United States Patent Application Publication US 2006/0150283 A1 - sequence listing, part 12

SEQ ID NO: 45919 - DNA, 1869 bp, Arabidopsis thaliana
  misc_feature (1)..(1869): Ceres Seq. ID no. 13591695
  misc_feature (1)..(1869): Ortholog of  Ceres SEQ ID NO 13597376 as cited in SEQ ID NO 64002
  misc_feature (1)..(1869): Ortholog of  Ceres SEQ ID NO 13503573 as cited in SEQ ID NO 65402
  misc_feature (1)..(1869): Ortholog of  Ceres SEQ ID NO 13659615 as cited in SEQ ID NO 67248
tctttcatcgtcctcaccggaacgcgcctactctctttccacatcgtacgtttcctctctctaaattcttcaactttaaaggtgataaaaattgaatctttcccacaacccacaagaaaattcgaatcctttctctctttctatctcttagtcacgctttcgatcagcaatctcctcgaattctggttggttccgtctctgttttctgtacacaaagccctgctgctgttgatacacgtgagccgccattaatgcccctttgttttcttcttccagctgatttaggaagttggtgatcaaattacatctagtgtttgtttccgccagctgaagtgaatcaaaatgtttagttttggccgagcaagaagccaagggaggcaaaacagatctatgtctcttggaggactggattatgcagaccccaagaagaaaaacaattacttgggaaagattcttttgacagcttctcttacagccttgtgcattttcatgctcaagcaatctccaacattcaatactcctagcgtgttttctcgacatgagccaggggttacacatgttttggtcactggtggtgctgggtatattggttcacatgcagctctaaggcttctaaaggaatcatatcgagtaaccattgtggacaatctatcacggggcaatctcgctgcagtcaggattttgcaagaactatttccggaacctggaaggcttcaatttatttatgctgatcttggagatgccaaagctgtcaacaagatattcacagagaatgcctttgacgctgtgatgcatttcgctgctgttgcatatgttggggaaagcacacaattccctcttaagtattatcacaatattacatcgaacactttggtagtattagagacaatggctgctcatggagtaaagactttgatatattcaagcacttgtgcaacgtatggggagcctgatattatgccaattacagaggaaactcctcaggtgccaatcaacccatatggtaaggccaagaagatggcagaagatatcattttggatttctcgaaaaactcagatatggcagttatgatcctaagatatttcaatgtgattgggtccgatccagagggcagattgggtgaagccccaagacctgagctgcgagagcatggacgcatctccggtgcttgttttgatgcagcacgtggcatcatgcctggcctacagatcaaaggaacagactacaaaaccgctgatggaacttgcgtacgggattacattgatgtcactgatttggttgatgctcatgttaaagctcttcaaaaggcaaaaccacgcaaagttggaatctacaatgttggcaccgggaaaggtagctcggtgaaagagtttgttgaggcgtgcaagaaagcaactggtgttgagatcaagatcgactatttgcctagacgtgcaggtgattacgctgaggtttacagtgatccaagcaagattaggaaggaacttaactggacagctaagcacactaatctcaaagagagtcttgagactgcatggagatggcagaagctgcaccgtaatggctatggcttaacaacctcatcggtctcggtttactgactttgttcattcctttggtgatggacggagattttgattccagatggtattgaggagagaagcgtaggagatgatgatggtttatatataaatataacacaagatatattatccatattatgaaaaaatgatatcacatgacgagatttttgattgatattcattttgtaatggctttaggttcttttaggaagcagccattcattagtatatgtacctctcacaatatttattgattagtcttaataatatatagcattcctggct

SEQ ID NO: 45920 - protein, 419 aa, Arabidopsis thaliana
  peptide (1)..(419): Ceres Seq. ID no. 13591696
MFSFGRARSQGRQNRSMSLGGLDYADPKKKNNYLGKILLTASLTALCIFMLKQSPTFNTPSVFSRHEPGVTHVLVTGGAGYIGSHAALRLLKESYRVTIVDNLSRGNLAAVRILQELFPEPGRLQFIYADLGDAKAVNKIFTENAFDAVMHFAAVAYVGESTQFPLKYYHNITSNTLVVLETMAAHGVKTLIYSSTCATYGEPDIMPITEETPQVPINPYGKAKKMAEDIILDFSKNSDMAVMILRYFNVIGSDPEGRLGEAPRPELREHGRISGACFDAARGIMPGLQIKGTDYKTADGTCVRDYIDVTDLVDAHVKALQKAKPRKVGIYNVGTGKGSSVKEFVEACKKATGVEIKIDYLPRRAGDYAEVYSDPSKIRKELNWTAKHTNLKESLETAWRWQKLHRNGYGLTTSSVSVY

SEQ ID NO: 45921 - protein, 403 aa, Arabidopsis thaliana
  peptide (1)..(403): Ceres Seq. ID no. 13591697
MSLGGLDYADPKKKNNYLGKILLTASLTALCIFMLKQSPTFNTPSVFSRHEPGVTHVLVTGGAGYIGSHAALRLLKESYRVTIVDNLSRGNLAAVRILQELFPEPGRLQFIYADLGDAKAVNKIFTENAFDAVMHFAAVAYVGESTQFPLKYYHNITSNTLVVLETMAAHGVKTLIYSSTCATYGEPDIMPITEETPQVPINPYGKAKKMAEDIILDFSKNSDMAVMILRYFNVIGSDPEGRLGEAPRPELREHGRISGACFDAARGIMPGLQIKGTDYKTADGTCVRDYIDVTDLVDAHVKALQKAKPRKVGIYNVGTGKGSSVKEFVEACKKATGVEIKIDYLPRRAGDYAEVYSDPSKIRKELNWTAKHTNLKESLETAWRWQKLHRNGYGLTTSSVSVY

SEQ ID NO: 45922 - protein, 370 aa, Arabidopsis thaliana
  peptide (1)..(370): Ceres Seq. ID no. 13591698
MLKQSPTFNTPSVFSRHEPGVTHVLVTGGAGYIGSHAALRLLKESYRVTIVDNLSRGNLAAVRILQELFPEPGRLQFIYADLGDAKAVNKIFTENAFDAVMHFAAVAYVGESTQFPLKYYHNITSNTLVVLETMAAHGVKTLIYSSTCATYGEPDIMPITEETPQVPINPYGKAKKMAEDIILDFSKNSDMAVMILRYFNVIGSDPEGRLGEAPRPELREHGRISGACFDAARGIMPGLQIKGTDYKTADGTCVRDYIDVTDLVDAHVKALQKAKPRKVGIYNVGTGKGSSVKEFVEACKKATGVEIKIDYLPRRAGDYAEVYSDPSKIRKELNWTAKHTNLKESLETAWRWQKLHRNGYGLTTSSVSVY

SEQ ID NO: 45923 - DNA, 1211 bp, Arabidopsis thaliana
  misc_feature (1)..(1211): Ceres Seq. ID no. 13646549
  misc_feature (1)..(1211): Ortholog of  Ceres SEQ ID NO 15175492 as cited in SEQ ID NO 56277
gatattatggaaaatttatcattttttggaacgtaatcctttgtaactaaatgcacctatagatacacatcaaacacttcatttgttttaagtaatttaatagactttttaaaggataaaatcgaaagagatctcaagagaaatagggagagatgagcatcagtgagtcatatccaccggctttccggcgtgtaaccaacgacgaaaatcctccagcaacaccggttattgtccagggcaaggatatcaatatcccggttatcgatttggaacgtttggacaaggagatactgagagaggcatgcaaggagtggggaatattccgtctagagaatcacggagtaccgttggcgttaacgtcacggcttcaagaaatctcggagtcattactgagtcttccgtttgagaaaaaacgggaattgttcgctgccgttaaatctccgttatcgtatttttggggaacaccagctctaaatcgttcaggagatgcactaaagagaggagctcaagcttcgaacttaaccatgctcgaaggtttcaacgttcctctctcgtctctctcgtcgctctcgaagcttccaacttctacttgttgtgatgatgatgctcaagaagagcctaaacttgagtctttcagagtgttgatggaggaatatggaaagcacataactagaattgctgtgtcattgttcgaagctatagcacaaacactgaacctagaactatccggtaaccggagatcagaatacttatcggaatcgacagggctaataagggtttaccggtatccacaaagctccgaggaagcagccagagaagctctaggaatggaagttcacacagacagttcggttatctcaatattaagagaagatgaaagtggtgggcttgagatcatgaaaggtgaagaatggttctgtgtaaagcctgttgctaatactcttatcgtcaatcttggagatatgatgcaggccataagcgatgatgagtacaagagtgtgacacatagagtgaagaagaggaataggaagacagagagacactcagtgtgttattttgtgtttccaaagagagattgcgtgataaagtcatcaaactataagctattcacttactcagattttgaagctcaagttcaagctgatgttcagtctcttggaaccaagattggccttcctagattcaacccaaattctccattgtttctctga

SEQ ID NO: 45924 - protein, 352 aa, Arabidopsis thaliana
  peptide (1)..(352): Ceres Seq. ID no. 13646550
MSISESYPPAFRRVTNDENPPATPVIVQGKDINIPVIDLERLDKEILREACKEWGIFRLENHGVPLALTSRLQEISESLLSLPFEKKRELFAAVKSPLSYFWGTPALNRSGDALKRGAQASNLTMLEGFNVPLSSLSSLSKLPTSTCCDDDAQEEPKLESFRVLMEEYGKHITRIAVSLFEAIAQTLNLELSGNRRSEYLSESTGLIRVYRYPQSSEEAAREALGMEVHTDSSVISILREDESGGLEIMKGEEWFCVKPVANTLIVNLGDMMQAISDDEYKSVTHRVKKRNRKTERHSVCYFVFPKRDCVIKSSNYKLFTYSDFEAQVQADVQSLGTKIGLPRFNPNSPLFL

SEQ ID NO: 45925 - protein, 228 aa, Arabidopsis thaliana
  peptide (1)..(228): Ceres Seq. ID no. 13646551
MLEGFNVPLSSLSSLSKLPTSTCCDDDAQEEPKLESFRVLMEEYGKHITRIAVSLFEAIAQTLNLELSGNRRSEYLSESTGLIRVYRYPQSSEEAAREALGMEVHTDSSVISILREDESGGLEIMKGEEWFCVKPVANTLIVNLGDMMQAISDDEYKSVTHRVKKRNRKTERHSVCYFVFPKRDCVIKSSNYKLFTYSDFEAQVQADVQSLGTKIGLPRFNPNSPLFL

SEQ ID NO: 45926 - protein, 188 aa, Arabidopsis thaliana
  peptide (1)..(188): Ceres Seq. ID no. 13646552
MEEYGKHITRIAVSLFEAIAQTLNLELSGNRRSEYLSESTGLIRVYRYPQSSEEAAREALGMEVHTDSSVISILREDESGGLEIMKGEEWFCVKPVANTLIVNLGDMMQAISDDEYKSVTHRVKKRNRKTERHSVCYFVFPKRDCVIKSSNYKLFTYSDFEAQVQADVQSLGTKIGLPRFNPNSPLFL

SEQ ID NO: 45927 - DNA, 1480 bp, Arabidopsis thaliana
  misc_feature (1)..(1480): Ceres Seq. ID no. 13591502
  misc_feature (1)..(1480): Ortholog of  Ceres SEQ ID NO 15176851 as cited in SEQ ID NO 61348
aatcttatttgcctccaagtcatcaattctttatcctatattactagtctctgcttcaccaatcctttttgctctcctgtctgctacaaaccttaacttggattctttctggtcaccatggcttcggttactttctctgtccccaagggtttcactgaattctcaggattgcgaagctcctctgcttctcttcccttcggcaagaaactttcttccgatgagttcgtttccatcgtctccttccagacttctgcaatgggaagcagtggtggatacaggaaaggtgtgactgaggccaagcttaaggtggccattaatggattcggtaggatcgggaggaacttcctgagatgttggcatggtcgcaaggactctcctcttgatatcattgccattaatgacactggtggcgtcaagcaggcttcgcatttacttaaatacgactctactctcggaatctttgatgctgatgtcaaaccttctggagagactgcaatctctgttgatggaaagatcatccaagttgtctctaaccgaaacccgtctcttctcccttggaaggagctaggaattgacattgtcatcgaaggaaccggagtgtttgtggatagagaaggtgcagggaaacacattgaagctggtgccaagaaggttatcattactgctccaggcaaaggagatattccaacttatgtcgttggtgtcaatgcagatgcttacagtcatgatgaacctatcatcagcaatgcatcttgcactaccaactgtcttgctccctttgtcaaagttcttgaccagaaattcggtatcataaagggtacaatgacgactactcactcttacaccggtgaccagaggttgctagacgcgagtcaccgtgatctaaggagagcaagagcagctgctttgaacattgttcctacttctacaggagcagctaaagctgtggctcttgtgctccctaacctcaaaggaaaactcaacgggatcgctctccgtgtaccaacaccaaacgtatcagtggttgatctcgttgtgcaggtctcaaagaagacatttgctgaggaagtcaacgctgctttcagagattctgcagagaaagagcttaaaggtatactcgatgtctgcgatgagccactagtgtccgttgatttcagatgctcagatttttcaacgaccattgattcatcactcactatggttatgggagatgatatggttaaggtgattgcttggtatgataatgaatggggttactcacagagagttgttgacttggctgacattgttgccaacaactggaagtgatttcatcaaactttgtttcatgtttttccatttttttctctttctcttttttacattatggttctcaaaatatcggtgaagactgtataattgtagtatggatttgtaataaataatcataaactattcaaacttgtttacattttgtgttttgtgatacacttttcagtat

SEQ ID NO: 45928 - protein, 396 aa, Arabidopsis thaliana
  peptide (1)..(396): Ceres Seq. ID no. 13591503
MASVTFSVPKGFTEFSGLRSSSASLPFGKKLSSDEFVSIVSFQTSAMGSSGGYRKGVTEAKLKVAINGFGRIGRNFLRCWHGRKDSPLDIIAINDTGGVKQASHLLKYDSTLGIFDADVKPSGETAISVDGKIIQVVSNRNPSLLPWKELGIDIVIEGTGVFVDREGAGKHIEAGAKKVIITAPGKGDIPTYVVGVNADAYSHDEPIISNASCTTNCLAPFVKVLDQKFGIIKGTMTTTHSYTGDQRLLDASHRDLRRARAAALNIVPTSTGAAKAVALVLPNLKGKLNGIALRVPTPNVSVVDLVVQVSKKTFAEEVNAAFRDSAEKELKGILDVCDEPLVSVDFRCSDFSTTIDSSLTMVMGDDMVKVIAWYDNEWGYSQRVVDLADIVANNWK

SEQ ID NO: 45929 - protein, 350 aa, Arabidopsis thaliana
  peptide (1)..(350): Ceres Seq. ID no. 13591504
MGSSGGYRKGVTEAKLKVAINGFGRIGRNFLRCWHGRKDSPLDIIAINDTGGVKQASHLLKYDSTLGIFDADVKPSGETAISVDGKIIQVVSNRNPSLLPWKELGIDIVIEGTGVFVDREGAGKHIEAGAKKVIITAPGKGDIPTYVVGVNADAYSHDEPIISNASCTTNCLAPFVKVLDQKFGIIKGTMTTTHSYTGDQRLLDASHRDLRRARAAALNIVPTSTGAAKAVALVLPNLKGKLNGIALRVPTPNVSVVDLVVQVSKKTFAEEVNAAFRDSAEKELKGILDVCDEPLVSVDFRCSDFSTTIDSSLTMVMGDDMVKVIAWYDNEWGYSQRVVDLADIVANNWK

SEQ ID NO: 45930 - DNA, 1522 bp, Arabidopsis thaliana
  misc_feature (1)..(1522): Ceres Seq. ID no. 14310004
  misc_feature (1)..(1522): Ortholog of  Ceres SEQ ID NO 15168580 as cited in SEQ ID NO 60279
ttggacgtgtaacgccgttaaaacgattctttcccattgtatccgcttttaacaactctcgtcgtcatctccaccgtccgttttctctcagctatattttaatggcgacaattcagaagcttgaagaagttgcaggcaaagatcaaactctaagagccgttgatctaaccatcatcaacggcgtcagaaacgtcgaaacttcaagacctttccaagtaaatcccacagtgagtctcgagcccaaggcggagccggtgatgccgtcgttttcaatgtctttagctccaccgtcttcgacaggaccaccattgaagagagcttcgactaaagaccgtcacacgaaggttgaaggaagagggagaaggatacggatgcctgccacgtgtgcggctaggatttttcaattaactcgagagttaggtcacaaatccgacggcgaaacgattcggtggttgttggagaacgctgagccggcgattatagccgccacgggtacgggaacggttcccgccatcgccatgtcggttaacggaaccttaaaaatcccgacgacgacgaacgctgattctgatatgggtgaaaatctgatgaagaagaaacgtaaacgaccttctaacagtgagtatatagacataagcgacgccgtttcagcttcctccggtttagctccaattgccacgacgacaacgatccaacctccgcaagctctggcatcatccactgtggctcagcaacttctgccgcaaggaatgtatccgatgtgggctattccatcaaacgcaatgattccgacggtcggagctttcttcttgattccacaaatcgctggtccgtcgaatcagcctcagttattagcttttcccgccgccgctgcttcgccgtcgtcttacgtcgccgctgttcaacaggcttccacgatggctagaccacctcctttacaagttgttccaagcagcggctttgtatccgtttcagacgttagcggttcgaatttatcaagagcgacgtcggttatggctccgagctcaagctcaggcgtaacaaccggtagttcatcgtcaattgcaacaacaacgacgcacacgctgagagacttctccctagagatatacgagaaacaagagcttcaccagttcatgagcaccacaacagcacggtcatcgaaccactgaagaaaagaaaggaaacggcggcgtattagtgatcggaaaaaaagcacgtgtgcacatgaagaagtgcacgtgttaagaagtgggcctcgattttaggcagaagtgggtcaacacgcaccaaaaagagagtggagggaggaggagaggggccacacggctcccaccttacgcatagcttccgaggcagccaggttgggtgtggtccccaaatggttagagctacgtggtccgtatgagtaggaccagcttaagcttaagcataattcgaaacgtttcgtttttttggtgggggctcaccactttgtcttgacttttttggtctttgtaattttacaaaataagatttattg

SEQ ID NO: 45931 - protein, 389 aa, Arabidopsis thaliana
  peptide (1)..(389): Ceres Seq. ID no. 14310005
GRVTPLKRFFPIVSAFNNSRRHLHRPFSLSYILMATIQKLEEVAGKDQTLRAVDLTIINGVRNVETSRPFQVNPTVSLEPKAEPVMPSFSMSLAPPSSTGPPLKRASTKDRHTKVEGRGRRIRMPATCAARIFQLTRELGHKSDGETIRWLLENAEPAIIAATGTGTVPAIAMSVNGTLKIPTTTNADSDMGENLMKKKRKRPSNSEYIDISDAVSASSGLAPIATTTTIQPPQALASSTVAQQLLPQGMYPMWAIPSNAMIPTVGAFFLIPQIAGPSNQPQLLAFPAAAASPSSYVAAVQQASTMARPPPLQVVPSSGFVSVSDVSGSNLSRATSVMAPSSSSGVTTGSSSSIATTTTHTLRDFSLEIYEKQELHQFMSTTTARSSNH

SEQ ID NO: 45932 - protein, 356 aa, Arabidopsis thaliana
  peptide (1)..(356): Ceres Seq. ID no. 14310006
MATIQKLEEVAGKDQTLRAVDLTIINGVRNVETSRPFQVNPTVSLEPKAEPVMPSFSMSLAPPSSTGPPLKRASTKDRHTKVEGRGRRIRMPATCAARIFQLTRELGHKSDGETIRWLLENAEPAIIAATGTGTVPAIAMSVNGTLKIPTTTNADSDMGENLMKKKRKRPSNSEYIDISDAVSASSGLAPIATTTTIQPPQALASSTVAQQLLPQGMYPMWAIPSNAMIPTVGAFFLIPQIAGPSNQPQLLAFPAAAASPSSYVAAVQQASTMARPPPLQVVPSSGFVSVSDVSGSNLSRATSVMAPSSSSGVTTGSSSSIATTTTHTLRDFSLEIYEKQELHQFMSTTTARSSNH

SEQ ID NO: 45933 - protein, 304 aa, Arabidopsis thaliana
  peptide (1)..(304): Ceres Seq. ID no. 14310007
MPSFSMSLAPPSSTGPPLKRASTKDRHTKVEGRGRRIRMPATCAARIFQLTRELGHKSDGETIRWLLENAEPAIIAATGTGTVPAIAMSVNGTLKIPTTTNADSDMGENLMKKKRKRPSNSEYIDISDAVSASSGLAPIATTTTIQPPQALASSTVAQQLLPQGMYPMWAIPSNAMIPTVGAFFLIPQIAGPSNQPQLLAFPAAAASPSSYVAAVQQASTMARPPPLQVVPSSGFVSVSDVSGSNLSRATSVMAPSSSSGVTTGSSSSIATTTTHTLRDFSLEIYEKQELHQFMSTTTARSSNH

SEQ ID NO: 45934 - DNA, 1121 bp, Arabidopsis thaliana
  misc_feature (1)..(1121): Ceres Seq. ID no. 15177866
  misc_feature (1)..(1121): Ortholog of  Ceres SEQ ID NO 13584593 as cited in SEQ ID NO 65340
attcatccgtctctgcaaacaaaggaagaagaatcaagatggctctggaaatctgtgtgaaagctgctgttggtgctcctgatcatctcggcgactgtaaccatcttctctttctctctctgtttttgttttgcattaagcttttgattttgcaattcttagtttctgagctttgatcgttggtaaaattactaatttaagtgtttgtttgtcgttttaggtccgttcagccaacgggctcttctcacactcgaggagaagagtcttacctacaaaatccatctgattaacctctctgacaaaccccagtggtcagtttctctcacgcctaaacccttaagatcggtctagtttgaacttgtttagccataatctctgaaattttacttgtaactggtacgagctttgtgttaaccggaaattggattggcttcatgtgcgagcattgtgttaaccggaacttgaaattggtggctttggttttatatatgatgcaggttcttggacattagtcctcaagggaaagtaccagtgctcaagatcgacgacaagtgggtgactgattccgacgtcatcgttggtatcctcgaggagaagtatcctgatccacctctcaagactcctgctgaatttgcctctgttggatccaacatttttggtacttttgggacattcttgaagagcaaagactccaatgacggatctgaacatgccttgcttgttgagctagaagccttggagaaccatctcaagagtcacgatggtccttttatcgccggggaaagagtttccgcggtggatctaagcttagcaccaaagctttaccaccttcaagttgctcttggccatttcaaaagctggtctgtccctgagagctttccccatgtccataactacatgaagactctgttctcgctcgactcttttgagaaaactaagaccgaggaaaagtatgtgatctctggatgggctcccaaggttaacccttgaaactatgcaccgttatgcgatcgttggtgtggtaatgttgttcaaggtctctctcttatatcagtcaaataatgtacttggaccttttttatgtaatgtactgtatcaatcaaataagaaagcctattttg

SEQ ID NO: 45935 - protein, 57 aa, Arabidopsis thaliana
  peptide (1)..(57): Ceres Seq. ID no. 15177867
SSVSANKGRRIKMALEICVKAAVGAPDHLGDCNHLLFLSLFLFCIKLLILQFLVSEL

SEQ ID NO: 45936 - protein, 45 aa, Arabidopsis thaliana
  peptide (1)..(45): Ceres Seq. ID no. 15177868
MALEICVKAAVGAPDHLGDCNHLLFLSLFLFCIKLLILQFLVSEL

SEQ ID NO: 45937 - protein, 42 aa, Arabidopsis thaliana
  peptide (1)..(42): Ceres Seq. ID no. 15177869
MHRYAIVGVVMLFKVSLLYQSNNVLGPFLCNVLYQSNKKAYF

SEQ ID NO: 45938 - DNA, 1907 bp, Arabidopsis thaliana
  misc_feature (1)..(1907): Ceres Seq. ID no. 12600580
  misc_feature (1)..(1907): Ortholog of  Ceres SEQ ID NO 14315204 as cited in SEQ ID NO 57630
  misc_feature (1)..(1907): Ortholog of  Ceres SEQ ID NO 12465371 as cited in SEQ ID NO 63848
ggattggttcggctggttcgtgctcgaaattgagattttgaaagaaaaaaagagctctgaatcattgaaatcagcttaattccaatctgaatctgcaaaaaagtcttacgtcacactcccatgtagtagccgtcacttctcgtcttcctcctagagattacccaactctctcgcttcttctttttcctcttagggtttcttcatcctttagggtttccacaaaaattcaaaacctacttggaaatatttgggcttgaagaaggaagaattagatggaaggaagaaggattacggcaagccctagaccttgtagtggaagaagaattgtggctaagaaaaggtctcgacccgatggattcgtcaacagtgttaaaaagcttcaacgaagagaaatctcttctcgtaaagatcgagctttctctattagcaccgcccaagagagatttcgtaacatgcgtctcgtggagcaatatgatactcacgatcctaaagggcactgtttagttgcattaccgtttttgatgaagagaactaaagttattgagattgttgctgcaagggacattgtttttgcgcttgcacattctggtgtttgcgcagcttttagtagagagtcgaacaaaagaatatgctttttaaatgttagtccagatgaagtcatcaggagcttgttctacaacaagaacaatgattctctcatcacagtttctgtttatgcttcagacaatttcagctctttgaaatgcagatccactagaattgagtatattctgagaggtcagccggatgcagggtttgctctttttgagtctgaatcattaaagtggcctggttttgttgagtttgatgatgtcaatggaaaggtgctgacttattctgcgcaggacagtgtatacaaggtgtttgatctgaaaaactacaccatgctatattcgatatcagataaaaatgtccaggaaattaaaatcagtccagggataatgttattgatcttcaagagagctgccagtcatgttcctctgaagattctgtcgatagaagatggcactgttctcaagtccttcaatcatttgcttcaccgaaacaagaaagttgacttcattgaacaattcaatgagaaacttcttgttaagcaagagaatgagaatcttcaaattcttgacgtcagaaatgctgagctaatggaagttagtagagctgagttcatgacaccgtctgcattcatatttctgtatgagaaccagttgtttctgacattcaggaaccggaacgtttctgtgtggaactttcgcggagagctcgttacttcctttgaggaccatcttctatggcatccagactgtaacactaataatatctacattacaagtgatcaagatctgatcatctcgtactgcaaagcagataccgaagatcagtggatagaaggaaatgcgggatcaatcaatatcagcaatatattgactgggaaatgcttagctaaaataacaccaagcagtgggcctccaaaagatgatgagagcagcagcagtaattgtatgggaaagaactcaaagcaaagaagaaacgctgtagctgaagctttggaagacataaccgctcttttctacgacgaagaacgcaatgagatatacacaggaaacagacacggccttgttcatgtgtggtccaattgatttcacatacatcgtcatcgttagctgctactactactactacgaatgtatcatttggtttccttcaattgtgtgtagcgataaatctttttaacttagtgtctttgagcagccatctgtgttgtaaaccatttgtgggcaagtgtgcgcgtcagaatgccagttgtgtacactaataccattgtacgtaacatttgggttttgacaattctatgaaagaccctttattcc

SEQ ID NO: 45939 - protein, 467 aa, Arabidopsis thaliana
  peptide (1)..(467): Ceres Seq. ID no. 12600581
MEGRRITASPRPCSGRRIVAKKRSRPDGFVNSVKKLQRREISSRKDRAFSISTAQERFRNMRLVEQYDTHDPKGHCLVALPFLMKRTKVIEIVAARDIVFALAHSGVCAAFSRESNKRICFLNVSPDEVIRSLFYNKNNDSLITVSVYASDNFSSLKCRSTRIEYILRGQPDAGFALFESESLKWPGFVEFDDVNGKVLTYSAQDSVYKVFDLKNYTMLYSISDKNVQEIKISPGIMLLIFKRAASHVPLKILSIEDGTVLKSFNHLLHRNKKVDFIEQFNEKLLVKQENENLQILDVRNAELMEVSRAEFMTPSAFIFLYENQLFLTFRNRNVSVWNFRGELVTSFEDHLLWHPDCNTNNIYITSDQDLIISYCKADTEDQWIEGNAGSINISNILTGKCLAKITPSSGPPKDDESSSSNCMGKNSKQRRNAVAEALEDITALFYDEERNEIYTGNRHGLVHVWSN

SEQ ID NO: 45940 - protein, 407 aa, Arabidopsis thaliana
  peptide (1)..(407): Ceres Seq. ID no. 12600582
MRLVEQYDTHDPKGHCLVALPFLMKRTKVIEIVAARDIVFALAHSGVCAAFSRESNKRICFLNVSPDEVIRSLFYNKNNDSLITVSVYASDNFSSLKCRSTRIEYILRGQPDAGFALFESESLKWPGFVEFDDVNGKVLTYSAQDSVYKVFDLKNYTMLYSISDKNVQEIKISPGIMLLIFKRAASHVPLKILSIEDGTVLKSFNHLLHRNKKVDFIEQFNEKLLVKQENENLQILDVRNAELMEVSRAEFMTPSAFIFLYENQLFLTFRNRNVSVWNFRGELVTSFEDHLLWHPDCNTNNIYITSDQDLIISYCKADTEDQWIEGNAGSINISNILTGKCLAKITPSSGPPKDDESSSSNCMGKNSKQRRNAVAEALEDITALFYDEERNEIYTGNRHGLVHVWSN

SEQ ID NO: 45941 - protein, 384 aa, Arabidopsis thaliana
  peptide (1)..(384): Ceres Seq. ID no. 12600583
MKRTKVIEIVAARDIVFALAHSGVCAAFSRESNKRICFLNVSPDEVIRSLFYNKNNDSLITVSVYASDNFSSLKCRSTRIEYILRGQPDAGFALFESESLKWPGFVEFDDVNGKVLTYSAQDSVYKVFDLKNYTMLYSISDKNVQEIKISPGIMLLIFKRAASHVPLKILSIEDGTVLKSFNHLLHRNKKVDFIEQFNEKLLVKQENENLQILDVRNAELMEVSRAEFMTPSAFIFLYENQLFLTFRNRNVSVWNFRGELVTSFEDHLLWHPDCNTNNIYITSDQDLIISYCKADTEDQWIEGNAGSINISNILTGKCLAKITPSSGPPKDDESSSSNCMGKNSKQRRNAVAEALEDITALFYDEERNEIYTGNRHGLVHVWSN

SEQ ID NO: 45942 - DNA, 1177 bp, Arabidopsis thaliana
  misc_feature (1)..(1177): Ceres Seq. ID no. 14310000
  misc_feature (1)..(1177): Ortholog of  Ceres SEQ ID NO 15179622 as cited in SEQ ID NO 61057
gctcactagtccccccccccccccccccccgctctgctccacttacctttaatcttcaatcaacggtactctcaggaacaggaatcagatcgagcaatgctcaggttaatcgttaattaccctctgattcccaagatatcccaccgggtttgtagtaacagtagtagtaagctcgggagttactatgattcttcgtcgatcataaaatatggcggaatcagcgatgttgttggtaagaagcaggagctttttctaagtgtttcggtgaaagcagtggaagacaaaggtaacaatggaggtggaagcatgagtttctcgggtcaaagctgggatcctagttccgagattgaagttccttcagaccaaagacccgtgaatgagtattcgtctctaaaggaaggaatgttgtattcatggggagaattgggtccaagcgaattctttattcgtctaggtggtctttggttggtcactttcactgttcttggagttcctgttgcagctgctagctttaatccttccagagagcctttgagatttattctagctgcagggactggaactttatttctcgtttctttgattgtcttgagaatttatctggggtggagctatgttggagatagactactttctgcagttataccttacgaagagagtggatggtatgatggacaaatgtgggtcaaaccacctgaggtgttggctcgcgacaggttgttgggttcttacaaggtgaagccagtgatcaagatgctcaaacaaacattaatcggaacaggagctttactcgtttcagcattcgtgctattcgttttcgcaacaccagtcgaggatttctttaaaaccactctaggatctacagaaaacaaccagaagtttccatttcaagaaccagcaacaagttcaatataagataagaacaattgcttcgactacccgtagatgttgtgactgacgatgatctggcagcagccgcggctgaggctgcggatggaagacctgtctattgcagagaccggtactaccgtgcattagcaggtggtcaatactgcaaatgtgaagatcttgttaaatagttgtcacactaatagaataccaacacacatactacagtatgtaatttttgcttaaaatggctttaaaagcctcatgaattatccactcattcatcact

SEQ ID NO: 45943 - protein, 272 aa, Arabidopsis thaliana
  peptide (1)..(272): Ceres Seq. ID no. 14310001
MLRLIVNYPLIPKISHRVCSNSSSKLGSYYDSSSIIKYGGISDVVGKKQELFLSVSVKAVEDKGNNGGGSMSFSGQSWDPSSEIEVPSDQRPVNEYSSLKEGMLYSWGELGPSEFFIRLGGLWLVTFTVLGVPVAAASFNPSREPLRFILAAGTGTLFLVSLIVLRIYLGWSYVGDRLLSAVIPYEESGWYDGQMWVKPPEVLARDRLLGSYKVKPVIKMLKQTLIGTGALLVSAFVLFVFATPVEDFFKTTLGSTENNQKFPFQEPATSSI

SEQ ID NO: 45944 - protein, 202 aa, Arabidopsis thaliana
  peptide (1)..(202): Ceres Seq. ID no. 14310002
MSFSGQSWDPSSEIEVPSDQRPVNEYSSLKEGMLYSWGELGPSEFFIRLGGLWLVTFTVLGVPVAAASFNPSREPLRFILAAGTGTLFLVSLIVLRIYLGWSYVGDRLLSAVIPYEESGWYDGQMWVKPPEVLARDRLLGSYKVKPVIKMLKQTLIGTGALLVSAFVLFVFATPVEDFFKTTLGSTENNQKFPFQEPATSSI

SEQ ID NO: 45945 - protein, 170 aa, Arabidopsis thaliana
  peptide (1)..(170): Ceres Seq. ID no. 14310003
MLYSWGELGPSEFFIRLGGLWLVTFTVLGVPVAAASFNPSREPLRFILAAGTGTLFLVSLIVLRIYLGWSYVGDRLLSAVIPYEESGWYDGQMWVKPPEVLARDRLLGSYKVKPVIKMLKQTLIGTGALLVSAFVLFVFATPVEDFFKTTLGSTENNQKFPFQEPATSSI

SEQ ID NO: 45946 - DNA, 1755 bp, Arabidopsis thaliana
  misc_feature (1)..(1755): Ceres Seq. ID no. 12601607
  misc_feature (1)..(1755): Ortholog of  Ceres SEQ ID NO 15170107 as cited in SEQ ID NO 67639
gtgactttgaagactcactcttgttcattcgtcttctccaccatggaaggtgtggctatgaaactcccgtcgttccctaacgccatctccatcggccaccggagcttctcccgcgttcgttgctcctcttcgctatccgtttgttccgccgccgccgcttcctccgccaccatctccactgattccgaatccgtctctctcggccatcgcgttcgaaaagatttccgaattctccaccaggaagtgaatgggtcaaagcttgtgtacttagacagtgctgcaacttctcagaagccagcagctgtattggacgctttgcagaattactatgagttctataattccaacgttcatcgaggaatacactatttaagtgctaaagctacagatgaatttgagttagctaggaaaaaagttgctcgtttcatcaatgcttctgatagtagagagattgtttttacaaggaatgccactgaagccatcaatcttgtagcttattcatggggtctttctaatcttaaaccaggagacgaggttatacttacagttgctgaacatcatagttgcattgttccttggcaaattgtatctcaaaaaactggagcagttctaaagtttgtgactttgaatgaggatgaagtccctgacataaacaagttgagagaattgatttctccaaagacaaagctcgtcgctgttcatcatgtttctaatgttcttgcatcttctcttcctattgaagagattgtggtatgggcacacgatgttggagcgaaagttctagtggatgcttgtcaaagtgttcctcacatggtggttgatgtccagaagcttaatgctgattttctagttgcgtcttctcacaagatgtgtggacctacaggcattgggttcttatatggtaagagtgatcttctacattccatgcctccattcttaggtggcggagaaatgatctcagatgtatttcttgaccattcaacttatgcggaacctccatccagatttgaagctggaacacctgcaataggagaagcaattgcccttggagcagcagttgattacttgtcaggaattggcatgccgaaaatccatgaatatgaggtagagattggtaagtatttgtacgagaaactgtcttccctgcctgatgtgcggatatacggtcccagaccttctgaaagtgttcacaggggtgctctttgttccttcaatgtggagggcttgcacccaactgatttggcaacctttcttgatcagcagcacggagttgcaataaggtcaggacaccactgcgcacagccactccaccggtatcttggagtgaatgcaagtgcacgcgccagcctctacttttacaacacaaaggatgacgttgacgccttcatcgttgcgctggcagacactgtgagcttcttcaactctttcaaataagtggaacaccttcctgctggatctctcggctggtttgtatggtatattgcttcagaggctacttatttaaatctgctttatatgatcaatgggagtggattttgtttcttcaagtccgaagggcaatttgtgttgtagttagcaatttgtatgaaaaaatagaccgacagtagtcatgaacaatttcaggcctctacttgatcatatttgtacgaatacacacgaaagcaaatgcttcgttgttaatttgtaagtttcataaaaaacaaactcaacatgaagaaaagttactaatatgaatcatcaaaggaaaggtttcga

SEQ ID NO: 45947 - protein, 477 aa, Arabidopsis thaliana
  peptide (1)..(477): Ceres Seq. ID no. 12601608
VTLKTHSCSFVFSTMEGVAMKLPSFPNAISIGHRSFSRVRCSSSLSVCSAAAASSATISTDSESVSLGHRVRKDFRILHQEVNGSKLVYLDSAATSQKPAAVLDALQNYYEFYNSNVHRGIHYLSAKATDEFELARKKVARFINASDSREIVFTRNATEAINLVAYSWGLSNLKPGDEVILTVAEHHSCIVPWQIVSQKTGAVLKFVTLNEDEVPDINKLRELISPKTKLVAVHHVSNVLASSLPIEEIVVWAHDVGAKVLVDACQSVPHMVVDVQKLNADFLVASSHKMCGPTGIGFLYGKSDLLHSMPPFLGGGEMISDVFLDHSTYAEPPSRFEAGTPAIGEAIALGAAVDYLSGIGMPKIHEYEVEIGKYLYEKLSSLPDVRIYGPRPSESVHRGALCSFNVEGLHPTDLATFLDQQHGVAIRSGHHCAQPLHRYLGVNASARASLYFYNTKDDVDAFIVALADTVSFFNSFK

SEQ ID NO: 45948 - protein, 463 aa, Arabidopsis thaliana
  peptide (1)..(463): Ceres Seq. ID no. 12601609
MEGVAMKLPSFPNAISIGHRSFSRVRCSSSLSVCSAAAASSATISTDSESVSLGHRVRKDFRILHQEVNGSKLVYLDSAATSQKPAAVLDALQNYYEFYNSNVHRGIHYLSAKATDEFELARKKVARFINASDSREIVFTRNATEAINLVAYSWGLSNLKPGDEVILTVAEHHSCIVPWQIVSQKTGAVLKFVTLNEDEVPDINKLRELISPKTKLVAVHHVSNVLASSLPIEEIVVWAHDVGAKVLVDACQSVPHMVVDVQKLNADFLVASSHKMCGPTGIGFLYGKSDLLHSMPPFLGGGEMISDVFLDHSTYAEPPSRFEAGTPAIGEAIALGAAVDYLSGIGMPKIHEYEVEIGKYLYEKLSSLPDVRIYGPRPSESVHRGALCSFNVEGLHPTDLATFLDQQHGVAIRSGHHCAQPLHRYLGVNASARASLYFYNTKDDVDAFIVALADTVSFFNSFK

SEQ ID NO: 45949 - protein, 458 aa, Arabidopsis thaliana
  peptide (1)..(458): Ceres Seq. ID no. 12601610
MKLPSFPNAISIGHRSFSRVRCSSSLSVCSAAAASSATISTDSESVSLGHRVRKDFRILHQEVNGSKLVYLDSAATSQKPAAVLDALQNYYEFYNSNVHRGIHYLSAKATDEFELARKKVARFINASDSREIVFTRNATEAINLVAYSWGLSNLKPGDEVILTVAEHHSCIVPWQIVSQKTGAVLKFVTLNEDEVPDINKLRELISPKTKLVAVHHVSNVLASSLPIEEIVVWAHDVGAKVLVDACQSVPHMVVDVQKLNADFLVASSHKMCGPTGIGFLYGKSDLLHSMPPFLGGGEMISDVFLDHSTYAEPPSRFEAGTPAIGEAIALGAAVDYLSGIGMPKIHEYEVEIGKYLYEKLSSLPDVRIYGPRPSESVHRGALCSFNVEGLHPTDLATFLDQQHGVAIRSGHHCAQPLHRYLGVNASARASLYFYNTKDDVDAFIVALADTVSFFNSFK

SEQ ID NO: 45950 - DNA, 2362 bp, Arabidopsis thaliana
  misc_feature (1)..(2362): Ceres Seq. ID no. 12560857
  misc_feature (1)..(2362): Ortholog of  Ceres SEQ ID NO 12583190 as cited in SEQ ID NO 56386
agaagaagaagaagagaaaattttgacagagataatacacagatagagagaagagacagagacagagagtgatggaaacagctgtatttattatgagacgaaacaagaacctctgggtttctacttaaactcttctctctttcctctctcactttaaaaatccacactttagagcacacaatacaaaaaataagggtttctttatcttttcgtttcttccaaattttgtaatggatttgatgcaaatggataagcgtttggattcaacggagcaagtggttgaagaaatcatgagaattcacagatctctacccgcaagaccaggaattgacgaagttgaagctgccaagggtttgattgacaacgttgagaaagaagatcaagcttgtttagaagccattgctagacagaggaaaagctctgaagttcctggtgagcttttcatggtgttgcaagaaatgaagaagggttatgttcagtttcgtagcaaagaacagataagagaagctttgaagcttctcgatctggaatctgttcactctttgttcgatgatttcattcaaagagcttctaattgcattgcttctccttcctctaacggctctgtttcgtctcgtcctccgctgcctccggcgactacgacggctgctcgttctgattctcagtcaagtttgaatttttctgagagagctcccgttcgccccaaggatatggtttcgcgagacgatagcttcgtcacaaagtctaagccttcttctctctacagtgatggttttgcagctcctcctcgaagaccacagattctcgattcaacacttaccaccggcaatgatggagagaagctgagtttgataaaacttgctagtttgattgaggtatcagctaagaaagctacacaagagataaatctacagaacaagttaacggaacaactcgagtggcttccagattctcttggcaagttatcgagtttaacttcgcttgatttgtctgagaatcacattgtggtgttgccaaacactataggaggactttcttccttgacaaaactcgatttgcattccaacagaatcggtcagcttcctgagtctataggagaattgttgaacttggtttacctcaatcttggtagcaaccagttatcatctctgccttcagcgtttagtagattggttcgactcgaggagcttgatttgagctgtaacaacctcccgattctccctgaatccataggttcgcttgtgagtctaaagaagctcgacgttgagacaaatgatatcgaagagatcccatattctattggtggatgttcttctctgatagaactccgtgcagattataacaaactaaaggctcttccagaagctattgggaagattactacattagagatcttgtctgtgcgttacaataacatcaggcagttacctacgacgatgtcttctttagctagcctcaaagagctggatgtgagtttcaacgagctcgagtcagtgccagagagtttgtgttttgccactacacttgtgaaactgaatattggaaacaatttcgctgacatggtatcgctcccgagatcaataggcaaccttgagatgcttgaagagcttgatataagcaataatcagatccgtgttctacctgactccttcaaaatgcttacaaagttgcgtgtgtttcgtgctcaggagaatccactacacattcctcctcgtgatatagctgaaaagggccctcaggccgttgttcaatacatgaatgatcttgtggagacgagaaacgcgaaatctctaatggttaagccaaagaagagctgggtccagatgtgcttcttctcgaaatccaacaagagaaaacagagcagcatggagattgtctaacacagctgataatgtctctgaccctaaatcaggtaattctgttaaagctgttgacagcacaagtgacaaacatatccagctatcttcttcacacgacaatgcattgatttgcattgcaactccaagtactgtagatgtttcactattcattctttgtttgtttctttcttcactattcacatgtatcaatgtgcacaacattgtttcattcatgtctctccacatatcatagagcccatcccaaaacagaatcgaaccatgtcccttgtagattgaggttttcattaagctcttaccatgtttgtctatcgtctctggttttgtttctttggtttgaaacttaagacactcacatctgtgtatatggatagagatgtgatgtaaatgtgatggctttgaagtttagaggagagatgtgacatgagttggctttgaacgtggttttgtctagagagtaacttggttaattaatactcccttgt

SEQ ID NO: 45951 - protein, 549 aa, Arabidopsis thaliana
  peptide (1)..(549): Ceres Seq. ID no. 12560858
MDLMQMDKRLDSTEQVVEEIMRIHRSLPARPGIDEVEAAKGLIDNVEKEDQACLEAIARQRKSSEVPGELFMVLQEMKKGYVQFRSKEQIREALKLLDLESVHSLFDDFIQRASNCIASPSSNGSVSSRPPLPPATTTAARSDSQSSLNFSERAPVRPKDMVSRDDSFVTKSKPSSLYSDGFAAPPRRPQILDSTLTTGNDGEKLSLIKLASLIEVSAKKATQEINLQNKLTEQLEWLPDSLGKLSSLTSLDLSENHIVVLPNTIGGLSSLTKLDLHSNRIGQLPESIGELLNLVYLNLGSNQLSSLPSAFSRLVRLEELDLSCNNLPILPESIGSLVSLKKLDVETNDIEEIPYSIGGCSSLIELRADYNKLKALPEAIGKITTLEILSVRYNNIRQLPTTMSSLASLKELDVSFNELESVPESLCFATTLVKLNIGNNFADMVSLPRSIGNLEMLEELDISNNQIRVLPDSFKMLTKLRVFRAQENPLHIPPRDIAEKGPQAVVQYMNDLVETRNAKSLMVKPKKSWVQMCFFSKSNKRKQSSMEIV

SEQ ID NO: 45952 - protein, 546 aa, Arabidopsis thaliana
  peptide (1)..(546): Ceres Seq. ID no. 12560859
MQMDKRLDSTEQVVEEIMRIHRSLPARPGIDEVEAAKGLIDNVEKEDQACLEAIARQRKSSEVPGELFMVLQEMKKGYVQFRSKEQIREALKLLDLESVHSLFDDFIQRASNCIASPSSNGSVSSRPPLPPATTTAARSDSQSSLNFSERAPVRPKDMVSRDDSFVTKSKPSSLYSDGFAAPPRRPQILDSTLTTGNDGEKLSLIKLASLIEVSAKKATQEINLQNKLTEQLEWLPDSLGKLSSLTSLDLSENHIVVLPNTIGGLSSLTKLDLHSNRIGQLPESIGELLNLVYLNLGSNQLSSLPSAFSRLVRLEELDLSCNNLPILPESIGSLVSLKKLDVETNDIEEIPYSIGGCSSLIELRADYNKLKALPEAIGKITTLEILSVRYNNIRQLPTTMSSLASLKELDVSFNELESVPESLCFATTLVKLNIGNNFADMVSLPRSIGNLEMLEELDISNNQIRVLPDSFKMLTKLRVFRAQENPLHIPPRDIAEKGPQAVVQYMNDLVETRNAKSLMVKPKKSWVQMCFFSKSNKRKQSSMEIV

SEQ ID NO: 45953 - protein, 544 aa, Arabidopsis thaliana
  peptide (1)..(544): Ceres Seq. ID no. 12560860
MDKRLDSTEQVVEEIMRIHRSLPARPGIDEVEAAKGLIDNVEKEDQACLEAIARQRKSSEVPGELFMVLQEMKKGYVQFRSKEQIREALKLLDLESVHSLFDDFIQRASNCIASPSSNGSVSSRPPLPPATTTAARSDSQSSLNFSERAPVRPKDMVSRDDSFVTKSKPSSLYSDGFAAPPRRPQILDSTLTTGNDGEKLSLIKLASLIEVSAKKATQEINLQNKLTEQLEWLPDSLGKLSSLTSLDLSENHIVVLPNTIGGLSSLTKLDLHSNRIGQLPESIGELLNLVYLNLGSNQLSSLPSAFSRLVRLEELDLSCNNLPILPESIGSLVSLKKLDVETNDIEEIPYSIGGCSSLIELRADYNKLKALPEAIGKITTLEILSVRYNNIRQLPTTMSSLASLKELDVSFNELESVPESLCFATTLVKLNIGNNFADMVSLPRSIGNLEMLEELDISNNQIRVLPDSFKMLTKLRVFRAQENPLHIPPRDIAEKGPQAVVQYMNDLVETRNAKSLMVKPKKSWVQMCFFSKSNKRKQSSMEIV

SEQ ID NO: 45954 - DNA, 3438 bp, Arabidopsis thaliana
  misc_feature (1)..(3438): Ceres Seq. ID no. 13576079
  misc_feature (1)..(3438): Ortholog of  Ceres SEQ ID NO 13658778 as cited in SEQ ID NO 66511
atggcatctaataagcattttgataaaagtcgatcaaatctatcaaacaactctgatattcaggagcctggaaggccacctgctggtcactctgtcaaatttgctcaaagaacttcctcgggtcgctatatcaattactcgagggacgatcttgatagcgagttgggcggtcaagatttcatgagctatacagttcacattcctcccactccagataaccagccaatggacccttccatttctcagaaagttgaggagcaatatgtcgctaactccatgttcactggcggtttcaagagcaacaccagggctcaccttatgcacaaagttattgagacagagcctaaccatccacaaatggctggctctaaaggatcgtcttgcgcgatccctggctgtgatgctaaggttatgagcgatgagagaggtcaagaccttcttccttgtgaatgtgactttaaaatttgtagggattgcttcatagatgctgtcaaaaccggaggtgggatttgccccgggtgtaaagaaccgtacaagaacacgcatttgaccgatcaggttgatgaaaacggtcagcaaaggcctatgctgcctgggggtggcgggtcaaagatggagagaagattgtcgatggtgaagtcaactaataaatcagctttgatgaggagtcagactggagattttgatcacaacaggtggttatttgagacgactggaacttatggttatgggaatgctttttggacaaaggacggggatttcgggagcggtaaggatggagatggagatggtgacggtatgggtatggaggcccaagatttgatgagcagaccgtggagaccgcttactcggaagctgaaaattcctgctggtgttattagtccatacaggcttttgatatttatccgtatagttgttcttgcattgttcttgacttggagggttaaacatcaaaacccagacgctgtatggttatggggaatgtctgtggtttgtgagctatggtttgccttgtcttggcttcttgatcagctccctaagctatgcccgattaatcgtgccaccgatcttcaagtcttgaaggaaaagtttgaaacaccgacagccagcaacccgaccggcaaatccgaccttcctggattcgatgtctttgtctctactgcggatccggagaaagaacctcctctggtcactgctaataccattttatctattcttgctgcggaatatcctgttgagaagctttcttgctatgtatctgatgatggaggggcgcttcttacgtttgaagcaatggctgaagctgctagctttgccaacatttgggttcctttttgtcgtaaacatgcgatcgagccgaggaatcctgattcctactttagcttaaagagagatccttacaagaacaaagtgaagtctgatttcgtgaaggatcgtagacgggttaagcgtgagtttgatgagtttaaagtcagggttaacagcttgcctgattctatcaggcgacgttctgatgcttatcatgccagagaagaaatcaaagccatgaagatgcagaggcagaacagggacgatgagcctatggagcccgtgaagattcctaaagctacatggatggctgatggtactcactggcctggaacttggttgacttctgccagtgatcatgccaagggagaccacgcgggtatcattcaggtgatgttgaagccacctagtgatgaaccactacacggagtatccgaagggtttcttgatctaaccgacgtggacattcgactcccgctccttgtgtatgtttctcgtgagaagcgacctggttatgatcataacaagaaggctggagccatgaacgccttagtcagagcttctgcgattatgtcaaatggaccgttcatactcaatcttgactgtgatcattacatatacaactctgaggctctgagagaaggcatgtgtttcatgatggatagaggcggggatcgtctttgctacgttcagtttccgcagcggtttgaaggtattgacccatctgatagatatgctaatcacaacactgtcttctttgacgtcaacatgagagctcttgatgggcttatgggtccggtttatgtcggaaccggttgtctcttccgaagaatcgcgctttatggattcaatccgcctcgaagcaaggacttttccccaagttgctggagttgttgtttccctcgtagcaagaagaagaatattcctgaagaaaaccgagctctgcgtatgagtgattatgatgacgaagagatgaatctctctctagtcccgaagaagttcggtaactcaacattcctcattgattcaattcccgttgctgagttccaaggccggcctctcgcggaccaccctgcggttaaaaacgggcgtccaccgggtgcactcaccattcctcgagaacttcttgatgcatcgactgtagcagaagccattgctgttatctcttgctggtacgaggataaaactgagtggggatcacgtatcggatggatttacggttcagtcactgaagatgttgtcacaggttatagaatgcataaccgaggctggaaatcggtttactgtgtgacgaaacgggatgctttccgtggcacagctcctattaacttgacggataggcttcaccaggttctccgttgggctactggctcggtggagatctttttctcccgtaacaacgctcttctcgcaagctcgaaaatgaaaatactccagagaattgcctacttaaacgtcggtatctacccgttcacatcgatcttcctcatcgtatactgtttcctaccagcgctctccctcttctctggtcagttcatcgtccagacgctcaacgtcactttcctagtctaccttctcatcatctccatcactctctgcttactggccctcctcgagatcaaatggtcaggaatctcactcgaggaatggtggagaaacgaacagttttggctcattggaggaacaagtgctcatctcgcagctgtgcttcaaggtttgctcaaagttgtagcaggagtcgaaatctccttcacgctcacgagtaaatccggaggagatgatatagacgacgagtttgcggatttgtacatggtgaaatggacttcacttatgatccctccgattaccatcattatggtgaatctgatagcgattgcggttggattcagcaggacgatttacagtgtggttcctcagtggagtaaactgattggaggagtgttcttcagtttttgggttttggcacatctttatccatttgctaaaggtctaatgggaagaagaggaagaacaccaacgattgtgtatgtttggtctggtcttgtggccattaccatttctcttctttgggtcgccattaatccaccggctggtaatactgagatcggaggaaacttcagttttccatga

SEQ ID NO: 45955 - protein, 1145 aa, Arabidopsis thaliana
  peptide (1)..(1145): Ceres Seq. ID no. 13576080
MASNKHFDKSRSNLSNNSDIQEPGRPPAGHSVKFAQRTSSGRYINYSRDDLDSELGGQDFMSYTVHIPPTPDNQPMDPSISQKVEEQYVANSMFTGGFKSNTRAHLMHKVIETEPNHPQMAGSKGSSCAIPGCDAKVMSDERGQDLLPCECDFKICRDCFIDAVKTGGGICPGCKEPYKNTHLTDQVDENGQQRPMLPGGGGSKMERRLSMVKSTNKSALMRSQTGDFDHNRWLFETTGTYGYGNAFWTKDGDFGSGKDGDGDGDGMGMEAQDLMSRPWRPLTRKLKIPAGVISPYRLLIFIRIVVLALFLTWRVKHQNPDAVWLWGMSVVCELWFALSWLLDQLPKLCPINRATDLQVLKEKFETPTASNPTGKSDLPGFDVFVSTADPEKEPPLVTANTILSILAAEYPVEKLSCYVSDDGGALLTFEAMAEAASFANIWVPFCRKHAIEPRNPDSYFSLKRDPYKNKVKSDFVKDRRRVKREFDEFKVRVNSLPDSIRRRSDAYHAREEIKAMKMQRQNRDDEPMEPVKIPKATWMADGTHWPGTWLTSASDHAKGDHAGIIQVMLKPPSDEPLHGVSEGFLDLTDVDIRLPLLVYVSREKRPGYDHNKKAGAMNALVRASAIMSNGPFILNLDCDHYIYNSEALREGMCFMMDRGGDRLCYVQFPQRFEGIDPSDRYANHNTVFFDVNMRALDGLMGPVYVGTGCLFRRIALYGFNPPRSKDFSPSCWSCCFPRSKKKNIPEENRALRMSDYDDEEMNLSLVPKKFGNSTFLIDSIPVAEFQGRPLADHPAVKNGRPPGALTIPRELLDASTVAEAIAVISCWYEDKTEWGSRIGWIYGSVTEDVVTGYRMHNRGWKSVYCVTKRDAFRGTAPINLTDRLHQVLRWATGSVEIFFSRNNALLASSKMKILQRIAYLNVGIYPFTSIFLIVYCFLPALSLFSGQFIVQTLNVTFLVYLLIISITLCLLALLEIKWSGISLEEWWRNEQFWLIGGTSAHLAAVLQGLLKVVAGVEISFTLTSKSGGDDIDDEFADLYMVKWTSLMIPPITIIMVNLIAIAVGFSRTIYSVVPQWSKLIGGVFFSFWVLAHLYPFAKGLMGRRGRTPTIVYVWSGLVAITISLLWVAINPPAGNTEIGGNFSFP

SEQ ID NO: 45956 - protein, 1085 aa, Arabidopsis thaliana
  peptide (1)..(1085): Ceres Seq. ID no. 13576081
MSYTVHIPPTPDNQPMDPSISQKVEEQYVANSMFTGGFKSNTRAHLMHKVIETEPNHPQMAGSKGSSCAIPGCDAKVMSDERGQDLLPCECDFKICRDCFIDAVKTGGGICPGCKEPYKNTHLTDQVDENGQQRPMLPGGGGSKMERRLSMVKSTNKSALMRSQTGDFDHNRWLFETTGTYGYGNAFWTKDGDFGSGKDGDGDGDGMGMEAQDLMSRPWRPLTRKLKIPAGVISPYRLLIFIRIVVLALFLTWRVKHQNPDAVWLWGMSVVCELWFALSWLLDQLPKLCPINRATDLQVLKEKFETPTASNPTGKSDLPGFDVFVSTADPEKEPPLVTANTILSILAAEYPVEKLSCYVSDDGGALLTFEAMAEAASFANIWVPFCRKHAIEPRNPDSYFSLKRDPYKNKVKSDFVKDRRRVKREFDEFKVRVNSLPDSIRRRSDAYHAREEIKAMKMQRQNRDDEPMEPVKIPKATWMADGTHWPGTWLTSASDHAKGDHAGIIQVMLKPPSDEPLHGVSEGFLDLTDVDIRLPLLVYVSREKRPGYDHNKKAGAMNALVRASAIMSNGPFILNLDCDHYIYNSEALREGMCFMMDRGGDRLCYVQFPQRFEGIDPSDRYANHNTVFFDVNMRALDGLMGPVYVGTGCLFRRIALYGFNPPRSKDFSPSCWSCCFPRSKKKNIPEENRALRMSDYDDEEMNLSLVPKKFGNSTFLIDSIPVAEFQGRPLADHPAVKNGRPPGALTIPRELLDASTVAEAIAVISCWYEDKTEWGSRIGWIYGSVTEDVVTGYRMHNRGWKSVYCVTKRDAFRGTAPINLTDRLHQVLRWATGSVEIFFSRNNALLASSKMKILQRIAYLNVGIYPFTSIFLIVYCFLPALSLFSGQFIVQTLNVTFLVYLLIISITLCLLALLEIKWSGISLEEWWRNEQFWLIGGTSAHLAAVLQGLLKVVAGVEISFTLTSKSGGDDIDDEFADLYMVKWTSLMIPPITIIMVNLIAIAVGFSRTIYSVVPQWSKLIGGVFFSFWVLAHLYPFAKGLMGRRGRTPTIVYVWSGLVAITISLLWVAINPPAGNTEIGGNFSFP

SEQ ID NO: 45957 - protein, 1070 aa, Arabidopsis thaliana
  peptide (1)..(1070): Ceres Seq. ID no. 13576082
MDPSISQKVEEQYVANSMFTGGFKSNTRAHLMHKVIETEPNHPQMAGSKGSSCAIPGCDAKVMSDERGQDLLPCECDFKICRDCFIDAVKTGGGICPGCKEPYKNTHLTDQVDENGQQRPMLPGGGGSKMERRLSMVKSTNKSALMRSQTGDFDHNRWLFETTGTYGYGNAFWTKDGDFGSGKDGDGDGDGMGMEAQDLMSRPWRPLTRKLKIPAGVISPYRLLIFIRIVVLALFLTWRVKHQNPDAVWLWGMSVVCELWFALSWLLDQLPKLCPINRATDLQVLKEKFETPTASNPTGKSDLPGFDVFVSTADPEKEPPLVTANTILSILAAEYPVEKLSCYVSDDGGALLTFEAMAEAASFANIWVPFCRKHAIEPRNPDSYFSLKRDPYKNKVKSDFVKDRRRVKREFDEFKVRVNSLPDSIRRRSDAYHAREEIKAMKMQRQNRDDEPMEPVKIPKATWMADGTHWPGTWLTSASDHAKGDHAGIIQVMLKPPSDEPLHGVSEGFLDLTDVDIRLPLLVYVSREKRPGYDHNKKAGAMNALVRASAIMSNGPFILNLDCDHYIYNSEALREGMCFMMDRGGDRLCYVQFPQRFEGIDPSDRYANHNTVFFDVNMRALDGLMGPVYVGTGCLFRRIALYGFNPPRSKDFSPSCWSCCFPRSKKKNIPEENRALRMSDYDDEEMNLSLVPKKFGNSTFLIDSIPVAEFQGRPLADHPAVKNGRPPGALTIPRELLDASTVAEAIAVISCWYEDKTEWGSRIGWIYGSVTEDVVTGYRMHNRGWKSVYCVTKRDAFRGTAPINLTDRLHQVLRWATGSVEIFFSRNNALLASSKMKILQRIAYLNVGIYPFTSIFLIVYCFLPALSLFSGQFIVQTLNVTFLVYLLIISITLCLLALLEIKWSGISLEEWWRNEQFWLIGGTSAHLAAVLQGLLKVVAGVEISFTLTSKSGGDDIDDEFADLYMVKWTSLMIPPITIIMVNLIAIAVGFSRTIYSVVPQWSKLIGGVFFSFWVLAHLYPFAKGLMGRRGRTPTIVYVWSGLVAITISLLWVAINPPAGNTEIGGNFSFP

SEQ ID NO: 45958 - DNA, 2131 bp, Arabidopsis thaliana
  misc_feature (1)..(2131): Ceres Seq. ID no. 12600445
  misc_feature (1)..(2131): Ortholog of  Ceres SEQ ID NO 13654290 as cited in SEQ ID NO 62197
  misc_feature (1)..(2131): Ortholog of  Ceres SEQ ID NO 14301924 as cited in SEQ ID NO 67731
gaggttctgaagaagaagactctctcccagcagatttagagcgtgtgagggagataggaagagagaaagtgagcgagagacgatcacggccgcgctgaaatccacgaccacggccgctctgaagaagaagactctctccgtctcctcccttctcctcctccgtctaagagacaaggcatccccagacgccatgatctctctcactccctcgttgtttctgaacaagacggttgttcctggatgttccacacgcctctctctgcgccagcctagaactataattactcctcctgcttccttgagagtcttttcctctctcggatctaaccaggatcccaccggcagcgttttgattgagaccactgccacttcatcctcctctctcgagacctccgccgccgacattgttcccaaatccaccgtatctggtggagttcaggatgtctacggcgaggatgccgccaccgaggacatgcctatcactccttggtctctctctgtcgccagtgggtatacgttgttgcgtgatccacatcacaacaaaggccttgcctttagccacagagagcgtgacgctcactatctacgcggcctcctcccccccactgttatctcacaagatcttcaggttaaaaaaattatgcacactcttcgtcagtatcaagttcccttgcagaagtatatggctatgatggatctccaggagaccaacgagaggctgttttacaaacttctcattgatcacgtcgaggagttgctacccgttatctacactccaacggttggggaagcctgccagaagtatggtagcattttcctgcgtccacaggggctttttatcagcttgaaagaaaaaggtaagattcatgaagtgctgaggaactggcctgagaagaacatccaggtcattgttgtcactgatggggagcgcattttagggttaggagatcttggatgtcagggaatgggaatacctgttgggaaactttctctctacacagcccttggaggtgtccggccatctgcctgtctgcccgtaacaatcgatgttgggacaaacaacgaaaagctattgaacgatgagttctacatagggctccgccaaaggagagctacaggagaggaatactccgaacttatgcatgaattcatgacagcagtcaagcagaactatggggagaaagtcgttattcagtttgaagactttgccaaccataatgcttttgatctgttagctaagtatggtacaacacatcttgttttcaatgacgatattcagggcacagcatcagttgtgcttgctggacttatcgctgctcttagatttgtggggggatccttgtcagaccacagattcctcttcctcggggctggagaggctggcactggaatagctgaactaattgctcttgagatttcaaagaagtcccatattccattggaagaggctcggaagaatatttggctcgtggattcaaagggattgattgtcagttcccggaaagaatccattcaacatttcaaaaagccctgggctcatgaccatgaaccaataagggaacttgttgatgccgtcaaggcaatcaagccgacagttctgatcggaacatcaggtgtaggtcaaacattcactcaagacgtggtggaaaccatggcaaagctaaatgagaaacccatcattctttctctttcgaacccaacttctcagtcagaatgtacggcagaagaggcctatacgtggagtcagggacgggcgatctttgcaagtggaagcccatttgcgccagtagagtatgagggaaagacgtttgtgcctggacaggcaaacaacgcatacatcttccctgggtttggactcgggctaataatgtcagggacgatccgtgtccatgatgacatgcttctggcagcatcagaagctttggctgaggaactgatggaggaacactatgagaaggggatgatataccctcccttcaggaatatcagaaaaatctcagctcgtattgcagctaaggtggctgccaaggcctacgaactgggactggccacgaggttgcctcagcccaaggagctggagcagtgtgctgagagcagcatgtacagcccttcgtatcgaagctaccgctga

SEQ ID NO: 45959 - protein, 646 aa, Arabidopsis thaliana
  peptide (1)..(646): Ceres Seq. ID no. 12600446
MISLTPSLFLNKTVVPGCSTRLSLRQPRTIITPPASLRVFSSLGSNQDPTGSVLIETTATSSSSLETSAADIVPKSTVSGGVQDVYGEDAATEDMPITPWSLSVASGYTLLRDPHHNKGLAFSHRERDAHYLRGLLPPTVISQDLQVKKIMHTLRQYQVPLQKYMAMMDLQETNERLFYKLLIDHVEELLPVIYTPTVGEACQKYGSIFLRPQGLFISLKEKGKIHEVLRNWPEKNIQVIVVTDGERILGLGDLGCQGMGIPVGKLSLYTALGGVRPSACLPVTIDVGTNNEKLLNDEFYIGLRQRRATGEEYSELMHEFMTAVKQNYGEKVVIQFEDFANHNAFDLLAKYGTTHLVFNDDIQGTASVVLAGLIAALRFVGGSLSDHRFLFLGAGEAGTGIAELIALEISKKSHIPLEEARKNIWLVDSKGLIVSSRKESIQHFKKPWAHDHEPIRELVDAVKAIKPTVLIGTSGVGQTFTQDVVETMAKLNEKPIILSLSNPTSQSECTAEEAYTWSQGRAIFASGSPFAPVEYEGKTFVPGQANNAYIFPGFGLGLIMSGTIRVHDDMLLAASEALAEELMEEHYEKGMIYPPFRNIRKISARIAAKVAAKAYELGLATRLPQPKELEQCAESSMYSPSYRSYR

SEQ ID NO: 45960 - protein, 552 aa, Arabidopsis thaliana
  peptide (1)..(552): Ceres Seq. ID no. 12600447
MPITPWSLSVASGYTLLRDPHHNKGLAFSHRERDAHYLRGLLPPTVISQDLQVKKIMHTLRQYQVPLQKYMAMMDLQETNERLFYKLLIDHVEELLPVIYTPTVGEACQKYGSIFLRPQGLFISLKEKGKIHEVLRNWPEKNIQVIVVTDGERILGLGDLGCQGMGIPVGKLSLYTALGGVRPSACLPVTIDVGTNNEKLLNDEFYIGLRQRRATGEEYSELMHEFMTAVKQNYGEKVVIQFEDFANHNAFDLLAKYGTTHLVFNDDIQGTASVVLAGLIAALRFVGGSLSDHRFLFLGAGEAGTGIAELIALEISKKSHIPLEEARKNIWLVDSKGLIVSSRKESIQHFKKPWAHDHEPIRELVDAVKAIKPTVLIGTSGVGQTFTQDVVETMAKLNEKPIILSLSNPTSQSECTAEEAYTWSQGRAIFASGSPFAPVEYEGKTFVPGQANNAYIFPGFGLGLIMSGTIRVHDDMLLAASEALAEELMEEHYEKGMIYPPFRNIRKISARIAAKVAAKAYELGLATRLPQPKELEQCAESSMYSPSYRSYR

SEQ ID NO: 45961 - protein, 496 aa, Arabidopsis thaliana
  peptide (1)..(496): Ceres Seq. ID no. 12600448
MHTLRQYQVPLQKYMAMMDLQETNERLFYKLLIDHVEELLPVIYTPTVGEACQKYGSIFLRPQGLFISLKEKGKIHEVLRNWPEKNIQVIVVTDGERILGLGDLGCQGMGIPVGKLSLYTALGGVRPSACLPVTIDVGTNNEKLLNDEFYIGLRQRRATGEEYSELMHEFMTAVKQNYGEKVVIQFEDFANHNAFDLLAKYGTTHLVFNDDIQGTASVVLAGLIAALRFVGGSLSDHRFLFLGAGEAGTGIAELIALEISKKSHIPLEEARKNIWLVDSKGLIVSSRKESIQHFKKPWAHDHEPIRELVDAVKAIKPTVLIGTSGVGQTFTQDVVETMAKLNEKPIILSLSNPTSQSECTAEEAYTWSQGRAIFASGSPFAPVEYEGKTFVPGQANNAYIFPGFGLGLIMSGTIRVHDDMLLAASEALAEELMEEHYEKGMIYPPFRNIRKISARIAAKVAAKAYELGLATRLPQPKELEQCAESSMYSPSYRSYR

SEQ ID NO: 45962 - DNA, 1002 bp, Arabidopsis thaliana
  misc_feature (1)..(1002): Ceres Seq. ID no. 13576161
  misc_feature (1)..(1002): Ortholog of  Ceres SEQ ID NO 13597498 as cited in SEQ ID NO 64648
atgccactattctcccaccgcttcaccaccgcatcttcttcttccccggcgtctccttcttactacaataaaccctcttcgaaaacccataaaccaaactcttcttcttcttcttatacttcgtctcgtattcatgtagctatcatattcttctcccttgtctctgttttcatcggagtcgccggaactatcttcgcactctcctccaccggtcctgcttctgtttatcgatgcggcggatctaaagacacttctcgggttgtgtctgcttcaagaaagctcggaggagatggtggtaataatggtgttgttgttgaaagacgaaagcttttagggtttgttgggatccagactggttttgattccggtgatcgtagaactgctttgagaagtacttggttcccttctgatcctgattctcttctaaggttggaacaagcgactggattagcttttagattcgtcattggaaagtcaaaggatgccaaaaagatggctgagcttgagaaggagataaaagagtacagagattttgtgcttcttgataccgaggaagaatatatacgacttccatataaaacgttggctttcttcaaagcagcttttaaactctttgaagctgattattatgtcaaagccgacgatgacatttatttgagaccagatcgacttgcgacgcttcttgccaatgaaagacttcattcacagacatacattggctgcatgaagaaaggaccagttataactgaccctaaactaaaatgtctgagaatgtttaataatgaagatgtaactatcggatcttggatgcttgcaatggatgtacatcacgaagacaaccgcgctttatgcgatccgcattgttccccaaagtccatagcagtttgggacattcccaaatgctcagggctttgtgacccggagagtcggttaaaagagcttcataagacggatatgtgctccaagagtccgacattacctcccgatgacatcgatcagtag

SEQ ID NO: 45963 - protein, 333 aa, Arabidopsis thaliana
  peptide (1)..(333): Ceres Seq. ID no. 13576162
MPLFSHRFTTASSSSPASPSYYNKPSSKTHKPNSSSSSYTSSRIHVAIIFFSLVSVFIGVAGTIFALSSTGPASVYRCGGSKDTSRVVSASRKLGGDGGNNGVVVERRKLLGFVGIQTGFDSGDRRTALRSTWFPSDPDSLLRLEQATGLAFRFVIGKSKDAKKMAELEKEIKEYRDFVLLDTEEEYIRLPYKTLAFFKAAFKLFEADYYVKADDDIYLRPDRLATLLANERLHSQTYIGCMKKGPVITDPKLKCLRMFNNEDVTIGSWMLAMDVHHEDNRALCDPHCSPKSIAVWDIPKCSGLCDPESRLKELHKTDMCSKSPTLPPDDIDQ

SEQ ID NO: 45964 - protein, 169 aa, Arabidopsis thaliana
  peptide (1)..(169): Ceres Seq. ID no. 13576163
MAELEKEIKEYRDFVLLDTEEEYIRLPYKTLAFFKAAFKLFEADYYVKADDDIYLRPDRLATLLANERLHSQTYIGCMKKGPVITDPKLKCLRMFNNEDVTIGSWMLAMDVHHEDNRALCDPHCSPKSIAVWDIPKCSGLCDPESRLKELHKTDMCSKSPTLPPDDIDQ

SEQ ID NO: 45965 - DNA, 2941 bp, Arabidopsis thaliana
  misc_feature (1)..(2941): Ceres Seq. ID no. 12600180
  misc_feature (1)..(2941): Ortholog of  Ceres SEQ ID NO 12465083 as cited in SEQ ID NO 68239
actttttggctgcgacacgattacagatttctcaccttcacccagatttcggtggaagcttccagaacgcgaacccctctcgcgatccaggttgctatcgaacacgtgggacgccccagtactgaagaacacaaagcctaacaatgagtgtagttggttttgattttggaaacgagaattgccttgttgctgttgcaaggcaaagaggtatcgacgtcgtgcttaatgatgagtcaaatcgcgagactccggctatcgtttgctttggtgacaagcagcgcttcatcggtactgctggagctgcttctaccatgatgaaccccaaaaactccatctcacaaatcaagcgcttaattggtcgccagttttccgaccctgagcttcaaagggatatcaaatcccttcccttttctgtcactgaaggccctgatggctatcctttgatccatgctaattatttgggagagattagagcctttaccccgactcaggtcatgggtatgatgttgtccaacttgaaaggtattgctgagaagaatttgaatacagctgtggtcgactgctgtattggtattcctgtttactttaccgacctccagcgtagggctgttctcgatgctgccacaattgcaggcttgcatcccttgcacttgatccatgagactacagctacggctttggcatacggaatttataagacagatctgccagagaatgaccagctcaatgttgcattcattgacattggacacgcaagcatgcaagtctgtattgcaggcttcaaaaaaggacagctcaaaatcttgtctcacgctttcgatcgctcccttgggggaagggattttgatgaagttcttttcaatcattttgctgctaagttcaaggacgagtacaagattgacgtctcccagaatgctaaggcttctctcaggctccgcgctacatgcgagaaactgaaaaaggttctaagcgctaatcctatggcaccattgaatatcgagtgtttgatggctgagaaagatgttaggggtgtcatcaagagggaagagtttgaagagatcagcatcccgattttggagcgtgttaagaggcctttagagaaagctctctctgatgcgggcctcactgttgaagatgtacatatggtcgaggttgtcggctctggctctcgtgtccctgctatgatcaagattctaactgagttttttggtaaggagcccaggcgtacaatgaatgcaagtgagtgtgtgtcgaggggatgtgccttgcagtgtgccattctcagtccgacctttaaagttcgcgaattccaggttcatgagagcttccctttctcaatatcgcttgcttggaaaggagcagcgactgatgctcaaaatggaggcactgagaaccagcagagcactattgtttttccgaaaggaaatcctattcctagtgtcaaggctctaacattttatcgttctggaacattctctattgatgtgcagtacagtgatgtgaacgatttgcaagcacctcctaaaatcagcacatacacgattggtcccttccagtcatcaaaaggcgagagggcaaagctgaaagtgaaagttagattgaacctgcatggaattgtctctgttgaatcagcaactcttttggaagaggaagaagttgaagtatcggtcacaaaagatcaatcagaggaaactgctaagatggacactgacaaagcttctgccgaggcagctcctgcttctggtgactctgatgttaacatgcaggacgccaaagataccagtgatgcaactggtactgacaatggtgttccagagtctgctgagaagccggtgcaaatggaaactgattcaaaggcagaggctccaaagaagaaggtgaagaaaacaaatgtaccactgtcagaattggtctatggtgccttgaaaactgtggaagttgaaaaggcagtggagaaggaatttgagatggctctgcaagacagagttatggaagagaccaaggaccggaagaatgctgttgagtcttatgtttatgatatgcgaaacaaactgagtgacaaataccagaatatatcactgactcggagagggaagcattcctggcgaatctgcaggaagttgaggattggttgtatgaagatggggaagatgagaccaaaggtgtttatgttgcaaagctcgaggagctcaagaaggtgggtgaccctgttgaagtgcgttacaaggagtcgttggaaagagggtcggtcattgatcagcttggctactgtattaacagctacagagaggcagctgtgtctaatgatcccaagtttgatcacattgaattggcagagaagcaaaaggttttgaacgagtgtgtggaagcagaagcatggctgcgggagaagcagcagcagcaggacacgcttcccaagtatgccacaccggctctcttgtcagctgacgtaaaaagcaaggcagaggcattggacaagttttgcaggcctataatgaccaaaccaaagccggcggctaaagcagaggcaccacaagccaagggaggtgagcaggcggatgagggcaagagtgagccagagcaaccagcttctgccgaagcaatggagactgagaatcccgcggaaggtagtacctaaatgaatgacgagagcgagatggtgttgttgtatcgattttgttttaatttacctagtggaaccactttttgtagtttcgctattatcccccaaacgattctatatttagttcttcctttcgacattttttaggaggtatattttttattgtctgttccttgtggtttcattttagtttgaaggtcttgttactttatttttgtttgtctctataatgattgttgtgtgtaacgtggattagctatacattgaacttgtttttaaaagcaaatgagattcaaatcagacattgggattttaatc

SEQ ID NO: 45966 - protein, 736 aa, Arabidopsis thaliana
  peptide (1)..(736): Ceres Seq. ID no. 12600181
MSVVGFDFGNENCLVAVARQRGIDVVLNDESNRETPAIVCFGDKQRFIGTAGAASTMMNPKNSISQIKRLIGRQFSDPELQRDIKSLPFSVTEGPDGYPLIHANYLGEIRAFTPTQVMGMMLSNLKGIAEKNLNTAVVDCCIGIPVYFTDLQRRAVLDAATIAGLHPLHLIHETTATALAYGIYKTDLPENDQLNVAFIDIGHASMQVCIAGFKKGQLKILSHAFDRSLGGRDFDEVLFNHFAAKFKDEYKIDVSQNAKASLRLRATCEKLKKVLSANPMAPLNIECLMAEKDVRGVIKREEFEEISIPILERVKRPLEKALSDAGLTVEDVHMVEVVGSGSRVPAMIKILTEFFGKEPRRTMNASECVSRGCALQCAILSPTFKVREFQVHESFPFSISLAWKGAATDAQNGGTENQQSTIVFPKGNPIPSVKALTFYRSGTFSIDVQYSDVNDLQAPPKISTYTIGPFQSSKGERAKLKVKVRLNLHGIVSVESATLLEEEEVEVSVTKDQSEETAKMDTDKASAEAAPASGDSDVNMQDAKDTSDATGTDNGVPESAEKPVQMETDSKAEAPKKKVKKTNVPLSELVYGALKTVEVEKAVEKEFEMALQDRVMEETKDRKNAVESYVYDMRNKLSDKYQNISLTRRGKHSWRICRKLRIGCMKMGKMRPKVFMLQSSRSSRRWVTLLKCVTRSRWKEGRSLISLATVLTATERQLCLMIPSLITLNWQRSKRF

SEQ ID NO: 45967 - protein, 680 aa, Arabidopsis thaliana
  peptide (1)..(680): Ceres Seq. ID no. 12600182
MMNPKNSISQIKRLIGRQFSDPELQRDIKSLPFSVTEGPDGYPLIHANYLGEIRAFTPTQVMGMMLSNLKGIAEKNLNTAVVDCCIGIPVYFTDLQRRAVLDAATIAGLHPLHLIHETTATALAYGIYKTDLPENDQLNVAFIDIGHASMQVCIAGFKKGQLKILSHAFDRSLGGRDFDEVLFNHFAAKFKDEYKIDVSQNAKASLRLRATCEKLKKVLSANPMAPLNIECLMAEKDVRGVIKREEFEEISIPILERVKRPLEKALSDAGLTVEDVHMVEVVGSGSRVPAMIKILTEFFGKEPRRTMNASECVSRGCALQCAILSPTFKVREFQVHESFPFSISLAWKGAATDAQNGGTENQQSTIVFPKGNPIPSVKALTFYRSGTFSIDVQYSDVNDLQAPPKISTYTIGPFQSSKGERAKLKVKVRLNLHGIVSVESATLLEEEEVEVSVTKDQSEETAKMDTDKASAEAAPASGDSDVNMQDAKDTSDATGTDNGVPESAEKPVQMETDSKAEAPKKKVKKTNVPLSELVYGALKTVEVEKAVEKEFEMALQDRVMEETKDRKNAVESYVYDMRNKLSDKYQNISLTRRGKHSWRICRKLRIGCMKMGKMRPKVFMLQSSRSSRRWVTLLKCVTRSRWKEGRSLISLATVLTATERQLCLMIPSLITLNWQRSKRF

SEQ ID NO: 45968 - protein, 679 aa, Arabidopsis thaliana
  peptide (1)..(679): Ceres Seq. ID no. 12600183
MNPKNSISQIKRLIGRQFSDPELQRDIKSLPFSVTEGPDGYPLIHANYLGEIRAFTPTQVMGMMLSNLKGIAEKNLNTAVVDCCIGIPVYFTDLQRRAVLDAATIAGLHPLHLIHETTATALAYGIYKTDLPENDQLNVAFIDIGHASMQVCIAGFKKGQLKILSHAFDRSLGGRDFDEVLFNHFAAKFKDEYKIDVSQNAKASLRLRATCEKLKKVLSANPMAPLNIECLMAEKDVRGVIKREEFEEISIPILERVKRPLEKALSDAGLTVEDVHMVEVVGSGSRVPAMIKILTEFFGKEPRRTMNASECVSRGCALQCAILSPTFKVREFQVHESFPFSISLAWKGAATDAQNGGTENQQSTIVFPKGNPIPSVKALTFYRSGTFSIDVQYSDVNDLQAPPKISTYTIGPFQSSKGERAKLKVKVRLNLHGIVSVESATLLEEEEVEVSVTKDQSEETAKMDTDKASAEAAPASGDSDVNMQDAKDTSDATGTDNGVPESAEKPVQMETDSKAEAPKKKVKKTNVPLSELVYGALKTVEVEKAVEKEFEMALQDRVMEETKDRKNAVESYVYDMRNKLSDKYQNISLTRRGKHSWRICRKLRIGCMKMGKMRPKVFMLQSSRSSRRWVTLLKCVTRSRWKEGRSLISLATVLTATERQLCLMIPSLITLNWQRSKRF

SEQ ID NO: 45969 - DNA, 1829 bp, Arabidopsis thaliana
  misc_feature (1)..(1829): Ceres Seq. ID no. 13576075
  misc_feature (1)..(1829): Ortholog of  Ceres SEQ ID NO 14313559 as cited in SEQ ID NO 62852
gaggttccagacacagacagaacaaacaacgaagaaaattcaaaatcttatttcaattcaacgtatactttccttaaattaggaatttggttttcgagaaaattgagatccgaataactatggtgagactcaagacgagtctctgggttcttctccttgccctcgtttcaattcagttaaatggttcgtttggatctgaatcaagtaaagtagcttatgtcacacttttgtatggagatgagttcttattaggagttagggtattgggtaaatcgattcgtgacactggatccactaaggatatggtcgctttggtttctgatggtgtctcagactactctaagaagttactcaaggctgatggatggaaagtagagaagattagtttactggcaaatccaaatcaagttcatccgactaggttctggggtgtttatacaaagcttaagatctttaacatgactgattataagaaagttgtgtatcttgatgctgatactattgtggtaaagaacattgaggatctgtttaagtgttctaagttttgcgcaaacttgaagcattctgagaggctaaactctggtgtgatggttgttgaaccatctgaagctctttttaatgacatgatgcggaaagtgaagactttgtcttcttatactggaggagatcaagggttcttgaattcgtattatccggatttcccgaatgctcgtgttttcgatcctagtgtaactcctgaagtcttgaaaaccagaccagttcctgctatggagaggctttcgacattatacaatgcggatgttggtctttatatgcttgctaataagtggatggttgatgacagtaaacttcacgtcattcactacactctaggccctcttaagccttgggactggtggacagcatggctcgtgaaacctgttgatgcttggcatagcattagggtaaagcttgaggaaactcttcctggaactggaggtggtagtaaccaacatgatgaactcgtcgtcaagttccttttcttgttacctctttgtgcacttttgttctgcatttaccgatccattcagggccgtgagggttcattgtgctggagctcgttcagcaatcagattagatatctttattacaaagttagatctaatggaacacttggttatggcggtgtatctaccatgagtcccagctatcaaccccacagtggcaacgcacagtccaaggttcctcaacacttaggcgcagtttcagttgtcgtctgttttactgctgttctgttatctcttggaatttcctttgcgattgtgcctaggcaaatcatgccatggactggcttggtcttggtgtatgaatggacttttacaatcttctttcttttgtttggtgtcttcttgctttttgtgcatcaacatggaaagagaatagcgatacaatcagaatcatcttccttggatgattccgcaaaagttcatcagcgagcaggtgggtcttgtgacgttactacattgtattatggattagggatggcttttctggctattgctgcagtttctttaccttacattttggggatcactgctttattcacgaggttgggtctaatggtgggtctagccataattctagctgccttcatgacttatgcttcagagcacctcgcggtgagatggttcttgaaaggtctagaagaccgtcgtgacacgacgagatcaaattccctatgtttcctctgttgacaacaaaatatgtaaaagtgtcaccaatcaccattgtaactttcagaaacaacagagcctataattctgtcttgaaatggttacacctttgttctt

SEQ ID NO: 45970 - protein, 537 aa, Arabidopsis thaliana
  peptide (1)..(537): Ceres Seq. ID no. 13576076
MVRLKTSLWVLLLALVSIQLNGSFGSESSKVAYVTLLYGDEFLLGVRVLGKSIRDTGSTKDMVALVSDGVSDYSKKLLKADGWKVEKISLLANPNQVHPTRFWGVYTKLKIFNMTDYKKVVYLDADTIVVKNIEDLFKCSKFCANLKHSERLNSGVMVVEPSEALFNDMMRKVKTLSSYTGGDQGFLNSYYPDFPNARVFDPSVTPEVLKTRPVPAMERLSTLYNADVGLYMLANKWMVDDSKLHVIHYTLGPLKPWDWWTAWLVKPVDAWHSIRVKLEETLPGTGGGSNQHDELVVKFLFLLPLCALLFCIYRSIQGREGSLCWSSFSNQIRYLYYKVRSNGTLGYGGVSTMSPSYQPHSGNAQSKVPQHLGAVSVVVCFTAVLLSLGISFAIVPRQIMPWTGLVLVYEWTFTIFFLLFGVFLLFVHQHGKRIAIQSESSSLDDSAKVHQRAGGSCDVTTLYYGLGMAFLAIAAVSLPYILGITALFTRLGLMVGLAIILAAFMTYASEHLAVRWFLKGLEDRRDTTRSNSLCFLC

SEQ ID NO: 45971 - protein, 476 aa, Arabidopsis thaliana
  peptide (1)..(476): Ceres Seq. ID no. 13576077
MVALVSDGVSDYSKKLLKADGWKVEKISLLANPNQVHPTRFWGVYTKLKIFNMTDYKKVVYLDADTIVVKNIEDLFKCSKFCANLKHSERLNSGVMVVEPSEALFNDMMRKVKTLSSYTGGDQGFLNSYYPDFPNARVFDPSVTPEVLKTRPVPAMERLSTLYNADVGLYMLANKWMVDDSKLHVIHYTLGPLKPWDWWTAWLVKPVDAWHSIRVKLEETLPGTGGGSNQHDELVVKFLFLLPLCALLFCIYRSIQGREGSLCWSSFSNQIRYLYYKVRSNGTLGYGGVSTMSPSYQPHSGNAQSKVPQHLGAVSVVVCFTAVLLSLGISFAIVPRQIMPWTGLVLVYEWTFTIFFLLFGVFLLFVHQHGKRIAIQSESSSLDDSAKVHQRAGGSCDVTTLYYGLGMAFLAIAAVSLPYILGITALFTRLGLMVGLAIILAAFMTYASEHLAVRWFLKGLEDRRDTTRSNSLCFLC

SEQ ID NO: 45972 - protein, 424 aa, Arabidopsis thaliana
  peptide (1)..(424): Ceres Seq. ID no. 13576078
MTDYKKVVYLDADTIVVKNIEDLFKCSKFCANLKHSERLNSGVMVVEPSEALFNDMMRKVKTLSSYTGGDQGFLNSYYPDFPNARVFDPSVTPEVLKTRPVPAMERLSTLYNADVGLYMLANKWMVDDSKLHVIHYTLGPLKPWDWWTAWLVKPVDAWHSIRVKLEETLPGTGGGSNQHDELVVKFLFLLPLCALLFCIYRSIQGREGSLCWSSFSNQIRYLYYKVRSNGTLGYGGVSTMSPSYQPHSGNAQSKVPQHLGAVSVVVCFTAVLLSLGISFAIVPRQIMPWTGLVLVYEWTFTIFFLLFGVFLLFVHQHGKRIAIQSESSSLDDSAKVHQRAGGSCDVTTLYYGLGMAFLAIAAVSLPYILGITALFTRLGLMVGLAIILAAFMTYASEHLAVRWFLKGLEDRRDTTRSNSLCFLC

SEQ ID NO: 45973 - DNA, 2322 bp, Arabidopsis thaliana
  misc_feature (1)..(2322): Ceres Seq. ID no. 12600192
  misc_feature (1)..(2322): Ortholog of  Ceres SEQ ID NO 13623192 as cited in SEQ ID NO 1286
  misc_feature (1)..(2322): Ortholog of  Ceres SEQ ID NO 13594171 as cited in SEQ ID NO 60359
  misc_feature (1)..(2322): Ortholog of  Ceres SEQ ID NO 14301866 as cited in SEQ ID NO 60955
  misc_feature (1)..(2322): Ortholog of  Ceres SEQ ID NO 13590645 as cited in SEQ ID NO 62109
agaaactcttatcaaagcttttgatttctctctcgagggtttcttactctgctgcttcttcttcttcttcagtagagcgagattctctcgcgctctctatcgctacatataaccatgggtttatcaacgaatctccatagcctcgacctccgttcaactttcttcaccggtctacgtacatctccaatcccttccaatttcatcaaaatctcttccatttccaaccctagacgcgatatctccaccatcagagcccaagtctccaccatcagcctcgagacctccgttaaacagcgtcaagacgaaatcgaatctcttttctcgaagcaaccctctcagcaagactccgatcggaaacgaaacgggaagagttccaaaaacggagcttctgggatatcttcaggtgtgaagctagagaacataaggaaaagctacaaaggcgtgactgtgcttaaagatgtgacatgggaagtgaagagaggtgagaaagtagggttagttggtgtgaacggagctgggaagacgactcagctcaggattatcactggtcaagaagagcctgattctggtaacgtaatcaaggccaaacccaatatgaaagtagctttcttgagccaggaatttgaggtttcgatgagtaagactgtgagggaagagttcatgactgctttcaaggaagagatggagattactgagaagcttgagaaagttcagaaggctattgagggatctgttgatgatttggatcttatgggaaggttattagatgaatttgatttgttgcagagacgagctcaggctgtgaatttagattccgttgatgctaagattagtaagttgatgccggaattagggtttgctcctgaggatgctgataggcttgtggcttcgtttagtggtggatggcaaatgagaatgtcacttggaaagattttgcttcaggatccagatttgctgctacttgatgagccgacaaatcatttggatcttgatactattgagtggcttgaaggttatttgcaaaagcaagatgtgcctatggttattatttcacatgacagagcctttcttgatcagttatgtactaaaattgtggaaactgagatgggtgtgtccaggacatttgagggtaattattctcagtatgtgatctcaaaggctgagtggatcgaaactcagaatgcagcgtgggaaaagcaacagaaagatatcgactcaactaaggacttgatcgccaggcttggtgctggtgccaattctggtcgtgcttccactgcagaaaagaaactagagaagcttcaagaacaggagctaatagagaagccatttcagcggaagcagatgaagattaggtttccagagcgtgggacaagtggaagatcggtagtcaatgttaaaaacattgattttggtttcgaggataagatgctatttaagaaggctaatctatcaatagaaagaggggagaaaatcgccatccttgggccaaacggttgtgggaaaagtacgttattgaagctaattatgggtttagagaagcctgtgaaaggtgaagttattcttggagagcacaatgtactgccaaactactttgaacagaatcaggctgaggtccttgatttggataaaacagtgcttgaaactgtttgtgaagctgcagaagactggagaagtgatgatataaaaggtcttcttggacgctgcaacttcaaagcagacatgcttgatcgaaaggtctctcttttaagtggtggggagaaagcgcgtcttgctttctgcaaattcatggtgacgccatctactttactcgttttggacgaaccaaccaatcacttagacattccttcaaaagaaatgctcgaggaagcgataaacgagtaccaaggtacagtcattgcggtatcccacgatcgatacttcatcaaacaaatcgttaacagagtgatagaagtagaagatggttgtttagaagattatgcaggcgactacaattattacttggagaagaatctggatgctagaacaaaggagctagagagagaagcagagctagaagagaaagcaccaaaagtgaaggcaaagtcaaagatgtcaaaagcagagaaagaagcgaggaagaagcagaagatgcaagcatttcaacaagctaaacagaagtcaaaggctagcaagaactccaagagatggaactgaacaaacattgaaaactgaaaggagtcaagatttataaaaaaggcttcttcacagtctcacaaaatcgtcattgtggaatgtatatagatattacttttagaaatgcagagagagtattaatgtttctac

SEQ ID NO: 45974 - protein, 692 aa, Arabidopsis thaliana
  peptide (1)..(692): Ceres Seq. ID no. 12600193
MGLSTNLHSLDLRSTFFTGLRTSPIPSNFIKISSISNPRRDISTIRAQVSTISLETSVKQRQDEIESLFSKQPSQQDSDRKRNGKSSKNGASGISSGVKLENIRKSYKGVTVLKDVTWEVKRGEKVGLVGVNGAGKTTQLRIITGQEEPDSGNVIKAKPNMKVAFLSQEFEVSMSKTVREEFMTAFKEEMEITEKLEKVQKAIEGSVDDLDLMGRLLDEFDLLQRRAQAVNLDSVDAKISKLMPELGFAPEDADRLVASFSGGWQMRMSLGKILLQDPDLLLLDEPTNHLDLDTIEWLEGYLQKQDVPMVIISHDRAFLDQLCTKIVETEMGVSRTFEGNYSQYVISKAEWIETQNAAWEKQQKDIDSTKDLIARLGAGANSGRASTAEKKLEKLQEQELIEKPFQRKQMKIRFPERGTSGRSVVNVKNIDFGFEDKMLFKKANLSIERGEKIAILGPNGCGKSTLLKLIMGLEKPVKGEVILGEHNVLPNYFEQNQAEVLDLDKTVLETVCEAAEDWRSDDIKGLLGRCNFKADMLDRKVSLLSGGEKARLAFCKFMVTPSTLLVLDEPTNHLDIPSKEMLEEAINEYQGTVIAVSHDRYFIKQIVNRVIEVEDGCLEDYAGDYNYYLEKNLDARTKELEREAELEEKAPKVKAKSKMSKAEKEARKKQKMQAFQQAKQKSKASKNSKRWN

SEQ ID NO: 45975 - protein, 532 aa, Arabidopsis thaliana
  peptide (1)..(532): Ceres Seq. ID no. 12600194
MKVAFLSQEFEVSMSKTVREEFMTAFKEEMEITEKLEKVQKAIEGSVDDLDLMGRLLDEFDLLQRRAQAVNLDSVDAKISKLMPELGFAPEDADRLVASFSGGWQMRMSLGKILLQDPDLLLLDEPTNHLDLDTIEWLEGYLQKQDVPMVIISHDRAFLDQLCTKIVETEMGVSRTFEGNYSQYVISKAEWIETQNAAWEKQQKDIDSTKDLIARLGAGANSGRASTAEKKLEKLQEQELIEKPFQRKQMKIRFPERGTSGRSVVNVKNIDFGFEDKMLFKKANLSIERGEKIAILGPNGCGKSTLLKLIMGLEKPVKGEVILGEHNVLPNYFEQNQAEVLDLDKTVLETVCEAAEDWRSDDIKGLLGRCNFKADMLDRKVSLLSGGEKARLAFCKFMVTPSTLLVLDEPTNHLDIPSKEMLEEAINEYQGTVIAVSHDRYFIKQIVNRVIEVEDGCLEDYAGDYNYYLEKNLDARTKELEREAELEEKAPKVKAKSKMSKAEKEARKKQKMQAFQQAKQKSKASKNSKRWN

SEQ ID NO: 45976 - protein, 519 aa, Arabidopsis thaliana
  peptide (1)..(519): Ceres Seq. ID no. 12600195
MSKTVREEFMTAFKEEMEITEKLEKVQKAIEGSVDDLDLMGRLLDEFDLLQRRAQAVNLDSVDAKISKLMPELGFAPEDADRLVASFSGGWQMRMSLGKILLQDPDLLLLDEPTNHLDLDTIEWLEGYLQKQDVPMVIISHDRAFLDQLCTKIVETEMGVSRTFEGNYSQYVISKAEWIETQNAAWEKQQKDIDSTKDLIARLGAGANSGRASTAEKKLEKLQEQELIEKPFQRKQMKIRFPERGTSGRSVVNVKNIDFGFEDKMLFKKANLSIERGEKIAILGPNGCGKSTLLKLIMGLEKPVKGEVILGEHNVLPNYFEQNQAEVLDLDKTVLETVCEAAEDWRSDDIKGLLGRCNFKADMLDRKVSLLSGGEKARLAFCKFMVTPSTLLVLDEPTNHLDIPSKEMLEEAINEYQGTVIAVSHDRYFIKQIVNRVIEVEDGCLEDYAGDYNYYLEKNLDARTKELEREAELEEKAPKVKAKSKMSKAEKEARKKQKMQAFQQAKQKSKASKNSKRWN

SEQ ID NO: 45977 - DNA, 2055 bp, Arabidopsis thaliana
  misc_feature (1)..(2055): Ceres Seq. ID no. 13576063
  misc_feature (1)..(2055): Ortholog of  Ceres SEQ ID NO 13600098 as cited in SEQ ID NO 0
gaaaatcagtgtgaattggagagagagagaagacaggaattgggaagtttcgtctttcgagcaaaactatcgaaatctaaatttagattgagaaacaagccaacaagctttttagtataaatcccataccacacaatcacaaatgcggagattcgtgattggccaagctaaaaatctcatagatcagagtcgtcgtcgtcaacttcatcatcacaaaaatctcagctttgtctctcttattcctcctttttctgctccttccgattcttcatcgcgccacttgtcttcttcttcttcttccgatatgtctgcttctgattcctcttcctctcttcccgttactcttgacaccatcaaccccaaggttatcaaatgtgagtatgctgtccgtggagaaattgtcaacattgctcagaaattgcaagaagatttgaagactaacaaggacgcttatccctttgatgagattatctactgtaatatcgggaatcctcaatctcttggtcaacagcctataacattcttcagagaggttcttgctttatgttcctacacagccctgttggatgagagtgcaacacacggtttgttcagttctgattcgattgagcgtgcttggaagattctggaccaaattcccgggagagcgactggtgcttacagccacagccagggtatcaaggggttacgtgatgcaattgctgatggaatcgaagcccgtgatggtttccctgctgatcctaatgatatattcatgacagatggtgcaagtccaggggttcatatgatgatgcaacttctcataacttcagagaaagatggaatcctttgtcctattcctcagtatccattgtactcagcttcaattgcccttcacggtggaactttggttccatactaccttgatgaagcatcaggatggggtcttgaaatatctgagctgaagaaacaacttgaagatgctaggtcaaagggcatcactgtgagagctttggctgtcattaaccctggaaacccgacagggcaggttctttcggaagaaaaccagcgtgacgttgttaagttctgcaagcaagagggtttagttcttttagcagacgaggtttatcaagagaatgtctatgtccctgacaaaaagttccattccttcaagaaagtagcccgctctatgggctacggtgagaaggatcttgccttagtctctttccaatctgtctccaaagggtactatggagagtgtgggaaaagaggtggttacatggaggttactggattcacttctgatgtaagagagcagatatacaaaatggcttctgtgaatctttgttccaacatctctggtcaaattcttgctagcctcatcatgagcccacccaagcctggtgacgactcctatgaatcatacatagcagagaaggatggaattctctcatctttggcaagacgtgcaaagactcttgaagaggctctgaacaagctagagggagttacatgcaatagagcagaaggagctatgtatctattcccttgccttcaccttccacaaaaggcaattgcagctgctgaggcggaaaagacagcaccagacaatttctactgcaaacgccttctaaaagctactggaatagtcgttgtccctggttctggctttagacaggtacctggaacatggcatttcaggtgcactatacttccccaagaggataagattccagcgattgttgatcgtctaactgcgttccaccagagcttcatggacgagttccgcgactaagcattctgttttcaagatccctctatagattatatgagtaataataagaaaaaggtcccatgccgtttctttttcatcgactttgtgtttacagaagctaagatgtgagagcattagttagtgctctctttcttattcactttttgttctgttctctttatagtgaaaaaccgtaatataaattgagagagtttcttataaacggttagtcaaaatgtaatctcatcaagaaaacacaagattgaaccattgttgaattccatgttcaaagtttcgatttc

SEQ ID NO: 45978 - protein, 543 aa, Arabidopsis thaliana
  peptide (1)..(543): Ceres Seq. ID no. 13576064
MRRFVIGQAKNLIDQSRRRQLHHHKNLSFVSLIPPFSAPSDSSSRHLSSSSSSDMSASDSSSSLPVTLDTINPKVIKCEYAVRGEIVNIAQKLQEDLKTNKDAYPFDEIIYCNIGNPQSLGQQPITFFREVLALCSYTALLDESATHGLFSSDSIERAWKILDQIPGRATGAYSHSQGIKGLRDAIADGIEARDGFPADPNDIFMTDGASPGVHMMMQLLITSEKDGILCPIPQYPLYSASIALHGGTLVPYYLDEASGWGLEISELKKQLEDARSKGITVRALAVINPGNPTGQVLSEENQRDVVKFCKQEGLVLLADEVYQENVYVPDKKFHSFKKVARSMGYGEKDLALVSFQSVSKGYYGECGKRGGYMEVTGFTSDVREQIYKMASVNLCSNISGQILASLIMSPPKPGDDSYESYIAEKDGILSSLARRAKTLEEALNKLEGVTCNRAEGAMYLFPCLHLPQKAIAAAEAEKTAPDNFYCKRLLKATGIVVVPGSGFRQVPGTWHFRCTILPQEDKIPAIVDRLTAFHQSFMDEFRD

SEQ ID NO: 45979 - protein, 489 aa, Arabidopsis thaliana
  peptide (1)..(489): Ceres Seq. ID no. 13576065
MSASDSSSSLPVTLDTINPKVIKCEYAVRGEIVNIAQKLQEDLKTNKDAYPFDEIIYCNIGNPQSLGQQPITFFREVLALCSYTALLDESATHGLFSSDSIERAWKILDQIPGRATGAYSHSQGIKGLRDAIADGIEARDGFPADPNDIFMTDGASPGVHMMMQLLITSEKDGILCPIPQYPLYSASIALHGGTLVPYYLDEASGWGLEISELKKQLEDARSKGITVRALAVINPGNPTGQVLSEENQRDVVKFCKQEGLVLLADEVYQENVYVPDKKFHSFKKVARSMGYGEKDLALVSFQSVSKGYYGECGKRGGYMEVTGFTSDVREQIYKMASVNLCSNISGQILASLIMSPPKPGDDSYESYIAEKDGILSSLARRAKTLEEALNKLEGVTCNRAEGAMYLFPCLHLPQKAIAAAEAEKTAPDNFYCKRLLKATGIVVVPGSGFRQVPGTWHFRCTILPQEDKIPAIVDRLTAFHQSFMDEFRD

SEQ ID NO: 45980 - protein, 339 aa, Arabidopsis thaliana
  peptide (1)..(339): Ceres Seq. ID no. 13576066
MTDGASPGVHMMMQLLITSEKDGILCPIPQYPLYSASIALHGGTLVPYYLDEASGWGLEISELKKQLEDARSKGITVRALAVINPGNPTGQVLSEENQRDVVKFCKQEGLVLLADEVYQENVYVPDKKFHSFKKVARSMGYGEKDLALVSFQSVSKGYYGECGKRGGYMEVTGFTSDVREQIYKMASVNLCSNISGQILASLIMSPPKPGDDSYESYIAEKDGILSSLARRAKTLEEALNKLEGVTCNRAEGAMYLFPCLHLPQKAIAAAEAEKTAPDNFYCKRLLKATGIVVVPGSGFRQVPGTWHFRCTILPQEDKIPAIVDRLTAFHQSFMDEFRD

SEQ ID NO: 45981 - DNA, 1385 bp, Arabidopsis thaliana
  misc_feature (1)..(1385): Ceres Seq. ID no. 14310101
  misc_feature (1)..(1385): Ortholog of  Ceres SEQ ID NO 13598548 as cited in SEQ ID NO 65227
gaccctaatttgagcagatctttccaattgaaagcgaaccgtgaattttgagtctctttaccggcggcgaaaaaatgcttggtggattatacggagatcttcctccaccgaccgatgatgagaaacccagtggaaactcctcttccgtctggtcaagcagtaccaaaatggctccacctacacttcgcaaaccaccagcttttgctcccccgcaaacaatcttaagacctctcaacaaacctaaacctatcgtttcggctccgtacaagcctcctcctccttcgaattcatcgcaatcggtgcttattccggcgaacgaatcagcaccttcgcatcagcctgcattggttggtgtgacttcatcggtgattgaagagtacgatccagcgagacctaacgattacgaggagtataagagggagaagaagaggaaagctacggaagctgagatgaaacgagagatggataagagaaggcaagaggatgaggaaagagataagagagaaagagaagagagggagaaggagagagagagagataacagtgatccgtctcggttgaatatctccggtgaggaagcgtggaagagacgcgctgctatgagtggtggtggaagtggtgggaagggaagatcttcgtctccgccggggaatgttgatgggtttagtattgggaaatcggagacgagtgggttaggagtaggagcaggtggacagatgacagctgctcagaggatgatggcgaagatgggatggaaacaaggacaagggcttgggaaatcagagcaagggattactacgccattgatggctaagaagactgatcgtagagctggtgtcattgtcaatgctagtgagaataaatcttcttcggcggagaagaaggttgttaagagtgttaatatcaatggtgaaccaaccagggttttgcttcttagaaacatggttgggccaggacaagtagatgatgagctagaagatgaggtaggaggcgagtgtggcaaatacggtacagtcactcgtgtactgatattcgagatcactgaaccgaacttccctgtacacgaagcagtaagaatctttgttcagttttcaagacccgaggaaacaactaaagcccttgtagacctcgatgggagatactttggaggaagaaccgtacgtgcaacgttctatgatgaagagaaattcagtaagaacgagttggctccagttccaggtgaaatccctggctattaataactcctaagacaaagaagaaacttcatcttctaggagattcttgttagaaagaaaccatagatgaggttttaaaaacatttgtaaagtacttagaaatcttgggattatctctttattgttgttcaaagtagcttcacaaggatc

SEQ ID NO: 45982 - protein, 387 aa, Arabidopsis thaliana
  peptide (1)..(387): Ceres Seq. ID no. 14310102
MLGGLYGDLPPPTDDEKPSGNSSSVWSSSTKMAPPTLRKPPAFAPPQTILRPLNKPKPIVSAPYKPPPPSNSSQSVLIPANESAPSHQPALVGVTSSVIEEYDPARPNDYEEYKREKKRKATEAEMKREMDKRRQEDEERDKREREEREKERERDNSDPSRLNISGEEAWKRRAAMSGGGSGGKGRSSSPPGNVDGFSIGKSETSGLGVGAGGQMTAAQRMMAKMGWKQGQGLGKSEQGITTPLMAKKTDRRAGVIVNASENKSSSAEKKVVKSVNINGEPTRVLLLRNMVGPGQVDDELEDEVGGECGKYGTVTRVLIFEITEPNFPVHEAVRIFVQFSRPEETTKALVDLDGRYFGGRTVRATFYDEEKFSKNELAPVPGEIPGY

SEQ ID NO: 45983 - protein, 356 aa, Arabidopsis thaliana
  peptide (1)..(356): Ceres Seq. ID no. 14310103
MAPPTLRKPPAFAPPQTILRPLNKPKPIVSAPYKPPPPSNSSQSVLIPANESAPSHQPALVGVTSSVIEEYDPARPNDYEEYKREKKRKATEAEMKREMDKRRQEDEERDKREREEREKERERDNSDPSRLNISGEEAWKRRAAMSGGGSGGKGRSSSPPGNVDGFSIGKSETSGLGVGAGGQMTAAQRMMAKMGWKQGQGLGKSEQGITTPLMAKKTDRRAGVIVNASENKSSSAEKKVVKSVNINGEPTRVLLLRNMVGPGQVDDELEDEVGGECGKYGTVTRVLIFEITEPNFPVHEAVRIFVQFSRPEETTKALVDLDGRYFGGRTVRATFYDEEKFSKNELAPVPGEIPGY

SEQ ID NO: 45984 - protein, 262 aa, Arabidopsis thaliana
  peptide (1)..(262): Ceres Seq. ID no. 14310104
MKREMDKRRQEDEERDKREREEREKERERDNSDPSRLNISGEEAWKRRAAMSGGGSGGKGRSSSPPGNVDGFSIGKSETSGLGVGAGGQMTAAQRMMAKMGWKQGQGLGKSEQGITTPLMAKKTDRRAGVIVNASENKSSSAEKKVVKSVNINGEPTRVLLLRNMVGPGQVDDELEDEVGGECGKYGTVTRVLIFEITEPNFPVHEAVRIFVQFSRPEETTKALVDLDGRYFGGRTVRATFYDEEKFSKNELAPVPGEIPGY

SEQ ID NO: 45985 - DNA, 1923 bp, Arabidopsis thaliana
  misc_feature (1)..(1923): Ceres Seq. ID no. 15168953
  misc_feature (1)..(1923): Ortholog of  Ceres SEQ ID NO 13595900 as cited in SEQ ID NO 69289
atttctttattattcccttcttcttctttctctttctcttttcttccgcaaatctccgcaaaatcttccctcaaactcagatccgattcttctaattctttgcccccctagagattcttcttctttctccaagtaaaagaaaacaactttctttctcttttcttgcgaaagtcctcaactttcaccactaaatcagcttccttcaatcactgtgtttgctttggacccagtttctgatttagcgactagggttttgattggaaccgtattaagtatatgagaatcgggttttactggtgaatcggattatcatcggaattcggaaaaagatggatcggaatcaaaagatggatcacgttatcggcgggaagtttaagttgggtaggaagcttggaagtggatcattcggtgaactttatttagggatcaatattcaaactggagaagaagtcgcagttaagctggaacctgtgaagacgaggcatcctcaactgcagtatgaatcgaaaatatatatgtttcttcaaggaggaacgggtgttccccatctgaaatggtttggagttgagggtgaatacagttgcatggttatcgatcttcttgggccaagcttggaggacttattcaattactgcaagcgaatattttcattaaaatctgttttaatgcttgcagatcaattgatatgtagagttgagtatatgcattcgcggggttttcttcaccgcgatattaaaccagacaactttttgatgggtcttgggcgcagagcaaaccaggtgtatatcattgattatggccttgctaaaaaatacaaggatcttcagacacaaaagcatataccatacagggaaaacaagaatcttacaggaactgctcggtatgcaagtgtgaacacacaccttgggattgagcaaagtagaagagatgatctggagtcacttggttatgtgttgatgtattttctacgaggaagtcttccgtggcaaggtttaaaagctggtacgaagaagcagaaatatgacaagattagtgaaaagaagatgcttacttctgtagagactctttgcaagtcgtatccatcagagttcacatcgtacttccattactgtcgttcattgagatttgaggacaaaccggattattcatatctgagaagactttttagggatcttttcattcgtgaaggttatcagcttgattatgtgtttgattggacaatctcgaagtatcctcagattggctctagttcgagaccaaggccaactccaagaccagcgttggaccctccaggaccacctgcagaaagagctgaaaagcctacagtcggacaggacctgcgaggaagatttacaggtgcaattgaggcattcaccagacgaaatgtttcaagccaaggcgctcttggtgatcgctctagacacagatcttctgatgatataccctcttctgccaaggaagtgcacgagtctcgaaatggaagtacctcaaagagaggtgtgatatcaagcaccagacctggctcatcagctgaaccaagcgagaaccactcaagccgactattttcaagtggttcacgtcatgccacaacccaacgggttccacagagctatgaatctgcagctgcagcaaggcctgggcatgaggatgccattagaaacttcgagctccttaccatcggctctggaaagaagaggaaatgaagatagggaaggagaagtttgatgagagtgaaaagacaacattcggtgctgatggctctctcctctgaaaataggaaagacatgtcctcgaattgttttttaaccttgggaacaagatgagaaagtgagagagagaaagagagttaatgtaatctgcctctcccaatctctcagtctctgtttttaaaagaatctgttaataaagctttaaagtgtaact

SEQ ID NO: 45986 - protein, 457 aa, Arabidopsis thaliana
  peptide (1)..(457): Ceres Seq. ID no. 15168954
MDRNQKMDHVIGGKFKLGRKLGSGSFGELYLGINIQTGEEVAVKLEPVKTRHPQLQYESKIYMFLQGGTGVPHLKWFGVEGEYSCMVIDLLGPSLEDLFNYCKRIFSLKSVLMLADQLICRVEYMHSRGFLHRDIKPDNFLMGLGRRANQVYIIDYGLAKKYKDLQTQKHIPYRENKNLTGTARYASVNTHLGIEQSRRDDLESLGYVLMYFLRGSLPWQGLKAGTKKQKYDKISEKKMLTSVETLCKSYPSEFTSYFHYCRSLRFEDKPDYSYLRRLFRDLFIREGYQLDYVFDWTISKYPQIGSSSRPRPTPRPALDPPGPPAERAEKPTVGQDLRGRFTGAIEAFTRRNVSSQGALGDRSRHRSSDDIPSSAKEVHESRNGSTSKRGVISSTRPGSSAEPSENHSSRLFSSGSRHATTQRVPQSYESAAAARPGHEDAIRNFELLTIGSGKKRK

SEQ ID NO: 45987 - protein, 451 aa, Arabidopsis thaliana
  peptide (1)..(451): Ceres Seq. ID no. 15168955
MDHVIGGKFKLGRKLGSGSFGELYLGINIQTGEEVAVKLEPVKTRHPQLQYESKIYMFLQGGTGVPHLKWFGVEGEYSCMVIDLLGPSLEDLFNYCKRIFSLKSVLMLADQLICRVEYMHSRGFLHRDIKPDNFLMGLGRRANQVYIIDYGLAKKYKDLQTQKHIPYRENKNLTGTARYASVNTHLGIEQSRRDDLESLGYVLMYFLRGSLPWQGLKAGTKKQKYDKISEKKMLTSVETLCKSYPSEFTSYFHYCRSLRFEDKPDYSYLRRLFRDLFIREGYQLDYVFDWTISKYPQIGSSSRPRPTPRPALDPPGPPAERAEKPTVGQDLRGRFTGAIEAFTRRNVSSQGALGDRSRHRSSDDIPSSAKEVHESRNGSTSKRGVISSTRPGSSAEPSENHSSRLFSSGSRHATTQRVPQSYESAAAARPGHEDAIRNFELLTIGSGKKRK

SEQ ID NO: 45988 - protein, 395 aa, Arabidopsis thaliana
  peptide (1)..(395): Ceres Seq. ID no. 15168956
MFLQGGTGVPHLKWFGVEGEYSCMVIDLLGPSLEDLFNYCKRIFSLKSVLMLADQLICRVEYMHSRGFLHRDIKPDNFLMGLGRRANQVYIIDYGLAKKYKDLQTQKHIPYRENKNLTGTARYASVNTHLGIEQSRRDDLESLGYVLMYFLRGSLPWQGLKAGTKKQKYDKISEKKMLTSVETLCKSYPSEFTSYFHYCRSLRFEDKPDYSYLRRLFRDLFIREGYQLDYVFDWTISKYPQIGSSSRPRPTPRPALDPPGPPAERAEKPTVGQDLRGRFTGAIEAFTRRNVSSQGALGDRSRHRSSDDIPSSAKEVHESRNGSTSKRGVISSTRPGSSAEPSENHSSRLFSSGSRHATTQRVPQSYESAAAARPGHEDAIRNFELLTIGSGKKRK

SEQ ID NO: 45989 - DNA, 1872 bp, Arabidopsis thaliana
  misc_feature (1)..(1872): Ceres Seq. ID no. 14315804
  misc_feature (1)..(1872): Ortholog of  Ceres SEQ ID NO 14307253 as cited in SEQ ID NO 54783
  misc_feature (1)..(1872): Ortholog of  Ceres SEQ ID NO 13654989 as cited in SEQ ID NO 63117
  misc_feature (1)..(1872): Ortholog of  Ceres SEQ ID NO 13584744 as cited in SEQ ID NO 69137
acttccgccatgagaaaaacctgcacacacgcctgaaaaaccaaatcatcctcatcatcttctgatctaatgtctaccgacactatcccttccctctcatctccaccggcgccggagtttccttccaccacaccagacacggcgacgtcaccagctccgtctcagccatccatcatcggaccttcttcgttggctccgttcccggagacaacaacaaacattgatggaggctcgagaaatgtagcattaactggacttattactggagtagttctcggagctacgtttgtcctactcggagtttgtatctttgtctgtttctataaaagaaagaagaggaagttaaagaagaagaagaaagaagatatcgaagcttctattaacagagactcactagatcccaaagataatagcaataatcttcagcaatggagttcatcagagattggacaaaacttgtttacatatgaagatttgtctaaagcaactagtaacttctccaacactaaccttcttggacaaggtgggtttggttatgttcatagaggagttcttgttgatggaactttggttgctattaagcagcttaaatctggaagtggacaaggtgaacgagagtttcaagctgagatacagactattagtagagttcatcataggcatcttgtttctcttcttggttattgtatcactggtgctcaaagattgcttgtttatgagtttgtgcctaataagactctcgaatttcatttgcacgagaaagagagaccggtaatggagtggtcaaagaggatgaagattgctttgggtgcagctaaaggattggcatacttacatgaagattgtaatcctaagacaatacaccgcgatgtcaaggctgcaaatattctaattgacgatagctatgaggcgaagttagcagattttggacttgccaggtcttctttagacactgatactcatgtctccactcggattatgggaaccttcggttacttggctcctgaatatgcttcttcagggaaacttactgagaaatcagatgtcttctcaattggagtggtgcttcttgaactgataaccggacgccgtcctgttgataaatcacagccttttgctgatgatgatagcatcgttgattgggttggttatcttgtttcccttaccaccacttttaataagcttttaaactttacctcatgctctaggcaaaacctctgatgatacaagcgttaaacgatggaaactttgacggtcttgttgacccgcggttagagaatgattttgatatcaacgaaatgacgagaatggttgcttgcgctgctgctagtgtccgtcattcagctaaacgtcgcccaaaaatgagccagatagttcgagcattcgaaggaaatatatctatagatgacctaacagaaggagctgccccaggacaaagtactatttacagcttagacgggagctcagattatagctcaacacaatacaaagaagacttgaagaaattcaagaaaatggcgttcgaaagcaaaacatttggtagcagcgaatgcagtggtttgactagcgacaatgctcagaacccatcaggctcgtctagtatcaccgaaggccaacgtacaacgcaggagatcgaaccggagaagaataccaaggacacatgaactttaaacagaggattcttggtaatagttaagtcttatcattttggggtaggaccggtaggtttaggtgtaaaacacattattcattagacgcgctttcacttttaattatttccatgtgtggctctaatcaaaactgtcatgagcctgatattgcacgtgaatattatttgttggagatttttttgagtttggtgtgaagatattg

SEQ ID NO: 45990 - protein, 383 aa, Arabidopsis thaliana
  peptide (1)..(383): Ceres Seq. ID no. 14315805
MSTDTIPSLSSPPAPEFPSTTPDTATSPAPSQPSIIGPSSLAPFPETTTNIDGGSRNVALTGLITGVVLGATFVLLGVCIFVCFYKRKKRKLKKKKKEDIEASINRDSLDPKDNSNNLQQWSSSEIGQNLFTYEDLSKATSNFSNTNLLGQGGFGYVHRGVLVDGTLVAIKQLKSGSGQGEREFQAEIQTISRVHHRHLVSLLGYCITGAQRLLVYEFVPNKTLEFHLHEKERPVMEWSKRMKIALGAAKGLAYLHEDCNPKTIHRDVKAANILIDDSYEAKLADFGLARSSLDTDTHVSTRIMGTFGYLAPEYASSGKLTEKSDVFSIGVVLLELITGRRPVDKSQPFADDDSIVDWVGYLVSLTTTFNKLLNFTSCSRQNL

SEQ ID NO: 45991 - DNA, 2138 bp, Arabidopsis thaliana
  misc_feature (1)..(2138): Ceres Seq. ID no. 12600200
  misc_feature (1)..(2138): Ortholog of  Ceres SEQ ID NO 15226209 as cited in SEQ ID NO 0
gagcttttttttcttcctcttcttaaaaccctaccgccgcgaccaccaacactgagagacttcgccgccgttaaaccaccagtgagaagcttaccgctgcgacttgaatgaagaggagacagaagaaactgatgataaacaatgagatggatttgtcagatgcagtgattgtaaaatctggtagattgaaatcagtagtgtggaatgatttcgatagagttagaaaaggtgagacatacattgcaatctgcaggcattgtaagaagcgacttagcggctcaagcgcgagcgggacttcgcatttgaggaaccatttgattagatgtaggaggagaactaatggtaacaacaacggtgttgctcagtatttcgttaaggggaagaagaaagagttagctaatgagcggataaaggatgaagaagtgcttagtgtagtgaatgttagatatgaacatgagaaagaagaacatgaagatgttaatgttgtgagtatgggtttggatcagaggcggtgtcgattcgatttagccaggatgattatcttacatggttatccgttgagtatggttgaagatgttggattcagaatgtttattggaaatttacagcctttgtttgagcttgttgcttttgaaagagttgaatctgattgtatggagatttatgcgaaagagaagcataagattttcgaagcgttggataagttacctgggaagattagtattagtgttgatgtgtggagtggttcgggtgattctgatgaattcttgtgtttggcagcgcattatattgatgaaggatgggaattgaaaaagagagttttgaacttctttatggttgatccatctcatagtggtgagatgcttgctgaagttataatgacgtgtttgatggagtgggatattgaccggaagttgttttctatggcgtcgagtcatgctcctccgtttagtgagaacgtagctagtaaaatcagagaccggttatcgcagaataagttcctttactgttacggccaattgtttgatgtgagctgtggagttaatgtcattaacgagatggttcaagattccctggaagcttgttgtgacacaataaacattattcgagagagtattagatatgttaaaagctcagaatctattcaagatagattcaaccagtggatagttgaaacgggagctgtaagtgaaaggaacctatgcatcgatgacccaatgagatgggactcaacatgcaccatgctggagaatgctttagagcaaaagagcgcgttttcgctcatgaatgaacatgatcctgattccgtgttatgtccatctgatttggaatgggagagattaggaacaattgttgagttcttgaaagtctttgttgaagtgataaatgcattcacaaagagcagttgtttacccgccaatatgtacttcccagaggtatgcgacatacacctccggttaattgagtggagcaagaacccggatgatttcattagctctctagttgtaaacatgagaaagaaatttgacgatttctgggataaaaactacctggttctagccatcgctaccatattagacccgcggttcaaaatgaagctggttgaatactattaccctctgttttatggtactagtgcttcagagctcattgaagatatttctgagtgcatcaaactgctgtacgatgagcattctgtaggatcgctattagcgtcgtcaaatcaagctcttgactggcagaatcatcatcatcggtcaaacggtgttgcccatgggaaagagcctgacgatagactcacagaattcgataggtacattaacgaaacaactactacaccgggtcaagactctaaatcagatctagaaaagtatctagaagagccactttttccccggaattcagatttcgacatcctgaactggtggaaagttcacacacctaagtacccaattctctccatgatggcacgtaacgtgttagcagttccaatgttgaatgtatcatcagaagaagacgcctttgaaacttgtcaaaggagacgggttagtgaaacatggcgttcgcttagaccgagtaccgtgcaagccttgatgtgtgcacaagattggatccaaagcgaactagaaagctcttga

SEQ ID NO: 45992 - protein, 676 aa, Arabidopsis thaliana
  peptide (1)..(676): Ceres Seq. ID no. 12600201
MKRRQKKLMINNEMDLSDAVIVKSGRLKSVVWNDFDRVRKGETYIAICRHCKKRLSGSSASGTSHLRNHLIRCRRRTNGNNNGVAQYFVKGKKKELANERIKDEEVLSVVNVRYEHEKEEHEDVNVVSMGLDQRRCRFDLARMIILHGYPLSMVEDVGFRMFIGNLQPLFELVAFERVESDCMEIYAKEKHKIFEALDKLPGKISISVDVWSGSGDSDEFLCLAAHYIDEGWELKKRVLNFFMVDPSHSGEMLAEVIMTCLMEWDIDRKLFSMASSHAPPFSENVASKIRDRLSQNKFLYCYGQLFDVSCGVNVINEMVQDSLEACCDTINIIRESIRYVKSSESIQDRFNQWIVETGAVSERNLCIDDPMRWDSTCTMLENALEQKSAFSLMNEHDPDSVLCPSDLEWERLGTIVEFLKVFVEVINAFTKSSCLPANMYFPEVCDIHLRLIEWSKNPDDFISSLVVNMRKKFDDFWDKNYLVLAIATILDPRFKMKLVEYYYPLFYGTSASELIEDISECIKLLYDEHSVGSLLASSNQALDWQNHHHRSNGVAHGKEPDDRLTEFDRYINETTTTPGQDSKSDLEKYLEEPLFPRNSDFDILNWWKVHTPKYPILSMMARNVLAVPMLNVSSEEDAFETCQRRRVSETWRSLRPSTVQALMCAQDWIQSELESS

SEQ ID NO: 45993 - protein, 668 aa, Arabidopsis thaliana
  peptide (1)..(668): Ceres Seq. ID no. 12600202
MINNEMDLSDAVIVKSGRLKSVVWNDFDRVRKGETYIAICRHCKKRLSGSSASGTSHLRNHLIRCRRRTNGNNNGVAQYFVKGKKKELANERIKDEEVLSVVNVRYEHEKEEHEDVNVVSMGLDQRRCRFDLARMIILHGYPLSMVEDVGFRMFIGNLQPLFELVAFERVESDCMEIYAKEKHKIFEALDKLPGKISISVDVWSGSGDSDEFLCLAAHYIDEGWELKKRVLNFFMVDPSHSGEMLAEVIMTCLMEWDIDRKLFSMASSHAPPFSENVASKIRDRLSQNKFLYCYGQLFDVSCGVNVINEMVQDSLEACCDTINIIRESIRYVKSSESIQDRFNQWIVETGAVSERNLCIDDPMRWDSTCTMLENALEQKSAFSLMNEHDPDSVLCPSDLEWERLGTIVEFLKVFVEVINAFTKSSCLPANMYFPEVCDIHLRLIEWSKNPDDFISSLVVNMRKKFDDFWDKNYLVLAIATILDPRFKMKLVEYYYPLFYGTSASELIEDISECIKLLYDEHSVGSLLASSNQALDWQNHHHRSNGVAHGKEPDDRLTEFDRYINETTTTPGQDSKSDLEKYLEEPLFPRNSDFDILNWWKVHTPKYPILSMMARNVLAVPMLNVSSEEDAFETCQRRRVSETWRSLRPSTVQALMCAQDWIQSELESS

SEQ ID NO: 45994 - protein, 663 aa, Arabidopsis thaliana
  peptide (1)..(663): Ceres Seq. ID no. 12600203
MDLSDAVIVKSGRLKSVVWNDFDRVRKGETYIAICRHCKKRLSGSSASGTSHLRNHLIRCRRRTNGNNNGVAQYFVKGKKKELANERIKDEEVLSVVNVRYEHEKEEHEDVNVVSMGLDQRRCRFDLARMIILHGYPLSMVEDVGFRMFIGNLQPLFELVAFERVESDCMEIYAKEKHKIFEALDKLPGKISISVDVWSGSGDSDEFLCLAAHYIDEGWELKKRVLNFFMVDPSHSGEMLAEVIMTCLMEWDIDRKLFSMASSHAPPFSENVASKIRDRLSQNKFLYCYGQLFDVSCGVNVINEMVQDSLEACCDTINIIRESIRYVKSSESIQDRFNQWIVETGAVSERNLCIDDPMRWDSTCTMLENALEQKSAFSLMNEHDPDSVLCPSDLEWERLGTIVEFLKVFVEVINAFTKSSCLPANMYFPEVCDIHLRLIEWSKNPDDFISSLVVNMRKKFDDFWDKNYLVLAIATILDPRFKMKLVEYYYPLFYGTSASELIEDISECIKLLYDEHSVGSLLASSNQALDWQNHHHRSNGVAHGKEPDDRLTEFDRYINETTTTPGQDSKSDLEKYLEEPLFPRNSDFDILNWWKVHTPKYPILSMMARNVLAVPMLNVSSEEDAFETCQRRRVSETWRSLRPSTVQALMCAQDWIQSELESS

SEQ ID NO: 45995 - DNA, 1029 bp, Arabidopsis thaliana
  misc_feature (1)..(1029): Ceres Seq. ID no. 14310076
  misc_feature (1)..(1029): Ortholog of  Ceres SEQ ID NO 14309484 as cited in SEQ ID NO 52876
aaagaggcgacgtaccacccacctaaccacaaccagatccccaaaagacagagaactttctcgatacgaacgccaaagagaagaagacgaagacgaagatgatgggtgtgttgaagtcggcgattggggatatgttgatgaccttctcttgggttgtcctctccgctacctttggaattcagacggcggcgattatctccgccggtgattttcaggcaatcacttgggctccgttggtgattttgacgtcgttgattttcgtctacgtctcgatcttcaccgttatcttcggtagcgctagcttcaatcctaccggaagcgctgccatttatgtcgccggtgtccccggagatactcttttctccttggcgattagattacctgctcaggcaattggtgctgcaggaggtgcattggcgatcatggagttcataccagagaaatacaagcatatgattggaggtccttctcttcaggttgatgtgcacactggagctattgctgaaacgatcttaagttttggtattacctttgcggttttgctaattatcctcaggggtccacggagattgcttgctaagacgttcttgcttgctcttgcaaccatctcatttgttgtcgccggatctaaatacactggaccagccatgaatcctgccattgcgtttggatgggcatacatgtacagctcccacaacacatgggaccatatctacgtctactggatcagttctttcgtaggagcattatctgctgcattgcttttccgttctatcttcccgccacctcggccccagaagaagaaacaaaagaaagcctgaggaaaataaaacaattgggagaacaccggtcagattcttcaccggtttgggctgtagaaagattcacaaagctgttccattctaaaataaggagaccaacaacaacaaaaagtcaaaagtctccttgtcattgtttagatccacacgcttattttacagatttgtgcgacgtaacttttctcttttatgttcataaatcattcagact

SEQ ID NO: 45996 - protein, 240 aa, Arabidopsis thaliana
  peptide (1)..(240): Ceres Seq. ID no. 14310077
MMGVLKSAIGDMLMTFSWVVLSATFGIQTAAIISAGDFQAITWAPLVILTSLIFVYVSIFTVIFGSASFNPTGSAAIYVAGVPGDTLFSLAIRLPAQAIGAAGGALAIMEFIPEKYKHMIGGPSLQVDVHTGAIAETILSFGITFAVLLIILRGPRRLLAKTFLLALATISFVVAGSKYTGPAMNPAIAFGWAYMYSSHNTWDHIYVYWISSFVGALSAALLFRSIFPPPRPQKKKQKKA

SEQ ID NO: 45997 - protein, 239 aa, Arabidopsis thaliana
  peptide (1)..(239): Ceres Seq. ID no. 14310078
MGVLKSAIGDMLMTFSWVVLSATFGIQTAAIISAGDFQAITWAPLVILTSLIFVYVSIFTVIFGSASFNPTGSAAIYVAGVPGDTLFSLAIRLPAQAIGAAGGALAIMEFIPEKYKHMIGGPSLQVDVHTGAIAETILSFGITFAVLLIILRGPRRLLAKTFLLALATISFVVAGSKYTGPAMNPAIAFGWAYMYSSHNTWDHIYVYWISSFVGALSAALLFRSIFPPPRPQKKKQKKA

SEQ ID NO: 45998 - protein, 229 aa, Arabidopsis thaliana
  peptide (1)..(229): Ceres Seq. ID no. 14310079
MLMTFSWVVLSATFGIQTAAIISAGDFQAITWAPLVILTSLIFVYVSIFTVIFGSASFNPTGSAAIYVAGVPGDTLFSLAIRLPAQAIGAAGGALAIMEFIPEKYKHMIGGPSLQVDVHTGAIAETILSFGITFAVLLIILRGPRRLLAKTFLLALATISFVVAGSKYTGPAMNPAIAFGWAYMYSSHNTWDHIYVYWISSFVGALSAALLFRSIFPPPRPQKKKQKKA

SEQ ID NO: 45999 - DNA, 1839 bp, Arabidopsis thaliana
  misc_feature (1)..(1839): Ceres Seq. ID no. 12581062
  misc_feature (1)..(1839): Ortholog of  Ceres SEQ ID NO 14302343 as cited in SEQ ID NO 67343
ataaaccataactctctctccctctctccctctctccctctctctctgctcgaatcgaaccgttcccaggagctgctttgatttggtttatcgttgatctgtgaaaatggggacgaatgatctcgacatcgaagaagggactctggagatcggcatggagtatagaactgtttctggtgttgctggaccattggtcattcttgacaaagtgaagggtccaaagtaccaggagattgttaatattcgcttaggagatggatcaacgagacgtggtcaggttttggaagttgatggcgagaaagcagttgtgcaggtttttgaaggaacatctggaattgacaacaagtttacaaccgtgcaattcacaggagaggttttgaaaacacctgtatcattggacatgcttgggcgcatatttaacggttcaggaaagccgattgataatggccctcctattctgccagaagcataccttgatatttcaggaagttcaatcaaccccagtgaaagaacctatcctgaagagatgatacagacaggcatatcgaccatcgatgtcatgaattccattgctcgtggacagaagattccacttttctctgctgctggtcttccacataatgaaatagctgctcagatttgtcgtcaggctggtctagtcaagcgtttggaaaagactgttgatctacttgaggatcatggagaggacaattttgcaattgtgtttgcagctatgggtgtgaacatggagacagctcagttcttcaagcgagattttgaagaaaatggatcaatggagagagttactcttttcctgaacctggccaatgacccaaccattgagagaatcatcactcctcgaattgccctcacaacagctgaatatctggcttatgaatgtgggaaacacgtccttgttatattgacggatatgagttcttatgctgatgctcttcgtgaggtttccgctgcccgagaagaggttcccggaagacgtggatatccaggttatatgtacactgatcttgcaactatttatgaacgtgctgggcgtatagaaggaagaaaaggttccatcacccaaattccaatcctcactatgcccaatgacgatatcactcatccaactccggatcttactggttacattactgaaggtcagatatatatcgataggcaacttcacaacagacagatatatccacccatcaacgtgcttccatccctttctcgtttaatgaagagtgctatcggcgagggcatgactcgtaaagaccattctgatgtgtcgaaccagctgtatgcaaattatgcaatcgggaaagatgttcaagcgatgaaagctgttgttggagaagaagcactttcttcagaggatttgctttatctagagtttttggataagtttgagaggaagtttgtgatgcaaggagcttatgatacacgcaacatcttccagtcgctggacttagcttggacattgctccgtatcttcccacgggagcttcttcatcgtatccctgcaaagacacttgaccaattctacagccgcgactcaaccagttaaaatgaggtaatggaggttatcttatcgaaactcttttgagagaaaagtgtgaatttttgtgatgtgtattatttggtgcttattataaagaggaaaaacaaagaaaagctatatattctgtgtctccctatctggtgatattttttttggttctgcattgtgttccaaagtggaaataaaaatcgataaacgatgtcgtattgtagtactttccttttctttgtatgaatttgttaagattggtttataaatgggattataataagtatctt

SEQ ID NO: 46000 - protein, 486 aa, Arabidopsis thaliana
  peptide (1)..(486): Ceres Seq. ID no. 12581063
MGTNDLDIEEGTLEIGMEYRTVSGVAGPLVILDKVKGPKYQEIVNIRLGDGSTRRGQVLEVDGEKAVVQVFEGTSGIDNKFTTVQFTGEVLKTPVSLDMLGRIFNGSGKPIDNGPPILPEAYLDISGSSINPSERTYPEEMIQTGISTIDVMNSIARGQKIPLFSAAGLPHNEIAAQICRQAGLVKRLEKTVDLLEDHGEDNFAIVFAAMGVNMETAQFFKRDFEENGSMERVTLFLNLANDPTIERIITPRIALTTAEYLAYECGKHVLVILTDMSSYADALREVSAAREEVPGRRGYPGYMYTDLATIYERAGRIEGRKGSITQIPILTMPNDDITHPTPDLTGYITEGQIYIDRQLHNRQIYPPINVLPSLSRLMKSAIGEGMTRKDHSDVSNQLYANYAIGKDVQAMKAVVGEEALSSEDLLYLEFLDKFERKFVMQGAYDTRNIFQSLDLAWTLLRIFPRELLHRIPAKTLDQFYSRDSTS

SEQ ID NO: 46001 - protein, 470 aa, Arabidopsis thaliana
  peptide (1)..(470): Ceres Seq. ID no. 12581064
MEYRTVSGVAGPLVILDKVKGPKYQEIVNIRLGDGSTRRGQVLEVDGEKAVVQVFEGTSGIDNKFTTVQFTGEVLKTPVSLDMLGRIFNGSGKPIDNGPPILPEAYLDISGSSINPSERTYPEEMIQTGISTIDVMNSIARGQKIPLFSAAGLPHNEIAAQICRQAGLVKRLEKTVDLLEDHGEDNFAIVFAAMGVNMETAQFFKRDFEENGSMERVTLFLNLANDPTIERIITPRIALTTAEYLAYECGKHVLVILTDMSSYADALREVSAAREEVPGRRGYPGYMYTDLATIYERAGRIEGRKGSITQIPILTMPNDDITHPTPDLTGYITEGQIYIDRQLHNRQIYPPINVLPSLSRLMKSAIGEGMTRKDHSDVSNQLYANYAIGKDVQAMKAVVGEEALSSEDLLYLEFLDKFERKFVMQGAYDTRNIFQSLDLAWTLLRIFPRELLHRIPAKTLDQFYSRDSTS

SEQ ID NO: 46002 - protein, 388 aa, Arabidopsis thaliana
  peptide (1)..(388): Ceres Seq. ID no. 12581065
MLGRIFNGSGKPIDNGPPILPEAYLDISGSSINPSERTYPEEMIQTGISTIDVMNSIARGQKIPLFSAAGLPHNEIAAQICRQAGLVKRLEKTVDLLEDHGEDNFAIVFAAMGVNMETAQFFKRDFEENGSMERVTLFLNLANDPTIERIITPRIALTTAEYLAYECGKHVLVILTDMSSYADALREVSAAREEVPGRRGYPGYMYTDLATIYERAGRIEGRKGSITQIPILTMPNDDITHPTPDLTGYITEGQIYIDRQLHNRQIYPPINVLPSLSRLMKSAIGEGMTRKDHSDVSNQLYANYAIGKDVQAMKAVVGEEALSSEDLLYLEFLDKFERKFVMQGAYDTRNIFQSLDLAWTLLRIFPRELLHRIPAKTLDQFYSRDSTS

SEQ ID NO: 46003 - DNA, 1289 bp, Arabidopsis thaliana
  misc_feature (1)..(1289): Ceres Seq. ID no. 13591715
  misc_feature (1)..(1289): Ortholog of  Ceres SEQ ID NO 14302919 as cited in SEQ ID NO 20338
  misc_feature (1)..(1289): Ortholog of  Ceres SEQ ID NO 13595497 as cited in SEQ ID NO 51127
  misc_feature (1)..(1289): Ortholog of  Ceres SEQ ID NO 14306765 as cited in SEQ ID NO 53275
  misc_feature (1)..(1289): Ortholog of  Ceres SEQ ID NO 14314046 as cited in SEQ ID NO 59316
ggtactgctgcacaagtgtagaggcagtggcacaacatctttaagaaagagagagagaaagagtcatttattcatttcctcgcttaaaaatcttgagcacccagacagaattcttctttcttctttctggggttgagaaaaatgagtgaaagagatgatggattggggctaagtttgagcttgagtttaggttttaatcaaaaggacccgtcctcgaggttaaatccaatgcctctggcttcttatgcatcttcatcacacatgcagcatatgcagcagagcaattataaccatcctcaaaagattcagaacacttggattaacatgtttcagtcatcagagagaaactcggacatgagatcgtttctccggggaatagacgtaaacagagctccatcgacggtggtggttgacgtggaggatgaaggcgccggagtttcgtctccgaacagcaccgtctcaagcgtgatgagcgggaagaagagcgagcgagagctaatggctgcggcaggtgcagttggaggaggtagagtagaagataatgagattgagagagcttcttgctcgctcggcggtggtagcgacgatgaagacggtagcgggaacggagatgacagttcgaggaagaaactccgattgtctaaagaacaagctttggttcttgaagaaacttttaaagaacatagtacactcaatccgaagcaaaagatggctttggctaagcagttgaatctgaggacgagacaagttgaagtgtggttccaaaaccgaaggcaaaggacgaagctgaagcaaacggaagtagactgtgaatatcttaagagatgttgcgagaatctaacggatgagaatcggagattgcaaaaggaagtgagtgagcttagggctttaaagctttctccacacttatacatgcacatgaaacctcccactactctcacaatgtgtccttcttgcgagcgagtcgctgttacgtcatctccgtcatcggtggctcctcctgtgatgaattcatcgtctccgatgggtccgatgagtccgtgggctgccatgcctctacggcaacgacctgctgctggttctcattagagtttaattagtctaaagataataggtttggtgatttgtttttattatattgttgaacggacttggaagttcttttcaagagttggtcccatgctcttctttcctttgttttattcagtttctatttatagctgaattcaggataatggaaaatctactaatattattgtccaattattagtttggggccctgacgtagc

SEQ ID NO: 46004 - protein, 315 aa, Arabidopsis thaliana
  peptide (1)..(315): Ceres Seq. ID no. 13591716
MSERDDGLGLSLSLSLGFNQKDPSSRLNPMPLASYASSSHMQHMQQSNYNHPQKIQNTWINMFQSSERNSDMRSFLRGIDVNRAPSTVVVDVEDEGAGVSSPNSTVSSVMSGKKSERELMAAAGAVGGGRVEDNEIERASCSLGGGSDDEDGSGNGDDSSRKKLRLSKEQALVLEETFKEHSTLNPKQKMALAKQLNLRTRQVEVWFQNRRQRTKLKQTEVDCEYLKRCCENLTDENRRLQKEVSELRALKLSPHLYMHMKPPTTLTMCPSCERVAVTSSPSSVAPPVMNSSSPMGPMSPWAAMPLRQRPAAGSH

SEQ ID NO: 46005 - protein, 286 aa, Arabidopsis thaliana
  peptide (1)..(286): Ceres Seq. ID no. 13591717
MPLASYASSSHMQHMQQSNYNHPQKIQNTWINMFQSSERNSDMRSFLRGIDVNRAPSTVVVDVEDEGAGVSSPNSTVSSVMSGKKSERELMAAAGAVGGGRVEDNEIERASCSLGGGSDDEDGSGNGDDSSRKKLRLSKEQALVLEETFKEHSTLNPKQKMALAKQLNLRTRQVEVWFQNRRQRTKLKQTEVDCEYLKRCCENLTDENRRLQKEVSELRALKLSPHLYMHMKPPTTLTMCPSCERVAVTSSPSSVAPPVMNSSSPMGPMSPWAAMPLRQRPAAGSH

SEQ ID NO: 46006 - protein, 275 aa, Arabidopsis thaliana
  peptide (1)..(275): Ceres Seq. ID no. 13591718
MQHMQQSNYNHPQKIQNTWINMFQSSERNSDMRSFLRGIDVNRAPSTVVVDVEDEGAGVSSPNSTVSSVMSGKKSERELMAAAGAVGGGRVEDNEIERASCSLGGGSDDEDGSGNGDDSSRKKLRLSKEQALVLEETFKEHSTLNPKQKMALAKQLNLRTRQVEVWFQNRRQRTKLKQTEVDCEYLKRCCENLTDENRRLQKEVSELRALKLSPHLYMHMKPPTTLTMCPSCERVAVTSSPSSVAPPVMNSSSPMGPMSPWAAMPLRQRPAAGSH

SEQ ID NO: 46007 - DNA, 1275 bp, Arabidopsis thaliana
  misc_feature (1)..(1275): Ceres Seq. ID no. 12560769
  misc_feature (1)..(1275): Ortholog of  Ceres SEQ ID NO 15179578 as cited in SEQ ID NO 0
atgtcctttgaatttcaaaagaaaaaaaggggaagctggtggagcttgtactggtgttttggatccaagaagaacaataaaaggataggccacgcggtgcttgtacccgaaccagctgcatcaggagctgcggtggctccagtccaaaactcttcgagcaattctacttcaatattcatgccctttatagctcctccttcatctcctgcttcctttctgccatcaggtcctccctctgcgtcacatactcctgatcctggtctactttgttccctaaccgtcaatgaaccgccttcagcctttactattggaccatacgctcatgagactcaacctgttactcctccagtgttctctgctttcacaacggaaccctccaccgcgccattcacgccacctcctgaatcaccttcttcccctgaagtgccttttgctcagttacttacatcttcattggaaagggctaggaggaacagtggtggtggaatgaatcagaagttttcagctgcacactacgagtttaagtcttgtcaagtgtatcctggaagtccaggtggtaatctaatctctcctggttcaggtacatcttctccttacccagggaaatgctccatcatcgagtttcgtatcggcgaacctccaaagtttcttggttttgagcacttcacagcgcgtaaatggggatcaagattcggttctggatccatcacacctgctggacaaggttcaaggttgggttcaggtgctttgactcctgatggctcaaagctaacttctggtgtagtgacaccaaatggtgcagagactgttataagaatgagttatgggaatctcacaccacttgaaggcagtcttttggatagtcagatctctgaggttgcgtctttagccaattcggaccacgggtcgtcaaggcataatgatgaagctctcgtggttcctcacagagtttctttcgagttgactggtgaagacgttgcacggtgtcttgcaagcaagctaaaccgttccggttcacatgaaaaagcaagcggcgaacatttaagaccaaactgttgtaaaacgtcgggagaaacagagagcgaacagagtcagaagctaagatcgttttctacaggctctaacaaagaattcaagtttgatagcaccaatgaagagatgatagagaaaattcgatcggagtggtgggcgaatgagaaggtcgccggaaaaggtgatcacagtccaagaaacagttggactttctttccagtcttacgctctggacatacttag

SEQ ID NO: 46008 - protein, 424 aa, Arabidopsis thaliana
  peptide (1)..(424): Ceres Seq. ID no. 12560770
MSFEFQKKKRGSWWSLYWCFGSKKNNKRIGHAVLVPEPAASGAAVAPVQNSSSNSTSIFMPFIAPPSSPASFLPSGPPSASHTPDPGLLCSLTVNEPPSAFTIGPYAHETQPVTPPVFSAFTTEPSTAPFTPPPESPSSPEVPFAQLLTSSLERARRNSGGGMNQKFSAAHYEFKSCQVYPGSPGGNLISPGSGTSSPYPGKCSIIEFRIGEPPKFLGFEHFTARKWGSRFGSGSITPAGQGSRLGSGALTPDGSKLTSGVVTPNGAETVIRMSYGNLTPLEGSLLDSQISEVASLANSDHGSSRHNDEALVVPHRVSFELTGEDVARCLASKLNRSGSHEKASGEHLRPNCCKTSGETESEQSQKLRSFSTGSNKEFKFDSTNEEMIEKIRSEWWANEKVAGKGDHSPRNSWTFFPVLRSGHT

SEQ ID NO: 46009 - protein, 365 aa, Arabidopsis thaliana
  peptide (1)..(365): Ceres Seq. ID no. 12560771
MPFIAPPSSPASFLPSGPPSASHTPDPGLLCSLTVNEPPSAFTIGPYAHETQPVTPPVFSAFTTEPSTAPFTPPPESPSSPEVPFAQLLTSSLERARRNSGGGMNQKFSAAHYEFKSCQVYPGSPGGNLISPGSGTSSPYPGKCSIIEFRIGEPPKFLGFEHFTARKWGSRFGSGSITPAGQGSRLGSGALTPDGSKLTSGVVTPNGAETVIRMSYGNLTPLEGSLLDSQISEVASLANSDHGSSRHNDEALVVPHRVSFELTGEDVARCLASKLNRSGSHEKASGEHLRPNCCKTSGETESEQSQKLRSFSTGSNKEFKFDSTNEEMIEKIRSEWWANEKVAGKGDHSPRNSWTFFPVLRSGHT

SEQ ID NO: 46010 - protein, 262 aa, Arabidopsis thaliana
  peptide (1)..(262): Ceres Seq. ID no. 12560772
MNQKFSAAHYEFKSCQVYPGSPGGNLISPGSGTSSPYPGKCSIIEFRIGEPPKFLGFEHFTARKWGSRFGSGSITPAGQGSRLGSGALTPDGSKLTSGVVTPNGAETVIRMSYGNLTPLEGSLLDSQISEVASLANSDHGSSRHNDEALVVPHRVSFELTGEDVARCLASKLNRSGSHEKASGEHLRPNCCKTSGETESEQSQKLRSFSTGSNKEFKFDSTNEEMIEKIRSEWWANEKVAGKGDHSPRNSWTFFPVLRSGHT

SEQ ID NO: 46011 - DNA, 1628 bp, Arabidopsis thaliana
  misc_feature (1)..(1628): Ceres Seq. ID no. 12560773
  misc_feature (1)..(1628): Ortholog of  Ceres SEQ ID NO 13594317 as cited in SEQ ID NO 57796
tttcctcttccttccttccccaatagagagggattttcccgcttcagcgtctctcagtctctctctcggctttatccaaaggttccttcgtttactccgcttctatggaagaagcttgaatccttctctcttcttcttctccttcttcccttgacatttttgttctganaagcaacatggccctcggtggcttgatttcaaatcggaacttcggttccttcatcggctcaggcaatggttgtcagagacttggaaaaagtggtgcagaggtttccaagctttttccaaatgcattgttgtgccgtaatcatcaacctctgcaagctagtttacatcatgaatcgggacacatgagaagaagttttggatgtttccttcaaccaagaatggacagtgtaattaggtttaggaacagtatcaagatcaacagatctcgtgcttactacaaatcagaggagtcagatatcacggaaggagttgtgccatcggctgatggctcagctgaagctattttagttgaaggaaatctacagaacgcatctccatggtggcagcagtttcctagacgctgggtgatcgtcttgttatgcttttcgtcttttcttctttgcaatatggaccgtgtgaacatgagcattgcaattcttcccatgtcacaagaatataactggagtagtgcaactgttggcttaattcagtcctctttcttctggggctatttacttactcagattctgggaggtatatgggcagataagtttggcgggaagggtgttgcaatgcctgctatgaacaacatgctttctaaatggatccctgtctcagagagaagcagatcgcttgcactggtctatagtggcatgtatcttggttccgtcacaggattggcattctctcctatgctaatcaccaagttcggatggccatctgttttctactcgtttggctccctcggaagtatatggtttttgctatggctaaaatttgcatatagctctcccaaggatgacccggacctaagtgaagaagaaaaaaaggttatactgggaggtagcaaaccaagggaacctgttacagtgattccatggaagctaatactgtctaaacccccagtctgggctctcataatttcccacttctgccataattggggaactttcatactattgacatggatgcccacatattacaatcaggcacggagttcagcttcagttatatccttactgtttaatattttttgtgaacaagtcttgaagttcaacctcactgaatccgggctactatgcgttttgccatggctaaccatggctgtttttgctaatattggaggttggattgctgatactcttgtgagcagaggtctttcaattacaaacggctctgatgcattctctcagtcgggtctctactctaatcatcaagacattggcccacgatacgctggtgtactcttaggactatcaaacacagcaggagtcctagctggtgtctttggcactgcagctactggttacatcctccaacgaggttcatgggatgatgtgttcaaagtagcagttgcactgtatctaattggaactctggtctggaacttgttcgcaaccggagaaaaaattctcgactag

SEQ ID NO: 46012 - protein, 483 aa, Arabidopsis thaliana
  peptide (1)..(483): Ceres Seq. ID no. 12560774
MALGGLISNRNFGSFIGSGNGCQRLGKSGAEVSKLFPNALLCRNHQPLQASLHHESGHMRRSFGCFLQPRMDSVIRFRNSIKINRSRAYYKSEESDITEGVVPSADGSAEAILVEGNLQNASPWWQQFPRRWVIVLLCFSSFLLCNMDRVNMSIAILPMSQEYNWSSATVGLIQSSFFWGYLLTQILGGIWADKFGGKGVAMPAMNNMLSKWIPVSERSRSLALVYSGMYLGSVTGLAFSPMLITKFGWPSVFYSFGSLGSIWFLLWLKFAYSSPKDDPDLSEEEKKVILGGSKPREPVTVIPWKLILSKPPVWALIISHFCHNWGTFILLTWMPTYYNQARSSASVISLLFNIFCEQVLKFNLTESGLLCVLPWLTMAVFANIGGWIADTLVSRGLSITNGSDAFSQSGLYSNHQDIGPRYAGVLLGLSNTAGVLAGVFGTAATGYILQRGSWDDVFKVAVALYLIGTLVWNLFATGEKILD

SEQ ID NO: 46013 - protein, 425 aa, Arabidopsis thaliana
  peptide (1)..(425): Ceres Seq. ID no. 12560775
MRRSFGCFLQPRMDSVIRFRNSIKINRSRAYYKSEESDITEGVVPSADGSAEAILVEGNLQNASPWWQQFPRRWVIVLLCFSSFLLCNMDRVNMSIAILPMSQEYNWSSATVGLIQSSFFWGYLLTQILGGIWADKFGGKGVAMPAMNNMLSKWIPVSERSRSLALVYSGMYLGSVTGLAFSPMLITKFGWPSVFYSFGSLGSIWFLLWLKFAYSSPKDDPDLSEEEKKVILGGSKPREPVTVIPWKLILSKPPVWALIISHFCHNWGTFILLTWMPTYYNQARSSASVISLLFNIFCEQVLKFNLTESGLLCVLPWLTMAVFANIGGWIADTLVSRGLSITNGSDAFSQSGLYSNHQDIGPRYAGVLLGLSNTAGVLAGVFGTAATGYILQRGSWDDVFKVAVALYLIGTLVWNLFATGEKILD

SEQ ID NO: 46014 - protein, 413 aa, Arabidopsis thaliana
  peptide (1)..(413): Ceres Seq. ID no. 12560776
MDSVIRFRNSIKINRSRAYYKSEESDITEGVVPSADGSAEAILVEGNLQNASPWWQQFPRRWVIVLLCFSSFLLCNMDRVNMSIAILPMSQEYNWSSATVGLIQSSFFWGYLLTQILGGIWADKFGGKGVAMPAMNNMLSKWIPVSERSRSLALVYSGMYLGSVTGLAFSPMLITKFGWPSVFYSFGSLGSIWFLLWLKFAYSSPKDDPDLSEEEKKVILGGSKPREPVTVIPWKLILSKPPVWALIISHFCHNWGTFILLTWMPTYYNQARSSASVISLLFNIFCEQVLKFNLTESGLLCVLPWLTMAVFANIGGWIADTLVSRGLSITNGSDAFSQSGLYSNHQDIGPRYAGVLLGLSNTAGVLAGVFGTAATGYILQRGSWDDVFKVAVALYLIGTLVWNLFATGEKILD

SEQ ID NO: 46015 - DNA, 1485 bp, Arabidopsis thaliana
  misc_feature (1)..(1485): Ceres Seq. ID no. 12560747
  misc_feature (1)..(1485): Ortholog of  Ceres SEQ ID NO 15177963 as cited in SEQ ID NO 59105
atggcttcaattctctcaattcttcttctcattctttcactttcaaatctccacttcacttcaaccaccggaaacaaccacattaacgacagaaaatccttagaaatcattatcggtggtggtaacgacaacaatcctccaccgtcaccttcaccggaaccagaaccagaacctgcagattgccctcctccccctcctcctcctccatgccctcctccaccttctccccctccatgccctcctccaccctctcctcctccaagccctcctcctccacagcttccacctcctccacagcttccgccgcctgcaccgcctaaaccccagccatcgccgccaacacctgatctaccgtttgcgagctcattattaaagaaagtctatccagttctccaaagatttaaggatctagtcgcagatgataaacttaagtcttgggaaggccccgacatttgcaacaaatacctcggactcaaatgcgccattttcccgaaaacaaagcatctcgcactcgcgagcgtccagtttaatgggttaaacttgagaggcaagataggcaagatcctcaagttagataacttcctcgacaagttagaagaagtcaccatcttccacgcaaactccaacggtttcacaggctctgtgcctgatttcagcaatttgaaattcttatacgagctcgatctaagcaacaacaaactcacaggagatttcccaactagtgtcttgaaaggaaacaatctcacgtttcttgatctcaggttcaattctttctcaggctctgttcctcctcaggtctttaatctcgacctcgacgtcttgttcatcaacaacaacaatcttgttcagaagcttccactcaatcttggatccatcactgctctttacctcaccttcgccaacaacaggttcacgggtccaattcccgaaagcataggcaacatcaagtacctacaagaagtccttttcctgaataacaagttaaccggatgcttaccgtaccaaatcggaaacctaacccgagccactgttttcgatgttgggttcaaccaattaaccggtccaataccgtactctttcggttgcttagaaacgatggaacaactcaatttagccggaaacaagttctatggaaccataccggagattgtatgcgagattgcttgtctccaaaacgtttctctctcgaataattacttcactcaggttggtccgaaatgtagaaaactcatcaagagaaaaattatggacgttagtatgaattgtatacttgatcttccaaaccagaaaacgccatcggagtgtgctaagttcttcatgcggaaacagacttgtcctaattccaagtctttgtttactgtcccttgtgataagaatccaaaccggggtaaaccggatcaagaacgattggaggaggaaaaagctcaagtttctcatccggtaacttacaacacacttaacccggaccggcttcggaatctataa

SEQ ID NO: 46016 - protein, 494 aa, Arabidopsis thaliana
  peptide (1)..(494): Ceres Seq. ID no. 12560748
MASILSILLLILSLSNLHFTSTTGNNHINDRKSLEIIIGGGNDNNPPPSPSPEPEPEPADCPPPPPPPPCPPPPSPPPCPPPPSPPPSPPPPQLPPPPQLPPPAPPKPQPSPPTPDLPFASSLLKKVYPVLQRFKDLVADDKLKSWEGPDICNKYLGLKCAIFPKTKHLALASVQFNGLNLRGKIGKILKLDNFLDKLEEVTIFHANSNGFTGSVPDFSNLKFLYELDLSNNKLTGDFPTSVLKGNNLTFLDLRFNSFSGSVPPQVFNLDLDVLFINNNNLVQKLPLNLGSITALYLTFANNRFTGPIPESIGNIKYLQEVLFLNNKLTGCLPYQIGNLTRATVFDVGFNQLTGPIPYSFGCLETMEQLNLAGNKFYGTIPEIVCEIACLQNVSLSNNYFTQVGPKCRKLIKRKIMDVSMNCILDLPNQKTPSECAKFFMRKQTCPNSKSLFTVPCDKNPNRGKPDQERLEEEKAQVSHPVTYNTLNPDRLRNL

SEQ ID NO: 46017 - DNA, 1438 bp, Arabidopsis thaliana
  misc_feature (1)..(1438): Ceres Seq. ID no. 15168593
  misc_feature (1)..(1438): Ortholog of  Ceres SEQ ID NO 15170354 as cited in SEQ ID NO 54190
  misc_feature (1)..(1438): Ortholog of  Ceres SEQ ID NO 14307253 as cited in SEQ ID NO 54783
  misc_feature (1)..(1438): Ortholog of  Ceres SEQ ID NO 13654989 as cited in SEQ ID NO 63117
  misc_feature (1)..(1438): Ortholog of  Ceres SEQ ID NO 13657138 as cited in SEQ ID NO 65923
  misc_feature (1)..(1438): Ortholog of  Ceres SEQ ID NO 13584744 as cited in SEQ ID NO 69137
gaagaaaagtctgcgtttcttcaccaaccctacacgaaccaagatagatagaaaccttctccttcttctgcttcttttatcatcggagaattcgaatcttcttttcctctttttgagattctctaattatccttttggaagagtttcgtgtgagagagaagcgtaatgggctgctttggttgttgtggtggtggtgaggatttccgtagagtttctgaaactggaccaaagccagtgcataacactggaggttacaatggaggtcaccatcaaagggcagatccacccaaaaaccttccagtcattcagatgcagcctatctctgttgcggccattccagctgatgaattgagggatataacggataactatggttcaaagtccttgattggtgagggttcatatggaagagtcttttatggtattcttaaaagtggtaaagcagctgccattaagaaactggattctagtaagcaaccagatcaagaatttctcgcccaggtatcaatggtttcgagattgcgacaagaaaatgttgttgcgcttctgggctattgtgttgatggcccactccgtgttcttgcttatgaatatgctcctaatggatctcttcatgatattcttcatggtcgaaaaggtgttaaaggggcacagccaggtcctgttctgtcgtggcaccagagagtcaaaattgctgttggtgcggctagaggactcgagtacttgcatgagaaggcaaaccctcatgttatccacagagacatcaaatccagcaatgtacttctgttcgatgatgatgttgccaagattgctgattttgatttgtccaaccaagcccctgacatggctgctcgccttcactcaacccgtgtgctcggaacctttggctatcacgctccagagtatgcaatgacggggacgttgagcacaaagagtgatgtctatagttttggcgttgttctgctggagctcctcacaggtcgtaaaccagttgatcataccttaccacgtggacagcagagtgtcgtgacatgggcaacccctaaattgagtgaagacaaggtgaagcagtgtgttgacgcaagactaaacggagaatatcctcccaaagctgttgctaagctggctgcggtagctgcactgtgtgtgcaatatgaggcagacttcaggcctaacatgagcatagtggtgaaggctcttcagccgttgctcaatcctcctcgctctgctccccagactccacacaggaacccgtattgatatgctccagtctgatatcaccctttatgatcatcactatttcatttgtttttgtttgaatccgatttgtgtaaatttgtgaaataggcgtttattctctcataaaccccctgccacttcactgaaaatcttacttggaaagacctgaatgttactgtatttctatattatttcatgc

SEQ ID NO: 46018 - protein, 364 aa, Arabidopsis thaliana
  peptide (1)..(364): Ceres Seq. ID no. 15168594
MGCFGCCGGGEDFRRVSETGPKPVHNTGGYNGGHHQRADPPKNLPVIQMQPISVAAIPADELRDITDNYGSKSLIGEGSYGRVFYGILKSGKAAAIKKLDSSKQPDQEFLAQVSMVSRLRQENVVALLGYCVDGPLRVLAYEYAPNGSLHDILHGRKGVKGAQPGPVLSWHQRVKIAVGAARGLEYLHEKANPHVIHRDIKSSNVLLFDDDVAKIADFDLSNQAPDMAARLHSTRVLGTFGYHAPEYAMTGTLSTKSDVYSFGVVLLELLTGRKPVDHTLPRGQQSVVTWATPKLSEDKVKQCVDARLNGEYPPKAVAKLAAVAALCVQYEADFRPNMSIVVKALQPLLNPPRSAPQTPHRNPY

SEQ ID NO: 46019 - protein, 316 aa, Arabidopsis thaliana
  peptide (1)..(316): Ceres Seq. ID no. 15168595
MQPISVAAIPADELRDITDNYGSKSLIGEGSYGRVFYGILKSGKAAAIKKLDSSKQPDQEFLAQVSMVSRLRQENVVALLGYCVDGPLRVLAYEYAPNGSLHDILHGRKGVKGAQPGPVLSWHQRVKIAVGAARGLEYLHEKANPHVIHRDIKSSNVLLFDDDVAKIADFDLSNQAPDMAARLHSTRVLGTFGYHAPEYAMTGTLSTKSDVYSFGVVLLELLTGRKPVDHTLPRGQQSVVTWATPKLSEDKVKQCVDARLNGEYPPKAVAKLAAVAALCVQYEADFRPNMSIVVKALQPLLNPPRSAPQTPHRNPY

SEQ ID NO: 46020 - protein, 250 aa, Arabidopsis thaliana
  peptide (1)..(250): Ceres Seq. ID no. 15168596
MVSRLRQENVVALLGYCVDGPLRVLAYEYAPNGSLHDILHGRKGVKGAQPGPVLSWHQRVKIAVGAARGLEYLHEKANPHVIHRDIKSSNVLLFDDDVAKIADFDLSNQAPDMAARLHSTRVLGTFGYHAPEYAMTGTLSTKSDVYSFGVVLLELLTGRKPVDHTLPRGQQSVVTWATPKLSEDKVKQCVDARLNGEYPPKAVAKLAAVAALCVQYEADFRPNMSIVVKALQPLLNPPRSAPQTPHRNPY

SEQ ID NO: 46021 - DNA, 2378 bp, Arabidopsis thaliana
  misc_feature (1)..(2378): Ceres Seq. ID no. 12560715
  misc_feature (1)..(2378): Ortholog of  Ceres SEQ ID NO 13532807 as cited in SEQ ID NO 53012
  misc_feature (1)..(2378): Ortholog of  Ceres SEQ ID NO 13663060 as cited in SEQ ID NO 60964
  misc_feature (1)..(2378): Ortholog of  Ceres SEQ ID NO 13500573 as cited in SEQ ID NO 67431
  misc_feature (1)..(2378): Ortholog of  Ceres SEQ ID NO 13656501 as cited in SEQ ID NO 69206
ttttttttcaaatttagaaaaaatatctcaaattcggtatttttaaaatcctctctcgtcttcttcttcttcgatcgctggatctaggttttgctcttctctgtatcgtcttcttcacagactgggcttgattttgagttcttctagttttcggattcttagcaatctaggtttttttttttttttacttttcgaaaagccgatccagatttttgataattttgaagaagaagatgcaacaaaatcaagtgaagaagggcacgaaagagatggagtttttcacagagtatggtgatgcaaacagatataggattctggaagttattggtaaaggaagctatggagttgtgtgtgcagctattgatacacatactggagagaaagttgctattaagaagattaatgatgtctttgaacatatttctgatgcgcttcgtattctccgtgaagtgaagcttcttcggcttttacggcatcctgatattgtggagatcaaaagcattatgctgcctccttctaagagagagtttaaagatatctatgttgtgtttgagctcatggaatcagatcttcatcaagttattaaagctaatgatgatttgactcgtgaacaccaccagtttttcctttatcagatgcttcgtgctttaaagttcatgcatacagctaatgtttatcaccgtgatcttaagccaaagaatatacttgcaaacgcaaattgcaagttgaaagtttgtgactttggattggctagagtagcgtttaatgatactcctacgacagtcttttggacggactatgttgccacaagatggtatagagcacctgagctctgtggatcattcttttcgaagtacactccagctatcgacgtttggagcattggctgcatctttgcagaggtactaacagggaagccattgtttccgggaaaaagtgttgtccatcagttggagttgattactgatcttcttggcacaccaaaatcagaaacaatttctggagttcgtaatgataaagctagaaaatacttgactgaaatgaggaagaaaaatcctgtcaccttctcgcaaaaattttccaaagcagatccattagcactccgtcttttgcagaggctgttggctttcgatccaaaggatcgaccgactcctgcagaggcattagctgatccttacttcaagggtctttctaagattgaaagagaaccttcaagtcagcaaatctcgaaaatggagtttgaatttgagaggcgaaggttgacaaaggacgacattagagaactaatatacagagaaatactggagtaccatcctcagttgctcaaggactatatgagcggatctgaggggtctaattttgtatatcctagcgccattggacatcttagacagcagttcacttacttagaggaaaatagcagtagaaatgggccggtcatacctctcgagaggaaacacgcatcactaccgcggtctacggttcactcaactgtagtccattccacctcgcaacccaacttgggtgcaacagatagtagacgtgtttctttcgagccttcaaaaaatggagcttcttctgcaggacatccatcaacttccgcgtatcctactaaatccatcggacctccaccaagagttccaccatcaggtagaccaggtcgtgttgtggaatcatctgtatcttatgagaatggcaggaacctcaaagaagcttatttcagaagcgcggtttcatctcctcattgctacttccgaccaaacaccatgacaaacccggagaaccgcaacatagaagcttcgtcttttccaccaaagccacaaaatcctgtccaccaattcagtcccactgagccaccagctgctacaactaaccaagcagacgttgagactatgaaccacccaaacccttactttcaaccacagctcccgaagacagatcaattaaacaacaacacacatatggccattgatgctaagctgttgcaggcacaatcacagtttggtccagcaggagctgcagcggttgcagtagcagcacaccggaacataggcacaattagttacagcgcagcatcatagacaacacttcagacagatctttaaccaccacatcttcctccaccaggtgattctctagtttttatgtaagtattattcagtccaggctctgatatgaactacgttgcaatgatataagaaagacttttatttagttgtaactctccagaacaagatcgccttggattagtctgattgcgggtcagtcccggttattgtttcggttatcttgttggctccataatctttgaatttgccataagcgtagttcaccgtagagaagaatatcgtggtgattatatacttcttaaacttctt

SEQ ID NO: 46022 - protein, 615 aa, Arabidopsis thaliana
  peptide (1)..(615): Ceres Seq. ID no. 12560716
MQQNQVKKGTKEMEFFTEYGDANRYRILEVIGKGSYGVVCAAIDTHTGEKVAIKKINDVFEHISDALRILREVKLLRLLRHPDIVEIKSIMLPPSKREFKDIYVVFELMESDLHQVIKANDDLTREHHQFFLYQMLRALKFMHTANVYHRDLKPKNILANANCKLKVCDFGLARVAFNDTPTTVFWTDYVATRWYRAPELCGSFFSKYTPAIDVWSIGCIFAEVLTGKPLFPGKSVVHQLELITDLLGTPKSETISGVRNDKARKYLTEMRKKNPVTFSQKFSKADPLALRLLQRLLAFDPKDRPTPAEALADPYFKGLSKIEREPSSQQISKMEFEFERRRLTKDDIRELIYREILEYHPQLLKDYMSGSEGSNFVYPSAIGHLRQQFTYLEENSSRNGPVIPLERKHASLPRSTVHSTVVHSTSQPNLGATDSRRVSFEPSKNGASSAGHPSTSAYPTKSIGPPPRVPPSGRPGRVVESSVSYENGRNLKEAYFRSAVSSPHCYFRPNTMTNPENRNIEASSFPPKPQNPVHQFSPTEPPAATTNQADVETMNHPNPYFQPQLPKTDQLNNNTHMAIDAKLLQAQSQFGPAGAAAVAVAAHRNIGTISYSAAS

SEQ ID NO: 46023 - protein, 603 aa, Arabidopsis thaliana
  peptide (1)..(603): Ceres Seq. ID no. 12560717
MEFFTEYGDANRYRILEVIGKGSYGVVCAAIDTHTGEKVAIKKINDVFEHISDALRILREVKLLRLLRHPDIVEIKSIMLPPSKREFKDIYVVFELMESDLHQVIKANDDLTREHHQFFLYQMLRALKFMHTANVYHRDLKPKNILANANCKLKVCDFGLARVAFNDTPTTVFWTDYVATRWYRAPELCGSFFSKYTPAIDVWSIGCIFAEVLTGKPLFPGKSVVHQLELITDLLGTPKSETISGVRNDKARKYLTEMRKKNPVTFSQKFSKADPLALRLLQRLLAFDPKDRPTPAEALADPYFKGLSKIEREPSSQQISKMEFEFERRRLTKDDIRELIYREILEYHPQLLKDYMSGSEGSNFVYPSAIGHLRQQFTYLEENSSRNGPVIPLERKHASLPRSTVHSTVVHSTSQPNLGATDSRRVSFEPSKNGASSAGHPSTSAYPTKSIGPPPRVPPSGRPGRVVESSVSYENGRNLKEAYFRSAVSSPHCYFRPNTMTNPENRNIEASSFPPKPQNPVHQFSPTEPPAATTNQADVETMNHPNPYFQPQLPKTDQLNNNTHMAIDAKLLQAQSQFGPAGAAAVAVAAHRNIGTISYSAAS

SEQ ID NO: 46024 - protein, 525 aa, Arabidopsis thaliana
  peptide (1)..(525): Ceres Seq. ID no. 12560718
MLPPSKREFKDIYVVFELMESDLHQVIKANDDLTREHHQFFLYQMLRALKFMHTANVYHRDLKPKNILANANCKLKVCDFGLARVAFNDTPTTVFWTDYVATRWYRAPELCGSFFSKYTPAIDVWSIGCIFAEVLTGKPLFPGKSVVHQLELITDLLGTPKSETISGVRNDKARKYLTEMRKKNPVTFSQKFSKADPLALRLLQRLLAFDPKDRPTPAEALADPYFKGLSKIEREPSSQQISKMEFEFERRRLTKDDIRELIYREILEYHPQLLKDYMSGSEGSNFVYPSAIGHLRQQFTYLEENSSRNGPVIPLERKHASLPRSTVHSTVVHSTSQPNLGATDSRRVSFEPSKNGASSAGHPSTSAYPTKSIGPPPRVPPSGRPGRVVESSVSYENGRNLKEAYFRSAVSSPHCYFRPNTMTNPENRNIEASSFPPKPQNPVHQFSPTEPPAATTNQADVETMNHPNPYFQPQLPKTDQLNNNTHMAIDAKLLQAQSQFGPAGAAAVAVAAHRNIGTISYSAAS

SEQ ID NO: 46025 - DNA, 1730 bp, Arabidopsis thaliana
  misc_feature (1)..(1730): Ceres Seq. ID no. 12560749
  misc_feature (1)..(1730): Ortholog of  Ceres SEQ ID NO 15169199 as cited in SEQ ID NO 55297
  misc_feature (1)..(1730): Ortholog of  Ceres SEQ ID NO 15175690 as cited in SEQ ID NO 55466
  misc_feature (1)..(1730): Ortholog of  Ceres SEQ ID NO 15171197 as cited in SEQ ID NO 56892
  misc_feature (1)..(1730): Ortholog of  Ceres SEQ ID NO 14306381 as cited in SEQ ID NO 58812
gaaaaaagcagagaacaagagaaaaaaaaaagaagaagacgactttatctttttctgggttttgttgttcttctttgactttatgggttcttttgttttagatttaggctcctacagatctgcttaaatctctgtgatcttgtctcttaattcttctgtttacccgtaatttccggaggattctcttcttgcttttccctgagcttctggatttggtcagagaagccttaagttcaaaaggatttggcttttgaagattggtgttaattaagcttctgggttttcatcagtttgtctaaaagtgagtggagtctctcatcttagtctgaagctcttttttttggatttgagcatttctggnttgagaagaatcttgtggaaaccaaagagaaatgtcgtttcgaggcattgttcaagatttgagagatgggtttgggagcttgtcaaggaggagtttcgattttaggctctcgagtcttcataaagggaaagctcagggttcttcgttccgtgagtattcgtcatcccgtgatctcttgtcgcctgtgatagttcagacaagtagatgggctaatcttcctccagagttactctttgatgtgatcaaaagattagaggaaagtgagagtaattggcctgcaagaaaacatgttgtggcttgtgcttcggtttgtcggtcttggagagctatgtgccaagagattgttttggggcctgaaatctgtgggaaactcactttccctgtttccctcaaacagccagggcctcgtgatgcaatgattcagtgtttcatcaaaagggataaatcaaagctaacatttcacctttttctttgtttaagtcccgctctattagtggagaatgggaaatttcttctttcagctaaaagaactcgtagaactactcgaaccgagtacattatctccatggatgctgataacatctcaagatccagcaactcttacctcggaaagctcagatcaaacttccttgggacaaagttcttggtgtacgacacgcaaccaccaccaaacacatcttcgagcgcacttatcactgatcgaacaagccgaagcaggtttcactccagacgagtttctcctaaagtaccatccggaagctacaacattgctcaaatcacctatgagctcaacgtgttgggcacacgcgggccacgacgaatgcactgcatcatgaactccatcccaatttcatcgctcgaaccaggcggttcagtccctaaccaacccgagaaactcgtccctgcaccatactctctcgacgactcattccgcagtaacatctccttctccaaatcatcatttgaccaccgctccctcgatttcagcagttctagattctccgaaatgggaatatcctgcgacgacaacgaagaagaagcgagtttcagaccgttgattctaaagaacaagcagccaaggtggcacgagcagttgcaatgctggtgtttgaatttccgcggacgtgtgacagttgcatcggttaagaatttccagcttgtagcagcaagacagccgcagcctcaagggacaggtgcagcagcagcaccaacaagtgcacctgctcaccctgagcaagacaaggtgattctccagtttggtaaagtagggaaagatatgttcacaatggactataggtatccattatcggcgtttcaggcgtttgcgatatgcttaagcagctttgacaccaagcttgcttgtgaatag

SEQ ID NO: 46026 - protein, 445 aa, Arabidopsis thaliana
  peptide (1)..(445): Ceres Seq. ID no. 12560750
MSFRGIVQDLRDGFGSLSRRSFDFRLSSLHKGKAQGSSFREYSSSRDLLSPVIVQTSRWANLPPELLFDVIKRLEESESNWPARKHVVACASVCRSWRAMCQEIVLGPEICGKLTFPVSLKQPGPRDAMIQCFIKRDKSKLTFHLFLCLSPALLVENGKFLLSAKRTRRTTRTEYIISMDADNISRSSNSYLGKLRSNFLGTKFLVYDTQPPPNTSSSALITDRTSRSRFHSRRVSPKVPSGSYNIAQITYELNVLGTRGPRRMHCIMNSIPISSLEPGGSVPNQPEKLVPAPYSLDDSFRSNISFSKSSFDHRSLDFSSSRFSEMGISCDDNEEEASFRPLILKNKQPRWHEQLQCWCLNFRGRVTVASVKNFQLVAARQPQPQGTGAAAAPTSAPAHPEQDKVILQFGKVGKDMFTMDYRYPLSAFQAFAICLSSFDTKLACE

SEQ ID NO: 46027 - protein, 346 aa, Arabidopsis thaliana
  peptide (1)..(346): Ceres Seq. ID no. 12560751
MCQEIVLGPEICGKLTFPVSLKQPGPRDAMIQCFIKRDKSKLTFHLFLCLSPALLVENGKFLLSAKRTRRTTRTEYIISMDADNISRSSNSYLGKLRSNFLGTKFLVYDTQPPPNTSSSALITDRTSRSRFHSRRVSPKVPSGSYNIAQITYELNVLGTRGPRRMHCIMNSIPISSLEPGGSVPNQPEKLVPAPYSLDDSFRSNISFSKSSFDHRSLDFSSSRFSEMGISCDDNEEEASFRPLILKNKQPRWHEQLQCWCLNFRGRVTVASVKNFQLVAARQPQPQGTGAAAAPTSAPAHPEQDKVILQFGKVGKDMFTMDYRYPLSAFQAFAICLSSFDTKLACE

SEQ ID NO: 46028 - protein, 317 aa, Arabidopsis thaliana
  peptide (1)..(317): Ceres Seq. ID no. 12560752
MIQCFIKRDKSKLTFHLFLCLSPALLVENGKFLLSAKRTRRTTRTEYIISMDADNISRSSNSYLGKLRSNFLGTKFLVYDTQPPPNTSSSALITDRTSRSRFHSRRVSPKVPSGSYNIAQITYELNVLGTRGPRRMHCIMNSIPISSLEPGGSVPNQPEKLVPAPYSLDDSFRSNISFSKSSFDHRSLDFSSSRFSEMGISCDDNEEEASFRPLILKNKQPRWHEQLQCWCLNFRGRVTVASVKNFQLVAARQPQPQGTGAAAAPTSAPAHPEQDKVILQFGKVGKDMFTMDYRYPLSAFQAFAICLSSFDTKLACE

SEQ ID NO: 46029 - DNA, 629 bp, Arabidopsis thaliana; identical to SEQ ID NO: 28299
  misc_feature (1)..(629): Ceres Seq. ID no. 12680276
  misc_feature (1)..(629): Ortholog of  Ceres SEQ ID NO 14301998 as cited in SEQ ID NO 52093
  misc_feature (1)..(629): Ortholog of  Ceres SEQ ID NO 12619783 as cited in SEQ ID NO 69210

SEQ ID NO: 46030 - protein, 145 aa, Arabidopsis thaliana; identical to SEQ ID NO: 28300
  peptide (1)..(145): Ceres Seq. ID no. 12680277

SEQ ID NO: 46031 - DNA, 1746 bp, Arabidopsis thaliana
  misc_feature (1)..(1746): Ceres Seq. ID no. 13591719
  misc_feature (1)..(1746): Ortholog of  Ceres SEQ ID NO 14311862 as cited in SEQ ID NO 51654
  misc_feature (1)..(1746): Ortholog of  Ceres SEQ ID NO 13597334 as cited in SEQ ID NO 64244
ggaagaagaagattgattataaaggtgttagctttttcaatacttcacaccaaataaagcctttctcgttagataagtaacaagcatttactcaaaagcttcttcctttctcactctctctctctctctgtctcttcttgtttgctttagacttaagatgggtgcggcgcattttagtaaggagagggtcttcagagggtttctggtttggttctgcttttggggactgatgtctctaacatgcgctgggagactcagtgtttcaaggcagaattttgaagtgcacaaacacttgaatcgattgaataaaccagccgttaagagcattcagagtccagatggtgacataatagactgtgttcacatatcgaagcaaccagcttttgatcaccctttcctcaaagatcacaagattcagatgggacctagttacactccagaatcgctgtttggtgagagcaaagtgtctgagaaaccaaaagagagtgtcaatcctattacacagttatggcaccagaacggagtttgttctgaagggacaataccagtgaggaggacaaagaaagaggatgtcttgagggcgagttctgttaaacggtatggtaagaagaagcacctttctgttcctctgcctcgatctgctgatcctgatctcattaaccaaagtggtcatcagcacgcgatagcttatgtggaaggaggcaagttttacggggcaaaggcgacaataaatgtatgggaacccaaagtgcaaagctctaatgagtttagcttgtctcagttatggattcttggaggttcttttggtcaagatctcaacagcattgaagctggttggcaggttagtccagatttatatggcgataacaacacaaggcttttcacatactggacgagcgatgcttatcaagctacgggctgctacaatctcctttgttcgggtttcatacaaatcaacagtcaaatagcaatgggagcaagtatctctccggtatctggcttccataacccgcaatacgatataagtattaccatttggaaggatccaaaagaagggcactggtggatgcagtttggagacgggtatgtgttgggatactggccaagctttctattctcttacttagcagatagtgcatcaatagtagagtggggtggagaagtagtgaacatggaagaagatggtcaccacacaaccacgcaaatgggaagcggtcaatttccggatgaagggttcacgaaagcgagttacttcaggaacattcaagtcgttgatagctctaataatctgaaagaaccaaaagggctcaacactttcactgagaaatcgaattgctatgatgttgaggttggtaagaatgatgattggggacattatttttactatggaggtcctggaagaaaccctaattgtcagtagaagttaaagaaagaagatgattgaagttgtagaggaacacttgtgctggattttttcttattatgtgaagtgtgaaaatatcgtttttgttgatttttccttacacttactctgtttttttattttacctggacggctggacactgttttgtttttttttggggtttttaggttttgattaggtttagttgaaggttttttaaatgttacttgggttgaaaggtttgtctttagtttgtaagtgtggaagagagaagttgatagtctcttttcttgtaggagtaacctttaagataagaagattaaagatctttggattgtcttag

SEQ ID NO: 46032 - protein, 420 aa, Arabidopsis thaliana
  peptide (1)..(420): Ceres Seq. ID no. 13591720
MGAAHFSKERVFRGFLVWFCFWGLMSLTCAGRLSVSRQNFEVHKHLNRLNKPAVKSIQSPDGDIIDCVHISKQPAFDHPFLKDHKIQMGPSYTPESLFGESKVSEKPKESVNPITQLWHQNGVCSEGTIPVRRTKKEDVLRASSVKRYGKKKHLSVPLPRSADPDLINQSGHQHAIAYVEGGKFYGAKATINVWEPKVQSSNEFSLSQLWILGGSFGQDLNSIEAGWQVSPDLYGDNNTRLFTYWTSDAYQATGCYNLLCSGFIQINSQIAMGASISPVSGFHNPQYDISITIWKDPKEGHWWMQFGDGYVLGYWPSFLFSYLADSASIVEWGGEVVNMEEDGHHTTTQMGSGQFPDEGFTKASYFRNIQVVDSSNNLKEPKGLNTFTEKSNCYDVEVGKNDDWGHYFYYGGPGRNPNCQ

SEQ ID NO: 46033 - protein, 396 aa, Arabidopsis thaliana
  peptide (1)..(396): Ceres Seq. ID no. 13591721
MSLTCAGRLSVSRQNFEVHKHLNRLNKPAVKSIQSPDGDIIDCVHISKQPAFDHPFLKDHKIQMGPSYTPESLFGESKVSEKPKESVNPITQLWHQNGVCSEGTIPVRRTKKEDVLRASSVKRYGKKKHLSVPLPRSADPDLINQSGHQHAIAYVEGGKFYGAKATINVWEPKVQSSNEFSLSQLWILGGSFGQDLNSIEAGWQVSPDLYGDNNTRLFTYWTSDAYQATGCYNLLCSGFIQINSQIAMGASISPVSGFHNPQYDISITIWKDPKEGHWWMQFGDGYVLGYWPSFLFSYLADSASIVEWGGEVVNMEEDGHHTTTQMGSGQFPDEGFTKASYFRNIQVVDSSNNLKEPKGLNTFTEKSNCYDVEVGKNDDWGHYFYYGGPGRNPNCQ

SEQ ID NO: 46034 - protein, 333 aa, Arabidopsis thaliana
  peptide (1)..(333): Ceres Seq. ID no. 13591722
MGPSYTPESLFGESKVSEKPKESVNPITQLWHQNGVCSEGTIPVRRTKKEDVLRASSVKRYGKKKHLSVPLPRSADPDLINQSGHQHAIAYVEGGKFYGAKATINVWEPKVQSSNEFSLSQLWILGGSFGQDLNSIEAGWQVSPDLYGDNNTRLFTYWTSDAYQATGCYNLLCSGFIQINSQIAMGASISPVSGFHNPQYDISITIWKDPKEGHWWMQFGDGYVLGYWPSFLFSYLADSASIVEWGGEVVNMEEDGHHTTTQMGSGQFPDEGFTKASYFRNIQVVDSSNNLKEPKGLNTFTEKSNCYDVEVGKNDDWGHYFYYGGPGRNPNCQ

SEQ ID NO: 46035 - DNA, 2313 bp, Arabidopsis thaliana
  misc_feature (1)..(2313): Ceres Seq. ID no. 15168627
  misc_feature (1)..(2313): Ortholog of  Ceres SEQ ID NO 15170354 as cited in SEQ ID NO 54190
  misc_feature (1)..(2313): Ortholog of  Ceres SEQ ID NO 14307253 as cited in SEQ ID NO 54783
  misc_feature (1)..(2313): Ortholog of  Ceres SEQ ID NO 15225226 as cited in SEQ ID NO 58693
  misc_feature (1)..(2313): Ortholog of  Ceres SEQ ID NO 13654989 as cited in SEQ ID NO 63117
  misc_feature (1)..(2313): Ortholog of  Ceres SEQ ID NO 14303173 as cited in SEQ ID NO 66550
  misc_feature (1)..(2313): Ortholog of  Ceres SEQ ID NO 13584744 as cited in SEQ ID NO 69137
gtttcctctcaggtcctcttcaagaccttcaaaatctcggaaattccctctaggtccacctcttcaagcatttcctcctcctccccctaattcagattgttcttcaactatttgtttggaaccgtacacaaacacacctccgggatctccatgtggctgtgtctggccaattcaagttgagctacgccttagcatggcgctctacgacttcttcccaatggtttcagaatttgctcgggaaatcagcgccggagttttcatgaaacagagccaagtccgtataatgggagctaacgcggccagcgaacaacctgagaaatccattgttctaatcgatttagtaccgcttggagataaattcgataacatgactgcaatgctgacttaccagagattctggagtaaaaaagtctatatagatgaaccaatctttggcggatacgacgtgatttacgtgcgttatcctggtttacccgcttccccgccaacttctggtatgaccattatagatcaaggaccgtactctggtaataataacggaagggcggtcaaaccgctcggagttgatgttccaaggaagccgcgcaagaaagagctcaatggtggaagtattgctgtgattgttttatccgcagctgcttttatcggtttatgtttcgttatcgtttggttcttggttttccggcgacaaagagatcgacgacgtctttcgaaaagaacaccacttgctcgcccttcactgccttccctctcgaaaccatcaggctcggcgagatctttaactggaagccgatttagctcaacttcattgtcatttgaatccagcattgctccgtttactctctctgcaaagactttcaccgcaagtgaaataatgaaagctacaaataactttgatgaatcgagggttcttggtgaaggcggatttggacgagtttacgaaggtgttttcgatgacggaactaaagtagcagttaaggtattgaagagagatgaccagcaaggtagcagggagttcttagccgaagtggaaatgcttagtcgtcttcatcacagaaacctcgtgaatttaattggtatttgtatcgaagatcgtaaccgttccctggtttatgaactcataccaaatggcagcgttgaatctcacctccacgggattgataaagcatcttcgcctttagattgggatgctcggttgaagatagctcttggtgcggcccgtggtttagcgtatttacacgaagactcgagcccgcgagttatacacagagacttcaagtccagcaacatcttgctggaaaacgatttcacacctaaagtatctgactttggattggctcgtaacgcccttgatgatgaagataacagacatatatcgacacgcgttatgggaacgtttgggtatgtggcaccggaatacgcaatgacagggcatcttttggtgaagagtgatgtgtatagttacggagttgtgcttctcgagctacttacagggcggaaaccagtggatatgtctcaaccgcccggacaagagaacttagtttcatggactcggccttttcttacgagtgcagaagggcttgcagctattatagatcagtctttaggacccgagatctcattcgatagcatagctaaagtcgcggcaatagcttctatgtgcgttcaaccagaagtatcacaccgtcctttcatgggagaagtagtgcaagctttgaaacttgtcagcaacgaatgtgatgaagctaaagaactcaattctttaacttctatctctaaagacgattttagagatgacactcaagctgagagctcttgtggtgacagctcagcaaggatggctcggtatccattgctaccaaattacgactctgagcctgatacagagagaggattatctacatcggaaatgtacacggggtcagggaggttcgagagacagtctaactcgggtcccttgacctcgggtcgaggcaagagtttctggcaaaagatgaggagattatcgaccggaagcttgagtgagcatggaacaccaacggtcatgttacgatccggttctcgctaaacaatcttttgcctacagaacactgaagagtttttgattgcccgtttaagttaagagactgaaaggaaagaaggtgccttctcctacaagcaaaactctttgcctcatggaaaccggttaagataaaaccaggagtgatcatttcccggttcaaaatttttagttgaatagatctgtttatctgagaagaagaaacaagagattctgttaaatctaatttgaatgtacatatcacgttttaaagc

SEQ ID NO: 46036 - protein, 688 aa, Arabidopsis thaliana
  peptide (1)..(688): Ceres Seq. ID no. 15168628
FPLRSSSRPSKSRKFPLGPPLQAFPPPPPNSDCSSTICLEPYTNTPPGSPCGCVWPIQVELRLSMALYDFFPMVSEFAREISAGVFMKQSQVRIMGANAASEQPEKSIVLIDLVPLGDKFDNMTAMLTYQRFWSKKVYIDEPIFGGYDVIYVRYPGLPASPPTSGMTIIDQGPYSGNNNGRAVKPLGVDVPRKPRKKELNGGSIAVIVLSAAAFIGLCFVIVWFLVFRRQRDRRRLSKRTPLARPSLPSLSKPSGSARSLTGSRFSSTSLSFESSIAPFTLSAKTFTASEIMKATNNFDESRVLGEGGFGRVYEGVFDDGTKVAVKVLKRDDQQGSREFLAEVEMLSRLHHRNLVNLIGICIEDRNRSLVYELIPNGSVESHLHGIDKASSPLDWDARLKIALGAARGLAYLHEDSSPRVIHRDFKSSNILLENDFTPKVSDFGLARNALDDEDNRHISTRVMGTFGYVAPEYAMTGHLLVKSDVYSYGVVLLELLTGRKPVDMSQPPGQENLVSWTRPFLTSAEGLAAIIDQSLGPEISFDSIAKVAAIASMCVQPEVSHRPFMGEVVQALKLVSNECDEAKELNSLTSISKDDFRDDTQAESSCGDSSARMARYPLLPNYDSEPDTERGLSTSEMYTGSGRFERQSNSGPLTSGRGKSFWQKMRRLSTGSLSEHGTPTVMLRSGSR

SEQ ID NO: 46037 - protein, 624 aa, Arabidopsis thaliana
  peptide (1)..(624): Ceres Seq. ID no. 15168629
MALYDFFPMVSEFAREISAGVFMKQSQVRIMGANAASEQPEKSIVLIDLVPLGDKFDNMTAMLTYQRFWSKKVYIDEPIFGGYDVIYVRYPGLPASPPTSGMTIIDQGPYSGNNNGRAVKPLGVDVPRKPRKKELNGGSIAVIVLSAAAFIGLCFVIVWFLVFRRQRDRRRLSKRTPLARPSLPSLSKPSGSARSLTGSRFSSTSLSFESSIAPFTLSAKTFTASEIMKATNNFDESRVLGEGGFGRVYEGVFDDGTKVAVKVLKRDDQQGSREFLAEVEMLSRLHHRNLVNLIGICIEDRNRSLVYELIPNGSVESHLHGIDKASSPLDWDARLKIALGAARGLAYLHEDSSPRVIHRDFKSSNILLENDFTPKVSDFGLARNALDDEDNRHISTRVMGTFGYVAPEYAMTGHLLVKSDVYSYGVVLLELLTGRKPVDMSQPPGQENLVSWTRPFLTSAEGLAAIIDQSLGPEISFDSIAKVAAIASMCVQPEVSHRPFMGEVVQALKLVSNECDEAKELNSLTSISKDDFRDDTQAESSCGDSSARMARYPLLPNYDSEPDTERGLSTSEMYTGSGRFERQSNSGPLTSGRGKSFWQKMRRLSTGSLSEHGTPTVMLRSGSR

SEQ ID NO: 46038 - protein, 616 aa, Arabidopsis thaliana
  peptide (1)..(616): Ceres Seq. ID no. 15168630
MVSEFAREISAGVFMKQSQVRIMGANAASEQPEKSIVLIDLVPLGDKFDNMTAMLTYQRFWSKKVYIDEPIFGGYDVIYVRYPGLPASPPTSGMTIIDQGPYSGNNNGRAVKPLGVDVPRKPRKKELNGGSIAVIVLSAAAFIGLCFVIVWFLVFRRQRDRRRLSKRTPLARPSLPSLSKPSGSARSLTGSRFSSTSLSFESSIAPFTLSAKTFTASEIMKATNNFDESRVLGEGGFGRVYEGVFDDGTKVAVKVLKRDDQQGSREFLAEVEMLSRLHHRNLVNLIGICIEDRNRSLVYELIPNGSVESHLHGIDKASSPLDWDARLKIALGAARGLAYLHEDSSPRVIHRDFKSSNILLENDFTPKVSDFGLARNALDDEDNRHISTRVMGTFGYVAPEYAMTGHLLVKSDVYSYGVVLLELLTGRKPVDMSQPPGQENLVSWTRPFLTSAEGLAAIIDQSLGPEISFDSIAKVAAIASMCVQPEVSHRPFMGEVVQALKLVSNECDEAKELNSLTSISKDDFRDDTQAESSCGDSSARMARYPLLPNYDSEPDTERGLSTSEMYTGSGRFERQSNSGPLTSGRGKSFWQKMRRLSTGSLSEHGTPTVMLRSGSR

SEQ ID NO: 46039 - DNA, 2074 bp, Arabidopsis thaliana
  misc_feature (1)..(2074): Ceres Seq. ID no. 13591618
  misc_feature (1)..(2074): Ortholog of  Ceres SEQ ID NO 14307728 as cited in SEQ ID NO 54710
gatttaagagctgcttgcttttatcatcatcactctctctgcgtccaaattttgatctttgttcttctcaaagcgaatatggttttcaaggtttctaccgtatccacatctcctattgatggccagaaaccaggaacttctggtcttcgtaagaaggtgaaagtgttcaagcaacccaattatctagagaattttgtccaagcaacattcaatgctcttacggcggagaaagttaaaggtgccacacttgtggtctctggtgatggtcgttattactcaaaggatgctgttcagatcataattaagatggcagcagctaatggtgtacgacgtgtgtgggttggtaaaaacactctgttatcaactcctgctgtatcagctgtgattcgtgaaagatcaggggctgatggatcgaaagcaactggagcatttatcttaacagcaagccacaatcctggtggccctactgaggattttggaatcaaatacaatatggaaaatggaggacctgctcctgaatcaatcactgataaaatttacgagaacactaagacaatcaaggagtacccaatagcacaagatctacccaatgttgatatttctgctgttggtgtaaccagttttgaaggacctgaaggaaaatttgatgttgaagtttttgatcccgcagatgactacgttaaattaatgaagtcaatcttcgattttgaagccatccggaaattgctatcatctccaaagtttacattctgctatgatgcattgcatggagttgctggagcctatgcacatcgcatctttgtcgaagaactcggtgcgcaagaaagcgcattattgaactgcactcccaaggaggactttggaggagggcatccggatcccaatttgacctatgctaaggagcttgtggcacgaatgggattaggtaaatccgacactggaggtgaacctccagagtttggcgccgctgctgatggtgatgcagaccgtaacatgatccttggtaaaaggttctttgtaactccttcggattcagttgccataattgctgcaaatgctattggtgccatcccgtacttcagctctggtttgaaaggtgttgcaaggagcatgccaacctcagctgctcttgatgtcgttgcaaaaagcttgaatttgaagttctttgaggttccaacaggctggaagttttttggtaatctgatggatgctgggatgtgttctgtttgtggagaagaaagttttggaactggctcggatcatatccgtgagaaagacggaatatgggcagttcttgcatggatgtctatacttgctcacaagaacaagggaaatattgacggtaacgctaaactggtgtcagttgaagacattgtccgccagcattgggctacctacggtcgtcactattacactcgttacgactatgagaatgtagacgcaggtaaagctaaggaactgatggagcatttggtcaaattgcaatcttcaattcctgaagttaacaagattgtgaaaggaattcgttcggacgtggcaagcgtcgccagtgctgatgaattcgagtacaaagatccagttgatggatccatttcgaagcaccagggaatccgttacttgtttgaagacggatcacgacttgttttccgtctctctggaactggctcagaaggagcaaccatccggctttacatcgaacagtacgaaaaggatgcttcaaaaaccggccgagaatcccaggaagctttgtctcctctggttgacttagctctaaagctgtcgaagatggaagagttcacaggccgatcagcccccaccgtcataacataagaagggtcaagctcaacgactcaaaccattcaccttttcgtctatatgatgttttcttcttatactatccaagttacattataagaataattagtctcagggagaatttgtatttctcatcagaattctgaacaaccaagactgatttcttgagttgttgtgaggcttatacttgtacggatttggctttctcagttttgttctctcttgtttccgtattttggcgagtatactctcttaacat

SEQ ID NO: 46040 - protein, 609 aa, Arabidopsis thaliana
  peptide (1)..(609): Ceres Seq. ID no. 13591619
DLRAACFYHHHSLCVQILIFVLLKANMVFKVSTVSTSPIDGQKPGTSGLRKKVKVFKQPNYLENFVQATFNALTAEKVKGATLVVSGDGRYYSKDAVQIIIKMAAANGVRRVWVGKNTLLSTPAVSAVIRERSGADGSKATGAFILTASHNPGGPTEDFGIKYNMENGGPAPESITDKIYENTKTIKEYPIAQDLPNVDISAVGVTSFEGPEGKFDVEVFDPADDYVKLMKSIFDFEAIRKLLSSPKFTFCYDALHGVAGAYAHRIFVEELGAQESALLNCTPKEDFGGGHPDPNLTYAKELVARMGLGKSDTGGEPPEFGAAADGDADRNMILGKRFFVTPSDSVAIIAANAIGAIPYFSSGLKGVARSMPTSAALDVVAKSLNLKFFEVPTGWKFFGNLMDAGMCSVCGEESFGTGSDHIREKDGIWAVLAWMSILAHKNKGNIDGNAKLVSVEDIVRQHWATYGRHYYTRYDYENVDAGKAKELMEHLVKLQSSIPEVNKIVKGIRSDVASVASADEFEYKDPVDGSISKHQGIRYLFEDGSRLVFRLSGTGSEGATIRLYIEQYEKDASKTGRESQEALSPLVDLALKLSKMEEFTGRSAPTVIT

SEQ ID NO: 46041 - protein, 583 aa, Arabidopsis thaliana
  peptide (1)..(583): Ceres Seq. ID no. 13591620
MVFKVSTVSTSPIDGQKPGTSGLRKKVKVFKQPNYLENFVQATFNALTAEKVKGATLVVSGDGRYYSKDAVQIIIKMAAANGVRRVWVGKNTLLSTPAVSAVIRERSGADGSKATGAFILTASHNPGGPTEDFGIKYNMENGGPAPESITDKIYENTKTIKEYPIAQDLPNVDISAVGVTSFEGPEGKFDVEVFDPADDYVKLMKSIFDFEAIRKLLSSPKFTFCYDALHGVAGAYAHRIFVEELGAQESALLNCTPKEDFGGGHPDPNLTYAKELVARMGLGKSDTGGEPPEFGAAADGDADRNMILGKRFFVTPSDSVAIIAANAIGAIPYFSSGLKGVARSMPTSAALDVVAKSLNLKFFEVPTGWKFFGNLMDAGMCSVCGEESFGTGSDHIREKDGIWAVLAWMSILAHKNKGNIDGNAKLVSVEDIVRQHWATYGRHYYTRYDYENVDAGKAKELMEHLVKLQSSIPEVNKIVKGIRSDVASVASADEFEYKDPVDGSISKHQGIRYLFEDGSRLVFRLSGTGSEGATIRLYIEQYEKDASKTGRESQEALSPLVDLALKLSKMEEFTGRSAPTVIT

SEQ ID NO: 46042 - protein, 507 aa, Arabidopsis thaliana
  peptide (1)..(507): Ceres Seq. ID no. 13591621
MAAANGVRRVWVGKNTLLSTPAVSAVIRERSGADGSKATGAFILTASHNPGGPTEDFGIKYNMENGGPAPESITDKIYENTKTIKEYPIAQDLPNVDISAVGVTSFEGPEGKFDVEVFDPADDYVKLMKSIFDFEAIRKLLSSPKFTFCYDALHGVAGAYAHRIFVEELGAQESALLNCTPKEDFGGGHPDPNLTYAKELVARMGLGKSDTGGEPPEFGAAADGDADRNMILGKRFFVTPSDSVAIIAANAIGAIPYFSSGLKGVARSMPTSAALDVVAKSLNLKFFEVPTGWKFFGNLMDAGMCSVCGEESFGTGSDHIREKDGIWAVLAWMSILAHKNKGNIDGNAKLVSVEDIVRQHWATYGRHYYTRYDYENVDAGKAKELMEHLVKLQSSIPEVNKIVKGIRSDVASVASADEFEYKDPVDGSISKHQGIRYLFEDGSRLVFRLSGTGSEGATIRLYIEQYEKDASKTGRESQEALSPLVDLALKLSKMEEFTGRSAPTVIT

SEQ ID NO: 46043 - DNA, 1776 bp, Arabidopsis thaliana; identical to SEQ ID NO: 43830
  misc_feature (1)..(1776): Ceres Seq. ID no. 13576533
  misc_feature (1)..(1776): Ortholog of  Ceres SEQ ID NO 14308370 as cited in SEQ ID NO 55399

SEQ ID NO: 46044 - protein, 485 aa, Arabidopsis thaliana; identical to SEQ ID NO: 43831
  peptide (1)..(485): Ceres Seq. ID no. 13576534

SEQ ID NO: 46045 - protein, 454 aa, Arabidopsis thaliana; identical to SEQ ID NO: 43832
  peptide (1)..(454): Ceres Seq. ID no. 13576535

SEQ ID NO: 46046 - protein, 386 aa, Arabidopsis thaliana; identical to SEQ ID NO: 43833
  peptide (1)..(386): Ceres Seq. ID no. 13576536

SEQ ID NO: 46047 - DNA, 1640 bp, Arabidopsis thaliana
  misc_feature (1)..(1640): Ceres Seq. ID no. 13575775
  misc_feature (1)..(1640): Ortholog of  Ceres SEQ ID NO 13638441 as cited in SEQ ID NO 58066
atgggttcatttgcttcttcttgcacgttatagttttcctaattgggtaagctccaaggtagcttcttcaatattaatttcatttttttcattttctgtagccatatgtttattttcccgagaaatattatccacacccagatctttaaatctcttttaactctgagtctctgatacttaaataccactcatgctgcttattagctccaccaaatctggaaaaccaatagattctttttatttcttctgcaaaaatctcagagctaccctaaaaattctctctttttgactcacttaccagatctccactagattttactcaattctttttcaaaaggtttaaacttttatagattccttgaagtgggtctaagcaatgcttcagagaaattccgatgatttcttctctaaccaaaataaaaatgaagtatcatttgatagtgatttttgtgttcttcttttgattctcttatctcttccttcccatcaataaacccaaaaaaattaatatcatttttgggatcttattgatcccaaaattcgtaaatccgttgacctttgtcggcatgatttgttcttacttaccgtaaaaaaaacagagctaggttttagttttcggacatggaggttatgagaccgtcgacgtcacacgtgtcaggtgggaactggctcatggaggaaactaagagcggcgtcgcagcttctggtgaaggtgccacgtggacggcggcagagaacaaggcattcgagaatgctttggcggtttacgacgacaacactcctgatcggtggcagaaggtggctgcggtgattccggggaagacagtgagtgacgtaattagacagtataacgatttggaagctgatgtcagcagcatcgaggccggtttaatcccggtccccggttacatcacctcgccgcctttcactctagattgggccggcggcggtggcggatgtaacgggtttaaaccgggtcatcaggtttgtaataaacggtcgcaggccggtagatcgccggagctggagcggaagaaaggcgttccttggacggaggaagaacacaagctatttctaatgggtttgaagaaatatgggaaaggagattggagaaacatatctcggaactttgtgataacgcgaacgccaacacaagtagctagccacgcccaaaagtacttcatccggcaactttccggcggcaaggacaagagacgagcaagcattcacgacataaccaccgtaaatctcgaagaggaggcttctttggagaccaataagagctccattgttgttggagatcagcgttcaaggctaaccgcgtttccttggaaccaaacggacaacaatggaacacaggcagacgctttcaatataacgattggaaacgctattagtggcgttcattcatacggccaggttatgattggagggtataacaatgcagattcttgctatgacgcccaaaacacaatgtttcaactatagctaatgaagatccatctctctaattaaaaagtgtaagttaaattcttaatttttcatatggacgaaacaatcatatttggcaattgtataataaacgtccattgttttaattccaaattgaaatagttaataaaagtctcttgacagtgcct

SEQ ID NO: 46048 - protein, 288 aa, Arabidopsis thaliana
  peptide (1)..(288): Ceres Seq. ID no. 13575776
MEVMRPSTSHVSGGNWLMEETKSGVAASGEGATWTAAENKAFENALAVYDDNTPDRWQKVAAVIPGKTVSDVIRQYNDLEADVSSIEAGLIPVPGYITSPPFTLDWAGGGGGCNGFKPGHQVCNKRSQAGRSPELERKKGVPWTEEEHKLFLMGLKKYGKGDWRNISRNFVITRTPTQVASHAQKYFIRQLSGGKDKRRASIHDITTVNLEEEASLETNKSSIVVGDQRSRLTAFPWNQTDNNGTQADAFNITIGNAISGVHSYGQVMIGGYNNADSCYDAQNTMFQL

SEQ ID NO: 46049 - protein, 285 aa, Arabidopsis thaliana
  peptide (1)..(285): Ceres Seq. ID no. 13575777
MRPSTSHVSGGNWLMEETKSGVAASGEGATWTAAENKAFENALAVYDDNTPDRWQKVAAVIPGKTVSDVIRQYNDLEADVSSIEAGLIPVPGYITSPPFTLDWAGGGGGCNGFKPGHQVCNKRSQAGRSPELERKKGVPWTEEEHKLFLMGLKKYGKGDWRNISRNFVITRTPTQVASHAQKYFIRQLSGGKDKRRASIHDITTVNLEEEASLETNKSSIVVGDQRSRLTAFPWNQTDNNGTQADAFNITIGNAISGVHSYGQVMIGGYNNADSCYDAQNTMFQL

SEQ ID NO: 46050 - protein, 271 aa, Arabidopsis thaliana
  peptide (1)..(271): Ceres Seq. ID no. 13575778
MEETKSGVAASGEGATWTAAENKAFENALAVYDDNTPDRWQKVAAVIPGKTVSDVIRQYNDLEADVSSIEAGLIPVPGYITSPPFTLDWAGGGGGCNGFKPGHQVCNKRSQAGRSPELERKKGVPWTEEEHKLFLMGLKKYGKGDWRNISRNFVITRTPTQVASHAQKYFIRQLSGGKDKRRASIHDITTVNLEEEASLETNKSSIVVGDQRSRLTAFPWNQTDNNGTQADAFNITIGNAISGVHSYGQVMIGGYNNADSCYDAQNTMFQL

SEQ ID NO: 46051 - DNA, 2739 bp, Arabidopsis thaliana
  misc_feature (1)..(2739): Ceres Seq. ID no. 13591630
  misc_feature (1)..(2739): Ortholog of  Ceres SEQ ID NO 15172609 as cited in SEQ ID NO 61938
  misc_feature (1)..(2739): Ortholog of  Ceres SEQ ID NO 13595870 as cited in SEQ ID NO 62101
  misc_feature (1)..(2739): Ortholog of  Ceres SEQ ID NO 13590241 as cited in SEQ ID NO 63878
  misc_feature (1)..(2739): Ortholog of  Ceres SEQ ID NO 13657939 as cited in SEQ ID NO 66349
  misc_feature (1)..(2739): Ortholog of  Ceres SEQ ID NO 13660597 as cited in SEQ ID NO 67655
  misc_feature (1)..(2739): Ortholog of  Ceres SEQ ID NO 13654484 as cited in SEQ ID NO 67717
agagatataattagagaaaatctgtgctctttcagatcccattatcacaaatccatctctctctctctctcagagaagaaaccaaagaagaagaaaaagctctcaactttcttcgatttctcagggaactctttcgttaatctcaaactcaatcatgtctaccccagctgaatcttcagactcgaaatcgaagaaagatttcagtactgctattctcgagaggaagaagtctccgaaccgtctcgtcgtcgatgaggctatcaacgatgataactccgtcgtctctcttcaccctgcaaccatggagaagcttcagctcttccgtggtgataccattctcatcaagggtaagaagaggaaggacactgtctgcattgctcttgctgatgagacatgtgaggagccaaagatcagaatgaataaagtagtcagatctaacttgagggttagactgggagatgttatatctgttcaccaatgcccagacgtcaagtacggaaagcgtgttcacatcctgcctgttgatgatactgttgaaggagtgactggaaacctatttgatgcttacctgaaaccttatttccttgaggcataccgtccagtgaggaagggtgatctcttcctagtcagaggaggaatgaggagtgtggagttcaaagttatagagacagatcctgctgagtactgcgtggttgctccagacacagagattttctgtgagggtgagcctgtgaagagagaggatgaagaaaggctagatgatgtaggttatgatgatgttggtggtgtcaggaaacagatggctcagattagggaacttgttgaacttcccttgaggcatccacagctattcaagtcgattggtgttaagccaccgaagggaattcttctttatggaccacctgggtctggaaagactttgatcgctcgtgctgtggctaatgaaacgggtgcctttttcttctgtatcaacggacctgagatcatgtccaaattggctggtgagagtgagagcaacctcaggaaagcattcgaggaggctgagaaaaatgcgccttcaatcatattcattgatgagatcgactctattgcaccgaaaagagagaagactaatggagaggttgagaggaggattgtctctcagctccttacgctaatggatggactgaaatctcgtgctcatgttatcgtcatgggagcaaccaatcgccccaacagtatcgacccagctttgagaaggtttggaagatttgacagggagatcgatattggagttcctgacgaaattggacgtcttgaagttctgaggatccatacaaagaacatgaagctggctgaagatgtggatctcgaaaggatctcaaaggacacacacggttacgtcggtgctgatcttgcagctttgtgcacagaggccgccctgcaatgcatcagggagaagatggatgtgattgatctggaagatgactccatagacgctgaaatcctcaattccatggcagtcactaatgaacatttccacactgctctcgggaacagcaacccatctgcacttcgtgaaactgttgtggaggttcccaacgtctcttggaatgatattggaggtcttgagaatgtcaagagagagctccaggagactgttcaatacccagtcgagcacccagagaagtttgagaaattcgggatgtctccatcaaagggagtccttttctacggtcctcctggatgtgggaaaacccttttggccaaagctattgccaacgagtgccaagctaatttcatcagtgtcaagggtcccgagcttctgacaatgtggtttggagagagtgaagcaaatgttcgtgaaatcttcgacaaggcccgtcaatccgctccatgtgttcttttctttgatgagctcgactccattgcaactcagagaggaggtggaagtggtggcgatggaggtggtgctgcggacagagtcttgaaccagcttttgactgagatggacggaatgaatgccaagaaaaccgtcttcatcatcggagctaccaacagacctgacattatcgattcagctcttctccgtcctggaaggcttgaccagctcatttacattccactaccagatgaggattcccgtctcaatatcttcaaggccgccttgaggaaatctcctattgctaaagatgtagacatcggtgcacttgctaaatacactcagggtttcagtggtgctgatatcactgagatttgccagagagcttgcaagtacgccatcagagaaaacattgagaaggacattgaaaaggagaagaggaggagcgagaacccagaggcaatggaggaagatggagtggatgaagtatcagagatcaaagctgcacactttgaggagtcgatgaagtatgcgcgtaggagtgtgagtgatgcagacatcaggaagtaccaagcctttgctcagacgttgcagcagtctagagggttcggttctgagttcaggttcgagaattctgctggttcaggtgccaccactggagtcgcagatccgtttgccacgtctgcagccgctgctggggacgatgatgatctctacaattagtgataacttctttatcctttttttttttaagttttaaaactcgaattctctacttttggattactggggaaagtgatactgattctttcctcgtgtttttaagttatccgaatctcttgtgtttgggttttaatcaatgttcttaattttcgttt

SEQ ID NO: 46052 - protein, 809 aa, Arabidopsis thaliana
  peptide (1)..(809): Ceres Seq. ID no. 13591631
MSTPAESSDSKSKKDFSTAILERKKSPNRLVVDEAINDDNSVVSLHPATMEKLQLFRGDTILIKGKKRKDTVCIALADETCEEPKIRMNKVVRSNLRVRLGDVISVHQCPDVKYGKRVHILPVDDTVEGVTGNLFDAYLKPYFLEAYRPVRKGDLFLVRGGMRSVEFKVIETDPAEYCVVAPDTEIFCEGEPVKREDEERLDDVGYDDVGGVRKQMAQIRELVELPLRHPQLFKSIGVKPPKGILLYGPPGSGKTLIARAVANETGAFFFCINGPEIMSKLAGESESNLRKAFEEAEKNAPSIIFIDEIDSIAPKREKTNGEVERRIVSQLLTLMDGLKSRAHVIVMGATNRPNSIDPALRRFGRFDREIDIGVPDEIGRLEVLRIHTKNMKLAEDVDLERISKDTHGYVGADLAALCTEAALQCIREKMDVIDLEDDSIDAEILNSMAVTNEHFHTALGNSNPSALRETVVEVPNVSWNDIGGLENVKRELQETVQYPVEHPEKFEKFGMSPSKGVLFYGPPGCGKTLLAKAIANECQANFISVKGPELLTMWFGESEANVREIFDKARQSAPCVLFFDELDSIATQRGGGSGGDGGGAADRVLNQLLTEMDGMNAKKTVFIIGATNRPDIIDSALLRPGRLDQLIYIPLPDEDSRLNIFKAALRKSPIAKDVDIGALAKYTQGFSGADITEICQRACKYAIRENIEKDIEKEKRRSENPEAMEEDGVDEVSEIKAAHFEESMKYARRSVSDADIRKYQAFAQTLQQSRGFGSEFRFENSAGSGATTGVADPFATSAAAAGDDDDLYN

SEQ ID NO: 46053 - protein, 760 aa, Arabidopsis thaliana
  peptide (1)..(760): Ceres Seq. ID no. 13591632
MEKLQLFRGDTILIKGKKRKDTVCIALADETCEEPKIRMNKVVRSNLRVRLGDVISVHQCPDVKYGKRVHILPVDDTVEGVTGNLFDAYLKPYFLEAYRPVRKGDLFLVRGGMRSVEFKVIETDPAEYCVVAPDTEIFCEGEPVKREDEERLDDVGYDDVGGVRKQMAQIRELVELPLRHPQLFKSIGVKPPKGILLYGPPGSGKTLIARAVANETGAFFFCINGPEIMSKLAGESESNLRKAFEEAEKNAPSIIFIDEIDSIAPKREKTNGEVERRIVSQLLTLMDGLKSRAHVIVMGATNRPNSIDPALRRFGRFDREIDIGVPDEIGRLEVLRIHTKNMKLAEDVDLERISKDTHGYVGADLAALCTEAALQCIREKMDVIDLEDDSIDAEILNSMAVTNEHFHTALGNSNPSALRETVVEVPNVSWNDIGGLENVKRELQETVQYPVEHPEKFEKFGMSPSKGVLFYGPPGCGKTLLAKAIANECQANFISVKGPELLTMWFGESEANVREIFDKARQSAPCVLFFDELDSIATQRGGGSGGDGGGAADRVLNQLLTEMDGMNAKKTVFIIGATNRPDIIDSALLRPGRLDQLIYIPLPDEDSRLNIFKAALRKSPIAKDVDIGALAKYTQGFSGADITEICQRACKYAIRENIEKDIEKEKRRSENPEAMEEDGVDEVSEIKAAHFEESMKYARRSVSDADIRKYQAFAQTLQQSRGFGSEFRFENSAGSGATTGVADPFATSAAAAGDDDDLYN

SEQ ID NO: 46054 - protein, 722 aa, Arabidopsis thaliana
  peptide (1)..(722): Ceres Seq. ID no. 13591633
MNKVVRSNLRVRLGDVISVHQCPDVKYGKRVHILPVDDTVEGVTGNLFDAYLKPYFLEAYRPVRKGDLFLVRGGMRSVEFKVIETDPAEYCVVAPDTEIFCEGEPVKREDEERLDDVGYDDVGGVRKQMAQIRELVELPLRHPQLFKSIGVKPPKGILLYGPPGSGKTLIARAVANETGAFFFCINGPEIMSKLAGESESNLRKAFEEAEKNAPSIIFIDEIDSIAPKREKTNGEVERRIVSQLLTLMDGLKSRAHVIVMGATNRPNSIDPALRRFGRFDREIDIGVPDEIGRLEVLRIHTKNMKLAEDVDLERISKDTHGYVGADLAALCTEAALQCIREKMDVIDLEDDSIDAEILNSMAVTNEHFHTALGNSNPSALRETVVEVPNVSWNDIGGLENVKRELQETVQYPVEHPEKFEKFGMSPSKGVLFYGPPGCGKTLLAKAIANECQANFISVKGPELLTMWFGESEANVREIFDKARQSAPCVLFFDELDSIATQRGGGSGGDGGGAADRVLNQLLTEMDGMNAKKTVFIIGATNRPDIIDSALLRPGRLDQLIYIPLPDEDSRLNIFKAALRKSPIAKDVDIGALAKYTQGFSGADITEICQRACKYAIRENIEKDIEKEKRRSENPEAMEEDGVDEVSEIKAAHFEESMKYARRSVSDADIRKYQAFAQTLQQSRGFGSEFRFENSAGSGATTGVADPFATSAAAAGDDDDLYN

SEQ ID NO: 46055 - DNA, 1167 bp, Arabidopsis thaliana
  misc_feature (1)..(1167): Ceres Seq. ID no. 15172395
  misc_feature (1)..(1167): Ortholog of  Ceres SEQ ID NO 13594604 as cited in SEQ ID NO 52106
gtttttctgaagatccaaggcacacaaaaaaacagctttttttgtttcttcaatcaaggattttccagggttttgataaccccatgggttcagggttctctctgtttcaaaagaatctatcgtcttgttatggagatcgagatctgttgcagcctggtttaggagatttgcctgaaagttgtgtggctttgattctccagaatttggatcccgttgagatctgtagattctccaagctaaacacggcttttcatggcgcttcttgggctgatttcgtttgggaatcgaaacttcctccagattataaattgattctcgagaaaatccttggtagtttccctgataatttgcgtaaaagagacatctttacttttctctctcgagttaattccttcgacgagggcaacaagaaagcttgggtagataaacgaacaggtgggctctgtttatgcacatcagccaagggcttatccataaccggaattgatgatcggagatactggagtcatattccgtctgatgattctcgattttcttcagtagcttatgttcaacagatctggtagtttcaagttgatggagaaattgatttcccatttcccgctggaacctacagtgtttacttcaggcttcagctaggcaaaccaggcaagcggtttggttggaaggttgttgacaccgaacaggttcatggctggaacattaaacctgtgcggtttcaactctcgactgaagatggtcaacattcttcatctcaatgcatgttaaccgaagcaggaaactggagtcattaccatgctggagactttgtggtcggtaaatcgaaaagttcatcgacgaagattaagttctcgatgactcagattgattgcacgcatactaaaggcgggctatgtgtagattctgtagttgtgtatccgagctcgtgtaaggaccggttgatgcagatttaagttgcaaaccggagtttgggtgtagtttagaggtttaaaaaagctgtttttttttttaagtggttttaaaaccttttgtagaatctttgagggggtaattagaaaactcagtgtaaagagaaaaagagggtaattactaattagggttgttgttttattgtttaggtcaaatgtaaactttaagtttgaagttattaaagagttcttgagttac

SEQ ID NO: 46056 - protein, 187 aa, Arabidopsis thaliana
  peptide (1)..(187): Ceres Seq. ID no. 15172396
FSEDPRHTKKQLFLFLQSRIFQGFDNPMGSGFSLFQKNLSSCYGDRDLLQPGLGDLPESCVALILQNLDPVEICRFSKLNTAFHGASWADFVWESKLPPDYKLILEKILGSFPDNLRKRDIFTFLSRVNSFDEGNKKAWVDKRTGGLCLCTSAKGLSITGIDDRRYWSHIPSDDSRFSSVAYVQQIW

SEQ ID NO: 46057 - protein, 160 aa, Arabidopsis thaliana
  peptide (1)..(160): Ceres Seq. ID no. 15172397
MGSGFSLFQKNLSSCYGDRDLLQPGLGDLPESCVALILQNLDPVEICRFSKLNTAFHGASWADFVWESKLPPDYKLILEKILGSFPDNLRKRDIFTFLSRVNSFDEGNKKAWVDKRTGGLCLCTSAKGLSITGIDDRRYWSHIPSDDSRFSSVAYVQQIW

SEQ ID NO: 46058 - DNA, 2941 bp, Arabidopsis thaliana; identical to SEQ ID NO: 45965
  misc_feature (1)..(2941): Ceres Seq. ID no. 12600180
  misc_feature (1)..(2941): Ortholog of  Ceres SEQ ID NO 12465083 as cited in SEQ ID NO 68239

SEQ ID NO: 46059 - protein, 736 aa, Arabidopsis thaliana; identical to SEQ ID NO: 45966
  peptide (1)..(736): Ceres Seq. ID no. 12600181

SEQ ID NO: 46060 - protein, 680 aa, Arabidopsis thaliana; identical to SEQ ID NO: 45967
  peptide (1)..(680): Ceres Seq. ID no. 12600182

SEQ ID NO: 46061 - protein, 679 aa, Arabidopsis thaliana; identical to SEQ ID NO: 45968
  peptide (1)..(679): Ceres Seq. ID no. 12600183

SEQ ID NO: 46062 - DNA, 1005 bp, Arabidopsis thaliana; identical to SEQ ID NO: 35525
  misc_feature (1)..(1005): Ceres Seq. ID no. 12562843
  misc_feature (1)..(1005): Ortholog of  Ceres SEQ ID NO 13595072 as cited in SEQ ID NO 55971

SEQ ID NO: 46063 - protein, 171 aa, Arabidopsis thaliana; identical to SEQ ID NO: 35526
  peptide (1)..(171): Ceres Seq. ID no. 12562844

SEQ ID NO: 46064 - protein, 166 aa, Arabidopsis thaliana; identical to SEQ ID NO: 35527
  peptide (1)..(166): Ceres Seq. ID no. 12562845

SEQ ID NO: 46065 - protein, 137 aa, Arabidopsis thaliana; identical to SEQ ID NO: 35528
  peptide (1)..(137): Ceres Seq. ID no. 12562846

SEQ ID NO: 46066 - DNA, 1111 bp, Arabidopsis thaliana; identical to SEQ ID NO: 41575
  misc_feature (1)..(1111): Ceres Seq. ID no. 13591787
  misc_feature (1)..(1111): Ortholog of  Ceres SEQ ID NO 14305682 as cited in SEQ ID NO 59267
  misc_feature (1)..(1111): Ortholog of  Ceres SEQ ID NO 14315060 as cited in SEQ ID NO 60039
  misc_feature (1)..(1111): Ortholog of  Ceres SEQ ID NO 13594430 as cited in SEQ ID NO 60181
  misc_feature (1)..(1111): Ortholog of  Ceres SEQ ID NO 13597809 as cited in SEQ ID NO 64598
  misc_feature (1)..(1111): Ortholog of  Ceres SEQ ID NO 14313544 as cited in SEQ ID NO 68424
  misc_feature (1)..(1111): Ortholog of  Ceres SEQ ID NO 12617960 as cited in SEQ ID NO 69051
  misc_feature (1)..(1111): Ortholog of  Ceres SEQ ID NO 13589401 as cited in SEQ ID NO 0

SEQ ID NO: 46067 - protein, 255 aa, Arabidopsis thaliana; identical to SEQ ID NO: 41576
  peptide (1)..(255): Ceres Seq. ID no. 13591788

SEQ ID NO: 46068 - protein, 240 aa, Arabidopsis thaliana; identical to SEQ ID NO: 41577
  peptide (1)..(240): Ceres Seq. ID no. 13591789

SEQ ID NO: 46069 - protein, 204 aa, Arabidopsis thaliana; identical to SEQ ID NO: 41578
  peptide (1)..(204): Ceres Seq. ID no. 13591790

SEQ ID NO: 46070 - DNA, 2250 bp, Arabidopsis thaliana
  misc_feature (1)..(2250): Ceres Seq. ID no. 12576055
  misc_feature (1)..(2250): Ortholog of  Ceres SEQ ID NO 15177692 as cited in SEQ ID NO 52664
  misc_feature (1)..(2250): Ortholog of  Ceres SEQ ID NO 14303959 as cited in SEQ ID NO 53709
gttggctgtgactggatcctccccctttcttccgggttcttgtcgtgcgtatccggcgaaatgagaagtgtgtagagcaaacagaggtgaagctgagaagttgatcactcactcaatctaagagtgcatgtaattgaagcagcaaccatttctacttttcgaatcttctctgcttcaatccacacccaagggtttcaaggaatatgggtctttcccgttagctaaagataattaattttgtgtccgatggcgtccactcgtaaacccagtggtcatggagctgaagtcgaagctcagaagcgctcctcttcgaatagtagtactaagtcagccaaagccgagacttttgagccgatgcaattacaaagatcagtaacaaacccaagagctgttggaattccggagagtaaacggttgccagagtcttttaggaagcgatctagcgacccggctgtttgtaaacccgatttcagctccctatccactgttcttgagcatgtagattcattgaccattgatgaaaagaaaacatctggctttggcagcgtcaagaccagctctgcttcagccaaattgagtgatggtacgagcagtcttggcaagactagtggaagtgccaagctaagtggccgccttgatttcatggagagtggcaagagcagtatctgcagaggaagcacaagcagtgatgtgagtgacgagagtagctgcagcagctttagtagcactgtcaacaaaccccacaaggccaatgacttaagatgggaagcaatccaggctgttagggttcgtgatgggcttttaggtcttagtcatttcaggctccttaagcggttaggctgcggggacatcgggagtgtttatctctctgagctgagcgggactaagtgttactttgctatgaaggttatggacaagacatcccttgccagtcgcaagaagcttctccgagctcagactgaaagagagattctccagtctttggatcatccatttctccctaccctctacactcactttgagactgagaaattctcatgcctggtgatggaattctgtcccggaggagatttgcatactctcaggcaacgccagccggggaaacatttttctgagcaagcggtaaaattttacatagcagagtcattgttagctttggaatacctgcacatgcttgggattgtgtatcgagatcttaagcctgaaaacgttctagttcgagaagacggacatataatgctctctgattttgacctttctctccgatgtcttgtcagcccgactctagtgaaatctgccgccatcgagtcagatcctttacggaaaaacgtttactgtgtgcagcccgcttgcattgagccctcctgcattcaaccgtcttgcaccgtccccaccacttgcttctccccacgtttgttctcaagcaaatctaagaaggaccgtaaacccaagaatgacaccgcaaatcaagttaggccattgccagagctggtagccgagccaaccgatgcacgttccatgtcatttgtgggcacacacgagtacttggccccagagatcatcaaaggcgaagggcatggcagtgcagtggattggtggacttttgggatattcctttacgagcttctctttgggagaacgcccttcaagggctcaggaaaccgacaaacactgttcaatgtggtgggtcagcctctgcggttcccagaaacgcctgtggtgagttttgcagcgagagacctcatccggggcttgctcatgaaggagccgcagcagcggctggggttcaaacggggagccactgaggttaagcagcaccctttcttcgaaggtgtgaactgggctttgattcggtgtgcgactcccccggaaataccaaagccggttgagctggaaaaaggagctgtgagtgttgcagaggcaccatcaagccagaagacagcagcgggtttggttctgaatgctcagaaagggtctgataactatttggaatttgatttcttctagcgttacggttagacatatggtactctattcttccttagaagactatgtgataaaagatgatcaggtgttgatgtttcgctctttatagattgccatgaattgtaagcttgtttgtatgcataagctgctgtagtttataaaaatgttgtaactgtttctcgtaaccttattagttgttatcagagttcctttttactcgctctatccaaacacaaaacattacatcaaatgtattgtctctgc

SEQ ID NO: 46071 - protein, 586 aa, Arabidopsis thaliana
  peptide (1)..(586): Ceres Seq. ID no. 12576056
MASTRKPSGHGAEVEAQKRSSSNSSTKSAKAETFEPMQLQRSVTNPRAVGIPESKRLPESFRKRSSDPAVCKPDFSSLSTVLEHVDSLTIDEKKTSGFGSVKTSSASAKLSDGTSSLGKTSGSAKLSGRLDFMESGKSSICRGSTSSDVSDESSCSSFSSTVNKPHKANDLRWEAIQAVRVRDGLLGLSHFRLLKRLGCGDIGSVYLSELSGTKCYFAMKVMDKTSLASRKKLLRAQTEREILQSLDHPFLPTLYTHFETEKFSCLVMEFCPGGDLHTLRQRQPGKHFSEQAVKFYIAESLLALEYLHMLGIVYRDLKPENVLVREDGHIMLSDFDLSLRCLVSPTLVKSAAIESDPLRKNVYCVQPACIEPSCIQPSCTVPTTCFSPRLFSSKSKKDRKPKNDTANQVRPLPELVAEPTDARSMSFVGTHEYLAPEIIKGEGHGSAVDWWTFGIFLYELLFGRTPFKGSGNRQTLFNVVGQPLRFPETPVVSFAARDLIRGLLMKEPQQRLGFKRGATEVKQHPFFEGVNWALIRCATPPEIPKPVELEKGAVSVAEAPSSQKTAAGLVLNAQKGSDNYLEFDFF

SEQ ID NO: 46072 - protein, 550 aa, Arabidopsis thaliana
  peptide (1)..(550): Ceres Seq. ID no. 12576057
MQLQRSVTNPRAVGIPESKRLPESFRKRSSDPAVCKPDFSSLSTVLEHVDSLTIDEKKTSGFGSVKTSSASAKLSDGTSSLGKTSGSAKLSGRLDFMESGKSSICRGSTSSDVSDESSCSSFSSTVNKPHKANDLRWEAIQAVRVRDGLLGLSHFRLLKRLGCGDIGSVYLSELSGTKCYFAMKVMDKTSLASRKKLLRAQTEREILQSLDHPFLPTLYTHFETEKFSCLVMEFCPGGDLHTLRQRQPGKHFSEQAVKFYIAESLLALEYLHMLGIVYRDLKPENVLVREDGHIMLSDFDLSLRCLVSPTLVKSAAIESDPLRKNVYCVQPACIEPSCIQPSCTVPTTCFSPRLFSSKSKKDRKPKNDTANQVRPLPELVAEPTDARSMSFVGTHEYLAPEIIKGEGHGSAVDWWTFGIFLYELLFGRTPFKGSGNRQTLFNVVGQPLRFPETPVVSFAARDLIRGLLMKEPQQRLGFKRGATEVKQHPFFEGVNWALIRCATPPEIPKPVELEKGAVSVAEAPSSQKTAAGLVLNAQKGSDNYLEFDFF

SEQ ID NO: 46073 - protein, 454 aa, Arabidopsis thaliana
  peptide (1)..(454): Ceres Seq. ID no. 12576058
MESGKSSICRGSTSSDVSDESSCSSFSSTVNKPHKANDLRWEAIQAVRVRDGLLGLSHFRLLKRLGCGDIGSVYLSELSGTKCYFAMKVMDKTSLASRKKLLRAQTEREILQSLDHPFLPTLYTHFETEKFSCLVMEFCPGGDLHTLRQRQPGKHFSEQAVKFYIAESLLALEYLHMLGIVYRDLKPENVLVREDGHIMLSDFDLSLRCLVSPTLVKSAAIESDPLRKNVYCVQPACIEPSCIQPSCTVPTTCFSPRLFSSKSKKDRKPKNDTANQVRPLPELVAEPTDARSMSFVGTHEYLAPEIIKGEGHGSAVDWWTFGIFLYELLFGRTPFKGSGNRQTLFNVVGQPLRFPETPVVSFAARDLIRGLLMKEPQQRLGFKRGATEVKQHPFFEGVNWALIRCATPPEIPKPVELEKGAVSVAEAPSSQKTAAGLVLNAQKGSDNYLEFDFF

SEQ ID NO: 46074 - DNA, 1822 bp, Arabidopsis thaliana
  misc_feature (1)..(1822): Ceres Seq. ID no. 12574917
  misc_feature (1)..(1822): Ortholog of  Ceres SEQ ID NO 13593968 as cited in SEQ ID NO 54626
aaaaaaaggaccagctcagatgagtctggagtttccaagtttaaaacctctctacctcgatttgagcaaatcctgatttactctcatcctcatcatctctcatcatcgagattcatagtctcttttgccgcttggattcttccaaggttagtgagctgctatggcaactcatcagcaaacgcaacctccttccgattttcccgctcttgccgatgaaaattcccagattccagaggctactaagcctgctaatgaggttcagcaagctaccatagctcaggatcctccaacatctgtgtttaagaattctgaaccaatacgggaggatcaaattcagaacgctatcaaattcctttcgcacccgagggttagaggctctcctgttatacatagaagatcttttcttgagaggaaaggtctcactaaagaagagattgacgaagctttccgccgtgttcctgatccaccaccaagttcgcagacaactgttacaacaagtcaagatggacagcaagcagtgtcaactgttcagccacaagctatgcagcctgtagtagctgctcctgctccactcattgtgactccacaggcagcttttctctctcggtttcgctggtaccatgctattcttgctgttggagtacttgcagcctctggtgccggtacagctgtttttattaagagatctctcatacccagatttaaatcctgggtccaaagaattatgttggaagaagaaactgaccctctgaagaaagctgatgctaaacctagcttagctgaagaagctgtagctgcagccaaagctgcttctgcggctgcttctgatgtagccagggttagtcaggaaatgatgataacaaagaatgaagagaggaaatattttgaggacttaacgcacctgttaggtgtccaagtacaagaaatgaagtccttgagcaataatatccgtaagcttgaagggcaatccaacaacatcccaaagatttattcagctgatcaagaggtttataatggttcggtcactacagcaaggaaaccctatacaaatggcagcaatgttgattatgacacacgttcagcacgatctgcatctcctcctgcggcaccagctgattcgtcggcgccccctcatccaaagtcatacatggatataatgtctatgatccagagaggagagaagccttcaaacattcgggagattaacgacatgccgcccaatccaaaccaaccactatcagatccacgcattgctcccaaatcaaagccatgggactatggtcaagcgccgcaagacgagagttccaatggtcaatggtggcaacagaaaaaccctagatccacggatttcggatacgagacaacaacagcggcgcgtttcactgctaaccaaaatgaaacaagtacaatggaaccagcagctttccagaggcaacgatcatgggtacctccacaaccacctccagttgccatggcagaagcagtcgaggccattcgccgtcctaagccacaagctaagatagaccaagaagcagctgctagtgatggccagtcaggtgtgagcgatgagttacagaagatcactaaattctccgaatctggtggtgatgggtcaggaggaattaagatcgcagagatacaagaagaaacagaacagcaacatatcagccaggaagggaactaaaaacaataataattaggggttattgatactttatgaggtttgcctgtaagaaaacatgcatttaggtcttgggatttatcaccacctaccttcatttaataaaatatgtcttgctacacaagtaaactcagtcatttg

SEQ ID NO: 46075 - protein, 507 aa, Arabidopsis thaliana
  peptide (1)..(507): Ceres Seq. ID no. 12574918
MATHQQTQPPSDFPALADENSQIPEATKPANEVQQATIAQDPPTSVFKNSEPIREDQIQNAIKFLSHPRVRGSPVIHRRSFLERKGLTKEEIDEAFRRVPDPPPSSQTTVTTSQDGQQAVSTVQPQAMQPVVAAPAPLIVTPQAAFLSRFRWYHAILAVGVLAASGAGTAVFIKRSLIPRFKSWVQRIMLEEETDPLKKADAKPSLAEEAVAAAKAASAAASDVARVSQEMMITKNEERKYFEDLTHLLGVQVQEMKSLSNNIRKLEGQSNNIPKIYSADQEVYNGSVTTARKPYTNGSNVDYDTRSARSASPPAAPADSSAPPHPKSYMDIMSMIQRGEKPSNIREINDMPPNPNQPLSDPRIAPKSKPWDYGQAPQDESSNGQWWQQKNPRSTDFGYETTTAARFTANQNETSTMEPAAFQRQRSWVPPQPPPVAMAEAVEAIRRPKPQAKIDQEAAASDGQSGVSDELQKITKFSESGGDGSGGIKIAEIQEETEQQHISQEGN

SEQ ID NO: 46076 - protein, 380 aa, Arabidopsis thaliana
  peptide (1)..(380): Ceres Seq. ID no. 12574919
MQPVVAAPAPLIVTPQAAFLSRFRWYHAILAVGVLAASGAGTAVFIKRSLIPRFKSWVQRIMLEEETDPLKKADAKPSLAEEAVAAAKAASAAASDVARVSQEMMITKNEERKYFEDLTHLLGVQVQEMKSLSNNIRKLEGQSNNIPKIYSADQEVYNGSVTTARKPYTNGSNVDYDTRSARSASPPAAPADSSAPPHPKSYMDIMSMIQRGEKPSNIREINDMPPNPNQPLSDPRIAPKSKPWDYGQAPQDESSNGQWWQQKNPRSTDFGYETTTAARFTANQNETSTMEPAAFQRQRSWVPPQPPPVAMAEAVEAIRRPKPQAKIDQEAAASDGQSGVSDELQKITKFSESGGDGSGGIKIAEIQEETEQQHISQEGN

SEQ ID NO: 46077 - protein, 319 aa, Arabidopsis thaliana
  peptide (1)..(319): Ceres Seq. ID no. 12574920
MLEEETDPLKKADAKPSLAEEAVAAAKAASAAASDVARVSQEMMITKNEERKYFEDLTHLLGVQVQEMKSLSNNIRKLEGQSNNIPKIYSADQEVYNGSVTTARKPYTNGSNVDYDTRSARSASPPAAPADSSAPPHPKSYMDIMSMIQRGEKPSNIREINDMPPNPNQPLSDPRIAPKSKPWDYGQAPQDESSNGQWWQQKNPRSTDFGYETTTAARFTANQNETSTMEPAAFQRQRSWVPPQPPPVAMAEAVEAIRRPKPQAKIDQEAAASDGQSGVSDELQKITKFSESGGDGSGGIKIAEIQEETEQQHISQEGN

SEQ ID NO: 46078 - DNA, 1262 bp, Arabidopsis thaliana
  misc_feature (1)..(1262): Ceres Seq. ID no. 13578513
  misc_feature (1)..(1262): Ortholog of  Ceres SEQ ID NO 14307041 as cited in SEQ ID NO 54672
gatcccacctctcttgtctctctatctctctctctccgcgcttgaggttggcgtcggagattaccaacaagagctctctccaatcgtcgtctctttgatatatggcgtctcagcctgcaggtggcagtcctcctaaaccttgggaaaaagaaggaaatacatctggtcctaatcctttcaggcctccttctaatactagcacggctggttcagttgaggcttctggcacagctaatcctggtgaagtagttcctccgcccgtgaacaggcctaatacagctgctaatatgaattcactcagtaggcctgtaccggctagaccttgggaacagcagaattatgggagcactatggggggaggttatggttcaaatctaggtatgacctctgggtatgggtcaggtacatatggttcagcattaggtgggtatggttcatcatatggtggtgggatgtatggaggtagtagcatgtatagaggaggttatggtggtggtgggctctatggaagttcaggcatgtatggtggtggtgcgatgggtggttatggtggcacgatgggtggttatggtatgggtatgggaacgggaatgggaatggggatgggaatgggaatgggtggtccttatggtagtcaagatccaaatgacccttttaatcaacctccatctccaccaggcttctggatatcatttctccgtgtgatgcaaggtgctgtgaatttctttggccgtgtagcgatgcttatagatcaaaacacacaggcctttcacatgttcatgtctgcccttcttcagctatttgatcgtggtggtatgttatatggagaattagcaagatttgtactgcgtatgcttggggtgagaacaaggcctagaaagatgcagcagccaccacaagggcctaatgggctacctttaccacaccagccacatggaaaccagaactacctcgaggggcctaaaactgctgcaccaggtggtggcggtggttgggacaatgtatggggcaactaagttacttctttcattacccaaatccttcaacattgctttaaaacaccatgacaaccagttggttaccgatagaagataaaccgtgtagcagcctgcaacacagattgggatgtacgaaaaccagatgtttgtttgcaaattgagtctcttcttctcttctctctatctctcagtattctctgattgtgtggtaaaggatagatgtcgtactctacaaaatggaaagtgaagttttaagtgtttgtt

SEQ ID NO: 46079 - protein, 304 aa, Arabidopsis thaliana
  peptide (1)..(304): Ceres Seq. ID no. 13578514
MASQPAGGSPPKPWEKEGNTSGPNPFRPPSNTSTAGSVEASGTANPGEVVPPPVNRPNTAANMNSLSRPVPARPWEQQNYGSTMGGGYGSNLGMTSGYGSGTYGSALGGYGSSYGGGMYGGSSMYRGGYGGGGLYGSSGMYGGGAMGGYGGTMGGYGMGMGTGMGMGMGMGMGGPYGSQDPNDPFNQPPSPPGFWISFLRVMQGAVNFFGRVAMLIDQNTQAFHMFMSALLQLFDRGGMLYGELARFVLRMLGVRTRPRKMQQPPQGPNGLPLPHQPHGNQNYLEGPKTAAPGGGGGWDNVWGN

SEQ ID NO: 46080 - protein, 242 aa, Arabidopsis thaliana
  peptide (1)..(242): Ceres Seq. ID no. 13578515
MNSLSRPVPARPWEQQNYGSTMGGGYGSNLGMTSGYGSGTYGSALGGYGSSYGGGMYGGSSMYRGGYGGGGLYGSSGMYGGGAMGGYGGTMGGYGMGMGTGMGMGMGMGMGGPYGSQDPNDPFNQPPSPPGFWISFLRVMQGAVNFFGRVAMLIDQNTQAFHMFMSALLQLFDRGGMLYGELARFVLRMLGVRTRPRKMQQPPQGPNGLPLPHQPHGNQNYLEGPKTAAPGGGGGWDNVWGN

SEQ ID NO: 46081 - protein, 221 aa, Arabidopsis thaliana
  peptide (1)..(221): Ceres Seq. ID no. 13578516
MGGGYGSNLGMTSGYGSGTYGSALGGYGSSYGGGMYGGSSMYRGGYGGGGLYGSSGMYGGGAMGGYGGTMGGYGMGMGTGMGMGMGMGMGGPYGSQDPNDPFNQPPSPPGFWISFLRVMQGAVNFFGRVAMLIDQNTQAFHMFMSALLQLFDRGGMLYGELARFVLRMLGVRTRPRKMQQPPQGPNGLPLPHQPHGNQNYLEGPKTAAPGGGGGWDNVWGN

SEQ ID NO: 46082 - DNA, 2263 bp, Arabidopsis thaliana; identical to SEQ ID NO: 44996
  misc_feature (1)..(2263): Ceres Seq. ID no. 13591573
  misc_feature (1)..(2263): Ortholog of  Ceres SEQ ID NO 13595870 as cited in SEQ ID NO 62101
  misc_feature (1)..(2263): Ortholog of  Ceres SEQ ID NO 13590241 as cited in SEQ ID NO 63878
  misc_feature (1)..(2263): Ortholog of  Ceres SEQ ID NO 13657939 as cited in SEQ ID NO 66349

SEQ ID NO: 46083 - protein, 695 aa, Arabidopsis thaliana; identical to SEQ ID NO: 44997
  peptide (1)..(695): Ceres Seq. ID no. 13591574

SEQ ID NO: 46084 - protein, 604 aa, Arabidopsis thaliana; identical to SEQ ID NO: 44998
  peptide (1)..(604): Ceres Seq. ID no. 13591575

SEQ ID NO: 46085 - protein, 499 aa, Arabidopsis thaliana; identical to SEQ ID NO: 44999
  peptide (1)..(499): Ceres Seq. ID no. 13591576

SEQ ID NO: 46086 - DNA, 1584 bp, Arabidopsis thaliana
  misc_feature (1)..(1584): Ceres Seq. ID no. 13578637
  misc_feature (1)..(1584): Ortholog of  Ceres SEQ ID NO 13502874 as cited in SEQ ID NO 66298
  misc_feature (1)..(1584): Ortholog of  Ceres SEQ ID NO 12614124 as cited in SEQ ID NO 68392
gatctgcctcttctttgcttttcagcaacaatggatgcaatcgtcgttgactctcaaaactgcttcatcatcattcttctatgttccttctcactcatctcctactttgtcttcttcaaaaaaccaaaggttaactttgatttgcttccgagccctccttcacttccaatcattggtcatcttcacctcttgctctctactcttatccacaagtctcttcagaaactctcctccaagtatggacctcttctccatctccgcatctttaacatccccttcatcctcgtctcctcggactcactggcctatgagatcttcagggatcacgacgtgaacgtctcctctcgcggtgttggagcgatcgacgagtccctggcgtatggatcttctggtttcatacaggctccctatggagattactggaaattcatgaagaagctcatcgcaactaagttgctgggaccccaaccactggtgcggtcacaggattttcgttctgaagagctagagaggttctacaaaaggctgttcgataaggccatgaagaaggaaagcgttatgattcataaggaagcgtccagattcgttaacaatagcctttacaagatgtgcacgggaaggagcttttcagtggagaataatgaagtggagagaataatggaacttactgccgacttaggtgccttgtcacagaagtttttcgtgtcaaagatgtttcgtaagctgcttgagaagctcggtatctcacttttcaaaacggagataatggttgtttcacgtagatttagtgagctggttgaaaggattcttattgaatatgaagagaaaatggacgggcatcaaggcacacagtttatggatgccttgttggcagcttatcgagatgaaaatacagaatataaaatcactaggagccatatcaagtcgcttctcacggtaaatgtacatgagtttttcattggagccgctgacgcctcatcaatagcaatacagtgggcaatggcagatatcataaacaaccgtgagattcttgagaaattgagagaagaaattgattcggttgtaggaaaaacaagattggttcaagaaacagatttaccaaaccttccttatttgcaagctgtagttaaggaagggctaagattgcacccgcctacacctctggttgtaagggagttccaagaagggtgtgagattggagggttctttgtaccaaagaacacaacacttattgttaattcttatgctatgatgagagatcctgattcatggcaagatcctgatgagtttaaaccagagaggtttctagcttccttaagtagagaggaggataaaaaagagaaaatccttaacttccttccttttgggagcggaaggagaatgtgtcctggatcaaatcttggttatatatttgtaggaaccgcgattgggatgatggtccagtgctttgactgggaaatcaatggagacaagattaatatggaagaggctactggagggtttctcatcaccatggctcatccccttacatgcactcctattcctcttccccgaacccaaaactctttaatttcccatctttaa

SEQ ID NO: 46087 - protein, 527 aa, Arabidopsis thaliana
  peptide (1)..(527): Ceres Seq. ID no. 13578638
DLPLLCFSATMDAIVVDSQNCFIIILLCSFSLISYFVFFKKPKVNFDLLPSPPSLPIIGHLHLLLSTLIHKSLQKLSSKYGPLLHLRIFNIPFILVSSDSLAYEIFRDHDVNVSSRGVGAIDESLAYGSSGFIQAPYGDYWKFMKKLIATKLLGPQPLVRSQDFRSEELERFYKRLFDKAMKKESVMIHKEASRFVNNSLYKMCTGRSFSVENNEVERIMELTADLGALSQKFFVSKMFRKLLEKLGISLFKTEIMVVSRRFSELVERILIEYEEKMDGHQGTQFMDALLAAYRDENTEYKITRSHIKSLLTVNVHEFFIGAADASSIAIQWAMADIINNREILEKLREEIDSVVGKTRLVQETDLPNLPYLQAVVKEGLRLHPPTPLVVREFQEGCEIGGFFVPKNTTLIVNSYAMMRDPDSWQDPDEFKPERFLASLSREEDKKEKILNFLPFGSGRRMCPGSNLGYIFVGTAIGMMVQCFDWEINGDKINMEEATGGFLITMAHPLTCTPIPLPRTQNSLISHL

SEQ ID NO: 46088 - protein, 517 aa, Arabidopsis thaliana
  peptide (1)..(517): Ceres Seq. ID no. 13578639
MDAIVVDSQNCFIIILLCSFSLISYFVFFKKPKVNFDLLPSPPSLPIIGHLHLLLSTLIHKSLQKLSSKYGPLLHLRIFNIPFILVSSDSLAYEIFRDHDVNVSSRGVGAIDESLAYGSSGFIQAPYGDYWKFMKKLIATKLLGPQPLVRSQDFRSEELERFYKRLFDKAMKKESVMIHKEASRFVNNSLYKMCTGRSFSVENNEVERIMELTADLGALSQKFFVSKMFRKLLEKLGISLFKTEIMVVSRRFSELVERILIEYEEKMDGHQGTQFMDALLAAYRDENTEYKITRSHIKSLLTVNVHEFFIGAADASSIAIQWAMADIINNREILEKLREEIDSVVGKTRLVQETDLPNLPYLQAVVKEGLRLHPPTPLVVREFQEGCEIGGFFVPKNTTLIVNSYAMMRDPDSWQDPDEFKPERFLASLSREEDKKEKILNFLPFGSGRRMCPGSNLGYIFVGTAIGMMVQCFDWEINGDKINMEEATGGFLITMAHPLTCTPIPLPRTQNSLISHL

SEQ ID NO: 46089 - protein, 384 aa, Arabidopsis thaliana
  peptide (1)..(384): Ceres Seq. ID no. 13578640
MKKLIATKLLGPQPLVRSQDFRSEELERFYKRLFDKAMKKESVMIHKEASRFVNNSLYKMCTGRSFSVENNEVERIMELTADLGALSQKFFVSKMFRKLLEKLGISLFKTEIMVVSRRFSELVERILIEYEEKMDGHQGTQFMDALLAAYRDENTEYKITRSHIKSLLTVNVHEFFIGAADASSIAIQWAMADIINNREILEKLREEIDSVVGKTRLVQETDLPNLPYLQAVVKEGLRLHPPTPLVVREFQEGCEIGGFFVPKNTTLIVNSYAMMRDPDSWQDPDEFKPERFLASLSREEDKKEKILNFLPFGSGRRMCPGSNLGYIFVGTAIGMMVQCFDWEINGDKINMEEATGGFLITMAHPLTCTPIPLPRTQNSLISHL

SEQ ID NO: 46090 - DNA, 1307 bp, Arabidopsis thaliana
  misc_feature (1)..(1307): Ceres Seq. ID no. 12600806
  misc_feature (1)..(1307): Ortholog of  Ceres SEQ ID NO 13648081 as cited in SEQ ID NO 165
  misc_feature (1)..(1307): Ortholog of  Ceres SEQ ID NO 15224803 as cited in SEQ ID NO 56572
  misc_feature (1)..(1307): Ortholog of  Ceres SEQ ID NO 13502952 as cited in SEQ ID NO 62271
  misc_feature (1)..(1307): Ortholog of  Ceres SEQ ID NO 13502973 as cited in SEQ ID NO 68052
  misc_feature (1)..(1307): Ortholog of  Ceres SEQ ID NO 13596000 as cited in SEQ ID NO 68188
atcaacaaactcaatcacaatcacaagtaaatacaaaaatcaccatagaaaaatatgaagcgatttattgttcttgcgctttgcatgcttatggttcttgaaaccacaaagggtttagatttccataacaaagatgtggaatcagagaatagcttgtgggagctatacgaacggtggaggagtcaccacactgttgctaggagccttgaagagaaagctaagaggttcaacgtgttcaagcacaacgtgaagcacatccatgagaccaacaagaaggataaatcttacaagctcaagctaaacaagtttggtgacatgactagtgaagaatttaggagaacatacgctggttcaaacatcaaacatcataggatgtttcaaggcgaaaaaaaggccacaaagagcttcatgtatgcaaatgtaaatactctcccaacctccgttgattggagaaagaatggagccgtcactcctgtcaaaaaccaaggccaatgcgggagttgttgggcgttttcaacagttgttgcggtggaagggatcaaccaaataagaactaaaaagctgacatcactctcagagcaagagctagtagattgtgatacaaaccagaaccaaggatgcaatggaggtctaatggaccttgcttttgagttcatcaaggagaaaggaggactcacaagtgagctagtgtacccttacaaggcttctgatgaaacttgtgacacaaacaaagaaaatgctccggtagtttcaatcgatggacacgaagatgttcctaagaacagcgaggatgatctaatgaaagctgttgctaatcagcctgtttctgttgctattgatgctggaggctcagactttcaattctactccgagggagtgtttaccgggagatgcggaacagagctaaaccatggagttgcggtagtagggtatggaacaacgatagacggaacaaagtattggattgttaagaattcatggggagaggaatggggagagaaaggatacataagaatgcagagagggattcgtcataaagaaggactttgtggtattgcaatggaagcttcttatcctctcaagaactccaacactaacccttctagactttccttggactcgcttaaggatgaactctaaattaaatctctttatattaagattaaatagacattgacaagtttgtttatgatgattgttttttttttaaatatatttctttttcattaataggttatggttttcaatgtatgaagttgatgggaatcgtttgaattcgttaaatgaataaataaatggttttatgt

SEQ ID NO: 46091 - protein, 361 aa, Arabidopsis thaliana
  peptide (1)..(361): Ceres Seq. ID no. 12600807
MKRFIVLALCMLMVLETTKGLDFHNKDVESENSLWELYERWRSHHTVARSLEEKAKRFNVFKHNVKHIHETNKKDKSYKLKLNKFGDMTSEEFRRTYAGSNIKHHRMFQGEKKATKSFMYANVNTLPTSVDWRKNGAVTPVKNQGQCGSCWAFSTVVAVEGINQIRTKKLTSLSEQELVDCDTNQNQGCNGGLMDLAFEFIKEKGGLTSELVYPYKASDETCDTNKENAPVVSIDGHEDVPKNSEDDLMKAVANQPVSVAIDAGGSDFQFYSEGVFTGRCGTELNHGVAVVGYGTTIDGTKYWIVKNSWGEEWGEKGYIRMQRGIRHKEGLCGIAMEASYPLKNSNTNPSRLSLDSLKDEL

SEQ ID NO: 46092 - protein, 351 aa, Arabidopsis thaliana
  peptide (1)..(351): Ceres Seq. ID no. 12600808
MLMVLETTKGLDFHNKDVESENSLWELYERWRSHHTVARSLEEKAKRFNVFKHNVKHIHETNKKDKSYKLKLNKFGDMTSEEFRRTYAGSNIKHHRMFQGEKKATKSFMYANVNTLPTSVDWRKNGAVTPVKNQGQCGSCWAFSTVVAVEGINQIRTKKLTSLSEQELVDCDTNQNQGCNGGLMDLAFEFIKEKGGLTSELVYPYKASDETCDTNKENAPVVSIDGHEDVPKNSEDDLMKAVANQPVSVAIDAGGSDFQFYSEGVFTGRCGTELNHGVAVVGYGTTIDGTKYWIVKNSWGEEWGEKGYIRMQRGIRHKEGLCGIAMEASYPLKNSNTNPSRLSLDSLKDEL

SEQ ID NO: 46093 - protein, 349 aa, Arabidopsis thaliana
  peptide (1)..(349): Ceres Seq. ID no. 12600809
MVLETTKGLDFHNKDVESENSLWELYERWRSHHTVARSLEEKAKRFNVFKHNVKHIHETNKKDKSYKLKLNKFGDMTSEEFRRTYAGSNIKHHRMFQGEKKATKSFMYANVNTLPTSVDWRKNGAVTPVKNQGQCGSCWAFSTVVAVEGINQIRTKKLTSLSEQELVDCDTNQNQGCNGGLMDLAFEFIKEKGGLTSELVYPYKASDETCDTNKENAPVVSIDGHEDVPKNSEDDLMKAVANQPVSVAIDAGGSDFQFYSEGVFTGRCGTELNHGVAVVGYGTTIDGTKYWIVKNSWGEEWGEKGYIRMQRGIRHKEGLCGIAMEASYPLKNSNTNPSRLSLDSLKDEL

SEQ ID NO: 46094 - DNA, 682 bp, Arabidopsis thaliana
  misc_feature (1)..(682): Ceres Seq. ID no. 13578591
  misc_feature (1)..(682): Ortholog of  Ceres SEQ ID NO 13587131 as cited in SEQ ID NO 331
  misc_feature (1)..(682): Ortholog of  Ceres SEQ ID NO 13661176 as cited in SEQ ID NO 61114
gattttttagggtttcaagtgaaaagagtaatagcgcggcggagccatggttctcaagactgagctttgccgattcagtggccagaaaatttaccctggtagagggatcagatttatccgatcggactctcaggtgtttttgtttctcaactccaaatgtaagaggtatttccacaacaagttgaagccatctaagctttgctggactgctatgtaccgaaagcagcacaagaaggacgcagcacaagaggctgtgaagagaaggagacgtgcaactaagaagccttactcaaggtcgattgtcggtgctactttggaggttattcagaagaagcgagcagagaagcctgaagttcgtgatgccgctagagaagctgccctacgtgagatcaaggagagaatcaagaagaccaaggacgagaagaaggcaaagaaggtcgagtatgcatcaaagcaacagaagtcacaagtgaagggaaatatccccaagagtgctgcacccaaggctgctaagatgggtggtggtggaggcagacgttgaatggagctatagagtagcccactcttctctcttcacttatctttctttcttgttttgacattgttttgttttgtcagccattttttagttttgcaccagatctaatatattcagtttatgaaaactttttgtttggtatca

SEQ ID NO: 46095 - protein, 164 aa, Arabidopsis thaliana; identical to SEQ ID NO: 29606
  peptide (1)..(164): Ceres Seq. ID no. 13578592

SEQ ID NO: 46096 - protein, 109 aa, Arabidopsis thaliana; identical to SEQ ID NO: 29607
  peptide (1)..(109): Ceres Seq. ID no. 13578593

SEQ ID NO: 46097 - DNA, 1675 bp, Arabidopsis thaliana
  misc_feature (1)..(1675): Ceres Seq. ID no. 12488947
  misc_feature (1)..(1675): Ortholog of  Ceres SEQ ID NO 14311203 as cited in SEQ ID NO 53639
  misc_feature (1)..(1675): Ortholog of  Ceres SEQ ID NO 14311175 as cited in SEQ ID NO 60223
  misc_feature (1)..(1675): Ortholog of  Ceres SEQ ID NO 15224727 as cited in SEQ ID NO 64990
  misc_feature (1)..(1675): Ortholog of  Ceres SEQ ID NO 14308023 as cited in SEQ ID NO 65865
  misc_feature (1)..(1675): Ortholog of  Ceres SEQ ID NO 14307972 as cited in SEQ ID NO 66436
  misc_feature (1)..(1675): Ortholog of  Ceres SEQ ID NO 15170175 as cited in SEQ ID NO 67138
  misc_feature (1)..(1675): Ortholog of  Ceres SEQ ID NO 12614670 as cited in SEQ ID NO 68565
acctctatctctctcttctctgggaggaaaaatggagatatcggttgcatcggtaacaatatcagtagttctagctgttgtgtcatggtggatatggagaactttacagtgggtttggtttaagccaaagatgcttgagcattacctgagaagacaaggtcttgccggaacaccttacacgcctctagtcggcgatttgaagaagaatttcaccatgttgtcggaggcaaggtccaaacccctcaaactaacggatgacatctcacctcgtgtcgtgccttatcccttgcaaatgttcaagacttacggaaggacttactttacatggtttggacctatcccaaccatcacaataatggatcctgagcaaatcaaggaagtgttcaacaaagtttatgatttccaaaagccgcatacatttcctttggccacaattatagctaaaggactcgctaattatgatggtgataaatgggcaaaacaccgaagaatcatcaacccggcttttcatatagagaagatcaagaatatggtacctgcgttccaccagagctgtagggaagttgttggcgaatgggatcagttagtatcggataaagggtcgtcatgtgaggtagacgtttggcctgggcttgtgagtatgactgcagatgtgatctctcgtactgcatttggcagcagctacaaagaagggcagaggatatttgagctccaagcagaactagcacagctcatcattcaagcttttaggaaagctttcatccctggatatagttatctcccaacaaaaagtaacagaagaatgaaagcagcagccagagaaatccaagttatactaagagggatcgtaaacaaaaggttaagggccagagaagctggtgaagcaccaagcgacgatttgctgggaatacttcttgaatcgaatttgaggcaaacggaaggaaacggaatgagtaccgaggatctgatggaggagtgcaagttgttctatttcgccgggcaagagacaacatcagtacttctggtttggacaatggtgctgttaagccaacaccaagattggcaggctcgtgcacgagaagaagtgaagcaagtgtttggcgataaagaacctgatgcagaaggactcaaccagctcaaagttatgacgatgatattatatgaggtccttaggctatatcctccagtaacccagctgactcgagccattcacaaagagctgaagctaggcgatctgaccctaccaggcggtgttcagatcagtctacctattctgctagtccaacacgacatcgagctgtggggaaacgacgcagcagagttcaatcctgacagatttaaagatggtctttcaaaggcaacaaagagccaagtctccttctttccctttgcgtggggaccgaggatatgcataggccagaactttgccctgttagaggcaaaaatggcaatggcattgattctgcggaggttctcgtttgagatttctccttcctatgttcacgcaccatacacagtcatcaccattcacccacagttcggtgctcagcttatcatgcacaagctctaatcagacaacacatttgtgttgttgtcaaatatacaataaacttgttatacagagatgaatcgagatagatcataatacaaaactcaaatctttccttttatgttc

SEQ ID NO: 46098 - protein, 522 aa, Arabidopsis thaliana
  peptide (1)..(522): Ceres Seq. ID no. 12488948
PLSLSSLGGKMEISVASVTISVVLAVVSWWIWRTLQWVWFKPKMLEHYLRRQGLAGTPYTPLVGDLKKNFTMLSEARSKPLKLTDDISPRVVPYPLQMFKTYGRTYFTWFGPIPTITIMDPEQIKEVFNKVYDFQKPHTFPLATIIAKGLANYDGDKWAKHRRIINPAFHIEKIKNMVPAFHQSCREVVGEWDQLVSDKGSSCEVDVWPGLVSMTADVISRTAFGSSYKEGQRIFELQAELAQLIIQAFRKAFIPGYSYLPTKSNRRMKAAAREIQVILRGIVNKRLRAREAGEAPSDDLLGILLESNLRQTEGNGMSTEDLMEECKLFYFAGQETTSVLLVWTMVLLSQHQDWQARAREEVKQVFGDKEPDAEGLNQLKVMTMILYEVLRLYPPVTQLTRAIHKELKLGDLTLPGGVQISLPILLVQHDIELWGNDAAEFNPDRFKDGLSKATKSQVSFFPFAWGPRICIGQNFALLEAKMAMALILRRFSFEISPSYVHAPYTVITIHPQFGAQLIMHKL

SEQ ID NO: 46099 - protein, 512 aa, Arabidopsis thaliana
  peptide (1)..(512): Ceres Seq. ID no. 12488949
MEISVASVTISVVLAVVSWWIWRTLQWVWFKPKMLEHYLRRQGLAGTPYTPLVGDLKKNFTMLSEARSKPLKLTDDISPRVVPYPLQMFKTYGRTYFTWFGPIPTITIMDPEQIKEVFNKVYDFQKPHTFPLATIIAKGLANYDGDKWAKHRRIINPAFHIEKIKNMVPAFHQSCREVVGEWDQLVSDKGSSCEVDVWPGLVSMTADVISRTAFGSSYKEGQRIFELQAELAQLIIQAFRKAFIPGYSYLPTKSNRRMKAAAREIQVILRGIVNKRLRAREAGEAPSDDLLGILLESNLRQTEGNGMSTEDLMEECKLFYFAGQETTSVLLVWTMVLLSQHQDWQARAREEVKQVFGDKEPDAEGLNQLKVMTMILYEVLRLYPPVTQLTRAIHKELKLGDLTLPGGVQISLPILLVQHDIELWGNDAAEFNPDRFKDGLSKATKSQVSFFPFAWGPRICIGQNFALLEAKMAMALILRRFSFEISPSYVHAPYTVITIHPQFGAQLIMHKL

SEQ ID NO: 46100 - protein, 479 aa, Arabidopsis thaliana
  peptide (1)..(479): Ceres Seq. ID no. 12488950
MLEHYLRRQGLAGTPYTPLVGDLKKNFTMLSEARSKPLKLTDDISPRVVPYPLQMFKTYGRTYFTWFGPIPTITIMDPEQIKEVFNKVYDFQKPHTFPLATIIAKGLANYDGDKWAKHRRIINPAFHIEKIKNMVPAFHQSCREVVGEWDQLVSDKGSSCEVDVWPGLVSMTADVISRTAFGSSYKEGQRIFELQAELAQLIIQAFRKAFIPGYSYLPTKSNRRMKAAAREIQVILRGIVNKRLRAREAGEAPSDDLLGILLESNLRQTEGNGMSTEDLMEECKLFYFAGQETTSVLLVWTMVLLSQHQDWQARAREEVKQVFGDKEPDAEGLNQLKVMTMILYEVLRLYPPVTQLTRAIHKELKLGDLTLPGGVQISLPILLVQHDIELWGNDAAEFNPDRFKDGLSKATKSQVSFFPFAWGPRICIGQNFALLEAKMAMALILRRFSFEISPSYVHAPYTVITIHPQFGAQLIMHKL

SEQ ID NO: 46101 - DNA, 792 bp, Arabidopsis thaliana
  misc_feature (1)..(792): Ceres Seq. ID no. 13579765
  misc_feature (1)..(792): Ortholog of  Ceres SEQ ID NO 15174082 as cited in SEQ ID NO 61896
  misc_feature (1)..(792): Ortholog of  Ceres SEQ ID NO 13655598 as cited in SEQ ID NO 64077
  misc_feature (1)..(792): Ortholog of  Ceres SEQ ID NO 15179351 as cited in SEQ ID NO 0
aacagaaaatagaaagaagtaacaaaaccaaagcaaaaaatggtgaagatcgaagttggaagtgtgggagactcattcagtgtatcatctcttaaagcttacttgtctgagttcatcgcaactcttctcttcgtattcgcaggcgttggctctgctgttgcgtttgccaaactaacctctgatggagccttggacccagctggtcttgtagcaattgcaattgctcacgcgtttgctcttttcgttggagtttccattgcggctaacatttctggtggtcaccttaacccagccgtgactcttggccttgccatcggcggaaacataacactcatcacaggtttcttctattggattgctcagtgtcttggctccatcgtcgcttgtcttctcctcgtctttgttactaatggcaagagcgtaccgacccacggggtctcagccggtctaggagcggtcgaaggtgtcgtcatggagatcgttgtgacctttgcattggtctacaccgtttacgccacagcagctgatccaaagaaaggatcgctagggaccatcgctccaatcgccatcggcttcatagttggtgccaacatcctcgctgctggtccattcagtggtggctccatgaatccagcaaggtcgttcggaccagctgttgtcagtggtgacttgtcccaaatctggatctattgggtgggaccacttgtgggtggtgcactcgcgggacttatctacggtgatgtgttcatcggttcttatgaagcggtagaaacccgtgagatccgagtgtaa

SEQ ID NO: 46102 - protein, 250 aa, Arabidopsis thaliana
  peptide (1)..(250): Ceres Seq. ID no. 13579766
MVKIEVGSVGDSFSVSSLKAYLSEFIATLLFVFAGVGSAVAFAKLTSDGALDPAGLVAIAIAHAFALFVGVSIAANISGGHLNPAVTLGLAIGGNITLITGFFYWIAQCLGSIVACLLLVFVTNGKSVPTHGVSAGLGAVEGVVMEIVVTFALVYTVYATAADPKKGSLGTIAPIAIGFIVGANILAAGPFSGGSMNPARSFGPAVVSGDLSQIWIYWVGPLVGGALAGLIYGDVFIGSYEAVETREIRV

SEQ ID NO: 46103 - DNA, 933 bp, Arabidopsis thaliana; identical to SEQ ID NO: 37998
  misc_feature (1)..(933): Ceres Seq. ID no. 12601209
  misc_feature (1)..(933): Ortholog of  Ceres SEQ ID NO 15226343 as cited in SEQ ID NO 61627

SEQ ID NO: 46104 - protein, 229 aa, Arabidopsis thaliana; identical to SEQ ID NO: 37999
  peptide (1)..(229): Ceres Seq. ID no. 12601210

SEQ ID NO: 46105 - protein, 210 aa, Arabidopsis thaliana; identical to SEQ ID NO: 38000
  peptide (1)..(210): Ceres Seq. ID no. 12601211

SEQ ID NO: 46106 - protein, 208 aa, Arabidopsis thaliana; identical to SEQ ID NO: 38001
  peptide (1)..(208): Ceres Seq. ID no. 12601212

SEQ ID NO: 46107 - DNA, 1996 bp, Arabidopsis thaliana; identical to SEQ ID NO: 41756
  misc_feature (1)..(1996): Ceres Seq. ID no. 12639081
  misc_feature (1)..(1996): Ortholog of  Ceres SEQ ID NO 13660024 as cited in SEQ ID NO 67241

SEQ ID NO: 46108 - protein, 610 aa, Arabidopsis thaliana; identical to SEQ ID NO: 41757
  peptide (1)..(610): Ceres Seq. ID no. 12639082

SEQ ID NO: 46109 - protein, 583 aa, Arabidopsis thaliana [sequence omitted]

SEQ ID NO: 46110 - protein, 506 aa, Arabidopsis thaliana; identical to SEQ ID NO: 41759
  peptide (1)..(506): Ceres Seq. ID no. 12639084

SEQ ID NO: 46111 - DNA, 1166 bp, Arabidopsis thaliana; identical to SEQ ID NO: 40143
  misc_feature (1)..(1166): Ceres Seq. ID no. 13645869
  misc_feature (1)..(1166): Ortholog of  Ceres SEQ ID NO 12578784 as cited in SEQ ID NO 20729
  misc_feature (1)..(1166): Ortholog of  Ceres SEQ ID NO 13658847 as cited in SEQ ID NO 66674

SEQ ID NO: 46112 - protein, 344 aa, Arabidopsis thaliana; identical to SEQ ID NO: 40144
  peptide (1)..(344): Ceres Seq. ID no. 13645870

SEQ ID NO: 46113 - protein, 332 aa, Arabidopsis thaliana; identical to SEQ ID NO: 40145
  peptide (1)..(332): Ceres Seq. ID no. 13645871

SEQ ID NO: 46114 - protein, 310 aa, Arabidopsis thaliana; identical to SEQ ID NO: 40146
  peptide (1)..(310): Ceres Seq. ID no. 13645872

SEQ ID NO: 46115 - DNA, 2886 bp, Arabidopsis thaliana
  misc_feature (1)..(2886): Ceres Seq. ID no. 12576059
  misc_feature (1)..(2886): Ortholog of  Ceres SEQ ID NO 13584744 as cited in SEQ ID NO 69137
atgacaccgtttcgctggagactgcttggtggtggaattcactacaacacgttaaaggtggaacacaacgaatctggaccattgagtttaaagggtctgtttggttctgtttctggaaatttcacttttttcacttttttgggatcacatttaatggtgagaatctcactgcttttgttgtgtttactggtttcaacttgtctcttcacttcttcatcagcacaagcaggttttgtgagcttggattgtggaggtgcagagccattcactgatgaacttggactcaaatggtcacctgataatcatctcatttatggagaaaccgctaatatatcgtccgttaacgaaacaagaactcagtacacgactttaaggcatttccctgctgattcaagaaagtattgctacactctcaatgtcacgagtaggaatagatatctcattagagctactttcttgtatggtaatttcgacaacagcaacaatgtgtatcccaaattcgatatctccctcggggcgactcattgggcgaccattgttatctctgaaacctatataatcgaaactgcagaactggtgtttctggcttcttctcctactgttagtgtttgtttgtcaaatgccacaactggacagccgtttatatctactcttgagcttaggcagttgagtggttcgatgtatggttcgatgctatctgaagaccggttttacctgagtgttgcagcacggataaatttcggggctgaaagtgaagcttctgtgaggtacccggatgatccgtatgatagaatatgggaatctgatttgcaaaagaagcctaattatcttgtggatgttgctgctgggactgtgcgagtgtcgactacattgccaatcgaaagcagggtcgatgacagaccgcctcagaaggttatgcagacggctgtggttggaacaaacgggtccttaacttacagaatgaacctagatggcttccctggttttggttgggcattcacatactttgctgaaatcgaggatttggctgaggatgagtcaaggaagtttagattagttctacctgagcagcctgagtatagcaaatcggttgttaacatcaaggaaaatacacagagaccgtatcgcgtttatgcacctggctatcctaacataacacttccatttgtgctaaactttcgatttgccaaaacggctgattcttctaggggacctattctgaatgccatggagatcagcaaatatttgcggaaaagcgatggttcagtagatgcaactgttatggctaatgtggcatcgctatattcttccactgaatgggctcaagaaggcggtgacccttgttcaccctcaccgtggtcatgggtgcaatgcaattcggatccacaaccaagggttgttgctatcaagctgtcgagtatgaacttgacgggaaatataccttctgacctggtgaaattgactggtttggttgagttacacctcgagaacaaccgactaaccggaaagatcccttcctcgttgacgaaactcccaaacctgaaagaactgtacctgcagaacaatgtgttaacaggaacaataccatcagacctggccaaagatgtgatctcaaacttctctgggaaccttaaccttgaaaaaagtggagataaaggcaagaagctcggtgtcatcatcggtgcatcagttggtgcttttgttctgctaattgcaaccatcatttcttgcatcgtcatgtgcaaaagcaagaagaataacaagttgggaaaaacttcggcagagttaacgaatcgtcccttaccgattcagagagtttcgtctaccttgagtgaagctcatggagacgctgcacattgcttcacactttatgagatcgaggaagccacaaaaaaattcgaaaagagaattgggtcgggaggttttggaatcgtatactatggtaaaacaagggaggggaaagagattgctgtaaaggttcttgcaaataattcatatcagggaaagagagagtttgcaaacgaggttacattactctcaaggatacatcatcggaaccttgtgcagtttcttggttattgccaagaagagggaaaaaacatgcttgtgtatgagttcatgcacaatgggactttgaaggagcatctttatggcgtggtaccacgtgaccggagaatcagttggattaaaaggcttgagatagctgaagatgcagcccgagggatcgagtatcttcacacagggtgtgttccagcaatcatacatagagatctcaagactagtaacatcctacttgacaaacacatgagggcaaaggtttcagatttcggtttgtcgaaattcgcagttgacgggacctcacatgtctccagcattgtccgtggcacagttggatatcttgaccccgagtactatatatcgcagcagttaacagagaagagtgatgtatatagcttcggagtcattcttcttgagctaatgtctggccaagaagccatatcgaatgaaagctttggtgtcaactgccggaacatagtccaatgggctaagatgcatatagacaacggggacatccgagggatcatcgatccagcgctagcggaagatgattacagtctccaatcaatgtggaagattgcggagaaagcgttgctgtgtgtgaaaccgcacgggaacatgagaccttcgatgtccgaggtgcaaaaagatatccaagacgcgattaggatcgagaaggaagcgttggctgcaagaggcggtatatcagacgagttttccaggagctcggctcattcgtcttcgctcaacatgggaatgcttgacctggctggatcacagagttatgtatccattgatgaatcagtattgcagccaacagctcggtag

SEQ ID NO: 46116 - protein, 961 aa, Arabidopsis thaliana
  peptide (1)..(961): Ceres Seq. ID no. 12576060
MTPFRWRLLGGGIHYNTLKVEHNESGPLSLKGLFGSVSGNFTFFTFLGSHLMVRISLLLLCLLVSTCLFTSSSAQAGFVSLDCGGAEPFTDELGLKWSPDNHLIYGETANISSVNETRTQYTTLRHFPADSRKYCYTLNVTSRNRYLIRATFLYGNFDNSNNVYPKFDISLGATHWATIVISETYIIETAELVFLASSPTVSVCLSNATTGQPFISTLELRQLSGSMYGSMLSEDRFYLSVAARINFGAESEASVRYPDDPYDRIWESDLQKKPNYLVDVAAGTVRVSTTLPIESRVDDRPPQKVMQTAVVGTNGSLTYRMNLDGFPGFGWAFTYFAEIEDLAEDESRKFRLVLPEQPEYSKSVVNIKENTQRPYRVYAPGYPNITLPFVLNFRFAKTADSSRGPILNAMEISKYLRKSDGSVDATVMANVASLYSSTEWAQEGGDPCSPSPWSWVQCNSDPQPRVVAIKLSSMNLTGNIPSDLVKLTGLVELHLENNRLTGKIPSSLTKLPNLKELYLQNNVLTGTIPSDLAKDVISNFSGNLNLEKSGDKGKKLGVIIGASVGAFVLLIATIISCIVMCKSKKNNKLGKTSAELTNRPLPIQRVSSTLSEAHGDAAHCFTLYEIEEATKKFEKRIGSGGFGIVYYGKTREGKEIAVKVLANNSYQGKREFANEVTLLSRIHHRNLVQFLGYCQEEGKNMLVYEFMHNGTLKEHLYGVVPRDRRISWIKRLEIAEDAARGIEYLHTGCVPAIIHRDLKTSNILLDKHMRAKVSDFGLSKFAVDGTSHVSSIVRGTVGYLDPEYYISQQLTEKSDVYSFGVILLELMSGQEAISNESFGVNCRNIVQWAKMHIDNGDIRGIIDPALAEDDYSLQSMWKIAEKALLCVKPHGNMRPSMSEVQKDIQDAIRIEKEALAARGGISDEFSRSSAHSSSLNMGMLDLAGSQSYVSIDESVLQPTAR

SEQ ID NO: 46117 - protein, 910 aa, Arabidopsis thaliana
  peptide (1)..(910): Ceres Seq. ID no. 12576061
MVRISLLLLCLLVSTCLFTSSSAQAGFVSLDCGGAEPFTDELGLKWSPDNHLIYGETANISSVNETRTQYTTLRHFPADSRKYCYTLNVTSRNRYLIRATFLYGNFDNSNNVYPKFDISLGATHWATIVISETYIIETAELVFLASSPTVSVCLSNATTGQPFISTLELRQLSGSMYGSMLSEDRFYLSVAARINFGAESEASVRYPDDPYDRIWESDLQKKPNYLVDVAAGTVRVSTTLPIESRVDDRPPQKVMQTAVVGTNGSLTYRMNLDGFPGFGWAFTYFAEIEDLAEDESRKFRLVLPEQPEYSKSVVNIKENTQRPYRVYAPGYPNITLPFVLNFRFAKTADSSRGPILNAMEISKYLRKSDGSVDATVMANVASLYSSTEWAQEGGDPCSPSPWSWVQCNSDPQPRVVAIKLSSMNLTGNIPSDLVKLTGLVELHLENNRLTGKIPSSLTKLPNLKELYLQNNVLTGTIPSDLAKDVISNFSGNLNLEKSGDKGKKLGVIIGASVGAFVLLIATIISCIVMCKSKKNNKLGKTSAELTNRPLPIQRVSSTLSEAHGDAAHCFTLYEIEEATKKFEKRIGSGGFGIVYYGKTREGKEIAVKVLANNSYQGKREFANEVTLLSRIHHRNLVQFLGYCQEEGKNMLVYEFMHNGTLKEHLYGVVPRDRRISWIKRLEIAEDAARGIEYLHTGCVPAIIHRDLKTSNILLDKHMRAKVSDFGLSKFAVDGTSHVSSIVRGTVGYLDPEYYISQQLTEKSDVYSFGVILLELMSGQEAISNESFGVNCRNIVQWAKMHIDNGDIRGIIDPALAEDDYSLQSMWKIAEKALLCVKPHGNMRPSMSEVQKDIQDAIRIEKEALAARGGISDEFSRSSAHSSSLNMGMLDLAGSQSYVSIDESVLQPTAR

SEQ ID NO: 46118 - protein, 735 aa, Arabidopsis thaliana
  peptide (1)..(735): Ceres Seq. ID no. 12576062
MYGSMLSEDRFYLSVAARINFGAESEASVRYPDDPYDRIWESDLQKKPNYLVDVAAGTVRVSTTLPIESRVDDRPPQKVMQTAVVGTNGSLTYRMNLDGFPGFGWAFTYFAEIEDLAEDESRKFRLVLPEQPEYSKSVVNIKENTQRPYRVYAPGYPNITLPFVLNFRFAKTADSSRGPILNAMEISKYLRKSDGSVDATVMANVASLYSSTEWAQEGGDPCSPSPWSWVQCNSDPQPRVVAIKLSSMNLTGNIPSDLVKLTGLVELHLENNRLTGKIPSSLTKLPNLKELYLQNNVLTGTIPSDLAKDVISNFSGNLNLEKSGDKGKKLGVIIGASVGAFVLLIATIISCIVMCKSKKNNKLGKTSAELTNRPLPIQRVSSTLSEAHGDAAHCFTLYEIEEATKKFEKRIGSGGFGIVYYGKTREGKEIAVKVLANNSYQGKREFANEVTLLSRIHHRNLVQFLGYCQEEGKNMLVYEFMHNGTLKEHLYGVVPRDRRISWIKRLEIAEDAARGIEYLHTGCVPAIIHRDLKTSNILLDKHMRAKVSDFGLSKFAVDGTSHVSSIVRGTVGYLDPEYYISQQLTEKSDVYSFGVILLELMSGQEAISNESFGVNCRNIVQWAKMHIDNGDIRGIIDPALAEDDYSLQSMWKIAEKALLCVKPHGNMRPSMSEVQKDIQDAIRIEKEALAARGGISDEFSRSSAHSSSLNMGMLDLAGSQSYVSIDESVLQPTAR

SEQ ID NO: 46119 - DNA, 2024 bp, Arabidopsis thaliana; identical to SEQ ID NO: 44984
  misc_feature (1)..(2024): Ceres Seq. ID no. 12600277
  misc_feature (1)..(2024): Ortholog of  Ceres SEQ ID NO 14310841 as cited in SEQ ID NO 53666
  misc_feature (1)..(2024): Ortholog of  Ceres SEQ ID NO 15178736 as cited in SEQ ID NO 56439
  misc_feature (1)..(2024): Ortholog of  Ceres SEQ ID NO 14308493 as cited in SEQ ID NO 60320

SEQ ID NO: 46120 - protein, 545 aa, Arabidopsis thaliana; identical to SEQ ID NO: 44985
  peptide (1)..(545): Ceres Seq. ID no. 12600278

SEQ ID NO: 46121 - protein, 520 aa, Arabidopsis thaliana; identical to SEQ ID NO: 44986
  peptide (1)..(520): Ceres Seq. ID no. 12600279

SEQ ID NO: 46122 - protein, 499 aa, Arabidopsis thaliana; identical to SEQ ID NO: 44987
  peptide (1)..(499): Ceres Seq. ID no. 12600280

SEQ ID NO: 46123 - DNA, 708 bp, Arabidopsis thaliana
  misc_feature (1)..(708): Ceres Seq. ID no. 13578577
  misc_feature (1)..(708): Ortholog of  Ceres SEQ ID NO 15179191 as cited in SEQ ID NO 0
ggttggattcgtgaagccgaaaaaaaaaaaaaaatggtaattctcagcaacgtctcgttgttctcctgctgcaacatctctcagaaaccatctctcttttctccgtcttctcgtagttctcattgtcccattcgttgctcacagtcacaggaagggaaagaagtggttaccagtcctttgagaagtgtggtttggtcattaggagaagaggtttcaaagagaagtctatttgcacttgtctctgcttctctcttctttgttgatcctgctcttgcttttaagggtggaggtccctatggtcaaggagtcaccaggggacaggacttatctggcaaagatttcagtggccagactcttatcaggcaggacttcaaaacgtccatcctaaggcaagccaacttcaagggtgcaaagttgttaggtgctagcttctttgatgcagatctaacaggtgctgatttatcggaagctgatctccgaggtgcagatttctccttggcaaatgtaacaaaggtgaatctaacgaacgctaacttagaaggagcgactgttactggaaacacatcattcaagggatcaaacattacaggcgcagacttcactgatgtccctctaagagatgatcagcgagtatacctttgcaaagttgcggatggagttaacgcgactactgggaatgcaacgcgggacacattgctttgcaactaa

SEQ ID NO: 46124 - protein, 235 aa, Arabidopsis thaliana
  peptide (1)..(235): Ceres Seq. ID no. 13578578
GWIREAEKKKKMVILSNVSLFSCCNISQKPSLFSPSSRSSHCPIRCSQSQEGKEVVTSPLRSVVWSLGEEVSKRSLFALVSASLFFVDPALAFKGGGPYGQGVTRGQDLSGKDFSGQTLIRQDFKTSILRQANFKGAKLLGASFFDADLTGADLSEADLRGADFSLANVTKVNLTNANLEGATVTGNTSFKGSNITGADFTDVPLRDDQRVYLCKVADGVNATTGNATRDTLLCN

SEQ ID NO: 46125 - protein, 224 aa, Arabidopsis thaliana
  peptide (1)..(224): Ceres Seq. ID no. 13578579
MVILSNVSLFSCCNISQKPSLFSPSSRSSHCPIRCSQSQEGKEVVTSPLRSVVWSLGEEVSKRSLFALVSASLFFVDPALAFKGGGPYGQGVTRGQDLSGKDFSGQTLIRQDFKTSILRQANFKGAKLLGASFFDADLTGADLSEADLRGADFSLANVTKVNLTNANLEGATVTGNTSFKGSNITGADFTDVPLRDDQRVYLCKVADGVNATTGNATRDTLLCN

SEQ ID NO: 46126 - DNA, 2093 bp, Arabidopsis thaliana; identical to SEQ ID NO: 43891
  misc_feature (1)..(2093): Ceres Seq. ID no. 12639093
  misc_feature (1)..(2093): Ortholog of  Ceres SEQ ID NO 15180350 as cited in SEQ ID NO 0

SEQ ID NO: 46127 - protein, 585 aa, Arabidopsis thaliana; identical to SEQ ID NO: 43892
  peptide (1)..(585): Ceres Seq. ID no. 12639094

SEQ ID NO: 46128 - protein, 513 aa, Arabidopsis thaliana; identical to SEQ ID NO: 43893
  peptide (1)..(513): Ceres Seq. ID no. 12639095

SEQ ID NO: 46129 - protein, 493 aa, Arabidopsis thaliana; identical to SEQ ID NO: 43894
  peptide (1)..(493): Ceres Seq. ID no. 12639096

SEQ ID NO: 46130 - DNA, 2055 bp, Arabidopsis thaliana
  misc_feature (1)..(2055): Ceres Seq. ID no. 13591783
  misc_feature (1)..(2055): Ortholog of  Ceres SEQ ID NO 15170764 as cited in SEQ ID NO 52602
aaaaaaaaaatcaaacgcagaatattatttttctcgctcgcgaattcctctttctcaccttttctcgctcctgggaatctgaagcagttcttctccgacgcctggatcgtgatttgattcgaactttcacataagatggctatggtagatgaaccgttgtatcccattgctgtgcttatagatgagcttaagaatgatgatattcagcttcgtttgaactcgatccgtcgcttatctactatagctcgtgctcttggagaggagcgtacaaggaaggagttaatcccttttttgagtgagaatagtgacgatgacgatgaggtgcttcttgcaatggctgaggagttaggagtttttattccgtttgttggaggaattgagtttgcgcatgttcttcttcctcctttggaatctctatgtactgttgaagagacttgtgtgagagaaaaagctgtggaatcgctttgtaagattggatctcagatgaaagagaatgatcttgttgaatcttttgttcctcttgtgaagaggttagcgggtggtgaatggtttgcagcaagagtttctgcatgtggtatatttcatgttgcataccaaggttgcactgatgtgttgaagactgagttacgggctacttatagccagttgtgcaaagatgatatgccaatggtgcgaagagctgctgcatctaacctggggaaatttgctacaactgtcgagtctacctttttgattgctgagatcatgactatgttcgatgatcttactaaagatgaccaagattctgtgagactattggctgttgaagggtgtgcagctcttggaaagttgttggaacctcaggattgtgttgcacgcattttacctgttattgttaatttctctcaggataaatcttggagggtgcgctacatggttgctaatcagctatatgaactttgtgaggcagtgggtcctgattgcacgaggacggatttggttccagcatatgtgagattgctaagggacaatgaggctgaagtgcgaatagcagcagcgggaaaagtgaccaagttctgtcggcttttgaatccagagcttgcgattcagcacatccttccttgtgtgaaggaattatcatcggattcttctcaacatgtccgctctgctctagcttcagtaataatggggatggctcctatccttgggaaggactcaaccattgagcatctgttaccaatttttctttcccttttgaaagatgaatttcctgatgtgcgccttaacatcataagcaagttagatcaagtcaaccaggttattggaattgatctactatctcaatccttgttaccggccattgtagaacttgctgaggatcggcactggagagtccgacttgcaataatagagtatgttccactgttggccagccagttaggtataggatttttcgatgacaagctcggagccctttgcatgcaatggctgcaagacaaggtctactctatccgcgaagctgcagcaaacaacctaaagcgcctcgcagaggagtttggtcctgaatgggcaatgcagcacttagttccccaggtattggacatggtcaacaatccgcactacctacacaggatgatggttctacgcgcaatatctctcatggcgcctgtaatgggatcagaaatcacatgctctaagtttcttcctgtggttgttgaagcatcaaaagacagagttccaaacatcaagttcaacgttgccaaacttctgcaatccctcatccccatagtcgaccaatcagtggtggacaaaacaatccgtcagtgtttggtggacctgagcgaagaccctgatgttgatgttcgttattttgcaaatcaagcacttaattccatcgatggttccacagcagcacaatcctgaattgtttttttttcatatgtatgatcgttaagttaagtttctattattcgtgttctctgcaatttatttggtttgtttgtgtaaaacgccattttggttgctggctatgaactgcaactatttttgttagtaaaattgtattaccttttttac

SEQ ID NO: 46131 - protein, 588 aa, Arabidopsis thaliana
  peptide (1)..(588): Ceres Seq. ID no. 13591784
MAMVDEPLYPIAVLIDELKNDDIQLRLNSIRRLSTIARALGEERTRKELIPFLSENSDDDDEVLLAMAEELGVFIPFVGGIEFAHVLLPPLESLCTVEETCVREKAVESLCKIGSQMKENDLVESFVPLVKRLAGGEWFAARVSACGIFHVAYQGCTDVLKTELRATYSQLCKDDMPMVRRAAASNLGKFATTVESTFLIAEIMTMFDDLTKDDQDSVRLLAVEGCAALGKLLEPQDCVARILPVIVNFSQDKSWRVRYMVANQLYELCEAVGPDCTRTDLVPAYVRLLRDNEAEVRIAAAGKVTKFCRLLNPELAIQHILPCVKELSSDSSQHVRSALASVIMGMAPILGKDSTIEHLLPIFLSLLKDEFPDVRLNIISKLDQVNQVIGIDLLSQSLLPAIVELAEDRHWRVRLAIIEYVPLLASQLGIGFFDDKLGALCMQWLQDKVYSIREAAANNLKRLAEEFGPEWAMQHLVPQVLDMVNNPHYLHRMMVLRAISLMAPVMGSEITCSKFLPVVVEASKDRVPNIKFNVAKLLQSLIPIVDQSVVDKTIRQCLVDLSEDPDVDVRYFANQALNSIDGSTAAQS

SEQ ID NO: 46132 - protein, 586 aa, Arabidopsis thaliana
  peptide (1)..(586): Ceres Seq. ID no. 13591785
MVDEPLYPIAVLIDELKNDDIQLRLNSIRRLSTIARALGEERTRKELIPFLSENSDDDDEVLLAMAEELGVFIPFVGGIEFAHVLLPPLESLCTVEETCVREKAVESLCKIGSQMKENDLVESFVPLVKRLAGGEWFAARVSACGIFHVAYQGCTDVLKTELRATYSQLCKDDMPMVRRAAASNLGKFATTVESTFLIAEIMTMFDDLTKDDQDSVRLLAVEGCAALGKLLEPQDCVARILPVIVNFSQDKSWRVRYMVANQLYELCEAVGPDCTRTDLVPAYVRLLRDNEAEVRIAAAGKVTKFCRLLNPELAIQHILPCVKELSSDSSQHVRSALASVIMGMAPILGKDSTIEHLLPIFLSLLKDEFPDVRLNIISKLDQVNQVIGIDLLSQSLLPAIVELAEDRHWRVRLAIIEYVPLLASQLGIGFFDDKLGALCMQWLQDKVYSIREAAANNLKRLAEEFGPEWAMQHLVPQVLDMVNNPHYLHRMMVLRAISLMAPVMGSEITCSKFLPVVVEASKDRVPNIKFNVAKLLQSLIPIVDQSVVDKTIRQCLVDLSEDPDVDVRYFANQALNSIDGSTAAQS

SEQ ID NO: 46133 - protein, 522 aa, Arabidopsis thaliana
  peptide (1)..(522): Ceres Seq. ID no. 13591786
MAEELGVFIPFVGGIEFAHVLLPPLESLCTVEETCVREKAVESLCKIGSQMKENDLVESFVPLVKRLAGGEWFAARVSACGIFHVAYQGCTDVLKTELRATYSQLCKDDMPMVRRAAASNLGKFATTVESTFLIAEIMTMFDDLTKDDQDSVRLLAVEGCAALGKLLEPQDCVARILPVIVNFSQDKSWRVRYMVANQLYELCEAVGPDCTRTDLVPAYVRLLRDNEAEVRIAAAGKVTKFCRLLNPELAIQHILPCVKELSSDSSQHVRSALASVIMGMAPILGKDSTIEHLLPIFLSLLKDEFPDVRLNIISKLDQVNQVIGIDLLSQSLLPAIVELAEDRHWRVRLAIIEYVPLLASQLGIGFFDDKLGALCMQWLQDKVYSIREAAANNLKRLAEEFGPEWAMQHLVPQVLDMVNNPHYLHRMMVLRAISLMAPVMGSEITCSKFLPVVVEASKDRVPNIKFNVAKLLQSLIPIVDQSVVDKTIRQCLVDLSEDPDVDVRYFANQALNSIDGSTAAQS

SEQ ID NO: 46134 - DNA, 2376 bp, Arabidopsis thaliana
  misc_feature (1)..(2376): Ceres Seq. ID no. 12574662
  misc_feature (1)..(2376): Ortholog of  Ceres SEQ ID NO 12586556 as cited in SEQ ID NO 64667
  misc_feature (1)..(2376): Ortholog of  Ceres SEQ ID NO 13656797 as cited in SEQ ID NO 65756
  misc_feature (1)..(2376): Ortholog of  Ceres SEQ ID NO 13658498 as cited in SEQ ID NO 66557
  misc_feature (1)..(2376): Ortholog of  Ceres SEQ ID NO 13660894 as cited in SEQ ID NO 67475
gacgagagagagaaataaaaaaggcgtgagtctcctaactagctcctaataatgcgataaaccaaaaacatgccactttgcaataatttctccggcaatctcgtcgtcgccgttgctctcttctttgccggcgccctatatatcttcaactaccaaaactatgtcaacactctgagaacaacacagtatccggtagatgagctagaggcggccttgtatacggcagccgccggaaacaacaagacggtgataataacgatggtgaacaaagcgtacgtgaaggaggttggaagagggagtacgatgcttgatctgtttttggagagtttttgggaaggagaagggactctaccacttttggaccatctaatggtggtggcagtggatcaaacggcctatgatcgctgccgtttcaagaggcttcactgctacaagatggagactgaagatggggttgacttagagggagagaaagtattcatgtcaaaagatttcattgagatgatgtggagaaggactcgcttgatcctagacgttcttcgtcgtggctacaatgttattttcacggacacggacgtgatgtggctaaggagtccattgtctcggttaaacatgagcttggatatgcaaataagcgtggacagaattaacgtgggaggacagttgatcaacacgggattctaccacgtccggtctaacaacaagaccatctcactcttccaaaaatggtacgacatgaggctaaactcgacggggatgaaggaacaagacgttctcaagaatctcctagactccggcttcttcaaccagttaggtctcaacgttggcttccttagtaccaccgaattcagcggtttttgccaagacagtcctcacatgggcgttgtcactaccgtccatgctaactgctgcctccacatccctgccaaagtctttgatctcactcgtgttcttcgtgattggaaacgctacaaagcgtcacatgtcaacagcaaatggagccctcatcttaagtatttgaatatatccatcaaactactcattcttcatttaaaatgcggttgcttgagttatgcacgccaagtgttcgacgaattacccaagccaacattatcggcttacaactacatgattagtgggtacttgaagcatggattggtaaaggaattacttcttctagttcaacggatgtcatactctggggaaaaggcagatgggtacacgctttccatggttctaaaggcttctaatagtcgtggctcgactatgatactgccgcgtagcttatgtaggttggtccatgcccggattataaaatgtgatgttgagctagatgatgtgttgattactgcacttgttgatacttatgtgaagagtgggaagttggagtctgcaaggactgtgtttgaaacaatgaaagatgagaatgttgtgtgttgtacatcaatgatctcaggttacatgaatcaaggttttgtagaggatgcggaagagattttcaatactaccaaagtgaaggatattgtagtttacaatgctatggtggaaggtttcagcagatcaggtgaaactgctaagagatcagttgacatgtatatttcgatgcaacgagctggtttccatccgaatatttcaactttcgctagcgtgattggagcgtgttcggttttgacgtcccatgaagttggtcagcaagtgcacgctcagattatgaagagtggagtttacacgcatatcaaaatggggagctctttgttagacatgtatgccaaatgcggagggatcaatgatgcaagaagagtctttgaccaaatgcaagagaaaaacgtattttcgtggacttcgatgattgatggatatggaaagaatggaaaccctgaggaagcactcgaactcttcactaggatgaaggaattccgtatagaacccaattatgtaacctttcttggtgctctctctgcttgttcacattctggtttagtcgataaaggttatgagatctttgagagcatgcagagagattattccatgaaaccaaagatggaacactatgcttgcatagttgatctcatgggacgagctggagatttgaataaagctttcgaatttgctagggcgatgccggaaaggcctgactcagatatttgggcagctcttctcagttcttgtaatttgcatggtaatgttgaactcgcaagcatagctgcgagtgagcttttcaaactgaatgctgataaaagacctggagcttatttagctttatccaatgtctacgcttctaatgataaatgggacaatgtgagcaagatccgagaagtgatgaaaagaagaaggatatctaaaactattggtcgtagttggaccagcgaagattga

SEQ ID NO: 46135 - protein, 768 aa, Arabidopsis thaliana
  peptide (1)..(768): Ceres Seq. ID no. 12574663
MPLCNNFSGNLVVAVALFFAGALYIFNYQNYVNTLRTTQYPVDELEAALYTAAAGNNKTVIITMVNKAYVKEVGRGSTMLDLFLESFWEGEGTLPLLDHLMVVAVDQTAYDRCRFKRLHCYKMETEDGVDLEGEKVFMSKDFIEMMWRRTRLILDVLRRGYNVIFTDTDVMWLRSPLSRLNMSLDMQISVDRINVGGQLINTGFYHVRSNNKTISLFQKWYDMRLNSTGMKEQDVLKNLLDSGFFNQLGLNVGFLSTTEFSGFCQDSPHMGVVTTVHANCCLHIPAKVFDLTRVLRDWKRYKASHVNSKWSPHLKYLNISIKLLILHLKCGCLSYARQVFDELPKPTLSAYNYMISGYLKHGLVKELLLLVQRMSYSGEKADGYTLSMVLKASNSRGSTMILPRSLCRLVHARIIKCDVELDDVLITALVDTYVKSGKLESARTVFETMKDENVVCCTSMISGYMNQGFVEDAEEIFNTTKVKDIVVYNAMVEGFSRSGETAKRSVDMYISMQRAGFHPNISTFASVIGACSVLTSHEVGQQVHAQIMKSGVYTHIKMGSSLLDMYAKCGGINDARRVFDQMQEKNVFSWTSMIDGYGKNGNPEEALELFTRMKEFRIEPNYVTFLGALSACSHSGLVDKGYEIFESMQRDYSMKPKMEHYACIVDLMGRAGDLNKAFEFARAMPERPDSDIWAALLSSCNLHGNVELASIAASELFKLNADKRPGAYLALSNVYASNDKWDNVSKIREVMKRRRISKTIGRSWTSED

SEQ ID NO: 46136 - protein, 705 aa, Arabidopsis thaliana
  peptide (1)..(705): Ceres Seq. ID no. 12574664
MVNKAYVKEVGRGSTMLDLFLESFWEGEGTLPLLDHLMVVAVDQTAYDRCRFKRLHCYKMETEDGVDLEGEKVFMSKDFIEMMWRRTRLILDVLRRGYNVIFTDTDVMWLRSPLSRLNMSLDMQISVDRINVGGQLINTGFYHVRSNNKTISLFQKWYDMRLNSTGMKEQDVLKNLLDSGFFNQLGLNVGFLSTTEFSGFCQDSPHMGVVTTVHANCCLHIPAKVFDLTRVLRDWKRYKASHVNSKWSPHLKYLNISIKLLILHLKCGCLSYARQVFDELPKPTLSAYNYMISGYLKHGLVKELLLLVQRMSYSGEKADGYTLSMVLKASNSRGSTMILPRSLCRLVHARIIKCDVELDDVLITALVDTYVKSGKLESARTVFETMKDENVVCCTSMISGYMNQGFVEDAEEIFNTTKVKDIVVYNAMVEGFSRSGETAKRSVDMYISMQRAGFHPNISTFASVIGACSVLTSHEVGQQVHAQIMKSGVYTHIKMGSSLLDMYAKCGGINDARRVFDQMQEKNVFSWTSMIDGYGKNGNPEEALELFTRMKEFRIEPNYVTFLGALSACSHSGLVDKGYEIFESMQRDYSMKPKMEHYACIVDLMGRAGDLNKAFEFARAMPERPDSDIWAALLSSCNLHGNVELASIAASELFKLNADKRPGAYLALSNVYASNDKWDNVSKIREVMKRRRISKTIGRSWTSED

SEQ ID NO: 46137 - protein, 690 aa, Arabidopsis thaliana
  peptide (1)..(690): Ceres Seq. ID no. 12574665
MLDLFLESFWEGEGTLPLLDHLMVVAVDQTAYDRCRFKRLHCYKMETEDGVDLEGEKVFMSKDFIEMMWRRTRLILDVLRRGYNVIFTDTDVMWLRSPLSRLNMSLDMQISVDRINVGGQLINTGFYHVRSNNKTISLFQKWYDMRLNSTGMKEQDVLKNLLDSGFFNQLGLNVGFLSTTEFSGFCQDSPHMGVVTTVHANCCLHIPAKVFDLTRVLRDWKRYKASHVNSKWSPHLKYLNISIKLLILHLKCGCLSYARQVFDELPKPTLSAYNYMISGYLKHGLVKELLLLVQRMSYSGEKADGYTLSMVLKASNSRGSTMILPRSLCRLVHARIIKCDVELDDVLITALVDTYVKSGKLESARTVFETMKDENVVCCTSMISGYMNQGFVEDAEEIFNTTKVKDIVVYNAMVEGFSRSGETAKRSVDMYISMQRAGFHPNISTFASVIGACSVLTSHEVGQQVHAQIMKSGVYTHIKMGSSLLDMYAKCGGINDARRVFDQMQEKNVFSWTSMIDGYGKNGNPEEALELFTRMKEFRIEPNYVTFLGALSACSHSGLVDKGYEIFESMQRDYSMKPKMEHYACIVDLMGRAGDLNKAFEFARAMPERPDSDIWAALLSSCNLHGNVELASIAASELFKLNADKRPGAYLALSNVYASNDKWDNVSKIREVMKRRRISKTIGRSWTSED

SEQ ID NO: 46138 - DNA, 1519 bp, Arabidopsis thaliana; identical to SEQ ID NO: 45000
  misc_feature (1)..(1519): Ceres Seq. ID no. 12600301
  misc_feature (1)..(1519): Ortholog of  Ceres SEQ ID NO 14314280 as cited in SEQ ID NO 57429
  misc_feature (1)..(1519): Ortholog of  Ceres SEQ ID NO 13595870 as cited in SEQ ID NO 62101
  misc_feature (1)..(1519): Ortholog of  Ceres SEQ ID NO 13590241 as cited in SEQ ID NO 63878
  misc_feature (1)..(1519): Ortholog of  Ceres SEQ ID NO 13657939 as cited in SEQ ID NO 66349

SEQ ID NO: 46139 - protein, 424 aa, Arabidopsis thaliana; identical to SEQ ID NO: 45001
  peptide (1)..(424): Ceres Seq. ID no. 12600302

SEQ ID NO: 46140 - protein, 420 aa, Arabidopsis thaliana; identical to SEQ ID NO: 45002
  peptide (1)..(420): Ceres Seq. ID no. 12600303

SEQ ID NO: 46141 - protein, 405 aa, Arabidopsis thaliana; identical to SEQ ID NO: 45003
  peptide (1)..(405): Ceres Seq. ID no. 12600304

SEQ ID NO: 46142 - DNA, 1978 bp, Arabidopsis thaliana
  misc_feature (1)..(1978): Ceres Seq. ID no. 13578537
  misc_feature (1)..(1978): Ortholog of  Ceres SEQ ID NO 14303109 as cited in SEQ ID NO 66330
gtaaaggatatataaaaaaacaagtcttcatttttctctcactgtccattgcaattgtagttttatattcacagatccaaagtcctttcattttcttggattctgattctcccacagtttcatttcttcttgtgtggggaaatctgcatctttgtccactctcttttattttcccaagaaaggaaacaaattcccacaatttcttgtcttctcttaaagttcttcttaagttgaagcttcttgtctgtttttgagatttccagtaagaagaaacttcgctaattttcccgcggaaattctcttacaatcataaagttttctttttttttgctctcgagaaagttttgagaatttttacttcttcaatggcgtcaagagaagtatcaacgatgatcaaacaagggtttatcgcagacccttctctctctttttctccgtcaagaatctcatctccgattaaactctccaccgcctctcctcctcttcctccgccacctcctccgccaccaaacgaatcgactctctcaaacccgactcttttcgatatgatgtcagacgagcacaaccgcgagctaccaaggaggaaatctcacgcgcgcgtggctcaaatcttgacggagttcaagaacggcgtcgtttacggccacagcctcgggccaggagacgttaagctgactgtggtgggcaaagacggttacagagtcactatggatgttcatcggaaggttttatctgagaagagtaggttttttatggagaagatgaattctagaagagagaaaggagtttctcacatggtggagataagtgagtgtgatgatttagagatttatgtagagactgttgttttgatgtatagtgatgatctcaagaagaagttgatcggtgaaaatgtcatcaaaatcttggctttactcaaggtttctgcagctatctcgtttgatgaaggcgttatgtcatgtttggagcatttggaagctgtaccatggtcagaagatgaagaagagactgttgtgacttgtcttgaagagcttcatcttcctgatgattctgtcactttgattcttcagagagtttcatctcaaccttcgacttcctcaacgagaactagaactgatgatatcttttcgaagcttctcactggtgttctacaagcgaaagatgataaagctcggcgagagatgaaagttttgatctttaaattggttagagaagaagccgattatgatgtctctagagacacactctatggtttgtgccatcgatgtctcacgtctcttgtgctttgcttatctgaagtgaccacacagatgaatgatccggggaaagaccgtggtgctctgatgggagaaatcgccagagaagctgataacatgctgtggatggtagatatattgattgagaagaaactgtgcagtgagtttgtgaaactatgggcggatcaaaaggagctagcgaatcttcattccaagatcccaacgatgtacagacacgaaataagcaagatcaccgcgcagatatgtgttggtattggtaaaggaaggatcttggtgaatcgggagactaggtttgcggttctgaatacatggttagaggctttgtatgatgatttcgggtggatgagacggttatcctcgagatctctggataggaaactggtggaggatggactcagccagaccatattgactttgtcgttgagacaacaacaagtgattctgatgaaatggtttgatcggtttctgagcaaaggtgatgattgtccaaatgtgcaacgagcatttgaggtgtggtggagaagagctttcataagacaggtcttgacagagcccgatgagcctcggctgcagattacactctattgactaactcaatatagaataagattgtagaccctcaaaatgacaaatctttgttttcttacttttggtaaactgttactacttgtgaatttcaatgagataccaaggttcaaaag

SEQ ID NO: 46143 - protein, 499 aa, Arabidopsis thaliana
  peptide (1)..(499): Ceres Seq. ID no. 13578538
MASREVSTMIKQGFIADPSLSFSPSRISSPIKLSTASPPLPPPPPPPPNESTLSNPTLFDMMSDEHNRELPRRKSHARVAQILTEFKNGVVYGHSLGPGDVKLTVVGKDGYRVTMDVHRKVLSEKSRFFMEKMNSRREKGVSHMVEISECDDLEIYVETVVLMYSDDLKKKLIGENVIKILALLKVSAAISFDEGVMSCLEHLEAVPWSEDEEETVVTCLEELHLPDDSVTLILQRVSSQPSTSSTRTRTDDIFSKLLTGVLQAKDDKARREMKVLIFKLVREEADYDVSRDTLYGLCHRCLTSLVLCLSEVTTQMNDPGKDRGALMGEIAREADNMLWMVDILIEKKLCSEFVKLWADQKELANLHSKIPTMYRHEISKITAQICVGIGKGRILVNRETRFAVLNTWLEALYDDFGWMRRLSSRSLDRKLVEDGLSQTILTLSLRQQQVILMKWFDRFLSKGDDCPNVQRAFEVWWRRAFIRQVLTEPDEPRLQITLY

SEQ ID NO: 46144 - protein, 491 aa, Arabidopsis thaliana
  peptide (1)..(491): Ceres Seq. ID no. 13578539
MIKQGFIADPSLSFSPSRISSPIKLSTASPPLPPPPPPPPNESTLSNPTLFDMMSDEHNRELPRRKSHARVAQILTEFKNGVVYGHSLGPGDVKLTVVGKDGYRVTMDVHRKVLSEKSRFFMEKMNSRREKGVSHMVEISECDDLEIYVETVVLMYSDDLKKKLIGENVIKILALLKVSAAISFDEGVMSCLEHLEAVPWSEDEEETVVTCLEELHLPDDSVTLILQRVSSQPSTSSTRTRTDDIFSKLLTGVLQAKDDKARREMKVLIFKLVREEADYDVSRDTLYGLCHRCLTSLVLCLSEVTTQMNDPGKDRGALMGEIAREADNMLWMVDILIEKKLCSEFVKLWADQKELANLHSKIPTMYRHEISKITAQICVGIGKGRILVNRETRFAVLNTWLEALYDDFGWMRRLSSRSLDRKLVEDGLSQTILTLSLRQQQVILMKWFDRFLSKGDDCPNVQRAFEVWWRRAFIRQVLTEPDEPRLQITLY

SEQ ID NO: 46145 - protein, 439 aa, Arabidopsis thaliana
  peptide (1)..(439): Ceres Seq. ID no. 13578540
MMSDEHNRELPRRKSHARVAQILTEFKNGVVYGHSLGPGDVKLTVVGKDGYRVTMDVHRKVLSEKSRFFMEKMNSRREKGVSHMVEISECDDLEIYVETVVLMYSDDLKKKLIGENVIKILALLKVSAAISFDEGVMSCLEHLEAVPWSEDEEETVVTCLEELHLPDDSVTLILQRVSSQPSTSSTRTRTDDIFSKLLTGVLQAKDDKARREMKVLIFKLVREEADYDVSRDTLYGLCHRCLTSLVLCLSEVTTQMNDPGKDRGALMGEIAREADNMLWMVDILIEKKLCSEFVKLWADQKELANLHSKIPTMYRHEISKITAQICVGIGKGRILVNRETRFAVLNTWLEALYDDFGWMRRLSSRSLDRKLVEDGLSQTILTLSLRQQQVILMKWFDRFLSKGDDCPNVQRAFEVWWRRAFIRQVLTEPDEPRLQITLY

SEQ ID NO: 46146 - DNA, 804 bp, Arabidopsis thaliana; identical to SEQ ID NO: 43806
  misc_feature (1)..(804): Ceres Seq. ID no. 12601213
  misc_feature (1)..(804): Ortholog of  Ceres SEQ ID NO 15177927 as cited in SEQ ID NO 1170
  misc_feature (1)..(804): Ortholog of  Ceres SEQ ID NO 13596295 as cited in SEQ ID NO 68019

SEQ ID NO: 46147 - protein, 217 aa, Arabidopsis thaliana; identical to SEQ ID NO: 43807
  peptide (1)..(217): Ceres Seq. ID no. 12601214

SEQ ID NO: 46148 - protein, 208 aa, Arabidopsis thaliana; identical to SEQ ID NO: 43808
  peptide (1)..(208): Ceres Seq. ID no. 12601215

SEQ ID NO: 46149 - protein, 175 aa, Arabidopsis thaliana; identical to SEQ ID NO: 43809
  peptide (1)..(175): Ceres Seq. ID no. 12601216

SEQ ID NO: 46150 - DNA, 1480 bp, Arabidopsis thaliana
  misc_feature (1)..(1480): Ceres Seq. ID no. 13579138
  misc_feature (1)..(1480): Ortholog of  Ceres SEQ ID NO 14315257 as cited in SEQ ID NO 52552
  misc_feature (1)..(1480): Ortholog of  Ceres SEQ ID NO 13594345 as cited in SEQ ID NO 58043
  misc_feature (1)..(1480): Ortholog of  Ceres SEQ ID NO 13597574 as cited in SEQ ID NO 64677
  misc_feature (1)..(1480): Ortholog of  Ceres SEQ ID NO 13597843 as cited in SEQ ID NO 64850
  misc_feature (1)..(1480): Ortholog of  Ceres SEQ ID NO 13597678 as cited in SEQ ID NO 65375
  misc_feature (1)..(1480): Ortholog of  Ceres SEQ ID NO 13662880 as cited in SEQ ID NO 65422
  misc_feature (1)..(1480): Ortholog of  Ceres SEQ ID NO 13596180 as cited in SEQ ID NO 67941
  misc_feature (1)..(1480): Ortholog of  Ceres SEQ ID NO 13591190 as cited in SEQ ID NO 68044
  misc_feature (1)..(1480): Ortholog of  Ceres SEQ ID NO 13595961 as cited in SEQ ID NO 68223
gaaaggaagcattaaacacaagaatagagagagaagaaagaagaagacgatgaaagcagaagcagagatcatcttcgttacatatccatcccctggtcatcttcttgtctccattgaattcgctaaatctctcatcaaacgtgatgatcgcatccacaccatcaccatcctctactgggctttacctctcgctcctcaagcccaccttttcgctaagtccctcgttgcttcacagcctcgaatccgtctccttgcgttgcctgatgttcaaaaccctccaccattggaactcttctttaaagctcccgaagcttatattcttgagtccaccaagaaaacagttcctttagtcagagacgctctctccactctagtttcttcacgtaaagaatccggttcggttcgtgtagtcggtttggttatcgattttttttgtgttccaatgatcgaagtggcaaacgagcttaaccttccttcttacatcttcctaacgtgtaacgctgggtttttaagtatgatgaagtatctccctgagagacatcgcataaccacttctgagctagatttaagctccggcaacgtagaacatccaattcctggctacgtctgctccgtgccgacgaaggttttgcctccaggtctattcgtgagagagtcctacgaggcttgggtcgagattgcagagaagttccctggagccaagggcattttggtaaactcagtcacatgtcttgagcagaatgcatttgattacttcgctcgtcttgatgagaactatcctccggtttacccggtcggaccggttcttagtttgaaggatcgtccgtctccaaatctggacgcatcggaccgggatcggatcatgagatggctcgaggaccagccggagtcgtcaattgtgtatatctgcttcggaagcctcggaatcattggcaagctgcagattgaagagatagctgaagccttggaactcaccggccacaggtttctttggtcaatacgtacaaatccgacggagaaagcgagcccgtacgatctgttgccggagggatttctcgatcggacggccagtaagggattggtgtgtgattgggccccgcaagtagaagttctggcccataaagcgctcggaggattcgtgtctcactgcggttggaactctgtactggagagcttatggttcggtgttccgatcgccacgtggccaatgtacgctgagcaacagttaaacgcattctcgatggtgaaggagttagggttagccgtggagctgcgtttagactacgtttcggcgtacggagagatagtaaaagctgaggagatcgcgggagccatacgatcattgatggacggtgaggatacgccgaggaagagagtgaaggagatggcggaagcggcgaggaatgctttgatggacggaggatcttcgtttgttgcggttaaacgatttctcgacgagttgatcggcggagatgtttag

SEQ ID NO: 46151 - protein, 492 aa, Arabidopsis thaliana
  peptide (1)..(492): Ceres Seq. ID no. 13579139
KGSIKHKNRERRKKKTMKAEAEIIFVTYPSPGHLLVSIEFAKSLIKRDDRIHTITILYWALPLAPQAHLFAKSLVASQPRIRLLALPDVQNPPPLELFFKAPEAYILESTKKTVPLVRDALSTLVSSRKESGSVRVVGLVIDFFCVPMIEVANELNLPSYIFLTCNAGFLSMMKYLPERHRITTSELDLSSGNVEHPIPGYVCSVPTKVLPPGLFVRESYEAWVEIAEKFPGAKGILVNSVTCLEQNAFDYFARLDENYPPVYPVGPVLSLKDRPSPNLDASDRDRIMRWLEDQPESSIVYICFGSLGIIGKLQIEEIAEALELTGHRFLWSIRTNPTEKASPYDLLPEGFLDRTASKGLVCDWAPQVEVLAHKALGGFVSHCGWNSVLESLWFGVPIATWPMYAEQQLNAFSMVKELGLAVELRLDYVSAYGEIVKAEEIAGAIRSLMDGEDTPRKRVKEMAEAARNALMDGGSSFVAVKRFLDELIGGDV

SEQ ID NO: 46152 - protein, 476 aa, Arabidopsis thaliana
  peptide (1)..(476): Ceres Seq. ID no. 13579140
MKAEAEIIFVTYPSPGHLLVSIEFAKSLIKRDDRIHTITILYWALPLAPQAHLFAKSLVASQPRIRLLALPDVQNPPPLELFFKAPEAYILESTKKTVPLVRDALSTLVSSRKESGSVRVVGLVIDFFCVPMIEVANELNLPSYIFLTCNAGFLSMMKYLPERHRITTSELDLSSGNVEHPIPGYVCSVPTKVLPPGLFVRESYEAWVEIAEKFPGAKGILVNSVTCLEQNAFDYFARLDENYPPVYPVGPVLSLKDRPSPNLDASDRDRIMRWLEDQPESSIVYICFGSLGIIGKLQIEEIAEALELTGHRFLWSIRTNPTEKASPYDLLPEGFLDRTASKGLVCDWAPQVEVLAHKALGGFVSHCGWNSVLESLWFGVPIATWPMYAEQQLNAFSMVKELGLAVELRLDYVSAYGEIVKAEEIAGAIRSLMDGEDTPRKRVKEMAEAARNALMDGGSSFVAVKRFLDELIGGDV

SEQ ID NO: 46153 - protein, 345 aa, Arabidopsis thaliana
  peptide (1)..(345): Ceres Seq. ID no. 13579141
MIEVANELNLPSYIFLTCNAGFLSMMKYLPERHRITTSELDLSSGNVEHPIPGYVCSVPTKVLPPGLFVRESYEAWVEIAEKFPGAKGILVNSVTCLEQNAFDYFARLDENYPPVYPVGPVLSLKDRPSPNLDASDRDRIMRWLEDQPESSIVYICFGSLGIIGKLQIEEIAEALELTGHRFLWSIRTNPTEKASPYDLLPEGFLDRTASKGLVCDWAPQVEVLAHKALGGFVSHCGWNSVLESLWFGVPIATWPMYAEQQLNAFSMVKELGLAVELRLDYVSAYGEIVKAEEIAGAIRSLMDGEDTPRKRVKEMAEAARNALMDGGSSFVAVKRFLDELIGGDV

SEQ ID NO: 46154 - DNA, 1193 bp, Arabidopsis thaliana
  misc_feature (1)..(1193): Ceres Seq. ID no. 12574427
  misc_feature (1)..(1193): Ortholog of  Ceres SEQ ID NO 15178083 as cited in SEQ ID NO 56185
  misc_feature (1)..(1193): Ortholog of  Ceres SEQ ID NO 15225046 as cited in SEQ ID NO 57061
  misc_feature (1)..(1193): Ortholog of  Ceres SEQ ID NO 15173586 as cited in SEQ ID NO 61901
  misc_feature (1)..(1193): Ortholog of  Ceres SEQ ID NO 15179881 as cited in SEQ ID NO 66861
aaaactgtcttaaggaagagaaaggaacaaaagaaaacagatgtgagctcttcttcttcgtcttcttctctctattttattctcatcctctcctcacagttactataagctcgtctatggccagagacggtggtgtttcttgtttacgaaggtcggagatgatgagcgtcggtggtatcggaggaattgaatctgcgccgttggatttagatgaagttcatgtcttagccgttgatgacagtctcgttgatcgtattgtcatcgagagattgcttcgtattacttcctgcaaagttacggcggtagatagtggatggcgtgctctggaatttctagggttagataatgagaaagcttctgctgaattcgatagattgaaagttgatttgatcatcactgattactgtatgcctggaatgactggttatgagcttctcaagaagattaaggaatcgtccaatttcagagaagttccggttgtaatcatgtcgtcggagaatgtattgaccagaatcgacagatgccttgaggaaggtgctcaagatttcttattgaaaccggtgaaactcgccgacgtgaaacgtctgagaagtcatttaactaaagacgttaaactttccaacggaaacaaacggaagcttccggaagattctagttccgttaactcttcgcttcctccaccgtcacctccgttgactatctcgcctgaatcgtcgccgccgttgactgtttcgactgaatcgtcggattcgtctccgccgttatctccggtggagatcttttccacctcgccactttcatctccgatagacgatgaagatgatgacgtgttgacgtcgtcgtcggaggaatcgccgattcgacggcagaagatgaggagtcccggattagattagtggaactattctgggatgccgtgtaatattatctatctccgttaacttcgtttttacctctgacggtgtttttaattgcacgttgacttgacgccgtcaaattttatagatgtccctttaatctctcgcgcctccacgtgggccttttttccttttccttaaagcttttcgaatatcttttaattattttaatttctgcacaaagttacgtttttaacttttttagtctttaaacaaagggaaaattgcaatcgaaccttcgacattcaccatttattatgataacgagacttgaat

SEQ ID NO: 46155 - protein, 297 aa, Arabidopsis thaliana
  peptide (1)..(297): Ceres Seq. ID no. 12574428
NCLKEEKGTKENRCELFFFVFFSLFYSHPLLTVTISSSMARDGGVSCLRRSEMMSVGGIGGIESAPLDLDEVHVLAVDDSLVDRIVIERLLRITSCKVTAVDSGWRALEFLGLDNEKASAEFDRLKVDLIITDYCMPGMTGYELLKKIKESSNFREVPVVIMSSENVLTRIDRCLEEGAQDFLLKPVKLADVKRLRSHLTKDVKLSNGNKRKLPEDSSSVNSSLPPPSPPLTISPESSPPLTVSTESSDSSPPLSPVEIFSTSPLSSPIDDEDDDVLTSSSEESPIRRQKMRSPGLD

SEQ ID NO: 46156 - protein, 259 aa, Arabidopsis thaliana
  peptide (1)..(259): Ceres Seq. ID no. 12574429
MARDGGVSCLRRSEMMSVGGIGGIESAPLDLDEVHVLAVDDSLVDRIVIERLLRITSCKVTAVDSGWRALEFLGLDNEKASAEFDRLKVDLIITDYCMPGMTGYELLKKIKESSNFREVPVVIMSSENVLTRIDRCLEEGAQDFLLKPVKLADVKRLRSHLTKDVKLSNGNKRKLPEDSSSVNSSLPPPSPPLTISPESSPPLTVSTESSDSSPPLSPVEIFSTSPLSSPIDDEDDDVLTSSSEESPIRRQKMRSPGLD

SEQ ID NO: 46157 - protein, 245 aa, Arabidopsis thaliana
  peptide (1)..(245): Ceres Seq. ID no. 12574430
MMSVGGIGGIESAPLDLDEVHVLAVDDSLVDRIVIERLLRITSCKVTAVDSGWRALEFLGLDNEKASAEFDRLKVDLIITDYCMPGMTGYELLKKIKESSNFREVPVVIMSSENVLTRIDRCLEEGAQDFLLKPVKLADVKRLRSHLTKDVKLSNGNKRKLPEDSSSVNSSLPPPSPPLTISPESSPPLTVSTESSDSSPPLSPVEIFSTSPLSSPIDDEDDDVLTSSSEESPIRRQKMRSPGLD

SEQ ID NO: 46158 - DNA, 1534 bp, Arabidopsis thaliana; identical to SEQ ID NO: 40297
  misc_feature (1)..(1534): Ceres Seq. ID no. 12558430
  misc_feature (1)..(1534): Ortholog of  Ceres SEQ ID NO 15177878 as cited in SEQ ID NO 59929
  misc_feature (1)..(1534): Ortholog of  Ceres SEQ ID NO 13658888 as cited in SEQ ID NO 66542

SEQ ID NO: 46159 - protein, 420 aa, Arabidopsis thaliana; identical to SEQ ID NO: 40298
  peptide (1)..(420): Ceres Seq. ID no. 12558431

SEQ ID NO: 46160 - protein, 406 aa, Arabidopsis thaliana; identical to SEQ ID NO: 40299
  peptide (1)..(406): Ceres Seq. ID no. 12558432

SEQ ID NO: 46161 - protein, 386 aa, Arabidopsis thaliana; identical to SEQ ID NO: 40300
  peptide (1)..(386): Ceres Seq. ID no. 12558433

SEQ ID NO: 46162 - DNA, 1786 bp, Arabidopsis thaliana
  misc_feature (1)..(1786): Ceres Seq. ID no. 12574921
  misc_feature (1)..(1786): Ortholog of  Ceres SEQ ID NO 15174638 as cited in SEQ ID NO 53185
  misc_feature (1)..(1786): Ortholog of  Ceres SEQ ID NO 13659394 as cited in SEQ ID NO 67049
atatcattatttaaaaatagaattttatttttctttcttcttcttcaattattatgacactcccgtgttcctaatcttttctcttattcttctctttcttctcatcttacaaaatcttgcaaatcaattttaatgaagagagagcacaaccaccgtgaatcatccgccggagaaggtgggagttcatcaatgacgacggtgattaaagaagaagctgccggagttgacgagcttttggttgttttaggttacaaagttcgatcatccgacatggctgacgtggcacacaagcttgaacagttagagatggttcttggtgatggaatctcgaatctttctgatgaaactgttcattacaatccttctgatctctctggttgggtcgaaagcatgctctcggatcttgacccgacccggattcaagaaaagcctgactcagagtacgatcttagagctattcctggctctgcagtgtatccacgtgacgagcacgtgactcgtcggagcaagaggacgagaattgaatcggagttatcctctacgcgctctgtggtggttttggattctcaagaaactggagtgcgtttagtccacgcgctattagcttgtgctgaagctgttcaacagaacaatttgaagttagccgacgcgctcgtgaagcacgtggggttactcgcgtcctctcaagctggtgctatgaggaaagtcgcgacttacttcgctgaagggcttgcgagaaggatttaccgtatttaccctcgagacgatgtcgcgttgtcttcgttttcggacactcttcagattcatttctatgagtcttgtccgtatctcaagtttgcgcattttacggcgaatcaagcgatacttgaggtttttgctacggcggagaaggttcatgttattgatttaggacttaaccatggtttacaatggccggctttgattcaagctcttgctttacgtcctaatggtccaccggattttcggttaaccgggatcggttattcgttaaccgatattcaagaagttggttggaaacttggtcagcttgcgagtactattggtgtcaatttcgaattcaagagcattgctttaaacaatttgtctgatcttaaaccggaaatgctagacattagacccggtttagaatcagtggcggttaactcggtcttcgagcttcatcgcctcttagctcatcccggttccatcgataagtttttatcgacaatcaaatcaatccgaccggatataatgactgtggtcgagcaagaagcaaaccataacggtaccgtatttctcgatcggttcacggaatcgctacattactattcgagcttattcgactcgctcgagggcccgccaagccaagaccgagtgatgtcggagttattcctaggacggcagatactaaaccttgtggcatgcgaaggagaagaccgggtagagaggcatgagactttaaatcagtggagaaaccggttcggtttaggaggatttaaaccggttagtatcggttcgaacgcgtataagcaagcaagcatgttgttggcactttatgccggggctgatgggtataatgtggaagagaatgaaggttgtttgttgcttggatggcaaacgcgaccgcttattgcaacatctgcgtggcgaatcaatcgtgtggaataaaaataaataatgggaaaagtgaaaatgtgctatatactttattgcattgctgataaagaaaaaaagtcccacgttttccaaattttatgaattctaaattttgttcacttgtcacgag

SEQ ID NO: 46163 - protein, 511 aa, Arabidopsis thaliana
  peptide (1)..(511): Ceres Seq. ID no. 12574922
MKREHNHRESSAGEGGSSSMTTVIKEEAAGVDELLVVLGYKVRSSDMADVAHKLEQLEMVLGDGISNLSDETVHYNPSDLSGWVESMLSDLDPTRIQEKPDSEYDLRAIPGSAVYPRDEHVTRRSKRTRIESELSSTRSVVVLDSQETGVRLVHALLACAEAVQQNNLKLADALVKHVGLLASSQAGAMRKVATYFAEGLARRIYRIYPRDDVALSSFSDTLQIHFYESCPYLKFAHFTANQAILEVFATAEKVHVIDLGLNHGLQWPALIQALALRPNGPPDFRLTGIGYSLTDIQEVGWKLGQLASTIGVNFEFKSIALNNLSDLKPEMLDIRPGLESVAVNSVFELHRLLAHPGSIDKFLSTIKSIRPDIMTVVEQEANHNGTVFLDRFTESLHYYSSLFDSLEGPPSQDRVMSELFLGRQILNLVACEGEDRVERHETLNQWRNRFGLGGFKPVSIGSNAYKQASMLLALYAGADGYNVEENEGCLLLGWQTRPLIATSAWRINRVE

SEQ ID NO: 46164 - protein, 492 aa, Arabidopsis thaliana
  peptide (1)..(492): Ceres Seq. ID no. 12574923
MTTVIKEEAAGVDELLVVLGYKVRSSDMADVAHKLEQLEMVLGDGISNLSDETVHYNPSDLSGWVESMLSDLDPTRIQEKPDSEYDLRAIPGSAVYPRDEHVTRRSKRTRIESELSSTRSVVVLDSQETGVRLVHALLACAEAVQQNNLKLADALVKHVGLLASSQAGAMRKVATYFAEGLARRIYRIYPRDDVALSSFSDTLQIHFYESCPYLKFAHFTANQAILEVFATAEKVHVIDLGLNHGLQWPALIQALALRPNGPPDFRLTGIGYSLTDIQEVGWKLGQLASTIGVNFEFKSIALNNLSDLKPEMLDIRPGLESVAVNSVFELHRLLAHPGSIDKFLSTIKSIRPDIMTVVEQEANHNGTVFLDRFTESLHYYSSLFDSLEGPPSQDRVMSELFLGRQILNLVACEGEDRVERHETLNQWRNRFGLGGFKPVSIGSNAYKQASMLLALYAGADGYNVEENEGCLLLGWQTRPLIATSAWRINRVE

SEQ ID NO: 46165 - protein, 465 aa, Arabidopsis thaliana
  peptide (1)..(465): Ceres Seq. ID no. 12574924
MADVAHKLEQLEMVLGDGISNLSDETVHYNPSDLSGWVESMLSDLDPTRIQEKPDSEYDLRAIPGSAVYPRDEHVTRRSKRTRIESELSSTRSVVVLDSQETGVRLVHALLACAEAVQQNNLKLADALVKHVGLLASSQAGAMRKVATYFAEGLARRIYRIYPRDDVALSSFSDTLQIHFYESCPYLKFAHFTANQAILEVFATAEKVHVIDLGLNHGLQWPALIQALALRPNGPPDFRLTGIGYSLTDIQEVGWKLGQLASTIGVNFEFKSIALNNLSDLKPEMLDIRPGLESVAVNSVFELHRLLAHPGSIDKFLSTIKSIRPDIMTVVEQEANHNGTVFLDRFTESLHYYSSLFDSLEGPPSQDRVMSELFLGRQILNLVACEGEDRVERHETLNQWRNRFGLGGFKPVSIGSNAYKQASMLLALYAGADGYNVEENEGCLLLGWQTRPLIATSAWRINRVE

SEQ ID NO: 46166 - DNA, 2003 bp, Arabidopsis thaliana
  misc_feature (1)..(2003): Ceres Seq. ID no. 13592058
  misc_feature (1)..(2003): Ortholog of  Ceres SEQ ID NO 13659971 as cited in SEQ ID NO 67565
ttcaacaactgtgttatctctatgaacagttcctttgatgaagaacacaaagtgaaagttgctgtctttataaccaggatttggtaattcccattgtttcatgggcaattcttgccgtggatctttcaaggacaaactcgacgaaggcgataacaataagcctgaagattactctaaaacctctaccaccaacttgtcttctaattccgaccattcaccgaacgctgcagacatcattgctcaagaattctccaaagacaacaacagcaacaacaacagcaaagatccagctcttgttattcctttaagagaaccaatcatgaggcgtaacccagacaatcaagcttactatgttcttggtcataagacaccaaacattcgtgatatctatacccttagccgcaagctaggtcaaggtcaatttggaacgacttatctatgtacagagattgcctcaggcgttgactacgcttgtaagtcaatatccaagaggaagttgatctctaaagaagatgttgaggatgttagaagggagattcagataatgcatcatttagctggtcacggtagtatcgtgacgattaaaggagcttatgaggactctttgtatgttcacattgttatggagctttgtgctggaggtgaattgtttgataggattattcagagaggacattatagtgagaggaaagctgctgagctgactaagatcattgtcggtgttgttgaagcgtgtcattcgcttggtgtgatgcatagagacttgaagcctgagaatttcttattggttaataaggatgatgatttctctctcaaggctattgattttgggctatctgtctttttcaaaccaggtcaaatattcactgatgttgttggaagtccatattatgttgctcctgaggttttgctcaaacgttatgggcctgaagctgatgtgtggactgctggtgttatattgtatatattgctaagcggagtcccacctttctgggcagaaacacagcaagggatatttgatgctgtgttgaaaggatatatcgactttgagtcagacccgtggcctgtgatatccgacagtgctaaagacttgatccgcagaatgttatcctccaagcctgcagaacgtttgaccgctcatgaagtcttgcgtcatccatggatctgtgagaatggtgttgcaccagatagagcactagatccagctgttctttctcgtctcaagcaattctctgcaatgaataaactaaagaagatggctttgaaggttatagctgagagtctctcggaagaagagatagctggtttaagagaaatgtttcaagcaatggatactgataacagcggggcaatcacatttgatgaactcaaagctgggctgagaaaatatggatctaccttgaaagacacagagatccatgatcttatggatgcggctgatgtagacaacagtgggacaatagattacagtgagttcattgcagcgacgatccatctcaacaaactagagcgggaagagcatcttgttgcagcgtttcaatattttgacaaagatggaagcggtttcataacaattgatgagctacaacaagcgtgtgttgaacatggcatggctgatgttttccttgaagacatcatcaaagaagttgatcaaaacaatgatggaaagattgattatggtgagtttgtggagatgatgcaaaagggaaatgctggtgttggaagaaggacgatgagaaatagtctaaacattagcatgagagacgcgtagaggttgttttccccggtgtttaatatgttagtgcgatcgtgactgcgaaaatgttcttattcatggaatcaacaacctcaatgctcaccacctagaaggcgatgaaagaagaccaaaccggattcatacctgtggatggttcgagttttgtttaacgactgtgtgattaatcgtcaagtagttttggaggttttttctttacctctttgttgtttgttcattatggccattg

SEQ ID NO: 46167 - protein, 556 aa, Arabidopsis thaliana
  peptide (1)..(556): Ceres Seq. ID no. 13592059
MGNSCRGSFKDKLDEGDNNKPEDYSKTSTTNLSSNSDHSPNAADIIAQEFSKDNNSNNNSKDPALVIPLREPIMRRNPDNQAYYVLGHKTPNIRDIYTLSRKLGQGQFGTTYLCTEIASGVDYACKSISKRKLISKEDVEDVRREIQIMHHLAGHGSIVTIKGAYEDSLYVHIVMELCAGGELFDRIIQRGHYSERKAAELTKIIVGVVEACHSLGVMHRDLKPENFLLVNKDDDFSLKAIDFGLSVFFKPGQIFTDVVGSPYYVAPEVLLKRYGPEADVWTAGVILYILLSGVPPFWAETQQGIFDAVLKGYIDFESDPWPVISDSAKDLIRRMLSSKPAERLTAHEVLRHPWICENGVAPDRALDPAVLSRLKQFSAMNKLKKMALKVIAESLSEEEIAGLREMFQAMDTDNSGAITFDELKAGLRKYGSTLKDTEIHDLMDAADVDNSGTIDYSEFIAATIHLNKLEREEHLVAAFQYFDKDGSGFITIDELQQACVEHGMADVFLEDIIKEVDQNNDGKIDYGEFVEMMQKGNAGVGRRTMRNSLNISMRDA

SEQ ID NO: 46168 - protein, 483 aa, Arabidopsis thaliana
  peptide (1)..(483): Ceres Seq. ID no. 13592060
MRRNPDNQAYYVLGHKTPNIRDIYTLSRKLGQGQFGTTYLCTEIASGVDYACKSISKRKLISKEDVEDVRREIQIMHHLAGHGSIVTIKGAYEDSLYVHIVMELCAGGELFDRIIQRGHYSERKAAELTKIIVGVVEACHSLGVMHRDLKPENFLLVNKDDDFSLKAIDFGLSVFFKPGQIFTDVVGSPYYVAPEVLLKRYGPEADVWTAGVILYILLSGVPPFWAETQQGIFDAVLKGYIDFESDPWPVISDSAKDLIRRMLSSKPAERLTAHEVLRHPWICENGVAPDRALDPAVLSRLKQFSAMNKLKKMALKVIAESLSEEEIAGLREMFQAMDTDNSGAITFDELKAGLRKYGSTLKDTEIHDLMDAADVDNSGTIDYSEFIAATIHLNKLEREEHLVAAFQYFDKDGSGFITIDELQQACVEHGMADVFLEDIIKEVDQNNDGKIDYGEFVEMMQKGNAGVGRRTMRNSLNISMRDA

SEQ ID NO: 46169 - protein, 408 aa, Arabidopsis thaliana
  peptide (1)..(408): Ceres Seq. ID no. 13592061
MHHLAGHGSIVTIKGAYEDSLYVHIVMELCAGGELFDRIIQRGHYSERKAAELTKIIVGVVEACHSLGVMHRDLKPENFLLVNKDDDFSLKAIDFGLSVFFKPGQIFTDVVGSPYYVAPEVLLKRYGPEADVWTAGVILYILLSGVPPFWAETQQGIFDAVLKGYIDFESDPWPVISDSAKDLIRRMLSSKPAERLTAHEVLRHPWICENGVAPDRALDPAVLSRLKQFSAMNKLKKMALKVIAESLSEEEIAGLREMFQAMDTDNSGAITFDELKAGLRKYGSTLKDTEIHDLMDAADVDNSGTIDYSEFIAATIHLNKLEREEHLVAAFQYFDKDGSGFITIDELQQACVEHGMADVFLEDIIKEVDQNNDGKIDYGEFVEMMQKGNAGVGRRTMRNSLNISMRDA

SEQ ID NO: 46170 - DNA, 1640 bp, Arabidopsis thaliana
  misc_feature (1)..(1640): Ceres Seq. ID no. 12601217
  misc_feature (1)..(1640): Ortholog of  Ceres SEQ ID NO 14315580 as cited in SEQ ID NO 53846
gaaacggaaaactcaaagccgagacagtactctagcttctccggcgactccaggagcgcctctttgcacctctcttcttctctcgctctctgtttctgaggttctgcaagaagtaaaacatgtcagttcttattgtgacgagccttggtgatatagtaattgaccttcactcggataaatgccctttgacttgcaagaacttccttaagctttgcaagatcaagtactacaatgggtgtctttttcacactgtgcaaaaggatttcacagcacagactggtgatccaactggtacgggagctggtggagattcaatctacaaatttctgtacggtgagcaggctcgtttttacaaagatgagattcatcttgatttaaaacattcaaagaccggcactgttgcaatggccagtggtggagagaatctcaatgcttcccagttctatttcacacttcgtgatgatttggactatcttgatgggaaacacactgtgtttggacagattgctgaggggtttgacactttgactaggataaatgaagcttatgttgatccgaagaacagaccctataagaacattagaatcaagcacacacatatacttgatgatccatttgatgatcccccacagctggctgaaatgatgccagatgcttcccctgaaggaaaaccgaaagaagaggtcaaagatgacgtgcggcttgaagatgattgggttccaatggatgaagaacttggtgctcaggaactggaggaggttatccgcgaaaaggcagcccattcaagtgctgttgtacttgaaagtataggagatatccccgaggctgaggtaaaacctcctgacaatgtgctgttcgtctgcaaactgaatccagtgactgaggatgaagacctccataccattttttcacgctttggaaccgttgtatcggctgatgtaatccgggatttcaagacaggtgacagtttgtgctatgcttttatagagtttgagaacaaggagtcatgcgaacaagcgtactttaagatggacaatgctctgatcgatgatagacggatacatgtggatttcagtcagagtgtgtccaaactttggtcacagttcaggcaaaaagactcccaaaagggcaaagggaatgggtgtttcaaatgcggctcgacggatcatattgccaaggactgtgtgggtggtccgtcttcaaagtttattgtaaaagatcaaaacagacagcacggaggaggtgaaggctatgagatggtgtttgagggtgatgtgcatgaaacccccaagcataatagtcatgagagggagaggagtgagaagattcagaggagaagtcctcatggtaatggggaaggcaaaagacagcacagagatgaacgtgatgatggtagaagacagcatgatcgggaagacgcacgagaactggagaggaaacacagagagagaaaagaaagagagagtagggaagatgaagacagaagaagaagaagacgccgtgaagagtctagagataaagagagtcggagagagagagacgaagatgatcatcggagtcatagagattataaagagaggagaagagagagagacgatagacatggaagagaagctagacatgagagaagggatagatga

SEQ ID NO: 46171 - protein, 506 aa, Arabidopsis thaliana
  peptide (1)..(506): Ceres Seq. ID no. 12601218
MSVLIVTSLGDIVIDLHSDKCPLTCKNFLKLCKIKYYNGCLFHTVQKDFTAQTGDPTGTGAGGDSIYKFLYGEQARFYKDEIHLDLKHSKTGTVAMASGGENLNASQFYFTLRDDLDYLDGKHTVFGQIAEGFDTLTRINEAYVDPKNRPYKNIRIKHTHILDDPFDDPPQLAEMMPDASPEGKPKEEVKDDVRLEDDWVPMDEELGAQELEEVIREKAAHSSAVVLESIGDIPEAEVKPPDNVLFVCKLNPVTEDEDLHTIFSRFGTVVSADVIRDFKTGDSLCYAFIEFENKESCEQAYFKMDNALIDDRRIHVDFSQSVSKLWSQFRQKDSQKGKGNGCFKCGSTDHIAKDCVGGPSSKFIVKDQNRQHGGGEGYEMVFEGDVHETPKHNSHERERSEKIQRRSPHGNGEGKRQHRDERDDGRRQHDREDARELERKHRERKERESREDEDRRRRRRREESRDKESRRERDEDDHRSHRDYKERRRERDDRHGREARHERRDR

SEQ ID NO: 46172 - protein, 411 aa, Arabidopsis thaliana
  peptide (1)..(411): Ceres Seq. ID no. 12601219
MASGGENLNASQFYFTLRDDLDYLDGKHTVFGQIAEGFDTLTRINEAYVDPKNRPYKNIRIKHTHILDDPFDDPPQLAEMMPDASPEGKPKEEVKDDVRLEDDWVPMDEELGAQELEEVIREKAAHSSAVVLESIGDIPEAEVKPPDNVLFVCKLNPVTEDEDLHTIFSRFGTVVSADVIRDFKTGDSLCYAFIEFENKESCEQAYFKMDNALIDDRRIHVDFSQSVSKLWSQFRQKDSQKGKGNGCFKCGSTDHIAKDCVGGPSSKFIVKDQNRQHGGGEGYEMVFEGDVHETPKHNSHERERSEKIQRRSPHGNGEGKRQHRDERDDGRRQHDREDARELERKHRERKERESREDEDRRRRRRREESRDKESRRERDEDDHRSHRDYKERRRERDDRHGREARHERRDR

SEQ ID NO: 46173 - protein, 332 aa, Arabidopsis thaliana
  peptide (1)..(332): Ceres Seq. ID no. 12601220
MMPDASPEGKPKEEVKDDVRLEDDWVPMDEELGAQELEEVIREKAAHSSAVVLESIGDIPEAEVKPPDNVLFVCKLNPVTEDEDLHTIFSRFGTVVSADVIRDFKTGDSLCYAFIEFENKESCEQAYFKMDNALIDDRRIHVDFSQSVSKLWSQFRQKDSQKGKGNGCFKCGSTDHIAKDCVGGPSSKFIVKDQNRQHGGGEGYEMVFEGDVHETPKHNSHERERSEKIQRRSPHGNGEGKRQHRDERDDGRRQHDREDARELERKHRERKERESREDEDRRRRRRREESRDKESRRERDEDDHRSHRDYKERRRERDDRHGREARHERRDR

SEQ ID NO: 46174 - DNA, 1281 bp, Arabidopsis thaliana
  misc_feature (1)..(1281): Ceres Seq. ID no. 12574298
  misc_feature (1)..(1281): Ortholog of  Ceres SEQ ID NO 14304502 as cited in SEQ ID NO 53212
atggagagattcaatttctttaatctgatgatcatagctttatgtttatcatccttcgttcacagtctcgaggttcttcttcttatacacacttctcttctaatcttttatgaatcttttaaaagtaacagagaagtttttttattttactcacagatgggagaaacatgtagttcgaccagcgaatgcgacgccggattgagctgtcaaagttgtccggcgaatggaaataccggctctacttgtacccggatccaacctcttaacccgacttcaaaggtgaatggtttgccgtttaacaagtactcgtggctaacaacacacaattcgtacgcaatcacgggggcaaattcggcaactggttcattccttgtctctccaaagaatcaagaagactccatcaccaatcagcttaagaatggtgtgagaggtataatgctagatacatatgattttcaaaacgatatatggttgtgtcattccactggagggacttgctttaacttcacagcctttcaaccagctatcaatgcacttaaagagatcaatgattttcttgaatcaaacttgtctgagattgttactatcatacttgaagattatgtcaaatctcaaatgggattgactaatgtattcaatgcatctggattgagtaagttcttgttaccaatctcgagaatgccgaaagacggtacagactggccaacggttgatgatatggtgaagcagaaccaaaggcttgtggtttttacttccaagaaggataaagaagcttctgaaggtcttgcttaccagtggaattacatggttgaaaatcaatatggtaatgatggaatgaaggatggatcatgctcgagtcgatctgaatcttcttcactagataccatgtctcggtctttggtgtttcagaactactttgaaaccagtccgaattcaacgcaagcgtgtgcggataattcctctccgttgatcgaaatgatgagaacttgccatgaagcagcgggtaaaaggtggcctaacttcatagctgttgatttttatcagaggagtgatagtggaggagctgccgaagctgtagatgaagcaaacggtcgtctcacatgtggttgtgacagcttagtctattgcaagtcaaacgcaccttttggcacttgtgatgctcctcctccgaagtcgtctccatcaccagtctccggaggaaggatacttcacggaaaccaagaaatcttcctgcgggtaatgctgattctacagctattggattgtcatctctcgttctaa

SEQ ID NO: 46175 - protein, 426 aa, Arabidopsis thaliana
  peptide (1)..(426): Ceres Seq. ID no. 12574299
MERFNFFNLMIIALCLSSFVHSLEVLLLIHTSLLIFYESFKSNREVFLFYSQMGETCSSTSECDAGLSCQSCPANGNTGSTCTRIQPLNPTSKVNGLPFNKYSWLTTHNSYAITGANSATGSFLVSPKNQEDSITNQLKNGVRGIMLDTYDFQNDIWLCHSTGGTCFNFTAFQPAINALKEINDFLESNLSEIVTIILEDYVKSQMGLTNVFNASGLSKFLLPISRMPKDGTDWPTVDDMVKQNQRLVVFTSKKDKEASEGLAYQWNYMVENQYGNDGMKDGSCSSRSESSSLDTMSRSLVFQNYFETSPNSTQACADNSSPLIEMMRTCHEAAGKRWPNFIAVDFYQRSDSGGAAEAVDEANGRLTCGCDSLVYCKSNAPFGTCDAPPPKSSPSPVSGGRILHGNQEIFLRVMLILQLLDCHLSF

SEQ ID NO: 46176 - protein, 417 aa, Arabidopsis thaliana
  peptide (1)..(417): Ceres Seq. ID no. 12574300
MIIALCLSSFVHSLEVLLLIHTSLLIFYESFKSNREVFLFYSQMGETCSSTSECDAGLSCQSCPANGNTGSTCTRIQPLNPTSKVNGLPFNKYSWLTTHNSYAITGANSATGSFLVSPKNQEDSITNQLKNGVRGIMLDTYDFQNDIWLCHSTGGTCFNFTAFQPAINALKEINDFLESNLSEIVTIILEDYVKSQMGLTNVFNASGLSKFLLPISRMPKDGTDWPTVDDMVKQNQRLVVFTSKKDKEASEGLAYQWNYMVENQYGNDGMKDGSCSSRSESSSLDTMSRSLVFQNYFETSPNSTQACADNSSPLIEMMRTCHEAAGKRWPNFIAVDFYQRSDSGGAAEAVDEANGRLTCGCDSLVYCKSNAPFGTCDAPPPKSSPSPVSGGRILHGNQEIFLRVMLILQLLDCHLSF

SEQ ID NO: 46177 - protein, 374 aa, Arabidopsis thaliana
  peptide (1)..(374): Ceres Seq. ID no. 12574301
MGETCSSTSECDAGLSCQSCPANGNTGSTCTRIQPLNPTSKVNGLPFNKYSWLTTHNSYAITGANSATGSFLVSPKNQEDSITNQLKNGVRGIMLDTYDFQNDIWLCHSTGGTCFNFTAFQPAINALKEINDFLESNLSEIVTIILEDYVKSQMGLTNVFNASGLSKFLLPISRMPKDGTDWPTVDDMVKQNQRLVVFTSKKDKEASEGLAYQWNYMVENQYGNDGMKDGSCSSRSESSSLDTMSRSLVFQNYFETSPNSTQACADNSSPLIEMMRTCHEAAGKRWPNFIAVDFYQRSDSGGAAEAVDEANGRLTCGCDSLVYCKSNAPFGTCDAPPPKSSPSPVSGGRILHGNQEIFLRVMLILQLLDCHLSF

SEQ ID NO: 46178 - DNA, 2307 bp, Arabidopsis thaliana
  misc_feature (1)..(2307): Ceres Seq. ID no. 12600696
  misc_feature (1)..(2307): Ortholog of  Ceres SEQ ID NO 15176563 as cited in SEQ ID NO 58992
gatctccccaaattagagtaaaccctaattgtgtatctgtagctttctctctctctctctctctctctctcgcgaagaagaagaagaagaaggagatcaaggaactcgaagtgtgtgtgtgtgtgtttgccttctcttgtcttttagttttttctctctttggctgtgatttcgtcggcgaagagagacatagatcggatatggcggctgataatacgggttcgaaatcgagctccgctgcggattcttacgttgggagcttgattagtttgacatctaagagtgagatcagatacgaagggatcctttacaatattaatacagatgaatccagtatcggacttcaaaacgttcgatcatttggaactgaaggaaggaaaaaagatggtccacaagttcctccaagtgacaaagtttacgagtacatattgttccgtggaactgatatcaaggatttgcaagtcaaagcttctccaccagttcagcctcctgcatctactataaataatgaccctgctataattcagtctcactaccctagcccgatgccaacatctggtagcttgccttctactgcgagcgggtcactacctgacattagttctcataatggacaacctggacaacatggaatgggatttcaaaacgcaatgcctttgtatcagcctggtggaaatcttggttcatggggagcgtcaccacaaccaccaatgtattggcaaggtttctacaccccacctcccaatggccttccccaattgcatcagcagtctctgattcgaccccctcatgggctgccaatgcccaactctcttcagcaacccctgcaatatcctaactttaatacccctcctccacctactgggtcatcatctttgcaggggtcaagcttgccagaagcaccctcttcattgtttccttttagtaccagttctcaaatgttagctcctagttcattgcctttccctggtctaccacctgtgacgctctcgtctagcctgcagtctacactgcaatcagcaccatctccttcactagcttcagagatggcacctccgttgctgtcaaacaaagctcctattactgctcctcctaccctacctcaggatactaatttgctttcgttttctctatctactacgagagccacagaagcaagtactggccttccactgtctaacaagcctagtgtagtaactggtccaatttctccgccgcagacaacaccattaacatctgctcctgttgcgggagtttctagttccattagccaagataagccaaaacctttgttggttactcctggtcaactgctgcagtctggatcttctgcagtctctttgtccccaccctcgacaaatgctgataaagatgttgaggtggttcaagtatcgtcatcagctgggttggaacaatctgttccagttacatccgaagcccaacctccaatactgccattgccttcctctgcaagaccaactcagaagccaaacgggcattctttcccaaatcataatggttacaggggacgtggaagaggacgaggaagaggagcagggagatcacaccaagtaatgaaattcactgaagattttgatttcacagcaatgaacgaaaagttcaataaggatgaagtatggggtcatcttgggaagagtactaccttagatggtgatgaagatgatgattccccgactgtagatgaggctgagcttcctaagatcgaggccaaacctgtttacaacaaagatgactttttcgatagcctatcatcaaacaccattgaccgagagtcccaaaattcaaggcctaggttctcagagcaacggaaactagatactgagacatttggtgaattctcgagattccgaggaggtcgaggagggcgtggtggttatggacgaaacaacggttactcacgtggtggttatggagggcgtggttatggcggttatggtggccgtggcggcggcggcggtggctacgggtatggtggacgtggccaggggagaggcgtatcaaatcgtactacctaaactgttctgctagaaagggctctaaagactcaaaatccaatgggagctcagctcttgagtgcttttggtatgtggcaataaaacaaaaaccgagtcccgtgtaatgttttctgttataaaaccccacttgtgtggttttggagtgtattaatttgatttctgatctttgtttttaagacttggtaatagcgtcgttcttcttatatccaatgttattttgaacttttgtatactcgacatttggtgtgaaatgcattttctatttactctc

SEQ ID NO: 46179 - protein, 677 aa, Arabidopsis thaliana
  peptide (1)..(677): Ceres Seq. ID no. 12600697
SPQIRVNPNCVSVAFSLSLSLSLAKKKKKKEIKELEVCVCVFAFSCLLVFSLFGCDFVGEERHRSDMAADNTGSKSSSAADSYVGSLISLTSKSEIRYEGILYNINTDESSIGLQNVRSFGTEGRKKDGPQVPPSDKVYEYILFRGTDIKDLQVKASPPVQPPASTINNDPAIIQSHYPSPMPTSGSLPSTASGSLPDISSHNGQPGQHGMGFQNAMPLYQPGGNLGSWGASPQPPMYWQGFYTPPPNGLPQLHQQSLIRPPHGLPMPNSLQQPLQYPNFNTPPPPTGSSSLQGSSLPEAPSSLFPFSTSSQMLAPSSLPFPGLPPVTLSSSLQSTLQSAPSPSLASEMAPPLLSNKAPITAPPTLPQDTNLLSFSLSTTRATEASTGLPLSNKPSVVTGPISPPQTTPLTSAPVAGVSSSISQDKPKPLLVTPGQLLQSGSSAVSLSPPSTNADKDVEVVQVSSSAGLEQSVPVTSEAQPPILPLPSSARPTQKPNGHSFPNHNGYRGRGRGRGRGAGRSHQVMKFTEDFDFTAMNEKFNKDEVWGHLGKSTTLDGDEDDDSPTVDEAELPKIEAKPVYNKDDFFDSLSSNTIDRESQNSRPRFSEQRKLDTETFGEFSRFRGGRGGRGGYGRNNGYSRGGYGGRGYGGYGGRGGGGGGYGYGGRGQGRGVSNRTT

SEQ ID NO: 46180 - protein, 611 aa, Arabidopsis thaliana
  peptide (1)..(611): Ceres Seq. ID no. 12600698
MAADNTGSKSSSAADSYVGSLISLTSKSEIRYEGILYNINTDESSIGLQNVRSFGTEGRKKDGPQVPPSDKVYEYILFRGTDIKDLQVKASPPVQPPASTINNDPAIIQSHYPSPMPTSGSLPSTASGSLPDISSHNGQPGQHGMGFQNAMPLYQPGGNLGSWGASPQPPMYWQGFYTPPPNGLPQLHQQSLIRPPHGLPMPNSLQQPLQYPNFNTPPPPTGSSSLQGSSLPEAPSSLFPFSTSSQMLAPSSLPFPGLPPVTLSSSLQSTLQSAPSPSLASEMAPPLLSNKAPITAPPTLPQDTNLLSFSLSTTRATEASTGLPLSNKPSVVTGPISPPQTTPLTSAPVAGVSSSISQDKPKPLLVTPGQLLQSGSSAVSLSPPSTNADKDVEVVQVSSSAGLEQSVPVTSEAQPPILPLPSSARPTQKPNGHSFPNHNGYRGRGRGRGRGAGRSHQVMKFTEDFDFTAMNEKFNKDEVWGHLGKSTTLDGDEDDDSPTVDEAELPKIEAKPVYNKDDFFDSLSSNTIDRESQNSRPRFSEQRKLDTETFGEFSRFRGGRGGRGGYGRNNGYSRGGYGGRGYGGYGGRGGGGGGYGYGGRGQGRGVSNRTT

SEQ ID NO: 46181 - protein, 496 aa, Arabidopsis thaliana
  peptide (1)..(496): Ceres Seq. ID no. 12600699
MPTSGSLPSTASGSLPDISSHNGQPGQHGMGFQNAMPLYQPGGNLGSWGASPQPPMYWQGFYTPPPNGLPQLHQQSLIRPPHGLPMPNSLQQPLQYPNFNTPPPPTGSSSLQGSSLPEAPSSLFPFSTSSQMLAPSSLPFPGLPPVTLSSSLQSTLQSAPSPSLASEMAPPLLSNKAPITAPPTLPQDTNLLSFSLSTTRATEASTGLPLSNKPSVVTGPISPPQTTPLTSAPVAGVSSSISQDKPKPLLVTPGQLLQSGSSAVSLSPPSTNADKDVEVVQVSSSAGLEQSVPVTSEAQPPILPLPSSARPTQKPNGHSFPNHNGYRGRGRGRGRGAGRSHQVMKFTEDFDFTAMNEKFNKDEVWGHLGKSTTLDGDEDDDSPTVDEAELPKIEAKPVYNKDDFFDSLSSNTIDRESQNSRPRFSEQRKLDTETFGEFSRFRGGRGGRGGYGRNNGYSRGGYGGRGYGGYGGRGGGGGGYGYGGRGQGRGVSNRTT

SEQ ID NO: 46182 - DNA, 1429 bp, Arabidopsis thaliana
  misc_feature (1)..(1429): Ceres Seq. ID no. 13578582
  misc_feature (1)..(1429): Ortholog of  Ceres SEQ ID NO 14313743 as cited in SEQ ID NO 59555
tacacacactctctctttcctctctcttacaccaaaacctatgacgatgaagagagctttaccatctccttcctcactgctcttcttctttctcctgataacaccactcttcctctgccaagaaaacagagtctctgcctcaatgcctccatctgagtcagaaactctcttcaagatcatggaatcaatgtcttctgatcaacaatggcgtcaatcccacccaaacccttgtgcacctggctcatcttggccaggcattgagtgcaaaaccggtccagaccacttatcacacgtctctcgactcgatttcggctctgctccaaacccctcttgtaaatcctctgcttctttcccttcttcaatcttcactctcccttttctccaatcagtcttcttcttcaactgcttcactcacttcccaaccacaatcatgttccctataaaactcatccctaactcttctcttcaacaacttagcctcagatcaaacccttctctctcaggtcaaatccctcctcgcatttcttctctcaaatctttacaaatcctcactctctcacaaaaccgattaaccggagatatccctccggcgattttctcattgaaaagcctcgtacacctcgatctcagctacaacaagctcacaggtaaaatccctctgcaattagggaatctaaataacctcgttggcttagatttaagctacaattctttaaccggtacaatccctccaacgatctctcaactgggtatgcttcagaaactcgacttgagctcaaattctctcttcggaagaatcccggaaggtgtagaaaagcttcgttcgttgtctttcatggcgttgagcaacaacaaactaaagggagcttttccaaaaggaatctcgaaccttcagagtttgcagtacttcataatggataataacccaatgttcgttgctctccccgttgaattagggtttcttcctaaacttcaagagctccagctcgagaattctggatattccggcgtaatcccggagagttacaccaaattgacgaaccttagctcgttgtctcttgctaacaacagattaaccggcgaaatcccatcagggtttgagtctctgccacacgttttccatctgaatctcagcaggaacttactgatcggcgttgttccgtttgattcaagtttcttaagacggttgggtaagaacttggatttgagcgggaacagaggattgtgtctgaatccggaggatgagtttagtgttgtcaagaccggggttgatgtatgcgggaagaacgttagtagtggtggaggtttatcggtgcattcatcgaagaagaaatctcaagcttctcggtattacagatcttgcttcttcgccaatgctctgtttccgtttgctctgtttctaggtttacatcaacgatgggttctctaa

SEQ ID NO: 46183 - protein, 475 aa, Arabidopsis thaliana
  peptide (1)..(475): Ceres Seq. ID no. 13578583
THTLSFLSLTPKPMTMKRALPSPSSLLFFFLLITPLFLCQENRVSASMPPSESETLFKIMESMSSDQQWRQSHPNPCAPGSSWPGIECKTGPDHLSHVSRLDFGSAPNPSCKSSASFPSSIFTLPFLQSVFFFNCFTHFPTTIMFPIKLIPNSSLQQLSLRSNPSLSGQIPPRISSLKSLQILTLSQNRLTGDIPPAIFSLKSLVHLDLSYNKLTGKIPLQLGNLNNLVGLDLSYNSLTGTIPPTISQLGMLQKLDLSSNSLFGRIPEGVEKLRSLSFMALSNNKLKGAFPKGISNLQSLQYFIMDNNPMFVALPVELGFLPKLQELQLENSGYSGVIPESYTKLTNLSSLSLANNRLTGEIPSGFESLPHVFHLNLSRNLLIGVVPFDSSFLRRLGKNLDLSGNRGLCLNPEDEFSVVKTGVDVCGKNVSSGGGLSVHSSKKKSQASRYYRSCFFANALFPFALFLGLHQRWVL

SEQ ID NO: 46184 - protein, 462 aa, Arabidopsis thaliana
  peptide (1)..(462): Ceres Seq. ID no. 13578584
MTMKRALPSPSSLLFFFLLITPLFLCQENRVSASMPPSESETLFKIMESMSSDQQWRQSHPNPCAPGSSWPGIECKTGPDHLSHVSRLDFGSAPNPSCKSSASFPSSIFTLPFLQSVFFFNCFTHFPTTIMFPIKLIPNSSLQQLSLRSNPSLSGQIPPRISSLKSLQILTLSQNRLTGDIPPAIFSLKSLVHLDLSYNKLTGKIPLQLGNLNNLVGLDLSYNSLTGTIPPTISQLGMLQKLDLSSNSLFGRIPEGVEKLRSLSFMALSNNKLKGAFPKGISNLQSLQYFIMDNNPMFVALPVELGFLPKLQELQLENSGYSGVIPESYTKLTNLSSLSLANNRLTGEIPSGFESLPHVFHLNLSRNLLIGVVPFDSSFLRRLGKNLDLSGNRGLCLNPEDEFSVVKTGVDVCGKNVSSGGGLSVHSSKKKSQASRYYRSCFFANALFPFALFLGLHQRWVL

SEQ ID NO: 46185 - protein, 460 aa, Arabidopsis thaliana
  peptide (1)..(460): Ceres Seq. ID no. 13578585
MKRALPSPSSLLFFFLLITPLFLCQENRVSASMPPSESETLFKIMESMSSDQQWRQSHPNPCAPGSSWPGIECKTGPDHLSHVSRLDFGSAPNPSCKSSASFPSSIFTLPFLQSVFFFNCFTHFPTTIMFPIKLIPNSSLQQLSLRSNPSLSGQIPPRISSLKSLQILTLSQNRLTGDIPPAIFSLKSLVHLDLSYNKLTGKIPLQLGNLNNLVGLDLSYNSLTGTIPPTISQLGMLQKLDLSSNSLFGRIPEGVEKLRSLSFMALSNNKLKGAFPKGISNLQSLQYFIMDNNPMFVALPVELGFLPKLQELQLENSGYSGVIPESYTKLTNLSSLSLANNRLTGEIPSGFESLPHVFHLNLSRNLLIGVVPFDSSFLRRLGKNLDLSGNRGLCLNPEDEFSVVKTGVDVCGKNVSSGGGLSVHSSKKKSQASRYYRSCFFANALFPFALFLGLHQRWVL

SEQ ID NO: 46186 - DNA, 2386 bp, Arabidopsis thaliana
  misc_feature (1)..(2386): Ceres Seq. ID no. 12601233
  misc_feature (1)..(2386): Ortholog of  Ceres SEQ ID NO 12778278 as cited in SEQ ID NO 63035
aaaaaataatccccaaataatggagacgaagtggagagagaaagctcccactctctcacaccccaaagcttcttcttcttcttcctcttcttcctcttcctcttctctaatctgaatccaaagcctctctctttatgacacaagatcgctcagaaatgtctgaagatgacgatgaccaacaatctccaccgttggatctaccctctaccgccatagctgatccttgctcatcttcctcttcaccaaacaaatctcgtaactgtatctcaaattctcaaactttccctgaccatgttctcgaaaacgtacttgagaacgttcttcagttcctagattcaagatgtgaccgtaacgctgcttctctagtttgcaaatcttggtggcgtgttgaagctttgactcgatctgaggtttttattggtaactgttacgctctttctccggcgaggttgactcagagattcaagcgtgttaggtctcttgtgctgaaagggaaacctaggtttgctgatttcaatctcatgcctcctgattggggtgctaattttgctccttgggtttctactatggctcaagcttatccttgtcttgagaaagttgatttgaagaggatgtttgttactgatgatgatttagctcttcttgctgactcttttcctgggtttaaagagcttatcttggtttgttgtgaaggttttggtactagtggtatctctattgttgccaacaagtgcagaaagctgaaagtgcttgatttgattgagtctgaggtcacggatgatgaagtggattggatctcttgtttccctgaggatgtaacttgtttggagtctttagcttttgactgtgtggaagctcctatcaattttaaggcgcttgagggtcttgttgctaggtcaccgttcttgaagaaacttaggctaaacaggtttgtgtctcttgtggagctacatcgtctgctacttggagctccacagcttactagtcttgggactggttcatttagccatgatgaggaacctcagagtgagcaagaaccagattatgctgctgcatttcgtgcttgtaaatctgtagtttgcttgtcagggtttagagagttgatgccggagtatcttccagctatctttccggtgtgcgctaatctcacctccctgaacttcagttatgctaacatttctcctgacatgttcaagcccatcatactcaattgccacaaactccaggtgttctgggcccttgattcaatatgtgatgaaggactacaggcagttgcagccacttgcaaggaactccgtgaactcaggatcttcccttttgatcctcgggaagacagtgaaggtcctgtctctgaattaggcctccaagcaatctccgagggttgtaggaaactagaatctattctctacttttgccagcgcatgactaatgccgctgtgatagccatgtcagagaactgtccagagcttactgtgtttaggctgtgcataatgggtcgacataggcctgaccatgtaacaggaaagcctatggacgagggatttggtgccattgttaaaaactgcaagaagctaactcgccttgcagtgtcgggattgctgacagatcaagcttttaggtatatgggtgagtatgggaaattggtccgtacgctttcagtagcttttgcaggggacagtgacatggctctgagacatgtcctagaaggttgccctagactgcagaaacttgagataagggacagtccctttggagatgttgcattacggtctggtatgcatcgctattacaacatgaggtttgtttggatgtcagcatgtagcttgtctaagggatgctgcaaggatattgcacgagcaatgccgaatctagttgtggaagtaattggatcggatgatgatgatgacaatagggattatgtcgagactttatacatgtatcggtctcttgatggtccaaggaatgatgcaccaaagttcgtcacgattttatagaacgaggagcatttccgtgtttccgttttttaagacgggaatgaaatgggtaagtgtaggaagctcagatgatgatggtggtggcatcagaggcacactacatgattgttgatgatgaatgatggtggttgggacttgggaggaatgcaagattgttgtatcattattttctttttttatttttgggttcaaaagatgttatttgggtggttaggtggaacagtggatgtatgttttgggagcatcggtgttagttagacagctgagttggttctaataagctgcacttttggctctctctagttgttgttgttgagaaactaatgagacatctctctcttttgtctttcccatttttaattaattttgagatatttcatcttaatctgttt

SEQ ID NO: 46187 - protein, 619 aa, Arabidopsis thaliana
  peptide (1)..(619): Ceres Seq. ID no. 12601234
MTQDRSEMSEDDDDQQSPPLDLPSTAIADPCSSSSSPNKSRNCISNSQTFPDHVLENVLENVLQFLDSRCDRNAASLVCKSWWRVEALTRSEVFIGNCYALSPARLTQRFKRVRSLVLKGKPRFADFNLMPPDWGANFAPWVSTMAQAYPCLEKVDLKRMFVTDDDLALLADSFPGFKELILVCCEGFGTSGISIVANKCRKLKVLDLIESEVTDDEVDWISCFPEDVTCLESLAFDCVEAPINFKALEGLVARSPFLKKLRLNRFVSLVELHRLLLGAPQLTSLGTGSFSHDEEPQSEQEPDYAAAFRACKSVVCLSGFRELMPEYLPAIFPVCANLTSLNFSYANISPDMFKPIILNCHKLQVFWALDSICDEGLQAVAATCKELRELRIFPFDPREDSEGPVSELGLQAISEGCRKLESILYFCQRMTNAAVIAMSENCPELTVFRLCIMGRHRPDHVTGKPMDEGFGAIVKNCKKLTRLAVSGLLTDQAFRYMGEYGKLVRTLSVAFAGDSDMALRHVLEGCPRLQKLEIRDSPFGDVALRSGMHRYYNMRFVWMSACSLSKGCCKDIARAMPNLVVEVIGSDDDDDNRDYVETLYMYRSLDGPRNDAPKFVTIL

SEQ ID NO: 46188 - protein, 612 aa, Arabidopsis thaliana
  peptide (1)..(612): Ceres Seq. ID no. 12601235
MSEDDDDQQSPPLDLPSTAIADPCSSSSSPNKSRNCISNSQTFPDHVLENVLENVLQFLDSRCDRNAASLVCKSWWRVEALTRSEVFIGNCYALSPARLTQRFKRVRSLVLKGKPRFADFNLMPPDWGANFAPWVSTMAQAYPCLEKVDLKRMFVTDDDLALLADSFPGFKELILVCCEGFGTSGISIVANKCRKLKVLDLIESEVTDDEVDWISCFPEDVTCLESLAFDCVEAPINFKALEGLVARSPFLKKLRLNRFVSLVELHRLLLGAPQLTSLGTGSFSHDEEPQSEQEPDYAAAFRACKSVVCLSGFRELMPEYLPAIFPVCANLTSLNFSYANISPDMFKPIILNCHKLQVFWALDSICDEGLQAVAATCKELRELRIFPFDPREDSEGPVSELGLQAISEGCRKLESILYFCQRMTNAAVIAMSENCPELTVFRLCIMGRHRPDHVTGKPMDEGFGAIVKNCKKLTRLAVSGLLTDQAFRYMGEYGKLVRTLSVAFAGDSDMALRHVLEGCPRLQKLEIRDSPFGDVALRSGMHRYYNMRFVWMSACSLSKGCCKDIARAMPNLVVEVIGSDDDDDNRDYVETLYMYRSLDGPRNDAPKFVTIL

SEQ ID NO: 46189 - protein, 490 aa, Arabidopsis thaliana
  peptide (1)..(490): Ceres Seq. ID no. 12601236
MPPDWGANFAPWVSTMAQAYPCLEKVDLKRMFVTDDDLALLADSFPGFKELILVCCEGFGTSGISIVANKCRKLKVLDLIESEVTDDEVDWISCFPEDVTCLESLAFDCVEAPINFKALEGLVARSPFLKKLRLNRFVSLVELHRLLLGAPQLTSLGTGSFSHDEEPQSEQEPDYAAAFRACKSVVCLSGFRELMPEYLPAIFPVCANLTSLNFSYANISPDMFKPIILNCHKLQVFWALDSICDEGLQAVAATCKELRELRIFPFDPREDSEGPVSELGLQAISEGCRKLESILYFCQRMTNAAVIAMSENCPELTVFRLCIMGRHRPDHVTGKPMDEGFGAIVKNCKKLTRLAVSGLLTDQAFRYMGEYGKLVRTLSVAFAGDSDMALRHVLEGCPRLQKLEIRDSPFGDVALRSGMHRYYNMRFVWMSACSLSKGCCKDIARAMPNLVVEVIGSDDDDDNRDYVETLYMYRSLDGPRNDAPKFVTIL

SEQ ID NO: 46190 - DNA, 1786 bp, Arabidopsis thaliana
  misc_feature (1)..(1786): Ceres Seq. ID no. 14309881
  misc_feature (1)..(1786): Ortholog of  Ceres SEQ ID NO 14316025 as cited in SEQ ID NO 65242
aaattttagcgtaaagacaatctcttgaaggagaaaaggaaaacaatctctctttctgtgacctttcgcaacttgtcaaagcaccacgaccttctctctacggagttgagatcaatccccccaaatctcggtgtggttcctctagggtttttgatcggaatcggaatcgataatctaaccggcatgaggccaatcctattgccggatccacccagtctatctaccggcgtccctgatattttcgaacaaggcggttcccataacgtcgtcagacgcgccgtcgtcatcggaaacggtttccctggctccgagaatcagtgtatcggtctcgttcgtgcgctcggcttatctgataatcaccttctcaaccgagtgacaaggcctaaaggaggactaaatgagtggctgcactggctcccagttggttttcacaagaagttggactttatcctcaggcatatttacctctactccagattgatgcttggatccaaacaaagtaaatacatctcatctgtaccctcagagaatggtggtaatgtaggtttggcctctattctagaggctgatgtgaagggcattgtaaatttggcccgtcagacctatgaaaaggatggcccgttgatcgtgattgcatgtggaagagatactatttctattgctagctcgataagacgtttggcttctgaaaacgtcttcgttgttcagatacaacatcctagatcacatttaaataggtttgacatggtgatcacgcctcgtcacgactactatcctctaacactcgaagcgcaggagcaggtccctagatttatgcgtagttggataactccacgtgaacctcctcaggatcatgtagtcttgactactggagctctacaccagatcgattatgcctcactccgtaaagcagctagtgcctggcatgatgaatttgctgctcttccgaagcctttagttgtggttaacatcggctggcctagaagtaactgtcggtatggagcagacctcgcaaaacagctaacagactcccttcttaatgtccttgctacctgtggaagtgtcagaattactctttcctacaaaacccctgcaaaggtttcaagagtaatcttcaaagaacttggagataaccccaaagtttacatatggaatggccaagaaccaaatccttacatggggcatctagcttggggtgatgcttttgtggtgacagcagattcagtcagtctgataagcgaagcttgtagcaccgggaaaccagtgtacgttgttggagccgatcactgtaaatggaagattgcagaattccaaaagtctttgagggagcgaggagttgtccgctcatttacaggtttcgaagatatgtcggaaagttggagttatccgccattgaatgacacagcagaggcagctacgagaatacggcgtgaattggctgcacgtggatggagtttacggtcttgaattatatactcttctttgctgtaccacttatttgcggaatcacattttgtccaaagctggagaaacagaagcctaagagaatcggatgttgtgcagaaagaaagaatagttgaagatatcatttaaaaagggtcattttactctagcttgccctaaaattttgctgataatgttttaccaataggccaaatactaaaaaaaatctctgttacttaatcggagaggcctttgtgagataaaagaaagcggaaaggttttttttaatctttttaacgtttgtattgttttgtcgacgagatttgaccgtttgagtgtgtat

SEQ ID NO: 46191 - protein, 427 aa, Arabidopsis thaliana
  peptide (1)..(427): Ceres Seq. ID no. 14309882
MRPILLPDPPSLSTGVPDIFEQGGSHNVVRRAVVIGNGFPGSENQCIGLVRALGLSDNHLLNRVTRPKGGLNEWLHWLPVGFHKKLDFILRHIYLYSRLMLGSKQSKYISSVPSENGGNVGLASILEADVKGIVNLARQTYEKDGPLIVIACGRDTISIASSIRRLASENVFVVQIQHPRSHLNRFDMVITPRHDYYPLTLEAQEQVPRFMRSWITPREPPQDHVVLTTGALHQIDYASLRKAASAWHDEFAALPKPLVVVNIGWPRSNCRYGADLAKQLTDSLLNVLATCGSVRITLSYKTPAKVSRVIFKELGDNPKVYIWNGQEPNPYMGHLAWGDAFVVTADSVSLISEACSTGKPVYVVGADHCKWKIAEFQKSLRERGVVRSFTGFEDMSESWSYPPLNDTAEAATRIRRELAARGWSLRS

SEQ ID NO: 46192 - protein, 328 aa, Arabidopsis thaliana
  peptide (1)..(328): Ceres Seq. ID no. 14309883
MLGSKQSKYISSVPSENGGNVGLASILEADVKGIVNLARQTYEKDGPLIVIACGRDTISIASSIRRLASENVFVVQIQHPRSHLNRFDMVITPRHDYYPLTLEAQEQVPRFMRSWITPREPPQDHVVLTTGALHQIDYASLRKAASAWHDEFAALPKPLVVVNIGWPRSNCRYGADLAKQLTDSLLNVLATCGSVRITLSYKTPAKVSRVIFKELGDNPKVYIWNGQEPNPYMGHLAWGDAFVVTADSVSLISEACSTGKPVYVVGADHCKWKIAEFQKSLRERGVVRSFTGFEDMSESWSYPPLNDTAEAATRIRRELAARGWSLRS

SEQ ID NO: 46193 - protein, 240 aa, Arabidopsis thaliana
  peptide (1)..(240): Ceres Seq. ID no. 14309884
MVITPRHDYYPLTLEAQEQVPRFMRSWITPREPPQDHVVLTTGALHQIDYASLRKAASAWHDEFAALPKPLVVVNIGWPRSNCRYGADLAKQLTDSLLNVLATCGSVRITLSYKTPAKVSRVIFKELGDNPKVYIWNGQEPNPYMGHLAWGDAFVVTADSVSLISEACSTGKPVYVVGADHCKWKIAEFQKSLRERGVVRSFTGFEDMSESWSYPPLNDTAEAATRIRRELAARGWSLRS

SEQ ID NO: 46194 - DNA, 1982 bp, Arabidopsis thaliana
  misc_feature (1)..(1982): Ceres Seq. ID no. 12601039
  misc_feature (1)..(1982): Ortholog of  Ceres SEQ ID NO 14307374 as cited in SEQ ID NO 54073
aacaaaagttgaaaagtcatgttactcctcctctcaattcgtctcctccgccatgcgaactcaaactcaaagctctctctaactttttgcttttcttcgaatctgtgatagatcgagacttggatttatcagcttctccgtgctcctttagcttctgctcggttttgttttttttagtctgacgatgagtaacaactggaaatccgttcgattaaggcttcaaaatcgtactctcgtgtttcttctggtgattttgagcttcggttcttgctattcgttgaaatctcaaggtgatggttttctggaatccgtgacgaaagatctatggtcagatatagatgctgaggatttgagagcagttggttttcacaggaaattacttggccgttttcgtaacccgtacacccatttgaatgcgttcagggaccgccctgtggcaagagctacacctccgtcatcttcggtttctacgagacctgatgccaaaagatcctctacattgcctccgccacaaaaaagtcctcctgcgcaacatgtttctgctccacctccttttgtgcaccatgtgactttacctagtctaacaagcagctccaaaacttcttcaaacagcacaattcctatagtggctggctgcatagcgggtgctgtgtttatcctccttttagctactggtgttttcttttttaaaagtaaggctgggaaatctgtgaatccctggcgtacaggtcttagtggacaacttcagaaagtgttcataactggtgtccccaaactcaaaagatctgagattgaagctgcctgtgaagattttagtaatgtcattgggtcttgccccattggtacattgttcaaagggacgctatcaagtggggtggagatagctgtggcttctgttgctactgcgtctgccaaagaatggacaaataatatagaaatgcagttcagaaagaagatcgaaatgttatccaagataaaccacaagaattttgtcaaccttcttggttactgtgaagaagaagaacctttcactaggatcttggtctttgaatatgcatcaaacggaacagtctttgaacatttacactataaagaatcagaacacttggactgggtaatgcggctaagaatagcaatgggcatagcttattgccttgaccatatgcacggactcaagccacctatagtccacagcaatcttctctcatcatcagttcaactcacagaggactacgcagtcaaaattgcggatttcaattttggatatttaaaaggcccatccgagacagaaagcagcaccaatgcactcatagatacaaacatctcagaaacaacacaagaagacaatgttcacagcttcgggttgctgttgtttgaactgatgacaggaaaactcccagagtcagttcaaaaaggtgactcgatagataccggattggctgtcttcttgagaggaaagacattaagggagatggtggatccgacaattgaaagctttgacgagaagattgagaatataggtgaagtgatcaaaagctgcataagagcagacgcgaaacagagaccgataatgaaggaagtcacagggagattacgagagatcactggattatcaccagacgacactatcccaaaactttcaccactctggtgggcagagctggaagttctgtccactgcgtgaagagacaactactgaacttcacaaaaaaatctgtaagtattaatatgaagatttgagtgaggtttttgagtctcttagaagctcttggcttctctttaggctactttcatctatctatctatatataagtatggaacttagtttatataacggctttaaaattcggtggatctatttggtcgtttatgtcgtaaacagaaaatgtcctaatcacggtaatacccctttttggtgtgcataatgttggtgggtggttactgtctttgtaaattagtgttactatgttcttgatatgttt

SEQ ID NO: 46195 - protein, 499 aa, Arabidopsis thaliana
  peptide (1)..(499): Ceres Seq. ID no. 12601040
MSNNWKSVRLRLQNRTLVFLLVILSFGSCYSLKSQGDGFLESVTKDLWSDIDAEDLRAVGFHRKLLGRFRNPYTHLNAFRDRPVARATPPSSSVSTRPDAKRSSTLPPPQKSPPAQHVSAPPPFVHHVTLPSLTSSSKTSSNSTIPIVAGCIAGAVFILLLATGVFFFKSKAGKSVNPWRTGLSGQLQKVFITGVPKLKRSEIEAACEDFSNVIGSCPIGTLFKGTLSSGVEIAVASVATASAKEWTNNIEMQFRKKIEMLSKINHKNFVNLLGYCEEEEPFTRILVFEYASNGTVFEHLHYKESEHLDWVMRLRIAMGIAYCLDHMHGLKPPIVHSNLLSSSVQLTEDYAVKIADFNFGYLKGPSETESSTNALIDTNISETTQEDNVHSFGLLLFELMTGKLPESVQKGDSIDTGLAVFLRGKTLREMVDPTIESFDEKIENIGEVIKSCIRADAKQRPIMKEVTGRLREITGLSPDDTIPKLSPLWWAELEVLSTA

SEQ ID NO: 46196 - DNA, 2895 bp, Arabidopsis thaliana
  misc_feature (1)..(2895): Ceres Seq. ID no. 12601041
  misc_feature (1)..(2895): Ortholog of  Ceres SEQ ID NO 14307030 as cited in SEQ ID NO 54041
  misc_feature (1)..(2895): Ortholog of  Ceres SEQ ID NO 14302891 as cited in SEQ ID NO 66282
tttttctttcacgttgacttctcctccgccatagtccgaaacagaggcatcacagcaacccaactcgaaccctcgatctcctcatcactctcaccaccaccaccaccgccactctttttcgactccctcttccacagaatcttcaaatcctaccgccggagctcgccgtaatccatttcggagatgtcgtatgggttgtagatcactagatctatcctgggaaatttttcaagtggggtcctccactactacttgctcctcgttgcttatttagtcttctctctatctctctctcgagctccattgacttggacttggtggtatccaatggccatcaccgattttttcgccggtgaaattgcgacggagctcctgaagcagctctttacgatatctacaacggcgtggagatacaaaaacaccgccaaacaactcctcaccttgatcgatagcattcgaccgacgatcaaggagattcaatacagcggcgtggagcttcctgctcaccgccaagctcaaatcggtatgctcttcgatactttagagaaaggcaagaagctcactgacaaagtccttagctctaagcgatggaatttatatcgacagctaaccctagccagaaaaatggagaagctagagaagaccatctctaatttccttaaaaatgaggtctttacacatatcctcgctgacgttcatcatctccgggccgataccagtgtgcgtttggatcgggttgacatgagcctcgacagggtgattcagcaagtgggttccatgaaaattgggggaggtggcttgatatcagaggccatgaagagagccgaggctatggagattgagaccaacgacgattcggagaaatttggggttggattggaattgggaaaggttaaggttaagaagatgatgttcgaatctcaaggaggggtttttgggatcagtggaatgggcggtgttggtaaaaccactcttgccaaagaacttcaacgggaccatgaagtccaatgtcactttgagaaccggattttgtttctgactgtatcacaatctccgcttcttgaggagctgagggaacttatatggggtttcttatctggttgtgaagctggaaatcctgttcctgactgtaattttccgtttgatggcgcgcgtaagctcgtgattcttgatgatgtttggaccacacaggccctggaccgcttgacctcgtttaagtttcctggttgcacaactcttgtggtctcacgatccaaactcactgagcctaaattcacttatgatgtcgaagtactgagtgaagatgaagcaatctctctcttctgtctctgtgctttcggtcagaaatctatccctcttggtttctgcaaagatctggttaagcagcataatattcaaagcttttcgattctcagagttctctgtttggctcaggttgctaatgaatgtaaagggcttcctttagctctcaaagtcacgggtgcttcattaaatggcaaacctgaaatgtactggaagggcgtattgcagaggttatcaaaaggtgaacctgctgatgactctcacgagagtagattgcttcgtcaaatggaagctagtctagacaatctcgaccagacgaccaaagattgtttcttggatcttggcgccttccctgaagacaggaagattcctcttgatgttctcatcaacatttggattgagttacatgatatagatgaaggaaatgcttttgccatccttgttgatttgtcacacaagaatctccttactcttgggaaggatccacggcttggctctttgtacgcaagccactatgatatatttgtgacacagcatgatgttctgcgagacctagctcttcatttaagcaatgcagggaaagtaaacagaagaaagcggttgctgatgccgaaaagagagttagatcttccaggagattgggaaaggaacaatgatgagcattacattgcccagattgtctctattcatactggcaagtgcttttctacactgcaaatattcttggttctctcatgtaataatcaccaggatcataatgttggggaaatgaatgaaatgcaatggtttgacatggagttccccaaggcagagattctaatattgaacttctcttcagacaagtatgttcttccgccttttatcagtaagatgagccggcttaaggtcctagtgattatcaacaacggcatgtctcccgcggttctccatgacttttcaatatttgctcatttgtcgaaactaagaagtctctggctagagagggttcacgtccctcaactctccaactcaaccacccccttgaaaaatctccacaagatgtctttgattctgtgcaagatcaataaaagttttgatcaaaccggacttgacgtggcagatatcttcccaaaattgggcgatctgacaatagatcactgtgatgatctcgtggcactaccttcaagcatttgcggactgacctcccttagctgcttaagcataacaaattgtccacgcctcggtgaattgcccaagaacctcagtaagctacaagctctcgaaatcttaaggctatatgcttgccctgagctaaagacattacctggagaaatatgtgagcttcctgggcttaagtatctcgacatctcacaatgtgtcagcctgagttgtcttccagaggaaataggaaagctaaagaagcttgagaagatcgacatgagagaatgttgcttctcggatagaccgagctctgctgtttcactgaagtctctgcgccatgtaatctgcgataccgacgttgcatttatgtgggaagaagttgagaaggctgttccagggttaaagatcgaagctgctgagaaatgcttcagcctagactggcttgacgaataa

SEQ ID NO: 46197 - protein, 855 aa, Arabidopsis thaliana
  peptide (1)..(855): Ceres Seq. ID no. 12601042
MAITDFFAGEIATELLKQLFTISTTAWRYKNTAKQLLTLIDSIRPTIKEIQYSGVELPAHRQAQIGMLFDTLEKGKKLTDKVLSSKRWNLYRQLTLARKMEKLEKTISNFLKNEVFTHILADVHHLRADTSVRLDRVDMSLDRVIQQVGSMKIGGGGLISEAMKRAEAMEIETNDDSEKFGVGLELGKVKVKKMMFESQGGVFGISGMGGVGKTTLAKELQRDHEVQCHFENRILFLTVSQSPLLEELRELIWGFLSGCEAGNPVPDCNFPFDGARKLVILDDVWTTQALDRLTSFKFPGCTTLVVSRSKLTEPKFTYDVEVLSEDEAISLFCLCAFGQKSIPLGFCKDLVKQHNIQSFSILRVLCLAQVANECKGLPLALKVTGASLNGKPEMYWKGVLQRLSKGEPADDSHESRLLRQMEASLDNLDQTTKDCFLDLGAFPEDRKIPLDVLINIWIELHDIDEGNAFAILVDLSHKNLLTLGKDPRLGSLYASHYDIFVTQHDVLRDLALHLSNAGKVNRRKRLLMPKRELDLPGDWERNNDEHYIAQIVSIHTGKCFSTLQIFLVLSCNNHQDHNVGEMNEMQWFDMEFPKAEILILNFSSDKYVLPPFISKMSRLKVLVIINNGMSPAVLHDFSIFAHLSKLRSLWLERVHVPQLSNSTTPLKNLHKMSLILCKINKSFDQTGLDVADIFPKLGDLTIDHCDDLVALPSSICGLTSLSCLSITNCPRLGELPKNLSKLQALEILRLYACPELKTLPGEICELPGLKYLDISQCVSLSCLPEEIGKLKKLEKIDMRECCFSDRPSSAVSLKSLRHVICDTDVAFMWEEVEKAVPGLKIEAAEKCFSLDWLDE

SEQ ID NO: 46198 - protein, 789 aa, Arabidopsis thaliana
  peptide (1)..(789): Ceres Seq. ID no. 12601043
MLFDTLEKGKKLTDKVLSSKRWNLYRQLTLARKMEKLEKTISNFLKNEVFTHILADVHHLRADTSVRLDRVDMSLDRVIQQVGSMKIGGGGLISEAMKRAEAMEIETNDDSEKFGVGLELGKVKVKKMMFESQGGVFGISGMGGVGKTTLAKELQRDHEVQCHFENRILFLTVSQSPLLEELRELIWGFLSGCEAGNPVPDCNFPFDGARKLVILDDVWTTQALDRLTSFKFPGCTTLVVSRSKLTEPKFTYDVEVLSEDEAISLFCLCAFGQKSIPLGFCKDLVKQHNIQSFSILRVLCLAQVANECKGLPLALKVTGASLNGKPEMYWKGVLQRLSKGEPADDSHESRLLRQMEASLDNLDQTTKDCFLDLGAFPEDRKIPLDVLINIWIELHDIDEGNAFAILVDLSHKNLLTLGKDPRLGSLYASHYDIFVTQHDVLRDLALHLSNAGKVNRRKRLLMPKRELDLPGDWERNNDEHYIAQIVSIHTGKCFSTLQIFLVLSCNNHQDHNVGEMNEMQWFDMEFPKAEILILNFSSDKYVLPPFISKMSRLKVLVIINNGMSPAVLHDFSIFAHLSKLRSLWLERVHVPQLSNSTTPLKNLHKMSLILCKINKSFDQTGLDVADIFPKLGDLTIDHCDDLVALPSSICGLTSLSCLSITNCPRLGELPKNLSKLQALEILRLYACPELKTLPGEICELPGLKYLDISQCVSLSCLPEEIGKLKKLEKIDMRECCFSDRPSSAVSLKSLRHVICDTDVAFMWEEVEKAVPGLKIEAAEKCFSLDWLDE

SEQ ID NO: 46199 - protein, 756 aa, Arabidopsis thaliana
  peptide (1)..(756): Ceres Seq. ID no. 12601044
MEKLEKTISNFLKNEVFTHILADVHHLRADTSVRLDRVDMSLDRVIQQVGSMKIGGGGLISEAMKRAEAMEIETNDDSEKFGVGLELGKVKVKKMMFESQGGVFGISGMGGVGKTTLAKELQRDHEVQCHFENRILFLTVSQSPLLEELRELIWGFLSGCEAGNPVPDCNFPFDGARKLVILDDVWTTQALDRLTSFKFPGCTTLVVSRSKLTEPKFTYDVEVLSEDEAISLFCLCAFGQKSIPLGFCKDLVKQHNIQSFSILRVLCLAQVANECKGLPLALKVTGASLNGKPEMYWKGVLQRLSKGEPADDSHESRLLRQMEASLDNLDQTTKDCFLDLGAFPEDRKIPLDVLINIWIELHDIDEGNAFAILVDLSHKNLLTLGKDPRLGSLYASHYDIFVTQHDVLRDLALHLSNAGKVNRRKRLLMPKRELDLPGDWERNNDEHYIAQIVSIHTGKCFSTLQIFLVLSCNNHQDHNVGEMNEMQWFDMEFPKAEILILNFSSDKYVLPPFISKMSRLKVLVIINNGMSPAVLHDFSIFAHLSKLRSLWLERVHVPQLSNSTTPLKNLHKMSLILCKINKSFDQTGLDVADIFPKLGDLTIDHCDDLVALPSSICGLTSLSCLSITNCPRLGELPKNLSKLQALEILRLYACPELKTLPGEICELPGLKYLDISQCVSLSCLPEEIGKLKKLEKIDMRECCFSDRPSSAVSLKSLRHVICDTDVAFMWEEVEKAVPGLKIEAAEKCFSLDWLDE

SEQ ID NO: 46200 - DNA, 1724 bp, Arabidopsis thaliana
  misc_feature (1)..(1724): Ceres Seq. ID no. 12600771
  misc_feature (1)..(1724): Ortholog of  Ceres SEQ ID NO 13599602 as cited in SEQ ID NO 0
tgagaacgatcgatcaaaaatctctcccacgataaaaatgaggaccctgaagctcattgtacttaacgtcttcccctttccagaaaaatcaaccaaacccatttcagtttccccggaaagtttttgtctttcaatcaccattagaattcagctgcaacacaagtgtttgcaacagagagaatcatggagagagctatggaaagacaaaagatattgcttcgtcatctcaatccagtttcttcttctaattcttctcttaaacatgaaccttctcttctgtctcctgtgaattgtgtttctgaagtttccccaatggctgcttttggagatgacattgtgattgtagcggcatatcgtaccgccatttgcaaagcgagacgtggaggtttcaaagacactcttcctgatgatcttcttgcttctgttcttaaggctgtagtggaaagaacatctttggatccaagtgaagttggtgatatcgttgttggtaccgtgatagcgcctggttctcagagagcaatggagtgtagagttgcagcttattttgctggttttcctgactccgtgccagttagaactgtcaatagacaatgctcatcaggactacaagcagttgctgatgttgctgcttccattagagctggttattacgacattggtattggtgctggagtggaatcaatgtcaactgatcatattcctggaggcggctttcatggctctaatccaagagcacaggatttcccaaaagcccgtgattgtttgcttccaatgggaattacttctgaaaacgttgcagaaaggttcggtgtcacaagagaagagcaagatatggctgcggtggagtctcacaaacgcgctgcagctgcaatcgcgtctggtaaactcaaggatgaaatcattcctgttgctactaagattgtggaccctgagactaaagcagagaaggcaatcgtcgtatctgttgatgacggtgtacgtccaaactcaaacatggcagatttggcaaagctgaagactgtctttaaacagaacggttccaccacagctggcaatgctagtcagatcagtgatggtgctggagcagtactgctaatgaagagaagtttggctatgaagaagggacttcccattcttggagtattcaggagttttgctgttactggtgtggaaccatctgtaatgggtattggtccagctgttgccattcccgctgcaactaagctcgcagggctcaacgtcagcgatattgatctattcgagatcaatgaggcatttgcatctcagtatgtgtactcttgcaagaagttagagctggatatggaaaaggtcaatgttaatggaggagccattgctattggccatcccctgggtgctacaggagctcgatgtgttgcgacattgttgcacgagatgaagcggagaggaaaagattgccgctttggagtaatctcaatgtgcataggcactggaatgggagctgcagctgtttttgagaggggagactctgttgataacttgtccaacgctcgtgtggctaacggggatagtcattagaacatcgaagagagcttgaataagtagaagtaatgatgcattgagtctaataaatatgatgctttagctctttcacattgctgaacaatgaaaacttttgtcattctgagtttaaaatcaactacttttctctgaacaaagtgttaaatctaaaaccaaaagttaca

SEQ ID NO: 46201 - protein, 457 aa, Arabidopsis thaliana
  peptide (1)..(457): Ceres Seq. ID no. 12600772
MERAMERQKILLRHLNPVSSSNSSLKHEPSLLSPVNCVSEVSPMAAFGDDIVIVAAYRTAICKARRGGFKDTLPDDLLASVLKAVVERTSLDPSEVGDIVVGTVIAPGSQRAMECRVAAYFAGFPDSVPVRTVNRQCSSGLQAVADVAASIRAGYYDIGIGAGVESMSTDHIPGGGFHGSNPRAQDFPKARDCLLPMGITSENVAERFGVTREEQDMAAVESHKRAAAAIASGKLKDEIIPVATKIVDPETKAEKAIVVSVDDGVRPNSNMADLAKLKTVFKQNGSTTAGNASQISDGAGAVLLMKRSLAMKKGLPILGVFRSFAVTGVEPSVMGIGPAVAIPAATKLAGLNVSDIDLFEINEAFASQYVYSCKKLELDMEKVNVNGGAIAIGHPLGATGARCVATLLHEMKRRGKDCRFGVISMCIGTGMGAAAVFERGDSVDNLSNARVANGDSH

SEQ ID NO: 46202 - protein, 453 aa, Arabidopsis thaliana
  peptide (1)..(453): Ceres Seq. ID no. 12600773
MERQKILLRHLNPVSSSNSSLKHEPSLLSPVNCVSEVSPMAAFGDDIVIVAAYRTAICKARRGGFKDTLPDDLLASVLKAVVERTSLDPSEVGDIVVGTVIAPGSQRAMECRVAAYFAGFPDSVPVRTVNRQCSSGLQAVADVAASIRAGYYDIGIGAGVESMSTDHIPGGGFHGSNPRAQDFPKARDCLLPMGITSENVAERFGVTREEQDMAAVESHKRAAAAIASGKLKDEIIPVATKIVDPETKAEKAIVVSVDDGVRPNSNMADLAKLKTVFKQNGSTTAGNASQISDGAGAVLLMKRSLAMKKGLPILGVFRSFAVTGVEPSVMGIGPAVAIPAATKLAGLNVSDIDLFEINEAFASQYVYSCKKLELDMEKVNVNGGAIAIGHPLGATGARCVATLLHEMKRRGKDCRFGVISMCIGTGMGAAAVFERGDSVDNLSNARVANGDSH

SEQ ID NO: 46203 - protein, 414 aa, Arabidopsis thaliana; identical to SEQ ID NO: 29323
  peptide (1)..(414): Ceres Seq. ID no. 12600774

SEQ ID NO: 46204 - DNA, 1762 bp, Arabidopsis thaliana; identical to SEQ ID NO: 43860
  misc_feature (1)..(1762): Ceres Seq. ID no. 12576067
  misc_feature (1)..(1762): Ortholog of  Ceres SEQ ID NO 13597574 as cited in SEQ ID NO 64677
  misc_feature (1)..(1762): Ortholog of  Ceres SEQ ID NO 13597843 as cited in SEQ ID NO 64850
  misc_feature (1)..(1762): Ortholog of  Ceres SEQ ID NO 13597678 as cited in SEQ ID NO 65375
  misc_feature (1)..(1762): Ortholog of  Ceres SEQ ID NO 13596180 as cited in SEQ ID NO 67941
  misc_feature (1)..(1762): Ortholog of  Ceres SEQ ID NO 13591190 as cited in SEQ ID NO 68044
  misc_feature (1)..(1762): Ortholog of  Ceres SEQ ID NO 13595961 as cited in SEQ ID NO 68223

SEQ ID NO: 46205 - protein, 473 aa, Arabidopsis thaliana; identical to SEQ ID NO: 43861
  peptide (1)..(473): Ceres Seq. ID no. 12576068

SEQ ID NO: 46206 - protein, 363 aa, Arabidopsis thaliana; identical to SEQ ID NO: 43862
  peptide (1)..(363): Ceres Seq. ID no. 12576069

SEQ ID NO: 46207 - protein, 358 aa, Arabidopsis thaliana; identical to SEQ ID NO: 43863
  peptide (1)..(358): Ceres Seq. ID no. 12576070

SEQ ID NO: 46208 - DNA, 3978 bp, Arabidopsis thaliana; identical to SEQ ID NO: 44836
  misc_feature (1)..(3978): Ceres Seq. ID no. 13646346
  misc_feature (1)..(3978): Ortholog of  Ceres SEQ ID NO 13600485 as cited in SEQ ID NO 1221

SEQ ID NO: 46209 - protein, 1125 aa, Arabidopsis thaliana; identical to SEQ ID NO: 44837
  peptide (1)..(1125): Ceres Seq. ID no. 13646347

SEQ ID NO: 46210 - protein, 1112 aa, Arabidopsis thaliana; identical to SEQ ID NO: 44838
  peptide (1)..(1112): Ceres Seq. ID no. 13646348

SEQ ID NO: 46211 - protein, 1070 aa, Arabidopsis thaliana; identical to SEQ ID NO: 44839
  peptide (1)..(1070): Ceres Seq. ID no. 13646349

SEQ ID NO: 46212 - DNA, 2456 bp, Arabidopsis thaliana; identical to SEQ ID NO: 45655
  misc_feature (1)..(2456): Ceres Seq. ID no. 13592201
  misc_feature (1)..(2456): Ortholog of  Ceres SEQ ID NO 15173102 as cited in SEQ ID NO 61106

SEQ ID NO: 46213 - protein, 793 aa, Arabidopsis thaliana; identical to SEQ ID NO: 45656
  peptide (1)..(793): Ceres Seq. ID no. 13592202

SEQ ID NO: 46214 - protein, 784 aa, Arabidopsis thaliana; identical to SEQ ID NO: 45657
  peptide (1)..(784): Ceres Seq. ID no. 13592203

SEQ ID NO: 46215 - protein, 626 aa, Arabidopsis thaliana; identical to SEQ ID NO: 45658
  peptide (1)..(626): Ceres Seq. ID no. 13592204

SEQ ID NO: 46216 - DNA, 1247 bp, Arabidopsis thaliana
  misc_feature (1)..(1247): Ceres Seq. ID no. 13578669
  misc_feature (1)..(1247): Ortholog of  Ceres SEQ ID NO 15225252 as cited in SEQ ID NO 60972
ttgttttgtctcaaacaaatttctctgcacacactcaacaacatatcccataacaaaaaaaagctattaaaaaaaaagagaagcagccatggaagaaggtaagcaagaagcttcaatgccactagttccaattgacagcttctcttacagttggttagttaactttccttctttagaagctaccattgatgatcatcatcaaacatacgaagattcatcttcttcttcttccttcattgagatggatccaagattgcctccttctagaagattcttcatcaaaacatctcatgaaagtagcttcaagttcgataacttcgtctctttctccgacgaagatcactctttagttcacgccgacgagctcttccgtgacggctacgttatgccttatcgattaaagcccacgtccgcggctaccgaggaagaatctgagccgttggatacaacaacatcggagaagattgatacacgtggccttaacagcaagccttctcctacttcttcaagaaagctgaggagagtgtccaaatgggttttgctgaagtatcttgatttcttgacgccattgtgtaagagattaaggagatgtagatccgctgtaacaacgggaagtatcggtatggattcgaggatccgtgtaacgacttcgtgtaggagcagagtttattctgatgaaatgacgtcgtcgccaagaataagtgttgctgatgattattattggagaaggtcttgtgactctgagagctctatatacgaagccgttcttcattgcaagaaatcattcgagaaataagaagaataatccatggaagaggagcagttagaagtagagatggagaatattaagcttgagagaataagcaaattgcattaacacgttacacatggagtgggagagaaagagagggagcaacttgtgatgtgtctttttgttgattctctctcttgaattaaagagattgatgtgaatgatccatgtgaatgtgtcatctgatgtggatcaagaatgtttttgtttttttacatgagtgggcacatttatagaaatatatatggggctgcaagcagaatcaagaaaatattttcagattttcttggctatttttttttctccatatgtgtatattccaatcatgtaagttaaatagtttctttttatatatggggtaaaaactataagtgcctacccatgtttacttttaatttctggtccaattgtgtttgaatattcttactttttgtgc

SEQ ID NO: 46217 - protein, 235 aa, Arabidopsis thaliana
  peptide (1)..(235): Ceres Seq. ID no. 13578670
MEEGKQEASMPLVPIDSFSYSWLVNFPSLEATIDDHHQTYEDSSSSSSFIEMDPRLPPSRRFFIKTSHESSFKFDNFVSFSDEDHSLVHADELFRDGYVMPYRLKPTSAATEEESEPLDTTTSEKIDTRGLNSKPSPTSSRKLRRVSKWVLLKYLDFLTPLCKRLRRCRSAVTTGSIGMDSRIRVTTSCRSRVYSDEMTSSPRISVADDYYWRRSCDSESSIYEAVLHCKKSFEK

SEQ ID NO: 46218 - protein, 226 aa, Arabidopsis thaliana
  peptide (1)..(226): Ceres Seq. ID no. 13578671
MPLVPIDSFSYSWLVNFPSLEATIDDHHQTYEDSSSSSSFIEMDPRLPPSRRFFIKTSHESSFKFDNFVSFSDEDHSLVHADELFRDGYVMPYRLKPTSAATEEESEPLDTTTSEKIDTRGLNSKPSPTSSRKLRRVSKWVLLKYLDFLTPLCKRLRRCRSAVTTGSIGMDSRIRVTTSCRSRVYSDEMTSSPRISVADDYYWRRSCDSESSIYEAVLHCKKSFEK

SEQ ID NO: 46219 - protein, 184 aa, Arabidopsis thaliana; identical to SEQ ID NO: 42522
  peptide (1)..(184): Ceres Seq. ID no. 13578672

SEQ ID NO: 46220 - DNA, 1831 bp, Arabidopsis thaliana
  misc_feature (1)..(1831): Ceres Seq. ID no. 14315800
  misc_feature (1)..(1831): Ortholog of  Ceres SEQ ID NO 14310375 as cited in SEQ ID NO 59612
ggttgcttcaaattacgcattcgaatctgatcttcgttgatctctgtggaagaaacagataagagaaaatcgcatgaatttttttagaaaactatgttttaattcttcgattgcaagctacttcactaatacgagtcttctgatctcaattcttagtttttctcctcaattgccgatttctctctttcttttcgagcagaaatcgttagatcctttatcgctgtgtaatagtaatactaattttaataatcttgagaataattactccgttcattgttgaatcatggagtccggaggcaaaactaatcgtcagctgcgtaaagctatttgcgtctcaacagacgagaagatgaagaagaagagatcaccttcagtgatagtaattggaggtggtatggctggaatttcagctgctcgcactcttcaagatgcttcctttcaggttgttgtattggagtctcgtgacagaattggtggacgagttcacactgattactcattcggttttccagttgatctcggtgcatcttggttgcatggtgtctgtaaagagaatcctttggctgcagtaattggtagattaggattacctctttatcgtactagcggtgacaattcggttttgtatgatcacgatcttgagagttatgctctgttcgacaaggctggtaaccaagtttctcaagagttggtgacaaaagttggcgaaaattttgagcacattctggaagagatctgtaaagtcagggatgagcaggacgaagacatgtcaatagctcaagccttttctattgtatttaagaggaaccctgaattgaggttggagggacttgcccataatgtgcttcagtggtacttgtgccgcatggaaggatggtttgctgctgatgctgaaaccatctcggcaaagtgttgggatcaggaagaactgttgcccggtggacatggtcttatggttagagggtatcgccctgtaatcaacactctctcgaaaggtcttgatatacgactaagccacagagttaccaagatttcaaggcgctacagtggtgtgaaggtgactacagagaaaggagacacgtttgttgcggatgctgcagtcattgctcttcctctaggagtcttaaagtcaggaatgataacattcgaaccaaagcttccacagtggaaacaagaagctatcaacgatctcggtgttggaatcgagaacaagatcatattgaattttgacaacgtcttttggccaaacgtagagtttttaggagtcgttgcagaaacttcctacggatgcagttatttcttgaacctgcataaagccacaagccatcctgtccttgtttacatgccggctggtcagctcgctagagacatcgagaaaaagtccgatgaagcagctgcaaattttgccttttcgcaactacagaaaattcttccagatgcctcttcaccgataaattatttggtatcaaggtggggatcagacatcaattcaatgggatcatatagctatgaaattgtgaacaaacctcacgacctctatgagagactgagagtgccattggataatctattctttgcgggggaagccactagctcgagctacccgggatcagttcacggtgcttattcaaccggagtgctggcagctgaagactgcaggatgcgtgtgcttgagcgctatggagagctcgaacatgagatggaagaggaagctcctgcttctgtccctcttctgatctcccgtatgtaatttaaacctcaggtgttttatatcacctccatatgggaacattgttagatttgattttatgagatttcacgagttggaact

SEQ ID NO: 46221 - protein, 488 aa, Arabidopsis thaliana
  peptide (1)..(488): Ceres Seq. ID no. 14315801
MESGGKTNRQLRKAICVSTDEKMKKKRSPSVIVIGGGMAGISAARTLQDASFQVVVLESRDRIGGRVHTDYSFGFPVDLGASWLHGVCKENPLAAVIGRLGLPLYRTSGDNSVLYDHDLESYALFDKAGNQVSQELVTKVGENFEHILEEICKVRDEQDEDMSIAQAFSIVFKRNPELRLEGLAHNVLQWYLCRMEGWFAADAETISAKCWDQEELLPGGHGLMVRGYRPVINTLSKGLDIRLSHRVTKISRRYSGVKVTTEKGDTFVADAAVIALPLGVLKSGMITFEPKLPQWKQEAINDLGVGIENKIILNFDNVFWPNVEFLGVVAETSYGCSYFLNLHKATSHPVLVYMPAGQLARDIEKKSDEAAANFAFSQLQKILPDASSPINYLVSRWGSDINSMGSYSYEIVNKPHDLYERLRVPLDNLFFAGEATSSSYPGSVHGAYSTGVLAAEDCRMRVLERYGELEHEMEEEAPASVPLLISRM

SEQ ID NO: 46222 - protein, 466 aa, Arabidopsis thaliana
  peptide (1)..(466): Ceres Seq. ID no. 14315802
MKKKRSPSVIVIGGGMAGISAARTLQDASFQVVVLESRDRIGGRVHTDYSFGFPVDLGASWLHGVCKENPLAAVIGRLGLPLYRTSGDNSVLYDHDLESYALFDKAGNQVSQELVTKVGENFEHILEEICKVRDEQDEDMSIAQAFSIVFKRNPELRLEGLAHNVLQWYLCRMEGWFAADAETISAKCWDQEELLPGGHGLMVRGYRPVINTLSKGLDIRLSHRVTKISRRYSGVKVTTEKGDTFVADAAVIALPLGVLKSGMITFEPKLPQWKQEAINDLGVGIENKIILNFDNVFWPNVEFLGVVAETSYGCSYFLNLHKATSHPVLVYMPAGQLARDIEKKSDEAAANFAFSQLQKILPDASSPINYLVSRWGSDINSMGSYSYEIVNKPHDLYERLRVPLDNLFFAGEATSSSYPGSVHGAYSTGVLAAEDCRMRVLERYGELEHEMEEEAPASVPLLISRM

SEQ ID NO: 46223 - protein, 451 aa, Arabidopsis thaliana
  peptide (1)..(451): Ceres Seq. ID no. 14315803
MAGISAARTLQDASFQVVVLESRDRIGGRVHTDYSFGFPVDLGASWLHGVCKENPLAAVIGRLGLPLYRTSGDNSVLYDHDLESYALFDKAGNQVSQELVTKVGENFEHILEEICKVRDEQDEDMSIAQAFSIVFKRNPELRLEGLAHNVLQWYLCRMEGWFAADAETISAKCWDQEELLPGGHGLMVRGYRPVINTLSKGLDIRLSHRVTKISRRYSGVKVTTEKGDTFVADAAVIALPLGVLKSGMITFEPKLPQWKQEAINDLGVGIENKIILNFDNVFWPNVEFLGVVAETSYGCSYFLNLHKATSHPVLVYMPAGQLARDIEKKSDEAAANFAFSQLQKILPDASSPINYLVSRWGSDINSMGSYSYEIVNKPHDLYERLRVPLDNLFFAGEATSSSYPGSVHGAYSTGVLAAEDCRMRVLERYGELEHEMEEEAPASVPLLISRM

SEQ ID NO: 46224 - DNA, 1481 bp, Arabidopsis thaliana
  misc_feature (1)..(1481): Ceres Seq. ID no. 15174935
  misc_feature (1)..(1481): Ortholog of  Ceres SEQ ID NO 15179641 as cited in SEQ ID NO 56414
  misc_feature (1)..(1481): Ortholog of  Ceres SEQ ID NO 15176851 as cited in SEQ ID NO 61348
  misc_feature (1)..(1481): Ortholog of  Ceres SEQ ID NO 14316049 as cited in SEQ ID NO 67036
  misc_feature (1)..(1481): Ortholog of  Ceres SEQ ID NO 14313252 as cited in SEQ ID NO 67134
  misc_feature (1)..(1481): Ortholog of  Ceres SEQ ID NO 14302220 as cited in SEQ ID NO 69121
gatccagaatctcatcttctttgcctccaactcagcaattcatattttcctatattacaactctctgcctcttctgcttacatcatacaacaagcttctctctctggtagccatggcttcggctactttctctgtggccaaaccatctcttcagggtttttctgagttctcaggacttcgaaactcctctgctcttccctttgccaagagatcttcttccgatgagtttgtttccttcgtcagtttccaaacttctgcaatgagaagcaatggtggatacaggaaaggggtgaccgaggccaagataaaggtagcaatcaatgggttcggtaggattggtaggaacttcttgaggtgttggcatggtcgtaaggactctcctcttgatgtcgttgtcattaacgacactggtggtgttaaacaagcatcacatctcctcaaatacgactcaactcttggaatctttgacgctgatgtcaaaccttcaggagactcagctctctctgttgatggaaagatcatcaagattgtatctgatcgtaacccatctaatctcccctggggggaactaggcattgacttagttatcgaaggaaccggagtgtttgttgacagagacggtgctgggaagcaccttcaggctggagccaagaaggttcttatcactgcacctggaaaaggtgacatcccaacttatgtcgttggtgtcaatgctgaactttacagccatgaagatacgatcatcagcaatgcgtcttgtactactaactgtctcgctccattcgtcaaggttcttgaccagaaatttgggatcataaagggtacaatgacaactactcactcatacactggtgaccaaaggttgttagatgcgagccaccgtgatctaaggagagcaagagcagcagctttgaacattgttccaacatctacaggagcagccaaagctgtggctcttgtgcttcctaacctcaaaggaaaacttaacggaattgcattgcgtgtgccaactccaaacgtttcagtggttgacttagtcgtgcaagtctccaagaaaacttttgctgaagaagtcaatgctgctttcagagatgcagctgagaaagagcttaaaggtatccttgacgtctgtgatgagcctcttgtctctgttgacttcaggtgctctgatgtatcctccactattgattcttccctcacaatggttatgggagatgatatggttaaagtgattgcttggtatgacaatgaatggggttactcacagagagtcgttgatttggctgacattgttgccaataactggaagtgaagactcaacaacctcttgatgtctgctccattattttttactgttacatgattcggaatgtataattgtagttcctgagtttattatgtatttgtgctctataatttatagtaataaacttgattcaaacatattacatcctctgcttaatacacaactctggtttggg

SEQ ID NO: 46225 - protein, 436 aa, Arabidopsis thaliana
  peptide (1)..(436): Ceres Seq. ID no. 15174936
IQNLIFFASNSAIHIFLYYNSLPLLLTSYNKLLSLVAMASATFSVAKPSLQGFSEFSGLRNSSALPFAKRSSSDEFVSFVSFQTSAMRSNGGYRKGVTEAKIKVAINGFGRIGRNFLRCWHGRKDSPLDVVVINDTGGVKQASHLLKYDSTLGIFDADVKPSGDSALSVDGKIIKIVSDRNPSNLPWGELGIDLVIEGTGVFVDRDGAGKHLQAGAKKVLITAPGKGDIPTYVVGVNAELYSHEDTIISNASCTTNCLAPFVKVLDQKFGIIKGTMTTTHSYTGDQRLLDASHRDLRRARAAALNIVPTSTGAAKAVALVLPNLKGKLNGIALRVPTPNVSVVDLVVQVSKKTFAEEVNAAFRDAAEKELKGILDVCDEPLVSVDFRCSDVSSTIDSSLTMVMGDDMVKVIAWYDNEWGYSQRVVDLADIVANNWK

SEQ ID NO: 46226 - protein, 399 aa, Arabidopsis thaliana
  peptide (1)..(399): Ceres Seq. ID no. 15174937
MASATFSVAKPSLQGFSEFSGLRNSSALPFAKRSSSDEFVSFVSFQTSAMRSNGGYRKGVTEAKIKVAINGFGRIGRNFLRCWHGRKDSPLDVVVINDTGGVKQASHLLKYDSTLGIFDADVKPSGDSALSVDGKIIKIVSDRNPSNLPWGELGIDLVIEGTGVFVDRDGAGKHLQAGAKKVLITAPGKGDIPTYVVGVNAELYSHEDTIISNASCTTNCLAPFVKVLDQKFGIIKGTMTTTHSYTGDQRLLDASHRDLRRARAAALNIVPTSTGAAKAVALVLPNLKGKLNGIALRVPTPNVSVVDLVVQVSKKTFAEEVNAAFRDAAEKELKGILDVCDEPLVSVDFRCSDVSSTIDSSLTMVMGDDMVKVIAWYDNEWGYSQRVVDLADIVANNWK

SEQ ID NO: 46227 - protein, 350 aa, Arabidopsis thaliana
  peptide (1)..(350): Ceres Seq. ID no. 15174938
MRSNGGYRKGVTEAKIKVAINGFGRIGRNFLRCWHGRKDSPLDVVVINDTGGVKQASHLLKYDSTLGIFDADVKPSGDSALSVDGKIIKIVSDRNPSNLPWGELGIDLVIEGTGVFVDRDGAGKHLQAGAKKVLITAPGKGDIPTYVVGVNAELYSHEDTIISNASCTTNCLAPFVKVLDQKFGIIKGTMTTTHSYTGDQRLLDASHRDLRRARAAALNIVPTSTGAAKAVALVLPNLKGKLNGIALRVPTPNVSVVDLVVQVSKKTFAEEVNAAFRDAAEKELKGILDVCDEPLVSVDFRCSDVSSTIDSSLTMVMGDDMVKVIAWYDNEWGYSQRVVDLADIVANNWK

SEQ ID NO: 46228 - DNA, 1670 bp, Arabidopsis thaliana
  misc_feature (1)..(1670): Ceres Seq. ID no. 12575864
  misc_feature (1)..(1670): Ortholog of  Ceres SEQ ID NO 15179554 as cited in SEQ ID NO 1174
  misc_feature (1)..(1670): Ortholog of  Ceres SEQ ID NO 15177814 as cited in SEQ ID NO 55489
agaggaagagagagatatccagaaaagctactggatggagcattctagtgatttgactgttgaagctatgatgcttgactctaaagcttctgatcttgacaaagaagaacgtcctgaggtactctctttaatcccaccatatgaagggaaatctgtgcttgaacttggagctggtattggtcgtttcactggtgaattggctcaaaaggctggtgaagttatcgctcttgacttcatcgaaagcgcgattcagaagaatgaaagtgttaatgggcattacaagaacatcaagtttatgtgtgctgatgtaacatctccagacttgaaaatcaaagatggatctatcgacttgattttctcaaactggttgctcatgtatctctctgataaagaggtggaactaatggcagagagaatgattggatgggtcaagccagggggatacattttcttcagagaatcttgcttccatcaatctggggacagcaagcgaaagtcaaaccccactcactaccgtgaacccagattctacacaaaggttttccaggaatgtcagacacgtgatgcttctggcaattcatttgagctctctatggttggctgcaaatgcattggggcttatgtgaagaacaagaagaatcagaatcagatttgctggatatggcaaaaagtcagcgtggagaatgacaaggatttccagcgtttcttggacaatgttcaatacaagtctagtgggatcttgcgctatgagcgtgtctttggggaaggatatgtgagcactggtggatttgagacaactaaagaatttgtggcgaagatggaccttaaaccgggacagaaagtcctagatgttggttgtggtatcggtggaggtgacttctacatggctgagaatttcgatgttcatgttgttggaatcgatctgtcggtcaacatgatctctttcgcactggagcgggccattggactcaaatgctcagtcgagtttgaagtcgctgattgcaccaccaaaacatatcccgataattcctttgatgtcatttacagccgtgacactattctgcacatccaagacaagccagctctattcaggacattcttcaagtggcttaaaccagggggtaaagttctcatcactgactattgcagaagtgctgaaactccgtctcctgaattcgcagagtacataaaacaaagaggatatgatctacatgatgttcaagcttacggacagatgctgaaagacgcaggctttgacgacgttatcgctgaggaccgtactgatcagtttgtacaagtcctcaggcgtgaattagaaaaagtggagaaagaaaaggaagaattcatcagcgacttctcagaagaggattacaatgacattgttggaggatggtcggcaaagcttgaaaggactgcatctggtgaacagaaatggggattattcatagccgacaagaagtaaaatccatgtttttatcccaaaactctggtgattcatttcccttcaataaaaccgttcctttggaggacaatatctgcttgtttactatcatggaactgcaaatcaaaagataaactcatgtgttgtttcgattcttactcgagtcgttgtgccacataaaacctgcattgctttgattttccattaaatatctgcataacattcaagg

SEQ ID NO: 46229 - protein, 486 aa, Arabidopsis thaliana
  peptide (1)..(486): Ceres Seq. ID no. 12575865
EEERDIQKSYWMEHSSDLTVEAMMLDSKASDLDKEERPEVLSLIPPYEGKSVLELGAGIGRFTGELAQKAGEVIALDFIESAIQKNESVNGHYKNIKFMCADVTSPDLKIKDGSIDLIFSNWLLMYLSDKEVELMAERMIGWVKPGGYIFFRESCFHQSGDSKRKSNPTHYREPRFYTKVFQECQTRDASGNSFELSMVGCKCIGAYVKNKKNQNQICWIWQKVSVENDKDFQRFLDNVQYKSSGILRYERVFGEGYVSTGGFETTKEFVAKMDLKPGQKVLDVGCGIGGGDFYMAENFDVHVVGIDLSVNMISFALERAIGLKCSVEFEVADCTTKTYPDNSFDVIYSRDTILHIQDKPALFRTFFKWLKPGGKVLITDYCRSAETPSPEFAEYIKQRGYDLHDVQAYGQMLKDAGFDDVIAEDRTDQFVQVLRRELEKVEKEKEEFISDFSEEDYNDIVGGWSAKLERTASGEQKWGLFIADKK

SEQ ID NO: 46230 - protein, 475 aa, Arabidopsis thaliana
  peptide (1)..(475): Ceres Seq. ID no. 12575866
MEHSSDLTVEAMMLDSKASDLDKEERPEVLSLIPPYEGKSVLELGAGIGRFTGELAQKAGEVIALDFIESAIQKNESVNGHYKNIKFMCADVTSPDLKIKDGSIDLIFSNWLLMYLSDKEVELMAERMIGWVKPGGYIFFRESCFHQSGDSKRKSNPTHYREPRFYTKVFQECQTRDASGNSFELSMVGCKCIGAYVKNKKNQNQICWIWQKVSVENDKDFQRFLDNVQYKSSGILRYERVFGEGYVSTGGFETTKEFVAKMDLKPGQKVLDVGCGIGGGDFYMAENFDVHVVGIDLSVNMISFALERAIGLKCSVEFEVADCTTKTYPDNSFDVIYSRDTILHIQDKPALFRTFFKWLKPGGKVLITDYCRSAETPSPEFAEYIKQRGYDLHDVQAYGQMLKDAGFDDVIAEDRTDQFVQVLRRELEKVEKEKEEFISDFSEEDYNDIVGGWSAKLERTASGEQKWGLFIADKK

SEQ ID NO: 46231 - protein, 464 aa, Arabidopsis thaliana
  peptide (1)..(464): Ceres Seq. ID no. 12575867
MMLDSKASDLDKEERPEVLSLIPPYEGKSVLELGAGIGRFTGELAQKAGEVIALDFIESAIQKNESVNGHYKNIKFMCADVTSPDLKIKDGSIDLIFSNWLLMYLSDKEVELMAERMIGWVKPGGYIFFRESCFHQSGDSKRKSNPTHYREPRFYTKVFQECQTRDASGNSFELSMVGCKCIGAYVKNKKNQNQICWIWQKVSVENDKDFQRFLDNVQYKSSGILRYERVFGEGYVSTGGFETTKEFVAKMDLKPGQKVLDVGCGIGGGDFYMAENFDVHVVGIDLSVNMISFALERAIGLKCSVEFEVADCTTKTYPDNSFDVIYSRDTILHIQDKPALFRTFFKWLKPGGKVLITDYCRSAETPSPEFAEYIKQRGYDLHDVQAYGQMLKDAGFDDVIAEDRTDQFVQVLRRELEKVEKEKEEFISDFSEEDYNDIVGGWSAKLERTASGEQKWGLFIADKK

SEQ ID NO: 46232 - DNA, 1528 bp, Arabidopsis thaliana
  misc_feature (1)..(1528): Ceres Seq. ID no. 12601699
  misc_feature (1)..(1528): Ortholog of  Ceres SEQ ID NO 13582297 as cited in SEQ ID NO 56486
  misc_feature (1)..(1528): Ortholog of  Ceres SEQ ID NO 13586936 as cited in SEQ ID NO 0
atcccacacttatctcttcctatctctctctcattcaaacccaaataggaaacaaatacacaaaagtataataaaaagtctttctctcatctttcgccacgtagacatggacgtcgaacatcacaaatccggccacatcagtagaccaacggtggatattccaccgaggaagcttctttcctccgccaagtctccgtcgtcagtttcaagtccccttcgcgactataaagaacagaaagactattgttacgactctgactctgaggatccttacgctggagaccatttccggatgtacgaattcaagatccgacggtgcacgcgtagccgtagccatgactggaccgactgtcctttctctcatcccggtgaaaaggctcgtcgccgtgaccctcgccggtttcactacaccggagaagtatgccctgagtttagccgtcacggtgattgtagccgtggtgatgaatgcggtttcgctcacggggttttcgagtgttggcttcatccgagtcgttaccgtacggaagcttgtaaagacggtaagcattgtaagaggaaagtttgtttctttgctcattctccacgtcagctgagagttcttccaccgtccccggagaatcatatttccggtggttgcggtggatcaccgtcgtcatcccctgcatcggttttaagcaataaaaataatcgatgttgcttgttttgttcccattctccgacgagtactctcttgaatttatcacgatcaccttcatcgtctccgcctttgtctccagctgataaagccgatgcattttcacggctgagccgccgtcgcaccgccgtactaaacgaactgattagttctttagattccttaagtctcacggaagcacttgcagcttcttcatcgtctcccgttaccatgcccatttccacggcgacgatgatcgcttcatcgaatctaagcagcaaccaccaccaccaccgtcttccgccgtggcttgatgtcggagacagagatctccaattacaacagagtagtcctctacgatttgctctttcaccttcttcaactccaagttacctccatggccagcttcagccaccaccgtcgagcttctttggcgatgaattcacaccacgtggtggccggctaagcgatttctcggtggctgcagctgcggcggcccaagctagggataaaaatagctttgaagtcggttctagtggcgatcttgatctaggatgggtgaacgatcttttgacatgaacagtatgacatcaactgtgaactacttgagatctttcccgacgggaataattatacggcggcgccgcggcggaggtccgtcgtggtacattgtttattaaaaaagtatttacgattttttccacgagagctaattaagagtctgtagtactatgtcgtgctttaaaaatatatttttactgtattttttgttaaataagagagtccataacttctattgttatattgatctcttggaacttgtaatatctactacattgtgatcgaattcctatg

SEQ ID NO: 46233 - protein, 416 aa, Arabidopsis thaliana
  peptide (1)..(416): Ceres Seq. ID no. 12601700
SHTYLFLSLSHSNPNRKQIHKSIIKSLSLIFRHVDMDVEHHKSGHISRPTVDIPPRKLLSSAKSPSSVSSPLRDYKEQKDYCYDSDSEDPYAGDHFRMYEFKIRRCTRSRSHDWTDCPFSHPGEKARRRDPRRFHYTGEVCPEFSRHGDCSRGDECGFAHGVFECWLHPSRYRTEACKDGKHCKRKVCFFAHSPRQLRVLPPSPENHISGGCGGSPSSSPASVLSNKNNRCCLFCSHSPTSTLLNLSRSPSSSPPLSPADKADAFSRLSRRRTAVLNELISSLDSLSLTEALAASSSSPVTMPISTATMIASSNLSSNHHHHRLPPWLDVGDRDLQLQQSSPLRFALSPSSTPSYLHGQLQPPPSSFFGDEFTPRGGRLSDFSVAAAAAAQARDKNSFEVGSSGDLDLGWVNDLLT

SEQ ID NO: 46234 - protein, 381 aa, Arabidopsis thaliana
  peptide (1)..(381): Ceres Seq. ID no. 12601701
MDVEHHKSGHISRPTVDIPPRKLLSSAKSPSSVSSPLRDYKEQKDYCYDSDSEDPYAGDHFRMYEFKIRRCTRSRSHDWTDCPFSHPGEKARRRDPRRFHYTGEVCPEFSRHGDCSRGDECGFAHGVFECWLHPSRYRTEACKDGKHCKRKVCFFAHSPRQLRVLPPSPENHISGGCGGSPSSSPASVLSNKNNRCCLFCSHSPTSTLLNLSRSPSSSPPLSPADKADAFSRLSRRRTAVLNELISSLDSLSLTEALAASSSSPVTMPISTATMIASSNLSSNHHHHRLPPWLDVGDRDLQLQQSSPLRFALSPSSTPSYLHGQLQPPPSSFFGDEFTPRGGRLSDFSVAAAAAAQARDKNSFEVGSSGDLDLGWVNDLLT

SEQ ID NO: 46235 - protein, 319 aa, Arabidopsis thaliana
  peptide (1)..(319): Ceres Seq. ID no. 12601702
MYEFKIRRCTRSRSHDWTDCPFSHPGEKARRRDPRRFHYTGEVCPEFSRHGDCSRGDECGFAHGVFECWLHPSRYRTEACKDGKHCKRKVCFFAHSPRQLRVLPPSPENHISGGCGGSPSSSPASVLSNKNNRCCLFCSHSPTSTLLNLSRSPSSSPPLSPADKADAFSRLSRRRTAVLNELISSLDSLSLTEALAASSSSPVTMPISTATMIASSNLSSNHHHHRLPPWLDVGDRDLQLQQSSPLRFALSPSSTPSYLHGQLQPPPSSFFGDEFTPRGGRLSDFSVAAAAAAQARDKNSFEVGSSGDLDLGWVNDLLT

SEQ ID NO: 46236 - DNA, 2833 bp, Arabidopsis thaliana
  misc_feature (1)..(2833): Ceres Seq. ID no. 12575868
  misc_feature (1)..(2833): Ortholog of  Ceres SEQ ID NO 14308863 as cited in SEQ ID NO 55247
gtttcttcatacgtttcgttcccaaaaaattgacacagaagagagaaaaccaaattaacaaaaaacaatttctcgcctctactcgcaaaaaccctaatttcatcatcttcctatctgattccaattatttcttctacaagtttccttcttcttataatccatcgtttcttccttctatcgcgtttcacaaagcttgtcgtttttctctccttgtgggttggttaggccaatttgtttcgattgagcgattgaatctacgagacgcaacaatctctttctgggttagggtttcttcacataaccttttgtggtttcttgttttgggcggagtttggtggtttctggaaccctagatagagaggagccttagggtggttaatattggcactggtgatttagatatagagaaagagatttgagagatatatgtgtaggtgttagggttttcattacttgtgaattgtggctgtggcattgaatagaggtgtttggggttttgtccctttggtaaaggatgagtgttctctagtgtgaagctaaattggtcttctaagccatctgtgtgagggatggaagtgtagaaggtgctgaaacaactcatttggattagggattggaattggattcgtcttgtggcctttaccgtggtagggatttagatggtagagaaagctagggtagattaaattttttgtaagaggagctttctctgttgttgttggtggggggtgaagaaggttagagagagtgtgtgttctttcttgtatctgatgaggtacagctttcctaatggacaaaggtgaacactctttagctccggaatggttgagaagttcagggcatgcttctggtggtgggagttcaaaccacctccttgtatcatcctcttctcattcagattctgcatctttacaatataatagcaggaataggaactctaggagcaaaagtgacgttgattcaattcattctccttttctggatcgatcttcttctactaattcaaggaggggctctagtaatggttctgcaaaacatgcatatagtagtttcaactttaataggagtcaaagggataaggaccgcagcagagacaaggatagggtaagctatgtggatccatgggaccttgacacttctatccctcttagaactatcttgactggtagggatccggatccattgagacgatcacattcaatggttacaaggaaacagggagaacacctgtctcgaggattaacagtgggcttgaataatggtggcagtagtaatagttacaacggaaatggactactttctggacctagcattgggaatagctttcagagaactgggtttgataaggattttccttctcttggagctgaagagaagcaaaatgggcaagatgttgtacgagtctcatctcctggtataagttcagttgttcagaacttgccagttggtaactcagctttgattggtggggaaggttggacgtctgctctggcagaggttcccaatgtcatcgagaaggcttgtactgggtcattaacgtctccaaaagctaatgctgttagcgcgggaactttaactggcccaagtggtcttaacatggctgaagcattggtgcaggctccagcaagaactcacacccctccccaaggatctgtgaagacacaacggctcgaggatttggcaatcaagcagtcaaggcaattgataccggttgtgccttcagcaccaaagggcttgagtctgaattcttctgataaatccaagacaaagcaagtggttcgaactggtgaaacttgccttgctccctcaagaaatgccctacaacagcccgctgtcctacttgggagtttccagtctaatcctagtggtcaaatcaaacctgagaagaagctgttggttctcaaaccggctagggaaaatggtgtcagtgctgttaaagaatctggaagcccaagtgctaatacaaacactcgagctgcctctagccagctgatgtccaatactcaatcaacccaatctgctcctgtgagaagtacaaacagcccaaaggagctcaagggagccagtgccttctccatgatatctggccaaacaatcgaaaagaaaccttccgctgctcaagctcagagcaggagtgcattttacagtgctctgaagcagaaacaaactgcatcaacaagcatcaccaccgatcctgttagctcttcaaccagtgcctcttcttctgttgaggtaaaactcaacagctcaaaggatcttatagctagtgacccttcaagttcacaggcaacaagtggcgtcgaagtgactgacagtgtccaggtagcttctcatactagtggctttgaagcaactgacactccagatgaggaagaggcacagttccttagatcactcggctgggttgaaaacaatggtgaagaatatctcacagaggaggagatagattcctttttggaacagtacaaggagctgaggccgttatttccggagagactatccatgatacatgaagcaagagaggatgtagcttaagactcctgaacccaactttacaaaactgaagaaagtactggtttttggaaagatagtttctaatttcttttttaatatatttttcttcttttggtctttttgttcctgagaaaagcttagctactactttggcaatgggagaggagaaaggcagggaggggtttttgtttgtttgttttgatgatttgcaaatagtgcaaataaagctgatgaggctttgagttgccatatgagtgtcctgccctcttcagactttgtagatctttctttggtctgaaaaaaaaatggctcagctctc

SEQ ID NO: 46237 - protein, 581 aa, Arabidopsis thaliana
  peptide (1)..(581): Ceres Seq. ID no. 12575869
MDKGEHSLAPEWLRSSGHASGGGSSNHLLVSSSSHSDSASLQYNSRNRNSRSKSDVDSIHSPFLDRSSSTNSRRGSSNGSAKHAYSSFNFNRSQRDKDRSRDKDRVSYVDPWDLDTSIPLRTILTGRDPDPLRRSHSMVTRKQGEHLSRGLTVGLNNGGSSNSYNGNGLLSGPSIGNSFQRTGFDKDFPSLGAEEKQNGQDVVRVSSPGISSVVQNLPVGNSALIGGEGWTSALAEVPNVIEKACTGSLTSPKANAVSAGTLTGPSGLNMAEALVQAPARTHTPPQGSVKTQRLEDLAIKQSRQLIPVVPSAPKGLSLNSSDKSKTKQVVRTGETCLAPSRNALQQPAVLLGSFQSNPSGQIKPEKKLLVLKPARENGVSAVKESGSPSANTNTRAASSQLMSNTQSTQSAPVRSTNSPKELKGASAFSMISGQTIEKKPSAAQAQSRSAFYSALKQKQTASTSITTDPVSSSTSASSSVEVKLNSSKDLIASDPSSSQATSGVEVTDSVQVASHTSGFEATDTPDEEEAQFLRSLGWVENNGEEYLTEEEIDSFLEQYKELRPLFPERLSMIHEAREDVA

SEQ ID NO: 46238 - protein, 444 aa, Arabidopsis thaliana
  peptide (1)..(444): Ceres Seq. ID no. 12575870
MVTRKQGEHLSRGLTVGLNNGGSSNSYNGNGLLSGPSIGNSFQRTGFDKDFPSLGAEEKQNGQDVVRVSSPGISSVVQNLPVGNSALIGGEGWTSALAEVPNVIEKACTGSLTSPKANAVSAGTLTGPSGLNMAEALVQAPARTHTPPQGSVKTQRLEDLAIKQSRQLIPVVPSAPKGLSLNSSDKSKTKQVVRTGETCLAPSRNALQQPAVLLGSFQSNPSGQIKPEKKLLVLKPARENGVSAVKESGSPSANTNTRAASSQLMSNTQSTQSAPVRSTNSPKELKGASAFSMISGQTIEKKPSAAQAQSRSAFYSALKQKQTASTSITTDPVSSSTSASSSVEVKLNSSKDLIASDPSSSQATSGVEVTDSVQVASHTSGFEATDTPDEEEAQFLRSLGWVENNGEEYLTEEEIDSFLEQYKELRPLFPERLSMIHEAREDVA

SEQ ID NO: 46239 - protein, 312 aa, Arabidopsis thaliana
  peptide (1)..(312): Ceres Seq. ID no. 12575871
MAEALVQAPARTHTPPQGSVKTQRLEDLAIKQSRQLIPVVPSAPKGLSLNSSDKSKTKQVVRTGETCLAPSRNALQQPAVLLGSFQSNPSGQIKPEKKLLVLKPARENGVSAVKESGSPSANTNTRAASSQLMSNTQSTQSAPVRSTNSPKELKGASAFSMISGQTIEKKPSAAQAQSRSAFYSALKQKQTASTSITTDPVSSSTSASSSVEVKLNSSKDLIASDPSSSQATSGVEVTDSVQVASHTSGFEATDTPDEEEAQFLRSLGWVENNGEEYLTEEEIDSFLEQYKELRPLFPERLSMIHEAREDVA

SEQ ID NO: 46240 - DNA, 1404 bp, Arabidopsis thaliana
  misc_feature (1)..(1404): Ceres Seq. ID no. 12600840
  misc_feature (1)..(1404): Ortholog of  Ceres SEQ ID NO 13638160 as cited in SEQ ID NO 58847
gatcatcttcacgatattactattttacccttctcttccaaaagagaaaaaaacattttaactctcaaagattcgttttaggtacgcgacggcccgacctcgattctcttccacttctttcttgttccaaaaacctaaaccctctctctctctctctatctcttgaaaaatcaacaaaacattggaatcaatttctctatgntttgattctattttaaagatccaatattctttctccattgagattaagcttctttctcgctgtcgtctctctatagatcttggntcttagtcccttttgaataataatgatggtggagatggattacgctaagaaaatgcagaaatgtcatgaatacgttgaagcacttgaagaagaacagaagaaaatccaagtctttcaacgcgagcttcctttatgtttagagcttgtcactcaagcgatcgaagcttgtcggaaggagttatctggtacgacgacaactacatcagaacagtgttcagaacagaccacaagtgtttgtggtggtcctgtctttgaagagtttattcctatcaagaaaattagttccttgtgtgaagaagtacaagaagaagaagaagaagatggtgaacatgaatcttctccagaacttgtgaataataagaaatcagattggcttagatctgttcagctatggaatcattcaccggatctaaatccaaaagaggagcgtgtagctaagaaagcgaaagtggtggaggtgaaaccaaaaagcggtgcgtttcagccgtttcaaaagcgcgttttggagactgatttgcaaccggcggtgaaagtagctagttcgatgccagcgacgacgacgagttctacgacggaaacttgtggtggtaaaagtgatttgattaaagctggagatgaggaaagacggatagagcagcagcaatcgcagtcgcatacgcatagaaaacaaaggcggtgctggtcgccggaattacaccgtcgattcctaaacgcgcttcagcagcttggaggatctcatgttgctacaccaaagcaaatcagggatcacatgaaggttgatggattaacaaacgacgaagttaaaagccatttacagaaatatagacttcacacaagaaggccagcagcaacatccgtggcggcacaaagtaccgggaatcagcaacaaccacaatttgtggtggttggaggcatatgggtaccatcgtcacaagattttccaccaccgtccgatgtagccaacaagggtggtgtatatgctccggttgcggtggcgcaatctccaaaacgttcgttggagagaagttgcaactcgccggcggcatcttcctctacaaatacaaatacttctactcctgtgtcataatctgatagtcatactataatcatctcctgat

SEQ ID NO: 46241 - protein, 354 aa, Arabidopsis thaliana; identical to SEQ ID NO: 25269
  peptide (1)..(354): Ceres Seq. ID no. 12600841

SEQ ID NO: 46242 - protein, 353 aa, Arabidopsis thaliana; identical to SEQ ID NO: 25270
  peptide (1)..(353): Ceres Seq. ID no. 12600842

SEQ ID NO: 46243 - protein, 350 aa, Arabidopsis thaliana; identical to SEQ ID NO: 25271
  peptide (1)..(350): Ceres Seq. ID no. 12600843

SEQ ID NO: 46244 - DNA, 2532 bp, Arabidopsis thaliana; identical to SEQ ID NO: 45523
  misc_feature (1)..(2532): Ceres Seq. ID no. 13647179
  misc_feature (1)..(2532): Ortholog of  Ceres SEQ ID NO 13595870 as cited in SEQ ID NO 62101
  misc_feature (1)..(2532): Ortholog of  Ceres SEQ ID NO 13590241 as cited in SEQ ID NO 63878
  misc_feature (1)..(2532): Ortholog of  Ceres SEQ ID NO 13657939 as cited in SEQ ID NO 66349

SEQ ID NO: 46245 - protein, 716 aa, Arabidopsis thaliana; identical to SEQ ID NO: 45524
  peptide (1)..(716): Ceres Seq. ID no. 13647180

SEQ ID NO: 46246 - protein, 531 aa, Arabidopsis thaliana; identical to SEQ ID NO: 45525
  peptide (1)..(531): Ceres Seq. ID no. 13647181

SEQ ID NO: 46247 - protein, 475 aa, Arabidopsis thaliana; identical to SEQ ID NO: 45526
  peptide (1)..(475): Ceres Seq. ID no. 13647182

SEQ ID NO: 46248 - DNA, 1379 bp, Arabidopsis thaliana
  misc_feature (1)..(1379): Ceres Seq. ID no. 13579157
  misc_feature (1)..(1379): Ortholog of  Ceres SEQ ID NO 13502943 as cited in SEQ ID NO 65097
acattctcgactttgctatttcattgagcttgaataaccaattttaagacgccattgctaaaacatgaaagctctatcatcttcttctccaatattaggtgctagccagccggcgacggcgactgcgcttatcgcgcgatctggtcgttctgaatggcagagctcctgcgctattctaacaagcaaggttatttctcaagaagaatctgaatccttacctgtgcctccagtttccggcggagttgatcatctcaacggccataacagcgccgccgcacgagttccaggaatgaatcttgttccgattgagaaatctgatagcaatccgttggttccacagcatcgtcataatccactgaaaccccttagcatgacggatctctcgccggctccgatgcacggatctaatctacgcgtcgcttatcaaggtgttcccggtgcttactctgaagcagccgctggtaaagcttatcctaattgtcaagctataccttgcgatcaatttgaggttgcgtttcaagcggtggagctttggatcgcagatcgtgctgttttaccggtggagaactctctcggcggttctatccaccgtaattacgatctcctcctccgtcaccgtcttcatatagtcggcgaagttcaactccctgttcatcactgtttactggctcttcccggcgttcgtaaagagtttctcacacgtgtgatctcacaccctcaaggtctcgctcagtgtgagcacacgctcacaaagctcggacttaatgtcgcacgtgaggcagttgatgacaccgcaggagccgctgagttcatcgcctctaacaacctccgcgacacagccgctatcgcgagtgcacgcgccgccgagatatacgggttggagattttggaagatgggattcaggacgacgtgagtaacgtgacgcgcttcgtgatgctggcgcgtgagccaatcatacctagaacagatagaccgttcaagactagcattgtctttgcgcacgagaaaggaaccagcgtgcttttcaaggtgctctctgctttcgccttcagagacattagcttgacgaagatcgaatcgaggccgaatcacaaccgtccgatcagggtcgtggatgatgccaatgtcgggacggcgaagcattttgagtacatgttttatgttgacttcgaggcctcgatggcggaggcgcgtgctcagaacgcgcttgccgaggttcaggagtttacatcgttcttgcgggtgcttgggagttatcccatggatatgactccttggtcaccaacatcatcaacttcatcgtaaccatactatagtctatacacacatgaaaatgtaaattttggagaagataacaaagttttatatttactgatcc

SEQ ID NO: 46249 - protein, 413 aa, Arabidopsis thaliana
  peptide (1)..(413): Ceres Seq. ID no. 13579158
MKALSSSSPILGASQPATATALIARSGRSEWQSSCAILTSKVISQEESESLPVPPVSGGVDHLNGHNSAAARVPGMNLVPIEKSDSNPLVPQHRHNPLKPLSMTDLSPAPMHGSNLRVAYQGVPGAYSEAAAGKAYPNCQAIPCDQFEVAFQAVELWIADRAVLPVENSLGGSIHRNYDLLLRHRLHIVGEVQLPVHHCLLALPGVRKEFLTRVISHPQGLAQCEHTLTKLGLNVAREAVDDTAGAAEFIASNNLRDTAAIASARAAEIYGLEILEDGIQDDVSNVTRFVMLAREPIIPRTDRPFKTSIVFAHEKGTSVLFKVLSAFAFRDISLTKIESRPNHNRPIRVVDDANVGTAKHFEYMFYVDFEASMAEARAQNALAEVQEFTSFLRVLGSYPMDMTPWSPTSSTSS

SEQ ID NO: 46250 - protein, 338 aa, Arabidopsis thaliana
  peptide (1)..(338): Ceres Seq. ID no. 13579159
MNLVPIEKSDSNPLVPQHRHNPLKPLSMTDLSPAPMHGSNLRVAYQGVPGAYSEAAAGKAYPNCQAIPCDQFEVAFQAVELWIADRAVLPVENSLGGSIHRNYDLLLRHRLHIVGEVQLPVHHCLLALPGVRKEFLTRVISHPQGLAQCEHTLTKLGLNVAREAVDDTAGAAEFIASNNLRDTAAIASARAAEIYGLEILEDGIQDDVSNVTRFVMLAREPIIPRTDRPFKTSIVFAHEKGTSVLFKVLSAFAFRDISLTKIESRPNHNRPIRVVDDANVGTAKHFEYMFYVDFEASMAEARAQNALAEVQEFTSFLRVLGSYPMDMTPWSPTSSTSS

SEQ ID NO: 46251 - protein, 311 aa, Arabidopsis thaliana
  peptide (1)..(311): Ceres Seq. ID no. 13579160
MTDLSPAPMHGSNLRVAYQGVPGAYSEAAAGKAYPNCQAIPCDQFEVAFQAVELWIADRAVLPVENSLGGSIHRNYDLLLRHRLHIVGEVQLPVHHCLLALPGVRKEFLTRVISHPQGLAQCEHTLTKLGLNVAREAVDDTAGAAEFIASNNLRDTAAIASARAAEIYGLEILEDGIQDDVSNVTRFVMLAREPIIPRTDRPFKTSIVFAHEKGTSVLFKVLSAFAFRDISLTKIESRPNHNRPIRVVDDANVGTAKHFEYMFYVDFEASMAEARAQNALAEVQEFTSFLRVLGSYPMDMTPWSPTSSTSS

SEQ ID NO: 46252 - DNA, 1993 bp, Arabidopsis thaliana
  misc_feature (1)..(1993): Ceres Seq. ID no. 15168615
  misc_feature (1)..(1993): Ortholog of  Ceres SEQ ID NO 13504578 as cited in SEQ ID NO 59850
ggagacgacggtggcgatcgaaaccctgtgccctaatttaaacggaaacttggttcgccgccgttctgcgtcgcccggcggcggaaatgtgcgcttggggcgatgcgtttaattctcaccgtcatgtgctcattcattccttacctttattcatcttctcctcaccgtccttgctcttccccaatctctcgtcctcctcctcgaatccgtccttgtcgtctcagtcgtttcgccaccgcattagtcgctacctccgctcttcttctcgcttccgtcgcttggctttctctcgtcttctcaccaaccacttcccgttgttggcatcttcttaaagattgggaagacaatcatctctggaacaaacggtaccatcatccaattgtaactcctcctccgccgccgccgtcgccgccgtctcttccagctcttccgttattcgatcatgaatttagaaatcgtagtctctcagagattgataaacttgatctgtctatgaatcacttgatgtttggtattgctggatcttcacagctttgggaacgtcgtaaggaacttgtgagattatggtggaaaccttctcagatgcgtggacatgtctggcttgaagagcaagtttctcctgaggaaggtgatgattctcttcctcctataattgtctctgaagacagctctcgttttcgttacactaatcctactggtcatccttctggacttcgaatctctcgtattgctatggagtcttttcgtctctctctccctaatgttcggtggtttgttcttggtgatgatgatactatcttcaatgttcataatcttcttgctgtgttaagcaagtatgatccttcggagatggtttatattggaaacccctcggagagccactctgctaactcttactttagtcataacatggcttttggaggcggtggcattgccattagctaccctttagcggaagctctctcccggattcacgacgattgtctcgatagatacccgaagctatacggtagtgatgatcgtctccacgcctgcatcactgaactcggagttcctttgtccagagagcctggctttcaccagtgggatattaagggaaatgctcatggtctcttgtcctctcatcctattgcaccatttgtctcaattcatcacgttgaagctgttaatcctctctatccgggattatctacattagatagtttgaaactcttgacaagagctatgagtttggatcctaggagtgttttgcagcgatcgatctgctatgatcatactcacaaactgacatttgcgatatctcttggttatgttgtacaagttttcccaagtattctcctaccacgggatcttgagcgagctgaactttctttctctgcttggaacgggataagtcaacccagtgagtttgatcttgacataaagcttccaatttcgtctctctgtaagaagcctatcctcttcttcttgaaagaggttggccaagaaggtaatgctacacttggaacgtactcaagatccttggtaaaggatgatttgaagacgaagcttctatgttttccacgctctctacctctgcacaaagtggataaaatccaggtctcagggtttcctctgagtaaaaattggcacttggcgccgagacggttgtgttgcagagcaaccccaactactactaacgagcctctcagattaacagttgggcagtgtggaagataattttgggttccacgattagttctcaatgaacacttatggtgaatactggatctctctaagcatgttgtttcagctctatcctgtacttgtacataggtaagatccagaaccttgactgttgtctgacctagaatgctaatatgcccaaaattgaatttgtcactcttttgtttgttccatgttccactttctttttttgtacatctgagatttcacgaactcaacatttcctgttgagaaacgagtgtaatgtgtacaacaacaaatctttacc

SEQ ID NO: 46253 - protein, 538 aa, Arabidopsis thaliana
  peptide (1)..(538): Ceres Seq. ID no. 15168616
MRLILTVMCSFIPYLYSSSPHRPCSSPISRPPPRIRPCRLSRFATALVATSALLLASVAWLSLVFSPTTSRCWHLLKDWEDNHLWNKRYHHPIVTPPPPPPSPPSLPALPLFDHEFRNRSLSEIDKLDLSMNHLMFGIAGSSQLWERRKELVRLWWKPSQMRGHVWLEEQVSPEEGDDSLPPIIVSEDSSRFRYTNPTGHPSGLRISRIAMESFRLSLPNVRWFVLGDDDTIFNVHNLLAVLSKYDPSEMVYIGNPSESHSANSYFSHNMAFGGGGIAISYPLAEALSRIHDDCLDRYPKLYGSDDRLHACITELGVPLSREPGFHQWDIKGNAHGLLSSHPIAPFVSIHHVEAVNPLYPGLSTLDSLKLLTRAMSLDPRSVLQRSICYDHTHKLTFAISLGYVVQVFPSILLPRDLERAELSFSAWNGISQPSEFDLDIKLPISSLCKKPILFFLKEVGQEGNATLGTYSRSLVKDDLKTKLLCFPRSLPLHKVDKIQVSGFPLSKNWHLAPRRLCCRATPTTTNEPLRLTVGQCGR

SEQ ID NO: 46254 - protein, 531 aa, Arabidopsis thaliana
  peptide (1)..(531): Ceres Seq. ID no. 15168617
MCSFIPYLYSSSPHRPCSSPISRPPPRIRPCRLSRFATALVATSALLLASVAWLSLVFSPTTSRCWHLLKDWEDNHLWNKRYHHPIVTPPPPPPSPPSLPALPLFDHEFRNRSLSEIDKLDLSMNHLMFGIAGSSQLWERRKELVRLWWKPSQMRGHVWLEEQVSPEEGDDSLPPIIVSEDSSRFRYTNPTGHPSGLRISRIAMESFRLSLPNVRWFVLGDDDTIFNVHNLLAVLSKYDPSEMVYIGNPSESHSANSYFSHNMAFGGGGIAISYPLAEALSRIHDDCLDRYPKLYGSDDRLHACITELGVPLSREPGFHQWDIKGNAHGLLSSHPIAPFVSIHHVEAVNPLYPGLSTLDSLKLLTRAMSLDPRSVLQRSICYDHTHKLTFAISLGYVVQVFPSILLPRDLERAELSFSAWNGISQPSEFDLDIKLPISSLCKKPILFFLKEVGQEGNATLGTYSRSLVKDDLKTKLLCFPRSLPLHKVDKIQVSGFPLSKNWHLAPRRLCCRATPTTTNEPLRLTVGQCGR

SEQ ID NO: 46255 - protein, 408 aa, Arabidopsis thaliana
  peptide (1)..(408): Ceres Seq. ID no. 15168618
MNHLMFGIAGSSQLWERRKELVRLWWKPSQMRGHVWLEEQVSPEEGDDSLPPIIVSEDSSRFRYTNPTGHPSGLRISRIAMESFRLSLPNVRWFVLGDDDTIFNVHNLLAVLSKYDPSEMVYIGNPSESHSANSYFSHNMAFGGGGIAISYPLAEALSRIHDDCLDRYPKLYGSDDRLHACITELGVPLSREPGFHQWDIKGNAHGLLSSHPIAPFVSIHHVEAVNPLYPGLSTLDSLKLLTRAMSLDPRSVLQRSICYDHTHKLTFAISLGYVVQVFPSILLPRDLERAELSFSAWNGISQPSEFDLDIKLPISSLCKKPILFFLKEVGQEGNATLGTYSRSLVKDDLKTKLLCFPRSLPLHKVDKIQVSGFPLSKNWHLAPRRLCCRATPTTTNEPLRLTVGQCGR

SEQ ID NO: 46256 - DNA, 2042 bp, Arabidopsis thaliana
  misc_feature (1)..(2042): Ceres Seq. ID no. 15168607
  misc_feature (1)..(2042): Ortholog of  Ceres SEQ ID NO 13600098 as cited in SEQ ID NO 0
accacatttttattctcttcaaaaattatctgcttctatttttataattaagcaagaacggtcttcgtagcataaaaacgagacacggatatagagatatcgtgaattgacttttgtctgacaaatcctcttcgtcaatttcagtggctctgctgcttcctttgttgtgaagccacatagattagattgaggaatgatccaaactcatgtcatacacacatttgtaatctgctacacaaaatacttttaaaatcacacacactaatattttaactctccccactctttgccttgcccttggctctagaaccgaacgtgactctccagatagacttttggagtcacaacattgagtttgaagaggagggaagaagtgagctagggattggttcagagtgaacataaatggctctcaaggcattagactacgatactctgaatgaaaacgtcaagaagtgtcagtatgccgtaagaggtgaactttatctccgagcttctgagctgcagaaagaaggcaaaaagattattttcacaaacgttgggaaccctcatgctttaggacagaagccattgacatttcctcgccaggtggttgcgctttgccaagctccgtttctactagatgacccaaatgttggaatgctatttccagctgatgctattgcaagagctaaacattatctttccttgacttcaggcggtttaggtgcttacagtgattcaagaggccttccaggagttaggaaagaggttgctgagttcattcaacggcgtgatgggtatccaagtgacccagaactcatctttctcactgatggagctagcaaaggtgtgatgcaaatcttgaattgtgttatacgcggtaatggagatgggattctagttccggttccacagtatccactttactcagctaccatatcactgttaggtggtactcttgttccttactatcttgatgagtctgaaaactggggacttgatgttgctaaccttcgacaatccgttgctcaggctcgttctcaagggataacagtaagggcaatggtgatcattaaccctgggaacccaactggccagtgtctaagcgaagctaacataagagagatattgaagttctgttataacgagaaactggttcttctgggagacgaggtttatcagcagaacatataccaggatgagcgtccctttatcagctccaagaaggttttgatggaaatgggttcgccgttcagcaaggaagttcagcttgtatcttttcacacagtctctaaaggatattggggtgaatgtggacagcgaggtggatactttgagatgaccaacctccctccaagggttgttgaggagatatacaaggttgcatcaattgccctcagccctaatgtctctgcgcaaatctttatgggtttgatggttaatcctccaaagcctggagacatttcatatgaccagttcgcccgtgaaagcaaggggattcttgaatctttgagaagaagagcaaggctcatgacagatggattcaacagctgcaaaaacgtcgtgtgcaatttcacagaaggtgcaatgtattcgtttcctcaaatacggttaccaacgggagctctccaagctgcaaaacaagctggaaaagtgccagacgttttctactgtctcaagctcttagaagccacaggaatctccacagtacctggctctggatttggacagaaagaaggtgtgttccatctgaggacaacaatcctgccagcagaagatgagatgccggagatcatggatagcttcaagaagttcaacgacgagttcatgactcagtatgataataactttggttattcgaaaatgtgattacttcttcttctgaacgactattgtgttctgctacactctttaaagctaaatctctgtagtacactctttctctttgccctattctataaaccatatctctctctttgtgtctctttttttttgggtgtaaactctctcttgtgtctctatttctattttcaattggaaactgattaagatcttttctc

SEQ ID NO: 46257 - protein, 481 aa, Arabidopsis thaliana; identical to SEQ ID NO: 28645
  peptide (1)..(481): Ceres Seq. ID no. 15168608

SEQ ID NO: 46258 - protein, 403 aa, Arabidopsis thaliana; identical to SEQ ID NO: 28646
  peptide (1)..(403): Ceres Seq. ID no. 15168609

SEQ ID NO: 46259 - protein, 338 aa, Arabidopsis thaliana; identical to SEQ ID NO: 28647
  peptide (1)..(338): Ceres Seq. ID no. 15168610

SEQ ID NO: 46260 - DNA, 2256 bp, Arabidopsis thaliana; identical to SEQ ID NO: 22038
  misc_feature (1)..(2256): Ceres Seq. ID no. 13646318
  misc_feature (1)..(2256): Ortholog of  Ceres SEQ ID NO 14303276 as cited in SEQ ID NO 1264
  misc_feature (1)..(2256): Ortholog of  Ceres SEQ ID NO 15170536 as cited in SEQ ID NO 52791
  misc_feature (1)..(2256): Ortholog of  Ceres SEQ ID NO 15171813 as cited in SEQ ID NO 57309
  misc_feature (1)..(2256): Ortholog of  Ceres SEQ ID NO 14314378 as cited in SEQ ID NO 57601
  misc_feature (1)..(2256): Ortholog of  Ceres SEQ ID NO 12465083 as cited in SEQ ID NO 68239

SEQ ID NO: 46261 - protein, 651 aa, Arabidopsis thaliana; identical to SEQ ID NO: 22039
  peptide (1)..(651): Ceres Seq. ID no. 13646319

SEQ ID NO: 46262 - protein, 588 aa, Arabidopsis thaliana; identical to SEQ ID NO: 22040
  peptide (1)..(588): Ceres Seq. ID no. 13646320

SEQ ID NO: 46263 - protein, 562 aa, Arabidopsis thaliana; identical to SEQ ID NO: 22041
  peptide (1)..(562): Ceres Seq. ID no. 13646321

SEQ ID NO: 46264 - DNA, 1607 bp, Arabidopsis thaliana
  misc_feature (1)..(1607): Ceres Seq. ID no. 14315782
  misc_feature (1)..(1607): Ortholog of  Ceres SEQ ID NO 14303850 as cited in SEQ ID NO 53464
  misc_feature (1)..(1607): Ortholog of  Ceres SEQ ID NO 13656177 as cited in SEQ ID NO 64997
ggggaaatcaatcgaaaaccctaggagagataaaaacaaaaatctagacggagatttatggcgacagcgaatcctggccgtggaggtggtagaagaggcggtggagctatggatgacgataagttggtcttcgagactaccgatggaattgagcccatcacgagcttcaatgatatgggcattaaggaagatgtgcttcgcggtgtctacgaatatggattcgagaagccttccgcgattcagcagagggctgttatgccgattcttcaaggacgtgatgttattgctcaagctcagtccggtaccgggaagacatctatgattgctctctccgtttgtcaagtcgttgatacttcttctagagaggttcaggccttgatattatccccaacaagagagctggctacacaaacagagaagacgatacaagctattggattacatgccaatattcaggcacatgcttgcatcggtgggaatagtgttggagaagacatcaggaagctggagcatggtgttcatgttgtgtctgggacacctggtcgtgtctgtgacatgataaagaggagaagtcttcgtaccagagctattaaacttctgattcttgatgaatcagatgaaatgctgagcagagggttcaaggaccagatctatgatgtttacagatatcttccaccagatcttcaggtttgcttggtttctgcaactcttcctcacgagattttggagatgacatccaagtttatgacagaaccagtgaagatacttgtgaagcgtgatgagttgactcttgaaggaatcaaacaattttttgttgctgattgagaaggaagagtggaaatttgatacactctgtgatctttatgacacgcttactatcactcaagctgttatcttctgcaatactaaacgaaaggtggattatcttagtgagaaaatgagaagtcacaacttcactgtctcatcaatgcatggagacatgcctcagaaggagagagacgccatcatgaatgagtttcggtcaggtgatagtcgtgttttgataacaacagatgtatgggcacgtgggattgatgtgcaacaagtttctcttgttatcaattatgatctccccaacaaccgtgagctctacatccatcgtattgggcggtctggtcgattcgggcgtaagggtgttgcaatcaactttgttaaaagcgacgacatcaagattctcagagacattgagcagtactacagtacccagattgatgagatgccaatgaatgtagctgatcttatctaaaagagcttgtctgagatttttgtgctttcagcggggaagtgtctggatgaaaaagtattgttgagcgcttctgtcaaattattgcactatcttaacggtgtatttcctttgatgtttctgtgggctcttttgaacaaacttaaactcgcgtgtggtaaatgtttaatgacttgagaagcgatttaggtttagggtttggaccgtttggtttttcgtttcctcgtaattgattctgggggctttgattgtggtttgtgggtcaaaactctcaactatcactacttgtaagacttttgctcgacagttgaaacggttcattgtt

SEQ ID NO: 46265 - protein, 255 aa, Arabidopsis thaliana
  peptide (1)..(255): Ceres Seq. ID no. 14315783
MATANPGRGGGRRGGGAMDDDKLVFETTDGIEPITSFNDMGIKEDVLRGVYEYGFEKPSAIQQRAVMPILQGRDVIAQAQSGTGKTSMIALSVCQVVDTSSREVQALILSPTRELATQTEKTIQAIGLHANIQAHACIGGNSVGEDIRKLEHGVHVVSGTPGRVCDMIKRRSLRTRAIKLLILDESDEMLSRGFKDQIYDVYRYLPPDLQVCLVSATLPHEILEMTSKFMTEPVKILVKRDELTLEGIKQFFVAD

SEQ ID NO: 46266 - protein, 238 aa, Arabidopsis thaliana
  peptide (1)..(238): Ceres Seq. ID no. 14315784
MDDDKLVFETTDGIEPITSFNDMGIKEDVLRGVYEYGFEKPSAIQQRAVMPILQGRDVIAQAQSGTGKTSMIALSVCQVVDTSSREVQALILSPTRELATQTEKTIQAIGLHANIQAHACIGGNSVGEDIRKLEHGVHVVSGTPGRVCDMIKRRSLRTRAIKLLILDESDEMLSRGFKDQIYDVYRYLPPDLQVCLVSATLPHEILEMTSKFMTEPVKILVKRDELTLEGIKQFFVAD

SEQ ID NO: 46267 - protein, 216 aa, Arabidopsis thaliana
  peptide (1)..(216): Ceres Seq. ID no. 14315785
MGIKEDVLRGVYEYGFEKPSAIQQRAVMPILQGRDVIAQAQSGTGKTSMIALSVCQVVDTSSREVQALILSPTRELATQTEKTIQAIGLHANIQAHACIGGNSVGEDIRKLEHGVHVVSGTPGRVCDMIKRRSLRTRAIKLLILDESDEMLSRGFKDQIYDVYRYLPPDLQVCLVSATLPHEILEMTSKFMTEPVKILVKRDELTLEGIKQFFVAD

SEQ ID NO: 46268 - DNA, 2234 bp, Arabidopsis thaliana
  misc_feature (1)..(2234): Ceres Seq. ID no. 14310012
  misc_feature (1)..(2234): Ortholog of  Ceres SEQ ID NO 13655755 as cited in SEQ ID NO 65117
gacccaaaacaacatcttttaagcttctcccgcaaaattcagcaaagctttcggaggaatctcctaacagtcaccaccaccaccaccgtctaggtcaaatctcgtcttcctcacgctctatttctccatagaatatttcctaactcctcctccggtttatcgattttttcaatttttctagggtttcgcgccgggatctaaaaaatcacaatcatgccggtgagtttgactccgaacgcaatcacggcgatacatgacggcgacgtgaatttgaagccgttgttacagattttagaaatcaaaatgataggaagaagtcaagagagaagccaagagaggtatcgtttcctcatttcagatggtgtttctgctcaacatgctatggtcgcggttcagcttaataatcgagtcaagtcaggacaatttgagaaaggatctatcgttcagcttattgattacatttgtagcgacgttaaaggccgcaagcttattgtggtgctgaacatggagacgatagtacaacagtctgaaaccattgggaaccctacaatatttggagaaacagatacagaagcccagaagacattttcaggtacgggcaatataccgcctccgaacagggttgtttttaatgaaccaatggttcagcattctgttaatagagcacctcccaggggtgtaaacattcaaaatcaagccaacaatactccaagcttcaggccatctgttcaaccttcatatcaaccgccagcaagttacagaaatcatggacccatcatgaagaacgaggctccagctcgagtcatccctattgctgctctcaatccataccaaggtcgatgggctattaaggctagagtaactgcgaaaggagatatcagacgatataacaatgcaaaaggagatggaaaggttttctcgtttgatctgcttgactatgatggaggggagattcgggttacgtgctttaatgctcttgttgaccgtttctatgatgttactgaggttggtaaggtatatttgatttcaaagggaagtttgaagcctgcacagaaaaatttcaaccacttaaagaatgaatgggaaattttcttggagtcaacatcgactgtggagctttgccctgatgaagatggctccataccaaagcagcaattctccttccgcccaataagtgacattgagaacgctgagaacaataccatactcgatgtcattggtgtggtgacttctgtgaacccctcggtgccaatcttgagaaagaacgggatggaaacccataggaggatcctgaatctaaaggatgaatcaggaaaggctgtagaggtaacactttggggagaattctgtaaccgagatggtcggcaactggaagagatggttgattcagcttttcacccggttttagcaataaaagctggaaaagtaagcgacttcagtgggaaatcagtagggacaatatcttcaacacagctcttcataaatccagatttccctgaagctcataaactacggacctggttcgattacgggggaaaagacactgcttccttctccatctccagggacactatgcctggaggagtttccaggaacgagataaagaaaaatgtttctcagatcaaagaggaaggtcttggaagatcagataagcctgactggatcactgtgaaagcaaccatatcattcatcaaaacagatagcttctgttatacagcttgtcctttgatgatcggggataaacaatgcaacaagaaggttacacggtctggaacaaacaggtggctctgtgaccggtgcaaccaagagtctgatgaatgcgactatagataccttcttcaggtacagattcaagaccacactgggttgacttggataaccgcgtttcaagaaacaggagaagaaataatgggatgtccggctaagaagctttacgcaatgaaatacgaattggagaaggaggaagagttcgcagagattgttagagacagactgtttcatcagtacatgttgaagctgaagatcaaagaggaatcgtatggggatgaacaaagagtgaagatgactgttgtgaaggttgataaggtgaattatacatccgagagtaaatacatgcttgatttgctcgtaaggtaagttcgttctaggtattacagtgaggtatttcaattaactcagaatatgcaagctcgagtttagtacactattatattatgaattgatgaattctattg

SEQ ID NO: 46269 - protein, 640 aa, Arabidopsis thaliana
  peptide (1)..(640): Ceres Seq. ID no. 14310013
MPVSLTPNAITAIHDGDVNLKPLLQILEIKMIGRSQERSQERYRFLISDGVSAQHAMVAVQLNNRVKSGQFEKGSIVQLIDYICSDVKGRKLIVVLNMETIVQQSETIGNPTIFGETDTEAQKTFSGTGNIPPPNRVVFNEPMVQHSVNRAPPRGVNIQNQANNTPSFRPSVQPSYQPPASYRNHGPIMKNEAPARVIPIAALNPYQGRWAIKARVTAKGDIRRYNNAKGDGKVFSFDLLDYDGGEIRVTCFNALVDRFYDVTEVGKVYLISKGSLKPAQKNFNHLKNEWEIFLESTSTVELCPDEDGSIPKQQFSFRPISDIENAENNTILDVIGVVTSVNPSVPILRKNGMETHRRILNLKDESGKAVEVTLWGEFCNRDGRQLEEMVDSAFHPVLAIKAGKVSDFSGKSVGTISSTQLFINPDFPEAHKLRTWFDYGGKDTASFSISRDTMPGGVSRNEIKKNVSQIKEEGLGRSDKPDWITVKATISFIKTDSFCYTACPLMIGDKQCNKKVTRSGTNRWLCDRCNQESDECDYRYLLQVQIQDHTGLTWITAFQETGEEIMGCPAKKLYAMKYELEKEEEFAEIVRDRLFHQYMLKLKIKEESYGDEQRVKMTVVKVDKVNYTSESKYMLDLLVR

SEQ ID NO: 46270 - protein, 610 aa, Arabidopsis thaliana
  peptide (1)..(610): Ceres Seq. ID no. 14310014
MIGRSQERSQERYRFLISDGVSAQHAMVAVQLNNRVKSGQFEKGSIVQLIDYICSDVKGRKLIVVLNMETIVQQSETIGNPTIFGETDTEAQKTFSGTGNIPPPNRVVFNEPMVQHSVNRAPPRGVNIQNQANNTPSFRPSVQPSYQPPASYRNHGPIMKNEAPARVIPIAALNPYQGRWAIKARVTAKGDIRRYNNAKGDGKVFSFDLLDYDGGEIRVTCFNALVDRFYDVTEVGKVYLISKGSLKPAQKNFNHLKNEWEIFLESTSTVELCPDEDGSIPKQQFSFRPISDIENAENNTILDVIGVVTSVNPSVPILRKNGMETHRRILNLKDESGKAVEVTLWGEFCNRDGRQLEEMVDSAFHPVLAIKAGKVSDFSGKSVGTISSTQLFINPDFPEAHKLRTWFDYGGKDTASFSISRDTMPGGVSRNEIKKNVSQIKEEGLGRSDKPDWITVKATISFIKTDSFCYTACPLMIGDKQCNKKVTRSGTNRWLCDRCNQESDECDYRYLLQVQIQDHTGLTWITAFQETGEEIMGCPAKKLYAMKYELEKEEEFAEIVRDRLFHQYMLKLKIKEESYGDEQRVKMTVVKVDKVNYTSESKYMLDLLVR

SEQ ID NO: 46271 - protein, 584 aa, Arabidopsis thaliana
  peptide (1)..(584): Ceres Seq. ID no. 14310015
MVAVQLNNRVKSGQFEKGSIVQLIDYICSDVKGRKLIVVLNMETIVQQSETIGNPTIFGETDTEAQKTFSGTGNIPPPNRVVFNEPMVQHSVNRAPPRGVNIQNQANNTPSFRPSVQPSYQPPASYRNHGPIMKNEAPARVIPIAALNPYQGRWAIKARVTAKGDIRRYNNAKGDGKVFSFDLLDYDGGEIRVTCFNALVDRFYDVTEVGKVYLISKGSLKPAQKNFNHLKNEWEIFLESTSTVELCPDEDGSIPKQQFSFRPISDIENAENNTILDVIGVVTSVNPSVPILRKNGMETHRRILNLKDESGKAVEVTLWGEFCNRDGRQLEEMVDSAFHPVLAIKAGKVSDFSGKSVGTISSTQLFINPDFPEAHKLRTWFDYGGKDTASFSISRDTMPGGVSRNEIKKNVSQIKEEGLGRSDKPDWITVKATISFIKTDSFCYTACPLMIGDKQCNKKVTRSGTNRWLCDRCNQESDECDYRYLLQVQIQDHTGLTWITAFQETGEEIMGCPAKKLYAMKYELEKEEEFAEIVRDRLFHQYMLKLKIKEESYGDEQRVKMTVVKVDKVNYTSESKYMLDLLVR

SEQ ID NO: 46272 - DNA, 1382 bp, Arabidopsis thaliana
  misc_feature (1)..(1382): Ceres Seq. ID no. 14310020
  misc_feature (1)..(1382): Ortholog of  Ceres SEQ ID NO 13598023 as cited in SEQ ID NO 66487
tgtgtcttaagttcttgcctacaggaagccagaaacattgaagactttctggagaacttcaaagatgaccccacagtcaaaattcctggagtatacaagaatctttgtggtccgcgggttctggtaatggagtggattgatggtattcggtgcactgacccacaggccatcaaggatgcagggattgatttaaatggattcttgactgttggcgtaagtgctgctctaaggcagctgttggaatttggattgttccatggagatccacatcctggaaatatctttgcaatgcaagatgggcgtatcgcttatgtggacttcggtaatgttgctgtactgagtcagcaaaacaagcaaattttgattgatgctgttgttcatgcggttaatgaggactatggggagatggcaaatgatttcactaggcttgggttcttggccaaggataccgatgtttctcctatcgttccagctttagaagccatctggcagaactctgcagggaaaggacttgcagatttcaatttccgaagtgttacaggacaattcaacaagcttgtgtacgactttcccatccgtatcccagagcggttctctcttgttattcgttctctgcttacgcaggagggtatatgtttcacactgaagcctgattttaaatttctagaggttgcttatccatatgtagcaaaacggctcctaacggatccaaatcctgcacttcgggaacgcttgatacaggttctattcaaagatggtgttttccaatggaaaaggctagaaaaccttttatcacttgcaaaggaaaacgtcgccaagatgagtagcaatcctaatctacgagtaaagcgtgtggagagtaagcttgacttgacagataccattaaggacggagctcgtcttttcctccttgacgaaggcatccgcaggaaacttattcttgcactcacagaggactcgaagcttcatgtagaagagcttgtggacgtatacagattggttgaagacgaagtagatattcccacactggccatgcaagtcgtgcaagatttaccgaatgttttccgagattttgtgttgtcatggagcaactcagtattatccgacagataatgaatcagcttctcacttactttttttggctctttttgaagaggaaagaggtaatatatattacagggagtagatggagaagaaaagcgtagattaatatatagtttaatcttcgatgcatacatgttattaacttatacaccaatccatacatgtaattatataaaagcacacacaaacttcacttcacttgttacccagtttgagtcttggtctcttggacgttgtctactgtagttggatatctaaacacattaatcgacgtcatc

SEQ ID NO: 46273 - protein, 370 aa, Arabidopsis thaliana
  peptide (1)..(370): Ceres Seq. ID no. 14310021
CVLSSCLQEARNIEDFLENFKDDPTVKIPGVYKNLCGPRVLVMEWIDGIRCTDPQAIKDAGIDLNGFLTVGVSAALRQLLEFGLFHGDPHPGNIFAMQDGRIAYVDFGNVAVLSQQNKQILIDAVVHAVNEDYGEMANDFTRLGFLAKDTDVSPIVPALEAIWQNSAGKGLADFNFRSVTGQFNKLVYDFPIRIPERFSLVIRSLLTQEGICFTLKPDFKFLEVAYPYVAKRLLTDPNPALRERLIQVLFKDGVFQWKRLENLLSLAKENVAKMSSNPNLRVKRVESKLDLTDTIKDGARLFLLDEGIRRKLILALTEDSKLHVEELVDVYRLVEDEVDIPTLAMQVVQDLPNVFRDFVLSWSNSVLSDR

SEQ ID NO: 46274 - protein, 328 aa, Arabidopsis thaliana
  peptide (1)..(328): Ceres Seq. ID no. 14310022
MEWIDGIRCTDPQAIKDAGIDLNGFLTVGVSAALRQLLEFGLFHGDPHPGNIFAMQDGRIAYVDFGNVAVLSQQNKQILIDAVVHAVNEDYGEMANDFTRLGFLAKDTDVSPIVPALEAIWQNSAGKGLADFNFRSVTGQFNKLVYDFPIRIPERFSLVIRSLLTQEGICFTLKPDFKFLEVAYPYVAKRLLTDPNPALRERLIQVLFKDGVFQWKRLENLLSLAKENVAKMSSNPNLRVKRVESKLDLTDTIKDGARLFLLDEGIRRKLILALTEDSKLHVEELVDVYRLVEDEVDIPTLAMQVVQDLPNVFRDFVLSWSNSVLSDR

SEQ ID NO: 46275 - protein, 274 aa, Arabidopsis thaliana
  peptide (1)..(274): Ceres Seq. ID no. 14310023
MQDGRIAYVDFGNVAVLSQQNKQILIDAVVHAVNEDYGEMANDFTRLGFLAKDTDVSPIVPALEAIWQNSAGKGLADFNFRSVTGQFNKLVYDFPIRIPERFSLVIRSLLTQEGICFTLKPDFKFLEVAYPYVAKRLLTDPNPALRERLIQVLFKDGVFQWKRLENLLSLAKENVAKMSSNPNLRVKRVESKLDLTDTIKDGARLFLLDEGIRRKLILALTEDSKLHVEELVDVYRLVEDEVDIPTLAMQVVQDLPNVFRDFVLSWSNSVLSDR

SEQ ID NO: 46276 - DNA, 1903 bp, Arabidopsis thaliana; identical to SEQ ID NO: 40379
  misc_feature (1)..(1903): Ceres Seq. ID no. 12336176
  misc_feature (1)..(1903): Ortholog of  Ceres SEQ ID NO 13596319 as cited in SEQ ID NO 67933

SEQ ID NO: 46277 - protein, 595 aa, Arabidopsis thaliana; identical to SEQ ID NO: 40380
  peptide (1)..(595): Ceres Seq. ID no. 12336177

SEQ ID NO: 46278 - protein, 583 aa, Arabidopsis thaliana; identical to SEQ ID NO: 40381
  peptide (1)..(583): Ceres Seq. ID no. 12336178

SEQ ID NO: 46279 - protein, 538 aa, Arabidopsis thaliana; identical to SEQ ID NO: 40382
  peptide (1)..(538): Ceres Seq. ID no. 12336179

SEQ ID NO: 46280 - DNA, 2256 bp, Arabidopsis thaliana
  misc_feature (1)..(2256): Ceres Seq. ID no. 14309966
  misc_feature (1)..(2256): Ortholog of  Ceres SEQ ID NO 13654989 as cited in SEQ ID NO 63117
  misc_feature (1)..(2256): Ortholog of  Ceres SEQ ID NO 15169474 as cited in SEQ ID NO 66139
  misc_feature (1)..(2256): Ortholog of  Ceres SEQ ID NO 13584744 as cited in SEQ ID NO 69137
atcatcgtcctctctgtttaaatcaggagaaagctcacgagaatccctcttcagatcagaacaccacaaaacatggctgcgtgtacactccacgcgctctcagtcaccttattcctccttctcttctttgccgtgtcaccggcgaaagctcagcaaccgtacgtcaacaaccaccagctcgcctgcgaggtccgtgtctacgacaacataaccaacggattcacatgtaacggcccaccttcttgccgctcatacctcactttctggtctcaaccaccgtacaacacggcggactcaatcgccaaactcctcaacgtctccgccgcagagatccaatcaatcaacaacctccccacagccaccaccagaatcccaacccgtgaattagtcgtgatcccagctaactgctcctgctcctcctccagcggaggattttaccaacacaacgccacttacaatctctccggtaacagaggagatgaaacctatttctcagtggctaacgatacttaccaagctttatccacgtgtcaagccatgatgtcacaaaaccgttacggcgagagacaactaacccccggcttaaacctccttgttcctctccgatgtgcttgtcccaccgccaaacaaaccaccgccggatttaaatatctcctgacttacttagtcgccatgggagatagtatctccggcatcgccgagatgttcaacagcacatccgccgccataaccgaaggtaacgagcttacatcagacaatatcttcttcttcacaccggttctagttcctctcacaactgaacctaccaaaatcgttatatctccgtcgcctcctcctccacccgttgttgctacgccgcctcaaacgccagttgatcctccgggatcttcttcttctcacaaatggatctacatcggaattggaatcggagctggtttgcttctcttactctcaatcttagctctctgcttctacaaacgaaggtctaagaagaagtcattaccgtcgtcgttgccggaggagaacaagctctttgattcatcaaccaaacaatctattcccacaacaacaacgactcaatggtcaatagatttatccaattcatcagaagctttcggtttaaaatccgccatagaatctctaacactatacagattcaacgatcttcaatcagctacttcgaatttcagcgacgaaaacagaatcaaaggctctgtttatcgcgcgacaatcaacggcgacgatgccgctgtgaaagtgatcaaaggagatgtttcttcctctgagatcaatcttttgaagaagctaaatcattctaatatcatccgtctctcaggtttctgtatccgtgaaggaacatcgtacctcgtcttcgagtattcagagaatggatcgatcagtgattggcttcactcgtcgggcaagaagagtttgacatggaaacagagagttgaaatagcaagggatgtggcagaggcgttagattatctccataactatataactccacctcatattcataagaacttggaatcaacaaacatacttctggattctaatttcagagccaagattgcgaatttcggtgttgcgaggattcttgatgaaggtgatcttgatcttcagttaacaagacatgttgaaggaacacaaggctacttagctccagagtatgtggagaatggagtcattacttcgaaactagacgtgtttgcttttggagttgcggttcttgagcttctttcggggagagaagcagtaacgatacataagaagaaggaaggagaagaagaagtggagatgttgtgtaaagtgataaacagtgtgcttggaggagagaatgtgagagagaagttaaaagagtttatggatccatctctagggaatgagtatccgttggagctggcttacaccatggctcagcttgctaagagctgtgtcgcaactgatcttaactcgcgtccatctgtcactcaggttctaaccacgctctcaatgatcgtctcctcctccatcgattgggagccttctgatgaccttcttcgttccggctctcttggcaactagttcagttttttttttctattggtagtcaataacaagtatttagactttagataaggaccatacggctaaaaagttgagatctaataagtaccccactgtgaaacatagtaataagaacatatcatagagaaactttatttagattttgacaaaaaaaaaaaaaaaaaaaactcgaggggggcccggtac

SEQ ID NO: 46281 - protein, 664 aa, Arabidopsis thaliana
  peptide (1)..(664): Ceres Seq. ID no. 14309967
MAACTLHALSVTLFLLLFFAVSPAKAQQPYVNNHQLACEVRVYDNITNGFTCNGPPSCRSYLTFWSQPPYNTADSIAKLLNVSAAEIQSINNLPTATTRIPTRELVVIPANCSCSSSSGGFYQHNATYNLSGNRGDETYFSVANDTYQALSTCQAMMSQNRYGERQLTPGLNLLVPLRCACPTAKQTTAGFKYLLTYLVAMGDSISGIAEMFNSTSAAITEGNELTSDNIFFFTPVLVPLTTEPTKIVISPSPPPPPVVATPPQTPVDPPGSSSSHKWIYIGIGIGAGLLLLLSILALCFYKRRSKKKSLPSSLPEENKLFDSSTKQSIPTTTTTQWSIDLSNSSEAFGLKSAIESLTLYRFNDLQSATSNFSDENRIKGSVYRATINGDDAAVKVIKGDVSSSEINLLKKLNHSNIIRLSGFCIREGTSYLVFEYSENGSISDWLHSSGKKSLTWKQRVEIARDVAEALDYLHNYITPPHIHKNLESTNILLDSNFRAKIANFGVARILDEGDLDLQLTRHVEGTQGYLAPEYVENGVITSKLDVFAFGVAVLELLSGREAVTIHKKKEGEEEVEMLCKVINSVLGGENVREKLKEFMDPSLGNEYPLELAYTMAQLAKSCVATDLNSRPSVTQVLTTLSMIVSSSIDWEPSDDLLRSGSLGN

SEQ ID NO: 46282 - protein, 509 aa, Arabidopsis thaliana
  peptide (1)..(509): Ceres Seq. ID no. 14309968
MMSQNRYGERQLTPGLNLLVPLRCACPTAKQTTAGFKYLLTYLVAMGDSISGIAEMFNSTSAAITEGNELTSDNIFFFTPVLVPLTTEPTKIVISPSPPPPPVVATPPQTPVDPPGSSSSHKWIYIGIGIGAGLLLLLSILALCFYKRRSKKKSLPSSLPEENKLFDSSTKQSIPTTTTTQWSIDLSNSSEAFGLKSAIESLTLYRFNDLQSATSNFSDENRIKGSVYRATINGDDAAVKVIKGDVSSSEINLLKKLNHSNIIRLSGFCIREGTSYLVFEYSENGSISDWLHSSGKKSLTWKQRVEIARDVAEALDYLHNYITPPHIHKNLESTNILLDSNFRAKIANFGVARILDEGDLDLQLTRHVEGTQGYLAPEYVENGVITSKLDVFAFGVAVLELLSGREAVTIHKKKEGEEEVEMLCKVINSVLGGENVREKLKEFMDPSLGNEYPLELAYTMAQLAKSCVATDLNSRPSVTQVLTTLSMIVSSSIDWEPSDDLLRSGSLGN

SEQ ID NO: 46283 - protein, 508 aa, Arabidopsis thaliana
  peptide (1)..(508): Ceres Seq. ID no. 14309969
MSQNRYGERQLTPGLNLLVPLRCACPTAKQTTAGFKYLLTYLVAMGDSISGIAEMFNSTSAAITEGNELTSDNIFFFTPVLVPLTTEPTKIVISPSPPPPPVVATPPQTPVDPPGSSSSHKWIYIGIGIGAGLLLLLSILALCFYKRRSKKKSLPSSLPEENKLFDSSTKQSIPTTTTTQWSIDLSNSSEAFGLKSAIESLTLYRFNDLQSATSNFSDENRIKGSVYRATINGDDAAVKVIKGDVSSSEINLLKKLNHSNIIRLSGFCIREGTSYLVFEYSENGSISDWLHSSGKKSLTWKQRVEIARDVAEALDYLHNYITPPHIHKNLESTNILLDSNFRAKIANFGVARILDEGDLDLQLTRHVEGTQGYLAPEYVENGVITSKLDVFAFGVAVLELLSGREAVTIHKKKEGEEEVEMLCKVINSVLGGENVREKLKEFMDPSLGNEYPLELAYTMAQLAKSCVATDLNSRPSVTQVLTTLSMIVSSSIDWEPSDDLLRSGSLGN

SEQ ID NO: 46284 - DNA, 1717 bp, Arabidopsis thaliana
  misc_feature (1)..(1717): Ceres Seq. ID no. 15168623
  misc_feature (1)..(1717): Ortholog of  Ceres SEQ ID NO 15176911 as cited in SEQ ID NO 54868
  misc_feature (1)..(1717): Ortholog of  Ceres SEQ ID NO 13596433 as cited in SEQ ID NO 68721
  misc_feature (1)..(1717): Ortholog of  Ceres SEQ ID NO 13599169 as cited in SEQ ID NO 0
gaaaaataaaaaagagagcgaaggattgcatcaagtaatcgccgtgtaactaactacttttgcattcaccatcgctcttacgtttgaatctatccagatccaaagctcttcttcttcccggcaattctgagatctcattttcaccggcgacgagctttaatcggagaacgatgaagcagcttcacaagcaaatgagctcgaagcgtgatgaagaaaccattcccatgagccaatccagtccttactctcccaaaactttaaagcatcccagatctcttcccagatcgcttcactatctctttcgtgaacaacgactcctctttatcctcgtcgggatcttgatcggatccactttcttcatcctccagccttctctctctcgtttaggcgccgctgagtccacctcgttaatcaccagatctgtttcctacgccgtcaccgattccccgccttccaggtcgacttttaattccggaggcggcggaggtagaaccggtcgtgttcccgtcggtatcggacggaagagactgaggattgttgtcaccggagctggtttcgtcggtagtcatcttgttgataagcttatcggtaggggagatgaagtgatcgtgattgataacttcttcactggtaggaaggagaatttggttcatctattctcgaatcctaggtttgagctaattcgacacgatgttgttgagccaatcctccttgaggtcgatcagatttaccatttagcttgtccagcttcacctgttcattacaagtataatccagtcaagactatcaagacaaatgtaatgggcactctcaaaatgttgggtcttgcaaagagagttggggcaaggtttctgctcaccagcacaagtgaagtctatggagatccccttgagcatccacagaaagagacttactggggaaacgtgaatccaatcggtgagaggagttgctatgatgaaggaaagcgtactgcagaaaccctggccatggattatcaccgaggtgcaggttagaattgctcgtattttcaacacatatgggcccagaatgtgccttgatgatgggcgtgttgttagtaactttgttgcccagaccattcgcaaacacccaatgactgtttatggtgatggaaaacagactcgtagctttcaatatgtttctgacttggtggagggacttgtagctttaatggaaaacgatcatgtaggacccttcaaccttggtaaccctggagaattcacaatgcttgaacttgcagaggtggttaaggaggtgatcgacccaagcgcgaccatagagttcaaaccaaacacagcagacgatcctcacaagaggaaaccagacataagcaaagcaaaggaacagttgaactgggaaccaaagatatctctgagggagggactgcctcgcatggttagtgacttccgtaaccgaatcttaaacgaagacgaaggtaaaggtctctaagtcagtcacacagagatatagagtataatccttcttctgctttgatttgatatatgtatagtctctttttcaagagctctgctaagtctttttgttctctctgttttttctttttggttctatctccaagacacagattactacttatattagctaatgtttttgacttgggattttgtcattgggccattcaccactaggctcaatattagtggaaaggtattgatataaaatttcgctcggttcatac

SEQ ID NO: 46285 - protein, 280 aa, Arabidopsis thaliana
  peptide (1)..(280): Ceres Seq. ID no. 15168624
MKQLHKQMSSKRDEETIPMSQSSPYSPKTLKHPRSLPRSLHYLFREQRLLFILVGILIGSTFFILQPSLSRLGAAESTSLITRSVSYAVTDSPPSRSTFNSGGGGGRTGRVPVGIGRKRLRIVVTGAGFVGSHLVDKLIGRGDEVIVIDNFFTGRKENLVHLFSNPRFELIRHDVVEPILLEVDQIYHLACPASPVHYKYNPVKTIKTNVMGTLKMLGLAKRVGARFLLTSTSEVYGDPLEHPQKETYWGNVNPIGERSCYDEGKRTAETLAMDYHRGAG

SEQ ID NO: 46286 - protein, 273 aa, Arabidopsis thaliana
  peptide (1)..(273): Ceres Seq. ID no. 15168625
MSSKRDEETIPMSQSSPYSPKTLKHPRSLPRSLHYLFREQRLLFILVGILIGSTFFILQPSLSRLGAAESTSLITRSVSYAVTDSPPSRSTFNSGGGGGRTGRVPVGIGRKRLRIVVTGAGFVGSHLVDKLIGRGDEVIVIDNFFTGRKENLVHLFSNPRFELIRHDVVEPILLEVDQIYHLACPASPVHYKYNPVKTIKTNVMGTLKMLGLAKRVGARFLLTSTSEVYGDPLEHPQKETYWGNVNPIGERSCYDEGKRTAETLAMDYHRGAG

SEQ ID NO: 46287 - protein, 262 aa, Arabidopsis thaliana
  peptide (1)..(262): Ceres Seq. ID no. 15168626
MSQSSPYSPKTLKHPRSLPRSLHYLFREQRLLFILVGILIGSTFFILQPSLSRLGAAESTSLITRSVSYAVTDSPPSRSTFNSGGGGGRTGRVPVGIGRKRLRIVVTGAGFVGSHLVDKLIGRGDEVIVIDNFFTGRKENLVHLFSNPRFELIRHDVVEPILLEVDQIYHLACPASPVHYKYNPVKTIKTNVMGTLKMLGLAKRVGARFLLTSTSEVYGDPLEHPQKETYWGNVNPIGERSCYDEGKRTAETLAMDYHRGAG

SEQ ID NO: 46288 - DNA, 2054 bp, Arabidopsis thaliana; identical to SEQ ID NO: 40106
  misc_feature (1)..(2054): Ceres Seq. ID no. 13509092
  misc_feature (1)..(2054): Ortholog of  Ceres SEQ ID NO 13587235 as cited in SEQ ID NO 0

SEQ ID NO: 46289 - protein, 447 aa, Arabidopsis thaliana; identical to SEQ ID NO: 40107
  peptide (1)..(447): Ceres Seq. ID no. 13509093

SEQ ID NO: 46290 - protein, 436 aa, Arabidopsis thaliana; identical to SEQ ID NO: 40108
  peptide (1)..(436): Ceres Seq. ID no. 13509094

SEQ ID NO: 46291 - protein, 429 aa, Arabidopsis thaliana; identical to SEQ ID NO: 40109
  peptide (1)..(429): Ceres Seq. ID no. 13509095

SEQ ID NO: 46292 - DNA, 1934 bp, Arabidopsis thaliana
  misc_feature (1)..(1934): Ceres Seq. ID no. 14310008
  misc_feature (1)..(1934): Ortholog of  Ceres SEQ ID NO 14307571 as cited in SEQ ID NO 58392
gacagaccgctagttttttttgccactctcttcgtctctctcttgtagcaatgccgcttcttcatccacagtcgttgcggcatccttctttcgagattcagacccaaagaagaagcaattccacaacaagattgcttctttctcacaagtttctccattctcaagcttccattatctcaatctccaggacaagaatcctcaaacgggtctctcagaatctctctgtagctaaagctgcttcagctcaaggttataaagtttgttcctttgtctccgcctgaaaaattgttaacgttatacgcgaaggagactaagcaagttctgatattttttaacttatgcattttggaaaacagctagtagtagtgttggtgagagtgttgctcaaacatcagaaaaagatgtgttgaaggctctgtctcagattattgatcctgattttgggacagatattgtttcttgtggttttgtgaaagatttggggattaatgaagctttgggtgaggtttcgttccgtttggagctgacaacacccgcatgtccagtcaaagacatgtttgagaacaaggcaaatgaggtagttgcagcccttccatgggtgaagaaggtaaatctgacaatgtcagcacaaccagccaagcccatttttgcagggcagcttccctttggattatcaagaatttcgaacatcatcgctgtttctagttgcaagggtggtgttgggaaatcaacagtagctgtaaatcttgcttatacattagctggtatgggtgctagagttggtatctttgatgctgatgtctatggtccaagtctaccaaccatggtcaatcctgagagccgtatattggaaatgaacccggagaagaagaccatcattccaacagaatacatgggcgtcaagctagtctcatttggatttgcaggacaagggcgtgccattatgagaggtcctatggtgtctggtgttataaaccaactccttacaacaactgaatggggagagctggactatcttgttatcgacatgcctcctggaactggtgatatacaactgaccttatgccaggttgcgccattgacagcagcggtaaatgtcaccacccctcaaaagttggcgtttattgatgttgcaaaaggtgtaaggatgttctcaaaacttaaggtgccttgcgttgctgttgtggagaatatgtgccactttgacgctgatgggaaacgttattacccttttgggaaaggttcaggttctgaggtggtcaagcaattcggcatacctcacctctttgacctccccattagaccaacgttatctgcttcgggggatagcggaactcctgaagtagtgtcggatcctctaagtgacgttgccagaacgttccaggatcttggtgtatgtgtagtgcaacaatgcgccaagatacgccagcaagtatcaacggccgtgacatacgacaagtatctcaaggcaattagagtgaaggtaccaaactcagacgaagagttcttactgcaccctgcaaccgtcagaagaaatgatagatctgcacaaagtgtggatgaatggactggagagcaaaaagttctatatggcgatgtagcggaagatatcgaacctgaggacatacgaccaatgggaaactacgctgtctcgataacctggcccgacgggtttagccagattgctccatatgaccagttggaagaaattgaaaggctagtagatgttcctccattgtctccagtcgaagtctagttcttgaacaatatgttttcgctttacgatatctcttgaaaatgaaatttgtatattcatattaagagcattgttatgaatcttacaatgatgaaaagagggttactgtaagcttttatttttactattataaactacagttataaccacagattttggactaggacgtagttgatct

SEQ ID NO: 46293 - protein, 400 aa, Arabidopsis thaliana
  peptide (1)..(400): Ceres Seq. ID no. 14310009
MFENKANEVVAALPWVKKVNLTMSAQPAKPIFAGQLPFGLSRISNIIAVSSCKGGVGKSTVAVNLAYTLAGMGARVGIFDADVYGPSLPTMVNPESRILEMNPEKKTIIPTEYMGVKLVSFGFAGQGRAIMRGPMVSGVINQLLTTTEWGELDYLVIDMPPGTGDIQLTLCQVAPLTAAVNVTTPQKLAFIDVAKGVRMFSKLKVPCVAVVENMCHFDADGKRYYPFGKGSGSEVVKQFGIPHLFDLPIRPTLSASGDSGTPEVVSDPLSDVARTFQDLGVCVVQQCAKIRQQVSTAVTYDKYLKAIRVKVPNSDEEFLLHPATVRRNDRSAQSVDEWTGEQKVLYGDVAEDIEPEDIRPMGNYAVSITWPDGFSQIAPYDQLEEIERLVDVPPLSPVEV

SEQ ID NO: 46294 - protein, 378 aa, Arabidopsis thaliana
  peptide (1)..(378): Ceres Seq. ID no. 14310010
MSAQPAKPIFAGQLPFGLSRISNIIAVSSCKGGVGKSTVAVNLAYTLAGMGARVGIFDADVYGPSLPTMVNPESRILEMNPEKKTIIPTEYMGVKLVSFGFAGQGRAIMRGPMVSGVINQLLTTTEWGELDYLVIDMPPGTGDIQLTLCQVAPLTAAVNVTTPQKLAFIDVAKGVRMFSKLKVPCVAVVENMCHFDADGKRYYPFGKGSGSEVVKQFGIPHLFDLPIRPTLSASGDSGTPEVVSDPLSDVARTFQDLGVCVVQQCAKIRQQVSTAVTYDKYLKAIRVKVPNSDEEFLLHPATVRRNDRSAQSVDEWTGEQKVLYGDVAEDIEPEDIRPMGNYAVSITWPDGFSQIAPYDQLEEIERLVDVPPLSPVEV

SEQ ID NO: 46295 - protein, 329 aa, Arabidopsis thaliana
  peptide (1)..(329): Ceres Seq. ID no. 14310011
MGARVGIFDADVYGPSLPTMVNPESRILEMNPEKKTIIPTEYMGVKLVSFGFAGQGRAIMRGPMVSGVINQLLTTTEWGELDYLVIDMPPGTGDIQLTLCQVAPLTAAVNVTTPQKLAFIDVAKGVRMFSKLKVPCVAVVENMCHFDADGKRYYPFGKGSGSEVVKQFGIPHLFDLPIRPTLSASGDSGTPEVVSDPLSDVARTFQDLGVCVVQQCAKIRQQVSTAVTYDKYLKAIRVKVPNSDEEFLLHPATVRRNDRSAQSVDEWTGEQKVLYGDVAEDIEPEDIRPMGNYAVSITWPDGFSQIAPYDQLEEIERLVDVPPLSPVEV

SEQ ID NO: 46296 - DNA, 3647 bp, Arabidopsis thaliana
  misc_feature (1)..(3647): Ceres Seq. ID no. 13579175
  misc_feature (1)..(3647): Ortholog of  Ceres SEQ ID NO 15178310 as cited in SEQ ID NO 1089
  misc_feature (1)..(3647): Ortholog of  Ceres SEQ ID NO 14303173 as cited in SEQ ID NO 66550
tcgtctcttttaaatctccgagttttcttcctccttctctaaaagaacatggcgtttcttaccgcattgttcctgtttctcttcttctctttttcgagttccgccattgttgatcttagctcggaaacaacttctctcatctccttcaagcgctcactagaaaacccatctctcctttcttcatggaacgtttcgtcttccgcgtctcactgcgattgggttggcgttacgtgtctgcttggacgagtcaactcgctctccttaccgtctttgtctctgagaggccagattccgaaggaaatttcgagtttgaagaaccttagagagctttgtcttgccggaaatcaattctccgggaagattccgcctgagatttggaatctaaaacatctccaaacccttgacctctcaggaaattctctcaccggacttctcccgaggctactcagtgagttacctcagcttctctacctcgaccttagtgacaaccacttctccggttcacttcctccatcgttcttcatcagcttacctgcactgtcttctcttgacgtctccaacaactctctctccggcgaaatccctcctgaaatcgggaaactgagtaacctctccaatctttacatgggactcaactcattttccggtcaaattccgtcggagattggtaacatctcgttgctgaagaactttgctgcaccttcttgcttcttcaatggaccgttaccaaaggagatttcgaaactgaaacacttagcaaagctcgacctttcttataatccactcaagtgttccattcccaaatcgtttggagagttgcataatctgagtatactaaatcttgtctccgcagagcttattggattgatcccaccagagcttggtaattgtaaaagcctcaagtcactgatgctgtctttcaattctctctctggacctttgccattggagctttcagagattcctctgttgacgttttctgctgaaaggaatcagctttcgggttcattgccttcatggatggggaaatggaaggtactggactcacttctgttagctaacaatcggttttcaggtgaaatccctcatgagattgaggattgtccaatgttgaaacatctcagtctagctagcaacttgttaagtggttcgattcctagggagctctgtggttcaggttcgttggaggcgattgatctctctgggaatttgctttctggaacaattgaggaggtctttgatggatgttcctctcttggagagttgttacttactaataatcagatcaatggctctattcctgaggatctttggaagcttccattgatggcacttgacttggattccaacaacttcacaggagaaatcccaaagagtctctggaaatcaacgaacttgatggagtttacagcttcttataatcgtctagaaggttatttgcctgcagagattggtaatgcagcttcactgaagcggttggttctcagtgataatcagttaacaggtgaaatcccaagagagattggaaaactcacatctttgtctgtcttgaatctgaatgcaaacatgtttcaagggaagataccagttgagctcggtgattgtacttctttgactacattggatctaggcagcaacaatcttcaaggacagattccagacaaaatcactgctctcgctcagcttcagtgcctggttctctcttacaacaatctctccgggtcaattccatcaaaaccctctgcttatttccatcagattgagatgcctgatctcagctttcttcagcaccatgggatatttgatctctcctacaatagattgtctggccctataccagaagaacttggcgagtgtttggtattggtagagatttcactgagcaacaaccatctctctggagagattccagcttcactctctcgtttgaccaacctcacaatcctggatctatctggaaatgcactgactggatctattccaaaggagatgggcaactctcttaagttgcagggattaaacttggcgaataatcagctcaatggccatattccagaaagctttggcttgttaggtagcttggtgaagctaaacttgactaagaacaagcttgatggaccggttcctgcttctcttgggaacttgaaagagcttacacacatggacttgagctttaacaacctaagtggcgagctttcatcagaactgtctacaatggaaaaacttgtcggcctctacattgagcagaataagttcaccggggaaataccttcagaacttggtaatcttacgcagctggagtaccttgatgtttctgagaacttgttatctggagagataccaacaaagatctgtggattgcccaatctggagttcttgaatctagccaagaacaatctgcgaggagaggtgccgagtgatggtgtttgtcaggatccttccaaggcattgctttcagggaacaaagagttgtgtggcagagtggttggatcagattgcaagatcgagggaactaagttgaggagtgcttgggggattgcaggactcatgcttggctttacgatcatcgtttttgtgtttgttttctctctgcgcagatgggctatgacaaagagagtgaagcaaagagatgatccagagcgaatggaggaaagcagattgaaagggtttgttgatcagaacctgtatttcttaagtggaagcagatcaagggagcctttaagcatcaatatagcaatgttcgagcagccgcttctgaaggtgcgtttaggagatattgtcgaggctacagatcatttctctaagaagaacattataggagacggtggttttgggacggtttacaaagcttgtttaccaggtgagaaaacagtagcggtgaagaagctaagtgaagccaaaacgcagggaaaccgagaattcatggcagagatggagactctagggaaagtgaagcatccgaatcttgtgtctttgcttggatattgctctttcagtgaagagaagcttctggtatatgagtatatggtaaatggaagcttagatcactggttaaggaaccaaactgggatgctagaggttctggactggtcaaaacgcctcaaaatcgcagttggagctgcaagaggtctagctttcctacatcacggtttcatccctcacattatacacagggacatcaaagcgagcaacattctgttagatggtgattttgaaccaaaggtggcggattttgggctagcaagactaattagtgcctgtgaatcccatgttagtacagtcatagcagggactttcgggtatatcccaccggagtatggtcagagtgcccgagccacaaccaaaggagatgtctatagctttggcgtgatactattggagcttgtcacagggaaagagccaaccggtccagactttaaggagagtgaaggagggaacttggttggttgggcgattcagaagatcaaccaagggaaagctgtggatgttattgatccactgctcgtatctgtggctttgaagaactctcagcttcgtctgcttcagatagctatgctttgtcttgctgaaacgccagctaagcgccctaacatgcttgatgtgttgaaggctcttaaggagatatgagccatataaccttaaatgtt

SEQ ID NO: 46297 - protein, 1192 aa, Arabidopsis thaliana
  peptide (1)..(1192): Ceres Seq. ID no. 13579176
MAFLTALFLFLFFSFSSSAIVDLSSETTSLISFKRSLENPSLLSSWNVSSSASHCDWVGVTCLLGRVNSLSLPSLSLRGQIPKEISSLKNLRELCLAGNQFSGKIPPEIWNLKHLQTLDLSGNSLTGLLPRLLSELPQLLYLDLSDNHFSGSLPPSFFISLPALSSLDVSNNSLSGEIPPEIGKLSNLSNLYMGLNSFSGQIPSEIGNISLLKNFAAPSCFFNGPLPKEISKLKHLAKLDLSYNPLKCSIPKSFGELHNLSILNLVSAELIGLIPPELGNCKSLKSLMLSFNSLSGPLPLELSEIPLLTFSAERNQLSGSLPSWMGKWKVLDSLLLANNRFSGEIPHEIEDCPMLKHLSLASNLLSGSIPRELCGSGSLEAIDLSGNLLSGTIEEVFDGCSSLGELLLTNNQINGSIPEDLWKLPLMALDLDSNNFTGEIPKSLWKSTNLMEFTASYNRLEGYLPAEIGNAASLKRLVLSDNQLTGEIPREIGKLTSLSVLNLNANMFQGKIPVELGDCTSLTTLDLGSNNLQGQIPDKITALAQLQCLVLSYNNLSGSIPSKPSAYFHQIEMPDLSFLQHHGIFDLSYNRLSGPIPEELGECLVLVEISLSNNHLSGEIPASLSRLTNLTILDLSGNALTGSIPKEMGNSLKLQGLNLANNQLNGHIPESFGLLGSLVKLNLTKNKLDGPVPASLGNLKELTHMDLSFNNLSGELSSELSTMEKLVGLYIEQNKFTGEIPSELGNLTQLEYLDVSENLLSGEIPTKICGLPNLEFLNLAKNNLRGEVPSDGVCQDPSKALLSGNKELCGRVVGSDCKIEGTKLRSAWGIAGLMLGFTIIVFVFVFSLRRWAMTKRVKQRDDPERMEESRLKGFVDQNLYFLSGSRSREPLSINIAMFEQPLLKVRLGDIVEATDHFSKKNIIGDGGFGTVYKACLPGEKTVAVKKLSEAKTQGNREFMAEMETLGKVKHPNLVSLLGYCSFSEEKLLVYEYMVNGSLDHWLRNQTGMLEVLDWSKRLKIAVGAARGLAFLHHGFIPHIIHRDIKASNILLDGDFEPKVADFGLARLISACESHVSTVIAGTFGYIPPEYGQSARATTKGDVYSFGVILLELVTGKEPTGPDFKESEGGNLVGWAIQKINQGKAVDVIDPLLVSVALKNSQLRLLQIAMLCLAETPAKRPNMLDVLKALKEI

SEQ ID NO: 46298 - protein, 1000 aa, Arabidopsis thaliana
  peptide (1)..(1000): Ceres Seq. ID no. 13579177
MGLNSFSGQIPSEIGNISLLKNFAAPSCFFNGPLPKEISKLKHLAKLDLSYNPLKCSIPKSFGELHNLSILNLVSAELIGLIPPELGNCKSLKSLMLSFNSLSGPLPLELSEIPLLTFSAERNQLSGSLPSWMGKWKVLDSLLLANNRFSGEIPHEIEDCPMLKHLSLASNLLSGSIPRELCGSGSLEAIDLSGNLLSGTIEEVFDGCSSLGELLLTNNQINGSIPEDLWKLPLMALDLDSNNFTGEIPKSLWKSTNLMEFTASYNRLEGYLPAEIGNAASLKRLVLSDNQLTGEIPREIGKLTSLSVLNLNANMFQGKIPVELGDCTSLTTLDLGSNNLQGQIPDKITALAQLQCLVLSYNNLSGSIPSKPSAYFHQIEMPDLSFLQHHGIFDLSYNRLSGPIPEELGECLVLVEISLSNNHLSGEIPASLSRLTNLTILDLSGNALTGSIPKEMGNSLKLQGLNLANNQLNGHIPESFGLLGSLVKLNLTKNKLDGPVPASLGNLKELTHMDLSFNNLSGELSSELSTMEKLVGLYIEQNKFTGEIPSELGNLTQLEYLDVSENLLSGEIPTKICGLPNLEFLNLAKNNLRGEVPSDGVCQDPSKALLSGNKELCGRVVGSDCKIEGTKLRSAWGIAGLMLGFTIIVFVFVFSLRRWAMTKRVKQRDDPERMEESRLKGFVDQNLYFLSGSRSREPLSINIAMFEQPLLKVRLGDIVEATDHFSKKNIIGDGGFGTVYKACLPGEKTVAVKKLSEAKTQGNREFMAEMETLGKVKHPNLVSLLGYCSFSEEKLLVYEYMVNGSLDHWLRNQTGMLEVLDWSKRLKIAVGAARGLAFLHHGFIPHIIHRDIKASNILLDGDFEPKVADFGLARLISACESHVSTVIAGTFGYIPPEYGQSARATTKGDVYSFGVILLELVTGKEPTGPDFKESEGGNLVGWAIQKINQGKAVDVIDPLLVSVALKNSQLRLLQIAMLCLAETPAKRPNMLDVLKALKEI

SEQ ID NO: 46299 - protein, 905 aa, Arabidopsis thaliana
  peptide (1)..(905): Ceres Seq. ID no. 13579178
MLSFNSLSGPLPLELSEIPLLTFSAERNQLSGSLPSWMGKWKVLDSLLLANNRFSGEIPHEIEDCPMLKHLSLASNLLSGSIPRELCGSGSLEAIDLSGNLLSGTIEEVFDGCSSLGELLLTNNQINGSIPEDLWKLPLMALDLDSNNFTGEIPKSLWKSTNLMEFTASYNRLEGYLPAEIGNAASLKRLVLSDNQLTGEIPREIGKLTSLSVLNLNANMFQGKIPVELGDCTSLTTLDLGSNNLQGQIPDKITALAQLQCLVLSYNNLSGSIPSKPSAYFHQIEMPDLSFLQHHGIFDLSYNRLSGPIPEELGECLVLVEISLSNNHLSGEIPASLSRLTNLTILDLSGNALTGSIPKEMGNSLKLQGLNLANNQLNGHIPESFGLLGSLVKLNLTKNKLDGPVPASLGNLKELTHMDLSFNNLSGELSSELSTMEKLVGLYIEQNKFTGEIPSELGNLTQLEYLDVSENLLSGEIPTKICGLPNLEFLNLAKNNLRGEVPSDGVCQDPSKALLSGNKELCGRVVGSDCKIEGTKLRSAWGIAGLMLGFTIIVFVFVFSLRRWAMTKRVKQRDDPERMEESRLKGFVDQNLYFLSGSRSREPLSINIAMFEQPLLKVRLGDIVEATDHFSKKNIIGDGGFGTVYKACLPGEKTVAVKKLSEAKTQGNREFMAEMETLGKVKHPNLVSLLGYCSFSEEKLLVYEYMVNGSLDHWLRNQTGMLEVLDWSKRLKIAVGAARGLAFLHHGFIPHIIHRDIKASNILLDGDFEPKVADFGLARLISACESHVSTVIAGTFGYIPPEYGQSARATTKGDVYSFGVILLELVTGKEPTGPDFKESEGGNLVGWAIQKINQGKAVDVIDPLLVSVALKNSQLRLLQIAMLCLAETPAKRPNMLDVLKALKEI

SEQ ID NO: 46300 - DNA, 2389 bp, Arabidopsis thaliana; identical to SEQ ID NO: 43744
  misc_feature (1)..(2389): Ceres Seq. ID no. 13591580
  misc_feature (1)..(2389): Ortholog of  Ceres SEQ ID NO 12465083 as cited in SEQ ID NO 68239

SEQ ID NO: 46301 - protein, 669 aa, Arabidopsis thaliana; identical to SEQ ID NO: 25857
  peptide (1)..(669): Ceres Seq. ID no. 15221053

SEQ ID NO: 46302 - protein, 516 aa, Arabidopsis thaliana; identical to SEQ ID NO: 25858
  peptide (1)..(516): Ceres Seq. ID no. 15221054

SEQ ID NO: 46303 - protein, 511 aa, Arabidopsis thaliana; identical to SEQ ID NO: 43747
  peptide (1)..(511): Ceres Seq. ID no. 15221055

SEQ ID NO: 46304 - DNA, 2704 bp, Arabidopsis thaliana
  misc_feature (1)..(2704): Ceres Seq. ID no. 13578529
  misc_feature (1)..(2704): Ortholog of  Ceres SEQ ID NO 13582297 as cited in SEQ ID NO 56486
  misc_feature (1)..(2704): Ortholog of  Ceres SEQ ID NO 13586936 as cited in SEQ ID NO 0
ggtcacaccagttaccctctcatccgttttcgttttttttttctctctttcaaaaatctctcagctgaggttgatcgatcttcttcttcttcttcctcactctttagatttgttccttttgcattttacacttttggatctgaaaatgtggttctctgtttcgcccgttaccgtttagattcagttctgtttttttcttacccgatcgcttgattcggactgtgatctttgatcttttttcttctccagtgccgtgaaggatgtgtggtcttgctaagaagctggatatagaggatactttgacatcactgtcagaccaagagaatgaatctttggccaaacccatgaatgatgctgctgaatgggaacattcgttttctgccttgcttgagtttgctgcagacaacgatgtggaggggtttaggcggcaactctctgatgtgtcttgtatcaaccagatgggtctttggtacagacggcagaggtttgttagaagaatggttcttgagcaaagaaccccgctgatggttgcttcgttatatgggagtttagatgttgtgaagtttattctttctttcccggaagcggagttgaatctgtcttgtggtcctgataaaagtactgctcttcattgcgctgcttctggtgcttctgtgaattccttggatgttgtcaagttgcttttgagtgtaggagcagatcctaatatccctgatgctcatggaaatcgtcctgttgatgttcttgttgtgtctccacacgctcctggtttgagaaccatccttgaagagatcttgaagaaagacgagattatatctgaagatctgcatgcctcgtcatctagcttgggatcaagtttccggtctctctcatcatcccctgataatggttcctcgttactctccttagattcagtatcctctccgactaagccacacggtactgatgtaactttcgcatcagagaagaaagagtacccaattgatccatcattgcctgatatcaaaagcgggatttattcaaccgatgagtttcgtatgttctcgttcaagatccgcccatgttctcgagcatattcccatgactggactgaatgtccatttgcacacccaggtgagaatgcaaggagaagagacccgaggaagtttcactatacgtgtgttccatgcccggattttaagaaaggatcctgtaagcaaggtgatatgtgtgaatatgctcatggggtttttgaatgctggctacaccctgctcagtacagaacacgattgtgcaaggacggaatgggttgcaaccgaagggtttgcttctttgctcacgcaaatgaggagttgcgtcccttgtacccttccacaggatctggattgccatctcctcgggcttcgtctgctgtttccgcctctactatggacatggcgtcagttttgaacatgttaccaggctcaccatctgctgctcaacattcgttcaccccaccaatatctccttctggaaatggtagtatgccccattcatcgatgggttggcctcagcagaacataccggcgttgaatcttcctggaagcaatatccagttgagtcgtctgagatcttctcttaacgctagagatattccttctgagcagcttagcatgctgcatgagtttgaaatgcaacgtcagcttgctggcgatatgcacagtccacgctttatgaatcattccgctcgtcctaagacactgaacccttcaaatctggaggaactcttctcagctgaggttgcatctcctcgtttctctgatcaacttgctgtttcatctgttctatcgccttcccacaagtccgcgcttcttaatcagctgcagaataataagcagagcatgctttctcctatcaagacaaatctaatgtcttctccaaagaatgtggagcaacattctcttctgcagcaagcctcgtcaccccgaggcggagagcctatttccccaatgaatgctcgaatgaaacagcagctacattcacgcagcctaagctcccgtgattttggatctagtctgccccgtgatttaatgccgactgattctggttcgccattaagtccatggtcaagttgggaccagacccatggaagcaaggtggattggtcagtccaatcagatgagttaggtcggttgagaaaatctcattccttggctaataacccaaacagggaagcagatgtttcatgggctcagcagatgttaaaagactcttcatcacctaggaacggaaaccgtgttgtgaacatgaatggtgcaaggccattgactcaaggtggttcgagtgtgaatcctcacaacagtgacactcgtgagagcgacattcttgatgcgtggcttgaacagctgcacctagatcgctgagcctcagctgcgagagagaggttcacatttctgtgaagctgtgaaactgatgattcgtttatttattattcaagaaagcaaacggaaacaaaagcaaactccgggtaagcttttttcgattctaataaccctaaaaggctcagttttttcaggcttctttctgaaatttctttactttcttatttttatcacctcattaaattaattattgtatcatctctgttgtaacaatggccaaagtgcgcctctattacttcccggatttctgatttacattttttgtatcctctcagtttgtcaattgtttctaatatctccttcat

SEQ ID NO: 46305 - protein, 706 aa, Arabidopsis thaliana
  peptide (1)..(706): Ceres Seq. ID no. 13578530
MCGLAKKLDIEDTLTSLSDQENESLAKPMNDAAEWEHSFSALLEFAADNDVEGFRRQLSDVSCINQMGLWYRRQRFVRRMVLEQRTPLMVASLYGSLDVVKFILSFPEAELNLSCGPDKSTALHCAASGASVNSLDVVKLLLSVGADPNIPDAHGNRPVDVLVVSPHAPGLRTILEEILKKDEIISEDLHASSSSLGSSFRSLSSSPDNGSSLLSLDSVSSPTKPHGTDVTFASEKKEYPIDPSLPDIKSGIYSTDEFRMFSFKIRPCSRAYSHDWTECPFAHPGENARRRDPRKFHYTCVPCPDFKKGSCKQGDMCEYAHGVFECWLHPAQYRTRLCKDGMGCNRRVCFFAHANEELRPLYPSTGSGLPSPRASSAVSASTMDMASVLNMLPGSPSAAQHSFTPPISPSGNGSMPHSSMGWPQQNIPALNLPGSNIQLSRLRSSLNARDIPSEQLSMLHEFEMQRQLAGDMHSPRFMNHSARPKTLNPSNLEELFSAEVASPRFSDQLAVSSVLSPSHKSALLNQLQNNKQSMLSPIKTNLMSSPKNVEQHSLLQQASSPRGGEPISPMNARMKQQLHSRSLSSRDFGSSLPRDLMPTDSGSPLSPWSSWDQTHGSKVDWSVQSDELGRLRKSHSLANNPNREADVSWAQQMLKDSSSPRNGNRVVNMNGARPLTQGGSSVNPHNSDTRESDILDAWLEQLHLDR

SEQ ID NO: 46306 - protein, 678 aa, Arabidopsis thaliana
  peptide (1)..(678): Ceres Seq. ID no. 13578531
MNDAAEWEHSFSALLEFAADNDVEGFRRQLSDVSCINQMGLWYRRQRFVRRMVLEQRTPLMVASLYGSLDVVKFILSFPEAELNLSCGPDKSTALHCAASGASVNSLDVVKLLLSVGADPNIPDAHGNRPVDVLVVSPHAPGLRTILEEILKKDEIISEDLHASSSSLGSSFRSLSSSPDNGSSLLSLDSVSSPTKPHGTDVTFASEKKEYPIDPSLPDIKSGIYSTDEFRMFSFKIRPCSRAYSHDWTECPFAHPGENARRRDPRKFHYTCVPCPDFKKGSCKQGDMCEYAHGVFECWLHPAQYRTRLCKDGMGCNRRVCFFAHANEELRPLYPSTGSGLPSPRASSAVSASTMDMASVLNMLPGSPSAAQHSFTPPISPSGNGSMPHSSMGWPQQNIPALNLPGSNIQLSRLRSSLNARDIPSEQLSMLHEFEMQRQLAGDMHSPRFMNHSARPKTLNPSNLEELFSAEVASPRFSDQLAVSSVLSPSHKSALLNQLQNNKQSMLSPIKTNLMSSPKNVEQHSLLQQASSPRGGEPISPMNARMKQQLHSRSLSSRDFGSSLPRDLMPTDSGSPLSPWSSWDQTHGSKVDWSVQSDELGRLRKSHSLANNPNREADVSWAQQMLKDSSSPRNGNRVVNMNGARPLTQGGSSVNPHNSDTRESDILDAWLEQLHLDR

SEQ ID NO: 46307 - protein, 640 aa, Arabidopsis thaliana
  peptide (1)..(640): Ceres Seq. ID no. 13578532
MGLWYRRQRFVRRMVLEQRTPLMVASLYGSLDVVKFILSFPEAELNLSCGPDKSTALHCAASGASVNSLDVVKLLLSVGADPNIPDAHGNRPVDVLVVSPHAPGLRTILEEILKKDEIISEDLHASSSSLGSSFRSLSSSPDNGSSLLSLDSVSSPTKPHGTDVTFASEKKEYPIDPSLPDIKSGIYSTDEFRMFSFKIRPCSRAYSHDWTECPFAHPGENARRRDPRKFHYTCVPCPDFKKGSCKQGDMCEYAHGVFECWLHPAQYRTRLCKDGMGCNRRVCFFAHANEELRPLYPSTGSGLPSPRASSAVSASTMDMASVLNMLPGSPSAAQHSFTPPISPSGNGSMPHSSMGWPQQNIPALNLPGSNIQLSRLRSSLNARDIPSEQLSMLHEFEMQRQLAGDMHSPRFMNHSARPKTLNPSNLEELFSAEVASPRFSDQLAVSSVLSPSHKSALLNQLQNNKQSMLSPIKTNLMSSPKNVEQHSLLQQASSPRGGEPISPMNARMKQQLHSRSLSSRDFGSSLPRDLMPTDSGSPLSPWSSWDQTHGSKVDWSVQSDELGRLRKSHSLANNPNREADVSWAQQMLKDSSSPRNGNRVVNMNGARPLTQGGSSVNPHNSDTRESDILDAWLEQLHLDR

SEQ ID NO: 46308 - DNA, 2066 bp, Arabidopsis thaliana
  misc_feature (1)..(2066): Ceres Seq. ID no. 15177662
  misc_feature (1)..(2066): Ortholog of  Ceres SEQ ID NO 14313943 as cited in SEQ ID NO 54725
  misc_feature (1)..(2066): Ortholog of  Ceres SEQ ID NO 12465428 as cited in SEQ ID NO 68898
tcactagtcccccccccccccgctaaacccttaatttgagctctctgctctcctggttttagttttcctctatttcgtgctcaattcgcttgttctccagttccactctatcagtgccggcggcgatattgtccgaggataaaacatgtttgctctttccaaggttttgcggagaagtcagagtctccgcctaggagcttgcaatgctgtctactctaagctagatataccattgggagaaagaaacattgctattgaatcaaacgctttgattcatgataaacacgaagctttgcctagattttatgagctctcttggtcttcctctaccggaagacgttcactttcctcggacgctggagctaaaactaccggagatgacgatgacctcgaagacaagaatgtagaccttgcaactccagacgagactagtagtgatagtgaagatggtgaggagttttccggtgatgaaggggatattgaaggagcagagctggaactacatgtcccggaaagcaagagaccatcggagatgtttaaggccattgtttctgtctcaggtctgtctgtagggagtgctcttgataagtgggttgaacaaggaaaggataccaaccgtaaagagtttgaaagtgcgatgctacaactccgtaaacgtcggatgtttgggagagcattgcagatgacagaatggttagacgaaaataagcagtttgaaatggaggagagagattatgcttgtcggcttgatctgatttccaaggtacgtggctggtacaagggagaagcttatatcaaaacaatcccggaatctttcagaggggaattggtctaccgaaccctcctggcgaatcatgtggcaactagcaatgtgagaacagctgaagcagttttcaacaaaatgaaggacttgggattccctctgtcaacattcacctgtaatcagatgcttattctttacaaaagggtcgacaagaagaaaatagccgatgtgttattgctgttggagaaggaaaatctgaagccgaatcttaacacatacaaaatcctgattgataccaaaggatcatcaaatgacataactgggatggaacaaattgtggagacaatgaaaagtgaaggtgttgagcttgaccttcgtgcacgagctctcattgcaagacactatgcatcagctgggcttaaagagaaggctgagaaagtgctgaaagagatggaaggtgaaagcttggaggaaaatcggcatatgtgcaaggatttgctttccgtctatggctatctccagagggaggatgaagtgcgcagagtttggaagatctgtgaagaaaacccccgttataacgaggtccttgctgcaatcttggcttttggaaagatcgataaagtcaaagatgcagaggcggtttttgagaaggtgttgaagatgtcccatagagtttcttctaatgtttactccgttctcttgagggtttacgtggatcacaagatggtctcagagggtaaggatcttgttaagcagatgtcagacagcgggtgcaatattggggccttaacatgggatgcagtgatcaagctctatgtggaagccggggaagtagaaaaggctgagtcttcactgagcaaggcaatacagtcgaaacagattaaaccgttgatgagctccttcatgtacttaatgcacgagtatgtgagaaggggtgatgttcataacacagagaaaatcttccagaggatgaagcaagctggctatcaatctcgcttctgggcgtaccaaacccttatccaagcttatgtcaatgccaaagctccagcatggaatgaaggaaagaatgaaagctgataacatcttcccaaataaaagattagctgctcaactcgctaaagccgatcccttcaagaagacccctctctcggatctccttgattgagttgcgttacagctacaacatcatccgccttgtgaatctttggtttgattgatcaaccttttatccatgttggtagaaacttcagtagcttagtttaaaaaagacctcctgatatataaattctgtttggttgctgct

SEQ ID NO: 46309 - protein, 564 aa, Arabidopsis thaliana
  peptide (1)..(564): Ceres Seq. ID no. 15177663
MFALSKVLRRSQSLRLGACNAVYSKLDIPLGERNIAIESNALIHDKHEALPRFYELSWSSSTGRRSLSSDAGAKTTGDDDDLEDKNVDLATPDETSSDSEDGEEFSGDEGDIEGAELELHVPESKRPSEMFKAIVSVSGLSVGSALDKWVEQGKDTNRKEFESAMLQLRKRRMFGRALQMTEWLDENKQFEMEERDYACRLDLISKVRGWYKGEAYIKTIPESFRGELVYRTLLANHVATSNVRTAEAVFNKMKDLGFPLSTFTCNQMLILYKRVDKKKIADVLLLLEKENLKPNLNTYKILIDTKGSSNDITGMEQIVETMKSEGVELDLRARALIARHYASAGLKEKAEKVLKEMEGESLEENRHMCKDLLSVYGYLQREDEVRRVWKICEENPRYNEVLAAILAFGKIDKVKDAEAVFEKVLKMSHRVSSNVYSVLLRVYVDHKMVSEGKDLVKQMSDSGCNIGALTWDAVIKLYVEAGEVEKAESSLSKAIQSKQIKPLMSSFMYLMHEYVRRGDVHNTEKIFQRMKQAGYQSRFWAYQTLIQAYVNAKAPAWNEGKNES

SEQ ID NO: 46310 - protein, 435 aa, Arabidopsis thaliana
  peptide (1)..(435): Ceres Seq. ID no. 15177664
MFKAIVSVSGLSVGSALDKWVEQGKDTNRKEFESAMLQLRKRRMFGRALQMTEWLDENKQFEMEERDYACRLDLISKVRGWYKGEAYIKTIPESFRGELVYRTLLANHVATSNVRTAEAVFNKMKDLGFPLSTFTCNQMLILYKRVDKKKIADVLLLLEKENLKPNLNTYKILIDTKGSSNDITGMEQIVETMKSEGVELDLRARALIARHYASAGLKEKAEKVLKEMEGESLEENRHMCKDLLSVYGYLQREDEVRRVWKICEENPRYNEVLAAILAFGKIDKVKDAEAVFEKVLKMSHRVSSNVYSVLLRVYVDHKMVSEGKDLVKQMSDSGCNIGALTWDAVIKLYVEAGEVEKAESSLSKAIQSKQIKPLMSSFMYLMHEYVRRGDVHNTEKIFQRMKQAGYQSRFWAYQTLIQAYVNAKAPAWNEGKNES

SEQ ID NO: 46311 - protein, 400 aa, Arabidopsis thaliana
  peptide (1)..(400): Ceres Seq. ID no. 15177665
MLQLRKRRMFGRALQMTEWLDENKQFEMEERDYACRLDLISKVRGWYKGEAYIKTIPESFRGELVYRTLLANHVATSNVRTAEAVFNKMKDLGFPLSTFTCNQMLILYKRVDKKKIADVLLLLEKENLKPNLNTYKILIDTKGSSNDITGMEQIVETMKSEGVELDLRARALIARHYASAGLKEKAEKVLKEMEGESLEENRHMCKDLLSVYGYLQREDEVRRVWKICEENPRYNEVLAAILAFGKIDKVKDAEAVFEKVLKMSHRVSSNVYSVLLRVYVDHKMVSEGKDLVKQMSDSGCNIGALTWDAVIKLYVEAGEVEKAESSLSKAIQSKQIKPLMSSFMYLMHEYVRRGDVHNTEKIFQRMKQAGYQSRFWAYQTLIQAYVNAKAPAWNEGKNES

SEQ ID NO: 46312 - DNA, 2388 bp, Arabidopsis thaliana
  misc_feature (1)..(2388): Ceres Seq. ID no. 12601683
  misc_feature (1)..(2388): Ortholog of  Ceres SEQ ID NO 14302243 as cited in SEQ ID NO 64663
acaacaccacttgggggaggctcccatacacaaaacgaaggcgcgaatttcaaggactcttctcgacgaccaaaccacataaaacactcttaccagaatttgtgttgtcttcgttcatttccttctcctcttcttcttcttcttcgtcgtaattttgattgtttctttgcgaaaagtcgtttttttaatcaagtctgaatcacgttttattgatctacactcgcgtgggttctccgtttcgtgcttagatcagagagctccctcccgtgattccgagctttaaggtcggaaatggcggctcatgtttctactggaaacattcataatttctatcttgcggggcaggtttacaggggacaagctttttcatggagttctgcttctactttcatggcaaatccattcaaagagccctcttggtcaagtggggtatttaaggctctaaaagctgagagatgtggttgttactctcgtggtatttcccccatcagtgagacctcaaaacctatcagggctgtttcggtatcttcttcaacaaagtattatgatttcactgtgattggtagtggagtagcgggtctgcgttatgctttagaagttgcaaagcaaggaacagtcgcagtgattaccaaagatgagcctcatgagagtaacacaaactatgctcaaggtggtgttagtgctgtgttatgccctttggattctgttgaaagtcatatgcgggacactatggtcgctggtgctcatctttgtgatgaagaaaccgtaagagttgtgtgtactgaagggcctgaaaggattcgtgaactgattgcaatgggagcatcatttgatcacggcgaggatggaaatttgcatttggccagagagggtggtcactcgcattgtaggatcgttcacgctgctgatatgacaggaagagagattgagagagctttacttgaagctgtacttaatgatcccaacatatctgtcttcaaacaccattttgcaatcgatctgctcacttctcaggatggcttgaacacagtttgtcatggtgtggacactttgaatatcaaaactaatgaggtagtacgctttatatcgaaggtgacattgcttgcttcaggtggagctgggcatatctatccatcaaccacaaatcctctggtggctactggagatgggatggcgatggctcatcgagctcaagctgtgatctcaaatatggaatttgtgcagtttcatcctactgccctagccgacgaaggtcttcccatcaaactacaaactgctagggaaaacgcgttcctcatcaccgaggcggtgagaggtgatggtggcatcctctataatctaggaatggagcgattcatgcctgtttacgatgaacgagctgagcttgctccaagagacgtggttgcaagaagtattgatgaccagcttaagaaacgaaacgaaaagtatgtgttacttgacataagccataagccaagagaaaagattcttgcccatttcccgaacatagcttctgaatgtcttaaacacggtctggatatcacccgtcagcctattccggttgtccctgcagcccattacatgtgtggaggagttcgtgctggtttacaaggcgaaaccaatgtccttggattgtttgtagcaggtgaagtagcatgtacaggcctccacggggcaaatcgtcttgctagtaactcgcttttagaagctctggttttcgcgagacgggctgttcagccttcgactgagctcatgaaacgcacaagacttgatgtatgcgcatcagagaaatggacaaggcctgttgttgcgacagctagattgctaggagatgaagtaatagcaaagattatagctttgactaaagaagtgagaagagagcttcaggaggtaatgtggaagtatgttggtattgtcagatcgacaattcggctcaccactgctgagaggaaaatcgcagagctagaagcaaaatgggaaacatttttgtttgaacatggatgggaacaaacagtggtagctcttgaagcttgtgagatgagaaacttgttctgttgcgctaagcttgtggtgagcagcgcgttagctagacatgaaagcagaggtcttcattacatgacagactttccttttgtggaagaaagcaagcggattccgacgattattctaccgtcttctcctacaacagctagttggagctcaaggcggttacagaatataagtagcagctcacttattgattgctaaaactgcaggagtttttgttcttatttgaatccaaacctctctgattattgtatcaatttgaaaaaatttggatctcaaaaggaatctctgattctgacactctgtaatacaaaaggaaataaattattcatttgagatatc

SEQ ID NO: 46313 - protein, 651 aa, Arabidopsis thaliana
  peptide (1)..(651): Ceres Seq. ID no. 12601684
MAAHVSTGNIHNFYLAGQVYRGQAFSWSSASTFMANPFKEPSWSSGVFKALKAERCGCYSRGISPISETSKPIRAVSVSSSTKYYDFTVIGSGVAGLRYALEVAKQGTVAVITKDEPHESNTNYAQGGVSAVLCPLDSVESHMRDTMVAGAHLCDEETVRVVCTEGPERIRELIAMGASFDHGEDGNLHLAREGGHSHCRIVHAADMTGREIERALLEAVLNDPNISVFKHHFAIDLLTSQDGLNTVCHGVDTLNIKTNEVVRFISKVTLLASGGAGHIYPSTTNPLVATGDGMAMAHRAQAVISNMEFVQFHPTALADEGLPIKLQTARENAFLITEAVRGDGGILYNLGMERFMPVYDERAELAPRDVVARSIDDQLKKRNEKYVLLDISHKPREKILAHFPNIASECLKHGLDITRQPIPVVPAAHYMCGGVRAGLQGETNVLGLFVAGEVACTGLHGANRLASNSLLEALVFARRAVQPSTELMKRTRLDVCASEKWTRPVVATARLLGDEVIAKIIALTKEVRRELQEVMWKYVGIVRSTIRLTTAERKIAELEAKWETFLFEHGWEQTVVALEACEMRNLFCCAKLVVSSALARHESRGLHYMTDFPFVEESKRIPTIILPSSPTTASWSSRRLQNISSSSLIDC

SEQ ID NO: 46314 - protein, 618 aa, Arabidopsis thaliana
  peptide (1)..(618): Ceres Seq. ID no. 12601685
MANPFKEPSWSSGVFKALKAERCGCYSRGISPISETSKPIRAVSVSSSTKYYDFTVIGSGVAGLRYALEVAKQGTVAVITKDEPHESNTNYAQGGVSAVLCPLDSVESHMRDTMVAGAHLCDEETVRVVCTEGPERIRELIAMGASFDHGEDGNLHLAREGGHSHCRIVHAADMTGREIERALLEAVLNDPNISVFKHHFAIDLLTSQDGLNTVCHGVDTLNIKTNEVVRFISKVTLLASGGAGHIYPSTTNPLVATGDGMAMAHRAQAVISNMEFVQFHPTALADEGLPIKLQTARENAFLITEAVRGDGGILYNLGMERFMPVYDERAELAPRDVVARSIDDQLKKRNEKYVLLDISHKPREKILAHFPNIASECLKHGLDITRQPIPVVPAAHYMCGGVRAGLQGETNVLGLFVAGEVACTGLHGANRLASNSLLEALVFARRAVQPSTELMKRTRLDVCASEKWTRPVVATARLLGDEVIAKIIALTKEVRRELQEVMWKYVGIVRSTIRLTTAERKIAELEAKWETFLFEHGWEQTVVALEACEMRNLFCCAKLVVSSALARHESRGLHYMTDFPFVEESKRIPTIILPSSPTTASWSSRRLQNISSSSLIDC

SEQ ID NO: 46315 - protein, 509 aa, Arabidopsis thaliana
  peptide (1)..(509): Ceres Seq. ID no. 12601686
MRDTMVAGAHLCDEETVRVVCTEGPERIRELIAMGASFDHGEDGNLHLAREGGHSHCRIVHAADMTGREIERALLEAVLNDPNISVFKHHFAIDLLTSQDGLNTVCHGVDTLNIKTNEVVRFISKVTLLASGGAGHIYPSTTNPLVATGDGMAMAHRAQAVISNMEFVQFHPTALADEGLPIKLQTARENAFLITEAVRGDGGILYNLGMERFMPVYDERAELAPRDVVARSIDDQLKKRNEKYVLLDISHKPREKILAHFPNIASECLKHGLDITRQPIPVVPAAHYMCGGVRAGLQGETNVLGLFVAGEVACTGLHGANRLASNSLLEALVFARRAVQPSTELMKRTRLDVCASEKWTRPVVATARLLGDEVIAKIIALTKEVRRELQEVMWKYVGIVRSTIRLTTAERKIAELEAKWETFLFEHGWEQTVVALEACEMRNLFCCAKLVVSSALARHESRGLHYMTDFPFVEESKRIPTIILPSSPTTASWSSRRLQNISSSSLIDC

SEQ ID NO: 46316 - DNA, 1545 bp, Arabidopsis thaliana
  misc_feature (1)..(1545): Ceres Seq. ID no. 12575907
  misc_feature (1)..(1545): Ortholog of  Ceres SEQ ID NO 13655463 as cited in SEQ ID NO 69035
  misc_feature (1)..(1545): Ortholog of  Ceres SEQ ID NO 15180063 as cited in SEQ ID NO 0
atgtctattaaagcatttgctttgattcaactactatccgtcacgattttatacaaccatgttcatgcaacaagtccgatcaaaaccatcgtagttgtggtgatggaaaatagatctttcgatcacatgcttggatggatgaagaaactaaacccggagatcaacggtgtggacgggtcggagtcaaacccggtctcggtgtcggacccttcctctagaaaaataaaattcgggtcaggttcgcattacgtagatccggaccctggtcattcgtttcaagcgataagagagcaagtattcgggtcaaatgatacatcaatggatcctccaccgatgaacgggtttgttcaacaagcatattccgaggaccctagtggtaacatgtcggcaagtgttatgaatggatttgaacctgataaggttcctgtctacaagtctcttgtctccgagttcgctgttttcgatagatggtttgcatcggttccatcatcgacacagccaaacagaatgtttgtacactcagggacgtcagcgggagccaccagcaacaaccctatctcccttgcaaagggttatcctcaaagaaccattttcgacaatcttgacgacgaagaattctctttcggtatatactaccagaatattccggcagtattgttttatcaaagcctaaggaaactcaaatacgtttttaagttccatagctatgggaactcttttaaggatcatgcaaagcaaggcaagctccctgcctacactgtcattgagcaacgttacatggacaccctcttggaaccggcttctgatgatcatccatcacatgatgtctaccaaggacagaagtttataaaggaagtgtacgagaccctaagggcgagcccacaatggaacgaaactttattgattatcacttacgacgagcatggtgggtatttcgatcacgtgcccacaccggttcgcaatgttcctagtccggatggtatagttggaccggatccattcctatttcagtttaacaggttaggtattcgtgtaccaacaatagcagtgtccccatggatagagaaaggaacggtcgtacatggaccaaacgggtctccatttccatcgtcagagtacgagcactcttcaatccccgcgactgtgaagaaactattcaatctatcatcgcctttcctcacaaagagagatgaatgggctggcacttttgagaacatcttacaaatccgaaaggagcctcgaactgattgccccgagacactacctgaaccggttaagataagaatgggagaggcaaatgagaaagctcttttgactgagtttcagcaagagcttgtacaactagctgcggttctaaaaggtgataatatgctcacaacatttcctaaagaaataagcaaaggaatgacagtgattgaagggaagaggtacatggaagatgctatgaaacgattcttagaggctggtcgtatggctctttccatgggagcgaataaagaagagcttgtccatatgaaaacttccctcaccggaagaagaccttaa

SEQ ID NO: 46317 - protein, 514 aa, Arabidopsis thaliana
  peptide (1)..(514): Ceres Seq. ID no. 12575908
MSIKAFALIQLLSVTILYNHVHATSPIKTIVVVVMENRSFDHMLGWMKKLNPEINGVDGSESNPVSVSDPSSRKIKFGSGSHYVDPDPGHSFQAIREQVFGSNDTSMDPPPMNGFVQQAYSEDPSGNMSASVMNGFEPDKVPVYKSLVSEFAVFDRWFASVPSSTQPNRMFVHSGTSAGATSNNPISLAKGYPQRTIFDNLDDEEFSFGIYYQNIPAVLFYQSLRKLKYVFKFHSYGNSFKDHAKQGKLPAYTVIEQRYMDTLLEPASDDHPSHDVYQGQKFIKEVYETLRASPQWNETLLIITYDEHGGYFDHVPTPVRNVPSPDGIVGPDPFLFQFNRLGIRVPTIAVSPWIEKGTVVHGPNGSPFPSSEYEHSSIPATVKKLFNLSSPFLTKRDEWAGTFENILQIRKEPRTDCPETLPEPVKIRMGEANEKALLTEFQQELVQLAAVLKGDNMLTTFPKEISKGMTVIEGKRYMEDAMKRFLEAGRMALSMGANKEELVHMKTSLTGRRP

SEQ ID NO: 46318 - protein, 480 aa, Arabidopsis thaliana
  peptide (1)..(480): Ceres Seq. ID no. 12575909
MENRSFDHMLGWMKKLNPEINGVDGSESNPVSVSDPSSRKIKFGSGSHYVDPDPGHSFQAIREQVFGSNDTSMDPPPMNGFVQQAYSEDPSGNMSASVMNGFEPDKVPVYKSLVSEFAVFDRWFASVPSSTQPNRMFVHSGTSAGATSNNPISLAKGYPQRTIFDNLDDEEFSFGIYYQNIPAVLFYQSLRKLKYVFKFHSYGNSFKDHAKQGKLPAYTVIEQRYMDTLLEPASDDHPSHDVYQGQKFIKEVYETLRASPQWNETLLIITYDEHGGYFDHVPTPVRNVPSPDGIVGPDPFLFQFNRLGIRVPTIAVSPWIEKGTVVHGPNGSPFPSSEYEHSSIPATVKKLFNLSSPFLTKRDEWAGTFENILQIRKEPRTDCPETLPEPVKIRMGEANEKALLTEFQQELVQLAAVLKGDNMLTTFPKEISKGMTVIEGKRYMEDAMKRFLEAGRMALSMGANKEELVHMKTSLTGRRP

SEQ ID NO: 46319 - protein, 472 aa, Arabidopsis thaliana
  peptide (1)..(472): Ceres Seq. ID no. 12575910
MLGWMKKLNPEINGVDGSESNPVSVSDPSSRKIKFGSGSHYVDPDPGHSFQAIREQVFGSNDTSMDPPPMNGFVQQAYSEDPSGNMSASVMNGFEPDKVPVYKSLVSEFAVFDRWFASVPSSTQPNRMFVHSGTSAGATSNNPISLAKGYPQRTIFDNLDDEEFSFGIYYQNIPAVLFYQSLRKLKYVFKFHSYGNSFKDHAKQGKLPAYTVIEQRYMDTLLEPASDDHPSHDVYQGQKFIKEVYETLRASPQWNETLLIITYDEHGGYFDHVPTPVRNVPSPDGIVGPDPFLFQFNRLGIRVPTIAVSPWIEKGTVVHGPNGSPFPSSEYEHSSIPATVKKLFNLSSPFLTKRDEWAGTFENILQIRKEPRTDCPETLPEPVKIRMGEANEKALLTEFQQELVQLAAVLKGDNMLTTFPKEISKGMTVIEGKRYMEDAMKRFLEAGRMALSMGANKEELVHMKTSLTGRRP

SEQ ID NO: 46320 - DNA, 1706 bp, Arabidopsis thaliana
  misc_feature (1)..(1706): Ceres Seq. ID no. 13591923
  misc_feature (1)..(1706): Ortholog of  Ceres SEQ ID NO 14307863 as cited in SEQ ID NO 20504
gacagcatcaaacaccttcctcaaaacctagaaatcgaaaatatcagatctaaagaagagcgtcttcataaacgcccttcgtcttcttccctgcaaatctattttctagatctttctttcttccgcgaaacgacaatgagagagtgcatttcgatccacattggtcaggctggtattcaagtcggaaatgcttgctgggagctttactgtcttgaacatggcattcagcctgatggccagatgcctggtgacaagactgttggtggaggtgatgatgctttcaacaccttcttcagtgaaaccggtgcaggtaagcacgtcccacgtgctgtctttgttgatcttgagccaactgtgatcgacgaggtcaggactggtacttaccgtcagcttttccaccctgaacaactcatcagtggtaaagaagacgctgctaacaatttcgcccgtggtcattacaccattgggaaagagattgttgatctctgcttggaccggatcagaaagctcgctgataactgtactggtcttcaaggattccttgttttcaacgctgttggtggtgggactggatctggtcttggatctcttctccttgagagactttctgttgactatgggaaaaagtccaagttgggtttcactgtttacccatctccacaggtgtctacctctgtggttgagccttacaacagtgtcctctccactcactctctcttggaacacactgatgtctccatcctcctcgacaatgaagctatctatgacatctgtagacgctcccttaacattgagagacctacctacaccaacctcaaccgtctcgtctctcaggttatttcttccttgactgcttctctgaggttcgatggtgccttgaatgttgatgttactgagttccaaaccaacttggttccatacccaaggatccacttcatgctttcgtcctatgcaccagtcatctccgcggagaaggccttccatgagcaactctcagttgctgagatcacgaacagtgcctttgaacctgcttccatgatggcaaagtgtgacccgcgacatggaaagtacatggcttgctgtttgatgtaccgtggtgatgtagtccccaaggatgtgaacgcagcggttggcaccatcaagaccaagcgaactattcagtttgttgactggtgtcctactggattcaagtgtggtatcaactaccagccaccaactgttgttcctggaggtgatcttgctaaagtccagagagctgtttgtatgatctcaaactcaaccagtgttgctgaggtattctcccgtattgatcacaagtttgatcttatgtacgccaaacgtgctttcgttcactggtatgttggtgagggtatggaagaaggagaattctcagaggctcgtgaggatcttgcagcattggagaaggattatgaagaggtcggtgctgaaggtggtgacgatgaggatgatgaaggagaggaatactaagaagaatgtttcttaaaaattggattttgtgttgggtttttctctattatctcgtgttgtgatgaatgggggctcgaaactcttacgagtcttagttgtgtgtttttctaaacctatatttctatctcttgctggtggtttgatttctattatctagttcgtttgtgtattgactcatgtttctggtaatatctttcttactatgtgataaagtaatc

SEQ ID NO: 46321 - protein, 495 aa, Arabidopsis thaliana
  peptide (1)..(495): Ceres Seq. ID no. 13591924
DSIKHLPQNLEIENIRSKEERLHKRPSSSSLQIYFLDLSFFRETTMRECISIHIGQAGIQVGNACWELYCLEHGIQPDGQMPGDKTVGGGDDAFNTFFSETGAGKHVPRAVFVDLEPTVIDEVRTGTYRQLFHPEQLISGKEDAANNFARGHYTIGKEIVDLCLDRIRKLADNCTGLQGFLVFNAVGGGTGSGLGSLLLERLSVDYGKKSKLGFTVYPSPQVSTSVVEPYNSVLSTHSLLEHTDVSILLDNEAIYDICRRSLNIERPTYTNLNRLVSQVISSLTASLRFDGALNVDVTEFQTNLVPYPRIHFMLSSYAPVISAEKAFHEQLSVAEITNSAFEPASMMAKCDPRHGKYMACCLMYRGDVVPKDVNAAVGTIKTKRTIQFVDWCPTGFKCGINYQPPTVVPGGDLAKVQRAVCMISNSTSVAEVFSRIDHKFDLMYAKRAFVHWYVGEGMEEGEFSEAREDLAALEKDYEEVGAEGGDDEDDEGEEY

SEQ ID NO: 46322 - protein, 450 aa, Arabidopsis thaliana
  peptide (1)..(450): Ceres Seq. ID no. 13591925
MRECISIHIGQAGIQVGNACWELYCLEHGIQPDGQMPGDKTVGGGDDAFNTFFSETGAGKHVPRAVFVDLEPTVIDEVRTGTYRQLFHPEQLISGKEDAANNFARGHYTIGKEIVDLCLDRIRKLADNCTGLQGFLVFNAVGGGTGSGLGSLLLERLSVDYGKKSKLGFTVYPSPQVSTSVVEPYNSVLSTHSLLEHTDVSILLDNEAIYDICRRSLNIERPTYTNLNRLVSQVISSLTASLRFDGALNVDVTEFQTNLVPYPRIHFMLSSYAPVISAEKAFHEQLSVAEITNSAFEPASMMAKCDPRHGKYMACCLMYRGDVVPKDVNAAVGTIKTKRTIQFVDWCPTGFKCGINYQPPTVVPGGDLAKVQRAVCMISNSTSVAEVFSRIDHKFDLMYAKRAFVHWYVGEGMEEGEFSEAREDLAALEKDYEEVGAEGGDDEDDEGEEY

SEQ ID NO: 46323 - protein, 415 aa, Arabidopsis thaliana
  peptide (1)..(415): Ceres Seq. ID no. 13591926
MPGDKTVGGGDDAFNTFFSETGAGKHVPRAVFVDLEPTVIDEVRTGTYRQLFHPEQLISGKEDAANNFARGHYTIGKEIVDLCLDRIRKLADNCTGLQGFLVFNAVGGGTGSGLGSLLLERLSVDYGKKSKLGFTVYPSPQVSTSVVEPYNSVLSTHSLLEHTDVSILLDNEAIYDICRRSLNIERPTYTNLNRLVSQVISSLTASLRFDGALNVDVTEFQTNLVPYPRIHFMLSSYAPVISAEKAFHEQLSVAEITNSAFEPASMMAKCDPRHGKYMACCLMYRGDVVPKDVNAAVGTIKTKRTIQFVDWCPTGFKCGINYQPPTVVPGGDLAKVQRAVCMISNSTSVAEVFSRIDHKFDLMYAKRAFVHWYVGEGMEEGEFSEAREDLAALEKDYEEVGAEGGDDEDDEGEEY

SEQ ID NO: 46324 - DNA, 1286 bp, Arabidopsis thaliana
  misc_feature (1)..(1286): Ceres Seq. ID no. 12600663
  misc_feature (1)..(1286): Ortholog of  Ceres SEQ ID NO 12617197 as cited in SEQ ID NO 63406
  misc_feature (1)..(1286): Ortholog of  Ceres SEQ ID NO 13597804 as cited in SEQ ID NO 64182
  misc_feature (1)..(1286): Ortholog of  Ceres SEQ ID NO 14301622 as cited in SEQ ID NO 65156
  misc_feature (1)..(1286): Ortholog of  Ceres SEQ ID NO 13598565 as cited in SEQ ID NO 65250
  misc_feature (1)..(1286): Ortholog of  Ceres SEQ ID NO 13598597 as cited in SEQ ID NO 65496
  misc_feature (1)..(1286): Ortholog of  Ceres SEQ ID NO 13596284 as cited in SEQ ID NO 68273
  misc_feature (1)..(1286): Ortholog of  Ceres SEQ ID NO 14308995 as cited in SEQ ID NO 0
agtcgaacaaaagttgagatatggagctgaagcagagatggtcaaagtcaaacaaatagctaccatttgcacaaggaagaatcttcttctcatttgggtgatcaaaaatggcggttgtgcagaaaggaaaggtttgtgtaaccggtgccggaggttttttgggttcttgggtcgtcaatcatctcctctctagggattacttcgtccacggcactgtcagagaccctggtaatgaaaagtatgctcatttgaagaagcttgataaagctggtgacaaactcaagctcttcaaggctgatttgctcaactacggctctcttcaatctgctattgctggctgcagcggcgtcttccatgtcgcttgccctgttccatctgcttcagtccctaatcctgaggtagatttgatcgcacctgcagtggatggtacgctgaatgtgcttaaggcatgcgttgaagcaaaagttaagcgtgttgtgtatgtttcctctgtatctgcagttgctatgaaccctatgtggtcaaagagtcaagtgttagatgagaccgcttggtctgaccaagattattgcaaaaaaactgagaattggtattctttgtcaaagacacgagcagaaagtgaagctttcgaatttgcaaaacgaaccggacttgatctcgtcagtgtttgccctacccttgtcttgggacctgtattgcagcagcacacagtaaatgctagtagccttgttcttctcaagcttcttaaagagggttatgaatcgcgtaataaccaagaacggcatttggtagatgtgcgtgatgtggctcaagctttacttttggtttatgagaaagcagaagctgaaggaaggtacatctgcataggccacacggttagggaacaagaagtcgctgagaagctgaaaagtctttatctaaattacaactacccaaagagatacatcgaagcggatggaaaagtgaaggtgagttcagagaagttgcagaagttgggttggacttaccggccgttggaggaaacacttgtggattctgttgagagctaccgcaaagctaagcttgtggactgaaaactgggaacgaatagcatatgagtgttttgggtccatgtgttaagtgttcctatctgcacacgctctttcatcttttactcaagaataagagttgtgcaacatattttccatcatgaacttctgagtttttgttactttcttagacaccattacttttatgaccaatctacaattactccttccataactatgttccaatatctctttgat

SEQ ID NO: 46325 - protein, 321 aa, Arabidopsis thaliana
  peptide (1)..(321): Ceres Seq. ID no. 12600664
MAVVQKGKVCVTGAGGFLGSWVVNHLLSRDYFVHGTVRDPGNEKYAHLKKLDKAGDKLKLFKADLLNYGSLQSAIAGCSGVFHVACPVPSASVPNPEVDLIAPAVDGTLNVLKACVEAKVKRVVYVSSVSAVAMNPMWSKSQVLDETAWSDQDYCKKTENWYSLSKTRAESEAFEFAKRTGLDLVSVCPTLVLGPVLQQHTVNASSLVLLKLLKEGYESRNNQERHLVDVRDVAQALLLVYEKAEAEGRYICIGHTVREQEVAEKLKSLYLNYNYPKRYIEADGKVKVSSEKLQKLGWTYRPLEETLVDSVESYRKAKLVD

SEQ ID NO: 46326 - protein, 188 aa, Arabidopsis thaliana
  peptide (1)..(188): Ceres Seq. ID no. 12600665
MNPMWSKSQVLDETAWSDQDYCKKTENWYSLSKTRAESEAFEFAKRTGLDLVSVCPTLVLGPVLQQHTVNASSLVLLKLLKEGYESRNNQERHLVDVRDVAQALLLVYEKAEAEGRYICIGHTVREQEVAEKLKSLYLNYNYPKRYIEADGKVKVSSEKLQKLGWTYRPLEETLVDSVESYRKAKLVD

SEQ ID NO: 46327 - protein, 185 aa, Arabidopsis thaliana
  peptide (1)..(185): Ceres Seq. ID no. 12600666
MWSKSQVLDETAWSDQDYCKKTENWYSLSKTRAESEAFEFAKRTGLDLVSVCPTLVLGPVLQQHTVNASSLVLLKLLKEGYESRNNQERHLVDVRDVAQALLLVYEKAEAEGRYICIGHTVREQEVAEKLKSLYLNYNYPKRYIEADGKVKVSSEKLQKLGWTYRPLEETLVDSVESYRKAKLVD

SEQ ID NO: 46328 - DNA, 2419 bp, Arabidopsis thaliana
  misc_feature (1)..(2419): Ceres Seq. ID no. 15168947
  misc_feature (1)..(2419): Ortholog of  Ceres SEQ ID NO 15225034 as cited in SEQ ID NO 53426
tctttcacttcgctttctctatttcccctgaaaccgttcttgtctctctctctctctctctcttcttctctgctcaagacaagaacttgatgttcatgtcttgaaacttaacaaagtattgatctttccttttaagtaaagaatttgggggttacacaacttcgtctagatggagcaagagaaaagcttggatccacaactatggcatgcttgtgcaggatcaatggttcaaatcccttcactgaattcaacggttttttacttcgctcaaggccacacagagcacgctcacgcgcctcctgattttcacgcgccgcgcgttccacctcttatcctctgtcgtgtcgtctccgtgaagttcctcgccgacgctgaaacagacgaagtttttgctaaaattacgcttttgccacttccgggaaacgacttggatctagaaaacgacgccgttttgggtctaactcctccttcttctgacggtaacggtaacggtaaagagaaaccggcgtctttcgctaaaacgttaacgcagtctgacgctaataacggcggtggtttctccgttccacgttattgcgccgagacgattttcccgcggcttgattactcggcggagccaccggttcaaacagtgattgctaaagacatccacggcgagacttggaaattccagattctttacagaggaacacctcgccgtcatctcctaaccaccggttggagcactttcgttaaccagaagaaactaatcgccggagactcaatcgtcttcctccgttctgaatccggtgacctctgcgtcggaatccgccgcgctaaacgcggcggtctcggatctaacgcaggatccgacaatccttaccctggattctccggtttcctccgtgacgacgagtcaacaacaacaacatcgaagctaatgatgatgaaacgcaacggaaacaacgacggaaacgccgcggctacagggagggttagagtagaagcagtagcggaagcggtggcgcgtgcagcgtgtggacaagcgtttgaggttgtttattatccacgcgctagtacaccggagttttgcgtaaaagcagctgatgttagatcagcaatgaggataagatggtgtagtggtatgcgttttaaaatggcgtttgaaacagaggattcttctagaatcagttggtttatgggtactgtctccgccgttcaagtcgctgatccaattcgttggcctaattcaccatggcgtctccttcaggtagcttgggacgaaccggatttgttacaaaacgttaagcgggttagtccgtggttagtcgaattggtatcgaacatgcctacaatacatttatctccattctctccgaggaagaagattaggattccgcagccatttgagtttccattcgacggtactaaattcccgattttctccccgggattcgccaacaatggcggtggcgagtccatgtgttatctgtcaaacgacaacaataatgctcctgcaggaatacagggagccaggcaagctcaacaactcttcggatcaccatctccgtctttgttgtctgatctcaatcttagtagttacaccggtaacaacaagttacattctccggcgatgtttctatcgagtttcaacccgaggcatcatcattatcaggctagggatagtgagaatagtaataacatttcgtgttctttaactatggggaatcctgctatggttcaggataagaagaagtctgttggttcggttaagactcatcagttcgtgttgttcggtcaaccgattttaaccgaacagcaagttatgaaccgaaaacggtttttggaagaagaggcggaagcggaggaggagaaaggtttagtggctcgtgggttaacatggaattatagtttacaaggacttgagacgggtcattgtaaagttttcatggaatctgaggatgttggacgcacactcgatctctcggttattggctcgtaccaagaattgtaccggaaattggctgagatgtttcatatagaagagaggtcggatttgttgactcatgttgtgtaccgggatgcaaatggtgttatcaaacgtattggagacgaacctttcagtgatttcatgaaagcaactaaacggctaacaatcaagatggatattggtggcgacaacgtgagaaagacgtggataaccggaatcaggactggtgaaaatggtatagacgcttctacgaagactggtccgctcagcatcttcgcttgaaattgaagcatattgaggaataagcagtggcctttgttttgaacctaattttatttctgtctttaattctcttttttccctattttaaatcctttttttgctggtcttttgtgtgtaacaaaccattcccaagtgttaccaaaagtactctaattggtatttgaattt

SEQ ID NO: 46329 - protein, 693 aa, Arabidopsis thaliana
  peptide (1)..(693): Ceres Seq. ID no. 15168948
MEQEKSLDPQLWHACAGSMVQIPSLNSTVFYFAQGHTEHAHAPPDFHAPRVPPLILCRVVSVKFLADAETDEVFAKITLLPLPGNDLDLENDAVLGLTPPSSDGNGNGKEKPASFAKTLTQSDANNGGGFSVPRYCAETIFPRLDYSAEPPVQTVIAKDIHGETWKFQILYRGTPRRHLLTTGWSTFVNQKKLIAGDSIVFLRSESGDLCVGIRRAKRGGLGSNAGSDNPYPGFSGFLRDDESTTTTSKLMMMKRNGNNDGNAAATGRVRVEAVAEAVARAACGQAFEVVYYPRASTPEFCVKAADVRSAMRIRWCSGMRFKMAFETEDSSRISWFMGTVSAVQVADPIRWPNSPWRLLQVAWDEPDLLQNVKRVSPWLVELVSNMPTIHLSPFSPRKKIRIPQPFEFPFDGTKFPIFSPGFANNGGGESMCYLSNDNNNAPAGIQGARQAQQLFGSPSPSLLSDLNLSSYTGNNKLHSPAMFLSSFNPRHHHYQARDSENSNNISCSLTMGNPAMVQDKKKSVGSVKTHQFVLFGQPILTEQQVMNRKRFLEEEAEAEEEKGLVARGLTWNYSLQGLETGHCKVFMESEDVGRTLDLSVIGSYQELYRKLAEMFHIEERSDLLTHVVYRDANGVIKRIGDEPFSDFMKATKRLTIKMDIGGDNVRKTWITGIRTGENGIDASTKTGPLSIFA

SEQ ID NO: 46330 - protein, 675 aa, Arabidopsis thaliana
  peptide (1)..(675): Ceres Seq. ID no. 15168949
MVQIPSLNSTVFYFAQGHTEHAHAPPDFHAPRVPPLILCRVVSVKFLADAETDEVFAKITLLPLPGNDLDLENDAVLGLTPPSSDGNGNGKEKPASFAKTLTQSDANNGGGFSVPRYCAETIFPRLDYSAEPPVQTVIAKDIHGETWKFQILYRGTPRRHLLTTGWSTFVNQKKLIAGDSIVFLRSESGDLCVGIRRAKRGGLGSNAGSDNPYPGFSGFLRDDESTTTTSKLMMMKRNGNNDGNAAATGRVRVEAVAEAVARAACGQAFEVVYYPRASTPEFCVKAADVRSAMRIRWCSGMRFKMAFETEDSSRISWFMGTVSAVQVADPIRWPNSPWRLLQVAWDEPDLLQNVKRVSPWLVELVSNMPTIHLSPFSPRKKIRIPQPFEFPFDGTKFPIFSPGFANNGGGESMCYLSNDNNNAPAGIQGARQAQQLFGSPSPSLLSDLNLSSYTGNNKLHSPAMFLSSFNPRHHHYQARDSENSNNISCSLTMGNPAMVQDKKKSVGSVKTHQFVLFGQPILTEQQVMNRKRFLEEEAEAEEEKGLVARGLTWNYSLQGLETGHCKVFMESEDVGRTLDLSVIGSYQELYRKLAEMFHIEERSDLLTHVVYRDANGVIKRIGDEPFSDFMKATKRLTIKMDIGGDNVRKTWITGIRTGENGIDASTKTGPLSIFA

SEQ ID NO: 46331 - protein, 443 aa, Arabidopsis thaliana
  peptide (1)..(443): Ceres Seq. ID no. 15168950
MMMKRNGNNDGNAAATGRVRVEAVAEAVARAACGQAFEVVYYPRASTPEFCVKAADVRSAMRIRWCSGMRFKMAFETEDSSRISWFMGTVSAVQVADPIRWPNSPWRLLQVAWDEPDLLQNVKRVSPWLVELVSNMPTIHLSPFSPRKKIRIPQPFEFPFDGTKFPIFSPGFANNGGGESMCYLSNDNNNAPAGIQGARQAQQLFGSPSPSLLSDLNLSSYTGNNKLHSPAMFLSSFNPRHHHYQARDSENSNNISCSLTMGNPAMVQDKKKSVGSVKTHQFVLFGQPILTEQQVMNRKRFLEEEAEAEEEKGLVARGLTWNYSLQGLETGHCKVFMESEDVGRTLDLSVIGSYQELYRKLAEMFHIEERSDLLTHVVYRDANGVIKRIGDEPFSDFMKATKRLTIKMDIGGDNVRKTWITGIRTGENGIDASTKTGPLSIFA

SEQ ID NO: 46332 - DNA, 1562 bp, Arabidopsis thaliana
  misc_feature (1)..(1562): Ceres Seq. ID no. 13578622
  misc_feature (1)..(1562): Ortholog of  Ceres SEQ ID NO 15176911 as cited in SEQ ID NO 54868
  misc_feature (1)..(1562): Ortholog of  Ceres SEQ ID NO 13596433 as cited in SEQ ID NO 68721
  misc_feature (1)..(1562): Ortholog of  Ceres SEQ ID NO 13599169 as cited in SEQ ID NO 0
cgactcagtctccggctagttcgactcggtaaaatcacgattactttctccttccatttatcacgatcgtggatccagaaactctgaaagatggcgtctgagctgacaaaccggcgacacgagatagagcaaccagaagcggaatcttattatccaaagccgataaagccatggttcgtagcgattcgtccgatccgttacatgctcagagaacagagactcgtcttcgtcctcgtcggcattgccatcgccacattaggattcacaatcttctccaaatcatccaaccaccaaccaattccttacgacgtggatccgctttccggatacggaatgcgatcggagtcatcgtatctgccagcgacgattcataagaagccaagcatcgagtacatgagccggatcggatcggcaggcggcaaaatccctctaggcttgaaacggaaagtgctaagggttgttgtgacaggtggagcagggttcgtcgggtcacacctggtggaccggttgatggctcgaggagacaacgtgatcgtggtcgacaatttcttcacgggaaggaaagagaacgtgatgcaccatttcaataaccctaatttcgagatgatccgtcacgatgtagtggagccgatccttctagaggttgatcagatctaccatttggcatgccctgcttctcctgttcactacaaattcaatcccgtcaagactatcaagacgaatgtggtgggaacattgaacatgttgggactagcgaagagagtgggagcaagattcttgctgacgagtacgagtgaggtctatggagatcctcttcaacatcctcaggttgagacttactggggcaacgttaatcccatcggtgttcggagttgttacgacgaaggcaaacgtacggctgagactttgaccatggactatcacagaggcgctaatgttgaggttaggattgctaggatattcaacacttatggcccaaggatgtgtatcgatgacggtcgtgtggttagcaacttcgttgcccaggcattaagaaaagagcctttgactgtttatggtgatggtaagcagactaggagtttccagtttgtctctgatctggtggaaggtctgatgaggttgatggagggagaacatgtcggtccatttaaccttggtaaccccggtgaattcaccatgctcgagctcgctaaggtggttcaagagacaattgacccgaacgcaaagatagagttcagaccaaacacagaggacgacccacacaagaggaaaccagacatcacaaaggccaaagagcttcttggttgggaaccaaaggtggctctacgccaaggactcccacttatggtcaaagatttccgtcaacgtgtctttggcgaccaaaagcaggattcttccaccacttcatcatcaacagagtaactgtcgctggagattctcgtttctcttcgttttcatttttaattttgatatttctattcctgtcaatgtagtgatattgaaacctccccgattttaaagttttattttttttaatgcaatcaccgtagttttgagcttgg

SEQ ID NO: 46333 - protein, 443 aa, Arabidopsis thaliana
  peptide (1)..(443): Ceres Seq. ID no. 13578623
MASELTNRRHEIEQPEAESYYPKPIKPWFVAIRPIRYMLREQRLVFVLVGIAIATLGFTIFSKSSNHQPIPYDVDPLSGYGMRSESSYLPATIHKKPSIEYMSRIGSAGGKIPLGLKRKVLRVVVTGGAGFVGSHLVDRLMARGDNVIVVDNFFTGRKENVMHHFNNPNFEMIRHDVVEPILLEVDQIYHLACPASPVHYKFNPVKTIKTNVVGTLNMLGLAKRVGARFLLTSTSEVYGDPLQHPQVETYWGNVNPIGVRSCYDEGKRTAETLTMDYHRGANVEVRIARIFNTYGPRMCIDDGRVVSNFVAQALRKEPLTVYGDGKQTRSFQFVSDLVEGLMRLMEGEHVGPFNLGNPGEFTMLELAKVVQETIDPNAKIEFRPNTEDDPHKRKPDITKAKELLGWEPKVALRQGLPLMVKDFRQRVFGDQKQDSSTTSSSTE

SEQ ID NO: 46334 - protein, 406 aa, Arabidopsis thaliana
  peptide (1)..(406): Ceres Seq. ID no. 13578624
MLREQRLVFVLVGIAIATLGFTIFSKSSNHQPIPYDVDPLSGYGMRSESSYLPATIHKKPSIEYMSRIGSAGGKIPLGLKRKVLRVVVTGGAGFVGSHLVDRLMARGDNVIVVDNFFTGRKENVMHHFNNPNFEMIRHDVVEPILLEVDQIYHLACPASPVHYKFNPVKTIKTNVVGTLNMLGLAKRVGARFLLTSTSEVYGDPLQHPQVETYWGNVNPIGVRSCYDEGKRTAETLTMDYHRGANVEVRIARIFNTYGPRMCIDDGRVVSNFVAQALRKEPLTVYGDGKQTRSFQFVSDLVEGLMRLMEGEHVGPFNLGNPGEFTMLELAKVVQETIDPNAKIEFRPNTEDDPHKRKPDITKAKELLGWEPKVALRQGLPLMVKDFRQRVFGDQKQDSSTTSSSTE

SEQ ID NO: 46335 - protein, 362 aa, Arabidopsis thaliana
  peptide (1)..(362): Ceres Seq. ID no. 13578625
MRSESSYLPATIHKKPSIEYMSRIGSAGGKIPLGLKRKVLRVVVTGGAGFVGSHLVDRLMARGDNVIVVDNFFTGRKENVMHHFNNPNFEMIRHDVVEPILLEVDQIYHLACPASPVHYKFNPVKTIKTNVVGTLNMLGLAKRVGARFLLTSTSEVYGDPLQHPQVETYWGNVNPIGVRSCYDEGKRTAETLTMDYHRGANVEVRIARIFNTYGPRMCIDDGRVVSNFVAQALRKEPLTVYGDGKQTRSFQFVSDLVEGLMRLMEGEHVGPFNLGNPGEFTMLELAKVVQETIDPNAKIEFRPNTEDDPHKRKPDITKAKELLGWEPKVALRQGLPLMVKDFRQRVFGDQKQDSSTTSSSTE

SEQ ID NO: 46336 - DNA, 1312 bp, Arabidopsis thaliana
  misc_feature (1)..(1312): Ceres Seq. ID no. 12574614
  misc_feature (1)..(1312): Ortholog of  Ceres SEQ ID NO 12636774 as cited in SEQ ID NO 372
  misc_feature (1)..(1312): Ortholog of  Ceres SEQ ID NO 12578315 as cited in SEQ ID NO 62451
  misc_feature (1)..(1312): Ortholog of  Ceres SEQ ID NO 12615466 as cited in SEQ ID NO 62761
  misc_feature (1)..(1312): Ortholog of  Ceres SEQ ID NO 13597295 as cited in SEQ ID NO 63743
  misc_feature (1)..(1312): Ortholog of  Ceres SEQ ID NO 12617090 as cited in SEQ ID NO 64005
  misc_feature (1)..(1312): Ortholog of  Ceres SEQ ID NO 13597439 as cited in SEQ ID NO 64081
  misc_feature (1)..(1312): Ortholog of  Ceres SEQ ID NO 13597233 as cited in SEQ ID NO 64370
  misc_feature (1)..(1312): Ortholog of  Ceres SEQ ID NO 13584577 as cited in SEQ ID NO 65298
  misc_feature (1)..(1312): Ortholog of  Ceres SEQ ID NO 13599438 as cited in SEQ ID NO 0
gtttttgatttgagaaacaaaaacgatggagatgatgaagattgatcctttattcgatcgtgccagtgagcttaaagctttcgatgaaacgaaaacgggtgtgaaaggactcgtcgactccggagtttcacaagttccacgcatctttcatcatccaactgtcaaattatcaaccccaaaaccacttccctcggacctgctacatctcaagacgatcccaacgatcgatctcggaggacgggacttccaggacgcgattaagcgcaataacgcgattgaagagattaaagaagcagcagcgaagtggggtttcttccaggtgatcaaccatggagtttcgcttgaacttcttgagaagatgaaaaaaggagttcgtgacttccacgagcaatcacaagaagtgaggaaagaattctacagtcgcgatttcagcagaaggtttctgtatttaagtaatttcgatctctttagttctccagcagcaaattggagagacactttctcttgtaccatggctccagatactccaaaaccacaggatcttccggagatttgtagggatattatgatggaatattcaaagcaagtgatgaatttgggtaaatttctcttcgagcttttatcagaagctctagggttggaacctaatcacctcaatgacatggattgctctaagggtttgctcatgctctcccactactacccaccgtgtccagagcctgacctaactttaggcacaagtcagcactccgacaactcttttctcactgtccttcttcccgatcagatcgaagggcttcaggttcgtcgtgaagggcactggttcgatgttcctcatgtttccggcgctctcatcatcaacatcggagatcttttacagcttataacaaacgacaaattcatcagtttggagcacagagtattggcgaacagagcaacaagagctcgagtgtctgtcgcatgtttctttaccactggagtaagaccgaatcctagaatgtacggaccgattagagagcttgtgtctgaagaaaatcctccaaagtacagagagaccacaattaaagactacgctacttacttcaatgccaaaggacttgacgggacctctgctttgctccattttaagatatgaaacatggtgagctactactgtctcacacatatacgacatgacaatatatgtaataattcatttgcagattaaaattacttcagaaaagatcaaaagagtgctggtgaagaaaattctcaagaggttcataaacatatcactgttgatactttattttttaatactatctttaaagct

SEQ ID NO: 46337 - protein, 369 aa, Arabidopsis thaliana
  peptide (1)..(369): Ceres Seq. ID no. 12574615
MEMMKIDPLFDRASELKAFDETKTGVKGLVDSGVSQVPRIFHHPTVKLSTPKPLPSDLLHLKTIPTIDLGGRDFQDAIKRNNAIEEIKEAAAKWGFFQVINHGVSLELLEKMKKGVRDFHEQSQEVRKEFYSRDFSRRFLYLSNFDLFSSPAANWRDTFSCTMAPDTPKPQDLPEICRDIMMEYSKQVMNLGKFLFELLSEALGLEPNHLNDMDCSKGLLMLSHYYPPCPEPDLTLGTSQHSDNSFLTVLLPDQIEGLQVRREGHWFDVPHVSGALIINIGDLLQLITNDKFISLEHRVLANRATRARVSVACFFTTGVRPNPRMYGPIRELVSEENPPKYRETTIKDYATYFNAKGLDGTSALLHFKI

SEQ ID NO: 46338 - protein, 367 aa, Arabidopsis thaliana
  peptide (1)..(367): Ceres Seq. ID no. 12574616
MMKIDPLFDRASELKAFDETKTGVKGLVDSGVSQVPRIFHHPTVKLSTPKPLPSDLLHLKTIPTIDLGGRDFQDAIKRNNAIEEIKEAAAKWGFFQVINHGVSLELLEKMKKGVRDFHEQSQEVRKEFYSRDFSRRFLYLSNFDLFSSPAANWRDTFSCTMAPDTPKPQDLPEICRDIMMEYSKQVMNLGKFLFELLSEALGLEPNHLNDMDCSKGLLMLSHYYPPCPEPDLTLGTSQHSDNSFLTVLLPDQIEGLQVRREGHWFDVPHVSGALIINIGDLLQLITNDKFISLEHRVLANRATRARVSVACFFTTGVRPNPRMYGPIRELVSEENPPKYRETTIKDYATYFNAKGLDGTSALLHFKI

SEQ ID NO: 46339 - protein, 366 aa, Arabidopsis thaliana
  peptide (1)..(366): Ceres Seq. ID no. 12574617
MKIDPLFDRASELKAFDETKTGVKGLVDSGVSQVPRIFHHPTVKLSTPKPLPSDLLHLKTIPTIDLGGRDFQDAIKRNNAIEEIKEAAAKWGFFQVINHGVSLELLEKMKKGVRDFHEQSQEVRKEFYSRDFSRRFLYLSNFDLFSSPAANWRDTFSCTMAPDTPKPQDLPEICRDIMMEYSKQVMNLGKFLFELLSEALGLEPNHLNDMDCSKGLLMLSHYYPPCPEPDLTLGTSQHSDNSFLTVLLPDQIEGLQVRREGHWFDVPHVSGALIINIGDLLQLITNDKFISLEHRVLANRATRARVSVACFFTTGVRPNPRMYGPIRELVSEENPPKYRETTIKDYATYFNAKGLDGTSALLHFKI

SEQ ID NO: 46340 - DNA, 1219 bp, Arabidopsis thaliana
  misc_feature (1)..(1219): Ceres Seq. ID no. 13591899
  misc_feature (1)..(1219): Ortholog of  Ceres SEQ ID NO 15176333 as cited in SEQ ID NO 52787
  misc_feature (1)..(1219): Ortholog of  Ceres SEQ ID NO 14303479 as cited in SEQ ID NO 54254
  misc_feature (1)..(1219): Ortholog of  Ceres SEQ ID NO 14312047 as cited in SEQ ID NO 55656
  misc_feature (1)..(1219): Ortholog of  Ceres SEQ ID NO 13660872 as cited in SEQ ID NO 60830
  misc_feature (1)..(1219): Ortholog of  Ceres SEQ ID NO 12616221 as cited in SEQ ID NO 63291
  misc_feature (1)..(1219): Ortholog of  Ceres SEQ ID NO 14302355 as cited in SEQ ID NO 65830
aaaacattattgtcaaaaataagaaagaaagaaaaaaatatgggtatccaagaaactgacccgttaacgcaattgagtttaccaccgggtttccgattttacccgaccgatgaagagcttatggttcaatatctctgtagaaaagcagctggttacgatttctctcttcagctcatcgccgaaatagatctttacaaattcgatccatgggttttaccaaataaagcattatttggagaaaaagaatggtatttttttagtcctagggatagaaaatatccaaacgggtcaagacctaaccgggttgccggatcgggttattggaaagctacgggtacggataaaataatctcgacggaaggacaaagagttggtattaaaaaagctttggtgttttacatcggaaaagctcctaaaggtactaaaaccaattggatcatgcatgagtatcgtctcattgaaccttctcgtagaaacggaagcactaagttggatgattgggttctatgtcgaatatacaagaagcaatcaagtgcacaaaaacaagtttacgataatggaatcgcgaatgctagagaattcagcaacaacggtacttcgtccacgacgtcgtcttcttctcactttgaagacgttcttgattcgtttcatcaagagatcgacaacagaaatttccagttttctaacccaaaccgcatctcgtcgctcagaccggacttaaccgaacagaaaaccgggttccacggtcttgcggatacttctaacttcgattgggctagttttgccggtaatgttgagcataataactcggtaccggaactcggaatgagtcatgttgttcctaatctcgagtacaactgtggctacctgaagacggaggaggaagtcgagagcagtcacgggtttaataactcgggcgagttagctcaaaagggttatggtgttgactcgtttgggtattcggggcaagttggtgggtttgggtttatgtgatgatgaaatgctgacgcaataaaaataagtcgttaatttttgtcccgtggcaaatcttatatgtatttgaatttcaattcttttgggttaagagggagactcatagatttagatgtagatttgtaatctttcatgcatagaaaatttgacgaatagatttcgtaactttattttgttgctgtttggttatctttgtattggtataaatttagtggattgaaattgc

SEQ ID NO: 46341 - protein, 330 aa, Arabidopsis thaliana
  peptide (1)..(330): Ceres Seq. ID no. 13591900
KTLLSKIRKKEKNMGIQETDPLTQLSLPPGFRFYPTDEELMVQYLCRKAAGYDFSLQLIAEIDLYKFDPWVLPNKALFGEKEWYFFSPRDRKYPNGSRPNRVAGSGYWKATGTDKIISTEGQRVGIKKALVFYIGKAPKGTKTNWIMHEYRLIEPSRRNGSTKLDDWVLCRIYKKQSSAQKQVYDNGIANAREFSNNGTSSTTSSSSHFEDVLDSFHQEIDNRNFQFSNPNRISSLRPDLTEQKTGFHGLADTSNFDWASFAGNVEHNNSVPELGMSHVVPNLEYNCGYLKTEEEVESSHGFNNSGELAQKGYGVDSFGYSGQVGGFGFM

SEQ ID NO: 46342 - protein, 317 aa, Arabidopsis thaliana
  peptide (1)..(317): Ceres Seq. ID no. 13591901
MGIQETDPLTQLSLPPGFRFYPTDEELMVQYLCRKAAGYDFSLQLIAEIDLYKFDPWVLPNKALFGEKEWYFFSPRDRKYPNGSRPNRVAGSGYWKATGTDKIISTEGQRVGIKKALVFYIGKAPKGTKTNWIMHEYRLIEPSRRNGSTKLDDWVLCRIYKKQSSAQKQVYDNGIANAREFSNNGTSSTTSSSSHFEDVLDSFHQEIDNRNFQFSNPNRISSLRPDLTEQKTGFHGLADTSNFDWASFAGNVEHNNSVPELGMSHVVPNLEYNCGYLKTEEEVESSHGFNNSGELAQKGYGVDSFGYSGQVGGFGFM

SEQ ID NO: 46343 - protein, 290 aa, Arabidopsis thaliana
  peptide (1)..(290): Ceres Seq. ID no. 13591902
MVQYLCRKAAGYDFSLQLIAEIDLYKFDPWVLPNKALFGEKEWYFFSPRDRKYPNGSRPNRVAGSGYWKATGTDKIISTEGQRVGIKKALVFYIGKAPKGTKTNWIMHEYRLIEPSRRNGSTKLDDWVLCRIYKKQSSAQKQVYDNGIANAREFSNNGTSSTTSSSSHFEDVLDSFHQEIDNRNFQFSNPNRISSLRPDLTEQKTGFHGLADTSNFDWASFAGNVEHNNSVPELGMSHVVPNLEYNCGYLKTEEEVESSHGFNNSGELAQKGYGVDSFGYSGQVGGFGFM

SEQ ID NO: 46344 - DNA, 1603 bp, Arabidopsis thaliana
  misc_feature (1)..(1603): Ceres Seq. ID no. 13578704
  misc_feature (1)..(1603): Ortholog of  Ceres SEQ ID NO 14315257 as cited in SEQ ID NO 52552
  misc_feature (1)..(1603): Ortholog of  Ceres SEQ ID NO 13597574 as cited in SEQ ID NO 64677
  misc_feature (1)..(1603): Ortholog of  Ceres SEQ ID NO 13597843 as cited in SEQ ID NO 64850
  misc_feature (1)..(1603): Ortholog of  Ceres SEQ ID NO 13597678 as cited in SEQ ID NO 65375
  misc_feature (1)..(1603): Ortholog of  Ceres SEQ ID NO 13662880 as cited in SEQ ID NO 65422
  misc_feature (1)..(1603): Ortholog of  Ceres SEQ ID NO 13596180 as cited in SEQ ID NO 67941
  misc_feature (1)..(1603): Ortholog of  Ceres SEQ ID NO 13591190 as cited in SEQ ID NO 68044
  misc_feature (1)..(1603): Ortholog of  Ceres SEQ ID NO 13595961 as cited in SEQ ID NO 68223
atggtgaaggaaacagagctaatcttcattccagttccatccacaggtcatattctcgtccatattgaattcgccaagcgtctcatcaatctcgaccatcggatccacaccatcactattctcaacttatcctcaccctcttctcctcacgcctccgtcttcgccagatctctcatcgcttcccagcccaaaatccgtctccacgaccttccccctatccaagatcctcctccattcgatctttaccaaagagctcccgaagcttacatagtaaaactcatcaagaaaaatactcctctgataaaagacgccgtctccagcatcgtcgcgtcgcgtcgtggaggctcagattcggttcaagtcgccggtttggttctcgatttattctgcaattcattggtaaaagatgttggcaacgagcttaatcttccttcttacatataccttacgtgtaacgctagatacttggggatgatgaaatatattccggatcggcatcggaaaatcgcatctgagttcgatttgagctccggcgatgaagaattgccggttccgggattcataaacgctattccgacgaaatttatgccgcctggattgttcaataaggaagcttacgaggcttacgtagagctagcgccgagattcgcagatgcgaagggtattttggttaattccttcacggagcttgagccgcacccgtttgactatttctctcacctggagaaattccctccggtttacccggtcggaccgattctcagcttgaaagatcgagcgagtccgaacgaagaagcagtcgatcgggatcagatcgttgggtggctcgatgatcagccggagtcatcggtggtgttcctctgtttcgggagcagaggaagcgttgatgagccgcaagtgaaggagatagctcgagctttggaactcgtcggctgcagatttctttggtcaattagaacaagcggcgacgtcgagacgaatcctaacgatgtgttgccggaggggttcatgggccgagtagcaggccgaggtttggtatgtggttgggctccacaagtggaagtgttggcccataaagcaataggaggatttgtgtctcactgtggttggaactccacgcttgaaagcttatggttcggggttcctgtcgcaacgtggccgatgtacgcagagcaacagcttaacgccttcacgctggtgaaagagcttgggcttgcggtggacctgcggatggattacgtgtcgagtcgtgggggtttggtgacttgtgatgagatagccagagccgtacgatctttgatggacggtggagatgagaagagaaaaaaggttaaggagatggctgatgcggcaaggaaggctttgatggatggaggatcgtcttctttggcaactgctcgattcatcgcagaattgtttgaagatggttcgtcgtgctaatgcaaatgttggtgcgataattcgtcatgcttacttatttgataccaaaaaagacacatgctaagtttttaaaactaaagatttttcttttcactacttaaacttatatgtacaagtgaaatactgtacttcaagaagcaaaaactatggcagtctttatggt

SEQ ID NO: 46345 - protein, 479 aa, Arabidopsis thaliana
  peptide (1)..(479): Ceres Seq. ID no. 13578705
MVKETELIFIPVPSTGHILVHIEFAKRLINLDHRIHTITILNLSSPSSPHASVFARSLIASQPKIRLHDLPPIQDPPPFDLYQRAPEAYIVKLIKKNTPLIKDAVSSIVASRRGGSDSVQVAGLVLDLFCNSLVKDVGNELNLPSYIYLTCNARYLGMMKYIPDRHRKIASEFDLSSGDEELPVPGFINAIPTKFMPPGLFNKEAYEAYVELAPRFADAKGILVNSFTELEPHPFDYFSHLEKFPPVYPVGPILSLKDRASPNEEAVDRDQIVGWLDDQPESSVVFLCFGSRGSVDEPQVKEIARALELVGCRFLWSIRTSGDVETNPNDVLPEGFMGRVAGRGLVCGWAPQVEVLAHKAIGGFVSHCGWNSTLESLWFGVPVATWPMYAEQQLNAFTLVKELGLAVDLRMDYVSSRGGLVTCDEIARAVRSLMDGGDEKRKKVKEMADAARKALMDGGSSSLATARFIAELFEDGSSC

SEQ ID NO: 46346 - protein, 322 aa, Arabidopsis thaliana
  peptide (1)..(322): Ceres Seq. ID no. 13578706
MMKYIPDRHRKIASEFDLSSGDEELPVPGFINAIPTKFMPPGLFNKEAYEAYVELAPRFADAKGILVNSFTELEPHPFDYFSHLEKFPPVYPVGPILSLKDRASPNEEAVDRDQIVGWLDDQPESSVVFLCFGSRGSVDEPQVKEIARALELVGCRFLWSIRTSGDVETNPNDVLPEGFMGRVAGRGLVCGWAPQVEVLAHKAIGGFVSHCGWNSTLESLWFGVPVATWPMYAEQQLNAFTLVKELGLAVDLRMDYVSSRGGLVTCDEIARAVRSLMDGGDEKRKKVKEMADAARKALMDGGSSSLATARFIAELFEDGSSC

SEQ ID NO: 46347 - protein, 321 aa, Arabidopsis thaliana
  peptide (1)..(321): Ceres Seq. ID no. 13578707
MKYIPDRHRKIASEFDLSSGDEELPVPGFINAIPTKFMPPGLFNKEAYEAYVELAPRFADAKGILVNSFTELEPHPFDYFSHLEKFPPVYPVGPILSLKDRASPNEEAVDRDQIVGWLDDQPESSVVFLCFGSRGSVDEPQVKEIARALELVGCRFLWSIRTSGDVETNPNDVLPEGFMGRVAGRGLVCGWAPQVEVLAHKAIGGFVSHCGWNSTLESLWFGVPVATWPMYAEQQLNAFTLVKELGLAVDLRMDYVSSRGGLVTCDEIARAVRSLMDGGDEKRKKVKEMADAARKALMDGGSSSLATARFIAELFEDGSSC

SEQ ID NO: 46348 - DNA, 1556 bp, Arabidopsis thaliana
  misc_feature (1)..(1556): Ceres Seq. ID no. 15168943
  misc_feature (1)..(1556): Ortholog of  Ceres SEQ ID NO 15175898 as cited in SEQ ID NO 57344
gatcacaacaaatcaaaaactccaagttcttacctttttcccatttacaatcagtaaatttctccgatcacgagatacaaatttcactttctgatatcttggatcttccgatcactttgaattttttggtttgttgatttttttttttttttttgttccataaagttcgaattttttatagagaagaaaccatgaatgctttagctgcaacaaacagaaacttccgtcatgcatctcgaatcctgggtttggattcgaagatcgagagaagtcttatgatcccatttagagaaatcaaggttgagtgtacgattcctaaagacgatggcactctggtttcatacatcggatttagggttcaacatgacaatgctcgtggacccatgaaaggtggaatcagatatcatcctgaggttgatccagatgaagttaacgcactagctcagctgatgacttggaagactgctgtagcagatattccatatggtggtgctaaaggtggaattggatgtagtcctcgtgacttgagtttgagcgagcttgagaggttgactcgtgtgtttacacagaagattcatgatcttatcggtattcataccgatgtgcctgctcctgatatgggcactaacgctcaaaccatggcttggattcttgatgagtactccaagtttcatggtcattcccctgctgttgtcactggaaagcccattgatcttggtggttcattaggtagggaagctgccacaggtcgtggtgtagtatttgccaccgaagctcttcttgctgagtacgggaaatcgattcagggtttgacatttgttattcagggttttgggaatgttggaacatgggctgcgaagctgatccacgagaaaggcggtaaagtggttgcagtaagcgacattactggtgcaatcaggaaccttgaaggtatcgacatcaacgctctcataaaacacaaggacgcaactggaagtctcaatgatttcaatggtggagacgctatgaattcagatgaattgctcattcatgagtgtgatgttctcattccatgcgctcttggtggtgtcctgaacaaggaaaatgctggagatgtgaaggcaaagtttatagtagaggcagctaaccatccaacagatccagatgctgatgagattctgtcgaagaaaggagtgattatacttccagatatctacgcaaacgcaggaggagtgacagtgagttacttcgagtgggtgcagaacattcaaggattcatgtgggaagaggaaaaagtgaacttggagctgcaaaaatacatgactcgagcctttcacaacatcaagacaatgtgccatactcattcttgcaacctccgtatgggagctttcactcttggagttaaccgagtcgctcgagccacccagttgcgtggttgggaagcttaattcagttgaatcccccttatatactctgtttcttgcttgctctgttttccatttttttttttttttttggtttcattgttactgaaaatcattgagctttccgaaatggaaaaggaaacaaatggattg

SEQ ID NO: 46349 - protein, 411 aa, Arabidopsis thaliana
  peptide (1)..(411): Ceres Seq. ID no. 15168944
MNALAATNRNFRHASRILGLDSKIERSLMIPFREIKVECTIPKDDGTLVSYIGFRVQHDNARGPMKGGIRYHPEVDPDEVNALAQLMTWKTAVADIPYGGAKGGIGCSPRDLSLSELERLTRVFTQKIHDLIGIHTDVPAPDMGTNAQTMAWILDEYSKFHGHSPAVVTGKPIDLGGSLGREAATGRGVVFATEALLAEYGKSIQGLTFVIQGFGNVGTWAAKLIHEKGGKVVAVSDITGAIRNLEGIDINALIKHKDATGSLNDFNGGDAMNSDELLIHECDVLIPCALGGVLNKENAGDVKAKFIVEAANHPTDPDADEILSKKGVIILPDIYANAGGVTVSYFEWVQNIQGFMWEEEKVNLELQKYMTRAFHNIKTMCHTHSCNLRMGAFTLGVNRVARATQLRGWEA

SEQ ID NO: 46350 - protein, 383 aa, Arabidopsis thaliana
  peptide (1)..(383): Ceres Seq. ID no. 15168945
MIPFREIKVECTIPKDDGTLVSYIGFRVQHDNARGPMKGGIRYHPEVDPDEVNALAQLMTWKTAVADIPYGGAKGGIGCSPRDLSLSELERLTRVFTQKIHDLIGIHTDVPAPDMGTNAQTMAWILDEYSKFHGHSPAVVTGKPIDLGGSLGREAATGRGVVFATEALLAEYGKSIQGLTFVIQGFGNVGTWAAKLIHEKGGKVVAVSDITGAIRNLEGIDINALIKHKDATGSLNDFNGGDAMNSDELLIHECDVLIPCALGGVLNKENAGDVKAKFIVEAANHPTDPDADEILSKKGVIILPDIYANAGGVTVSYFEWVQNIQGFMWEEEKVNLELQKYMTRAFHNIKTMCHTHSCNLRMGAFTLGVNRVARATQLRGWEA

SEQ ID NO: 46351 - protein, 347 aa, Arabidopsis thaliana
  peptide (1)..(347): Ceres Seq. ID no. 15168946
MKGGIRYHPEVDPDEVNALAQLMTWKTAVADIPYGGAKGGIGCSPRDLSLSELERLTRVFTQKIHDLIGIHTDVPAPDMGTNAQTMAWILDEYSKFHGHSPAVVTGKPIDLGGSLGREAATGRGVVFATEALLAEYGKSIQGLTFVIQGFGNVGTWAAKLIHEKGGKVVAVSDITGAIRNLEGIDINALIKHKDATGSLNDFNGGDAMNSDELLIHECDVLIPCALGGVLNKENAGDVKAKFIVEAANHPTDPDADEILSKKGVIILPDIYANAGGVTVSYFEWVQNIQGFMWEEEKVNLELQKYMTRAFHNIKTMCHTHSCNLRMGAFTLGVNRVARATQLRGWEA

SEQ ID NO: 46352 - DNA, 1809 bp, Arabidopsis thaliana; identical to SEQ ID NO: 23714
  misc_feature (1)..(1809): Ceres Seq. ID no. 13591810
  misc_feature (1)..(1809): Ortholog of  Ceres SEQ ID NO 13600220 as cited in SEQ ID NO 0

SEQ ID NO: 46353 - protein, 541 aa, Arabidopsis thaliana; identical to SEQ ID NO: 23715
  peptide (1)..(541): Ceres Seq. ID no. 13591811

SEQ ID NO: 46354 - protein, 537 aa, Arabidopsis thaliana; identical to SEQ ID NO: 23716
  peptide (1)..(537): Ceres Seq. ID no. 13591812

SEQ ID NO: 46355 - protein, 438 aa, Arabidopsis thaliana; identical to SEQ ID NO: 23717
  peptide (1)..(438): Ceres Seq. ID no. 13591813

SEQ ID NO: 46356 - DNA, 2829 bp, Arabidopsis thaliana
  misc_feature (1)..(2829): Ceres Seq. ID no. 12574769
  misc_feature (1)..(2829): Ortholog of  Ceres SEQ ID NO 15170741 as cited in SEQ ID NO 58530
agaagctgaatcagaagagtttttttttgcttcaaaaggagctccggcgaaacttccggagatattaacacttactctgacgagtttttgtctcgtcttacgtctttgctgctgctgttgatggaacttgacgacttggatctcagcggttcttggccgttagatcagatcacttttgcttcaaatttcaagtctcctgtcattttctcttcctccgaacaacctttctctcctctctggtccttctccgaaacttctggagatgtcggcggcgagctttactccgccgcagtagctcccactcgcttcaccgattattccgtcttactcgctagttctgaatctgaaaccacgaccaaggagaataatcaggttccttctccgtcatggggtataatgcctttggagaatccagatagttactgtgccatcaaagccaagatgactcaagcgcttagatacttcaaggaatctactggacaacaacatgttcttgctcaggtttgggcgcctgtcaaaaaccgtggtcgatatgttcttacaacttcaggacagccatttgttcttggtcccaatagtaatggccttaatcaatacaggatggtttcattgacgtatatgttttcccttgatggtgaacgggacggagagctcgggcttcctggtcgcgttttcaggaaaaagttacctgagtggactcctaatgtgcagtattactccagcaaagagttttcaaggcttggtcacgccttgcactataatgttcagggaactttggctttgcctgtttttgaaccatccaggcaactctgtgtaggagttgtcgagcttattatgacttctccgaagattaactatgctcctgaggttgaaaaagtttgtaaagcgcttgaggccgtgaatctgaaaacttcggaaatattgaaccacgagactactcagatctgcaacgagggtcgccaaaatgcgttagctgagattttggagatactgacagtggtgtgcgagacctacaaactgcctttagcccagacatgggtcccttgcaggcatcgcagtgttctagcctttggaggtggttttaagaaaagctgttcgagcttcgatggaagctgtatggggaaagtctgtatgtctactagtgatttagcggtttatgttgttgatgctcatgtttggggtttccgagacgcctgtgctgaacaccatctgcagaagggacaaggtgttgctgggagggcgtttcagtctggaaatctatgcttctgtagagatgttactcggttctgcaaaaccgactacccattagtacactatgcacggatgttcaagttgacgagctgtttcgcggtctgcttaaagagcacatatacaggggatgatgagtacgttcttgaattctttcttcctccagccatcacagacaagagtgagcaagattgtctattgggttctctgcttcagacaatgaagcagcactattcgagtctcaaggttgtctctgaaactgaactctgtgaaaacaacatgtctcttgaagtcgtggaagcttcggaggacggaatggtttactcgaaacttgaaccaatcaggatacatcatccagcacaaatctctaaggattaccttgagctcaacgcacccgaacagaaggtgagcttaaactctgactttatggagaataatgaagttgatgatggggttgagaggttccaaacgcttgatcctataccagaggccaaaacagtgaaaaaatcagaaaggaagcgtgggaaaacagagaaaacgatcagtctagaagtgcttcaacaatattttgctggtagtctaaaagatgcagcaaagagcctcggagtttgcccaacaacaatgaaacgcatttgccgacaacacgggatctcacggtggccatctcgaaaaatcaacaaggtgaaccgatctctcacacgacttaaacatgttatagactcggttcaaggtgctgatggatcactcaacttgacgtccctctctcctcgcccttggcctcaccaaatccctccaatcgatatccaattagcaaagaactgccctccaacttctacatctcccctaagtaatctccaagatgtcaaaatcgaaaacagagatgcagaagacagtgcaggttcatcaacatcgcgtgcttcttgcaaagtgaatcctatttgcgagacgcgttttcggcttcctacacacaaccaagaaccatccagacaagtggccttggacgattcggatagtagctctaaaaacatgacaaatttttgggcacacttaacctgccaagatacagcttctccaacaattctccaacataagctcgtgagtataaaggcaacgtacagagaagacatcatcaggttcaagatctcaccagagtcggtaagcattacggaacttaagcagcaagtggccaaaaggctgaagctcgaaacggcagcctttgagctcaagtatctagacgacgatagagaatgggtctccgtctcatgcgatgctgacctcagcgaatgcctcgacacgtctgcagcaaaagcgaacacactgaggctctcagtacatgacgtgacttttaactttgggagctcatgcgaaagctcagaggaaactatgatgtgcttgtgacaatgcttcacttgtatacaactttcttgtatggatctgagagttttgtttcttatttttctctggaaacatgtcttctttagaagaaggttttagtgttctatttttttataagatgtataaaagcacacttctccacatcaatagatgttgattggaataatgatatataattgttattat

SEQ ID NO: 46357 - protein, 841 aa, Arabidopsis thaliana
  peptide (1)..(841): Ceres Seq. ID no. 12574770
MELDDLDLSGSWPLDQITFASNFKSPVIFSSSEQPFSPLWSFSETSGDVGGELYSAAVAPTRFTDYSVLLASSESETTTKENNQVPSPSWGIMPLENPDSYCAIKAKMTQALRYFKESTGQQHVLAQVWAPVKNRGRYVLTTSGQPFVLGPNSNGLNQYRMVSLTYMFSLDGERDGELGLPGRVFRKKLPEWTPNVQYYSSKEFSRLGHALHYNVQGTLALPVFEPSRQLCVGVVELIMTSPKINYAPEVEKVCKALEAVNLKTSEILNHETTQICNEGRQNALAEILEILTVVCETYKLPLAQTWVPCRHRSVLAFGGGFKKSCSSFDGSCMGKVCMSTSDLAVYVVDAHVWGFRDACAEHHLQKGQGVAGRAFQSGNLCFCRDVTRFCKTDYPLVHYARMFKLTSCFAVCLKSTYTGDDEYVLEFFLPPAITDKSEQDCLLGSLLQTMKQHYSSLKVVSETELCENNMSLEVVEASEDGMVYSKLEPIRIHHPAQISKDYLELNAPEQKVSLNSDFMENNEVDDGVERFQTLDPIPEAKTVKKSERKRGKTEKTISLEVLQQYFAGSLKDAAKSLGVCPTTMKRICRQHGISRWPSRKINKVNRSLTRLKHVIDSVQGADGSLNLTSLSPRPWPHQIPPIDIQLAKNCPPTSTSPLSNLQDVKIENRDAEDSAGSSTSRASCKVNPICETRFRLPTHNQEPSRQVALDDSDSSSKNMTNFWAHLTCQDTASPTILQHKLVSIKATYREDIIRFKISPESVSITELKQQVAKRLKLETAAFELKYLDDDREWVSVSCDADLSECLDTSAAKANTLRLSVHDVTFNFGSSCESSEETMMCL

SEQ ID NO: 46358 - protein, 749 aa, Arabidopsis thaliana
  peptide (1)..(749): Ceres Seq. ID no. 12574771
MPLENPDSYCAIKAKMTQALRYFKESTGQQHVLAQVWAPVKNRGRYVLTTSGQPFVLGPNSNGLNQYRMVSLTYMFSLDGERDGELGLPGRVFRKKLPEWTPNVQYYSSKEFSRLGHALHYNVQGTLALPVFEPSRQLCVGVVELIMTSPKINYAPEVEKVCKALEAVNLKTSEILNHETTQICNEGRQNALAEILEILTVVCETYKLPLAQTWVPCRHRSVLAFGGGFKKSCSSFDGSCMGKVCMSTSDLAVYVVDAHVWGFRDACAEHHLQKGQGVAGRAFQSGNLCFCRDVTRFCKTDYPLVHYARMFKLTSCFAVCLKSTYTGDDEYVLEFFLPPAITDKSEQDCLLGSLLQTMKQHYSSLKVVSETELCENNMSLEVVEASEDGMVYSKLEPIRIHHPAQISKDYLELNAPEQKVSLNSDFMENNEVDDGVERFQTLDPIPEAKTVKKSERKRGKTEKTISLEVLQQYFAGSLKDAAKSLGVCPTTMKRICRQHGISRWPSRKINKVNRSLTRLKHVIDSVQGADGSLNLTSLSPRPWPHQIPPIDIQLAKNCPPTSTSPLSNLQDVKIENRDAEDSAGSSTSRASCKVNPICETRFRLPTHNQEPSRQVALDDSDSSSKNMTNFWAHLTCQDTASPTILQHKLVSIKATYREDIIRFKISPESVSITELKQQVAKRLKLETAAFELKYLDDDREWVSVSCDADLSECLDTSAAKANTLRLSVHDVTFNFGSSCESSEETMMCL

SEQ ID NO: 46359 - protein, 734 aa, Arabidopsis thaliana
  peptide (1)..(734): Ceres Seq. ID no. 12574772
MTQALRYFKESTGQQHVLAQVWAPVKNRGRYVLTTSGQPFVLGPNSNGLNQYRMVSLTYMFSLDGERDGELGLPGRVFRKKLPEWTPNVQYYSSKEFSRLGHALHYNVQGTLALPVFEPSRQLCVGVVELIMTSPKINYAPEVEKVCKALEAVNLKTSEILNHETTQICNEGRQNALAEILEILTVVCETYKLPLAQTWVPCRHRSVLAFGGGFKKSCSSFDGSCMGKVCMSTSDLAVYVVDAHVWGFRDACAEHHLQKGQGVAGRAFQSGNLCFCRDVTRFCKTDYPLVHYARMFKLTSCFAVCLKSTYTGDDEYVLEFFLPPAITDKSEQDCLLGSLLQTMKQHYSSLKVVSETELCENNMSLEVVEASEDGMVYSKLEPIRIHHPAQISKDYLELNAPEQKVSLNSDFMENNEVDDGVERFQTLDPIPEAKTVKKSERKRGKTEKTISLEVLQQYFAGSLKDAAKSLGVCPTTMKRICRQHGISRWPSRKINKVNRSLTRLKHVIDSVQGADGSLNLTSLSPRPWPHQIPPIDIQLAKNCPPTSTSPLSNLQDVKIENRDAEDSAGSSTSRASCKVNPICETRFRLPTHNQEPSRQVALDDSDSSSKNMTNFWAHLTCQDTASPTILQHKLVSIKATYREDIIRFKISPESVSITELKQQVAKRLKLETAAFELKYLDDDREWVSVSCDADLSECLDTSAAKANTLRLSVHDVTFNFGSSCESSEETMMCL

SEQ ID NO: 46360 - DNA, 2389 bp, Arabidopsis thaliana
  misc_feature (1)..(2389): Ceres Seq. ID no. 15168896
  misc_feature (1)..(2389): Ortholog of  Ceres SEQ ID NO 14315862 as cited in SEQ ID NO 60207
  misc_feature (1)..(2389): Ortholog of  Ceres SEQ ID NO 13660129 as cited in SEQ ID NO 67547
ggtgacactctttgatacagacttcaatgtttaagttatggccgatcatttgattctttctcttcaagctcctccttttctcatcttcccttgttctcttcaccgttcatggagatttcccggtggaatcagatattccgttcctgagttccgattgtcctctcagctacagttggctaattccatttcaccttcaaagtcttcagcttcctcttcttctccaccggagaattctgctccagagaagttcgatctcgtgtccagcactcagcttaaagatggaagtcatgtctttcggttcggggatgcaagtgagattgagaaatatctcgaggctgaagaaaaagcgagatgtgttgaggtagaaacgcaaaatgctaagattgctgaagaagccagtgaagtttcaaggaaacaaaagaaattggtcagttctattattgaaacaagtactgagaaagaggaaacagctgctccttccgatcttagcaatgtcattaaaataaaggatcgtaaaagggttcgttctcctactaagaagaagaaagaaactgtgaatgtatcacggagcgaagataaaattgatgccaagagtgctagtgtttccaatctgagctccatagttagtgtagcagaagctattccaattagctctactgaagaagaagctgttgttgagaaggaaatcacggctaagtcatataatgtagagcctctttcttctgaagccatgaagaaagtttctgtcaataaaataggagactgtgagacaaatggttatcaagagaatcgtatggaggttcaggcaagaccgtcattgtctacacaacaggaaattacgcctgtatccaccattgaaattgatgacaatttggatgtgacggaaaagcctattgaagctgaggagaatcttgtcgcggaaccaacagctacagatgatttgtctcctgatgaactcctttcaacttcagaagcaacacatcgcagcgttgatgagattgctcaaaaacctgtaattgatacgtctgaggaaaaccttctgaacacttttgaagctgaggagaatcctgtagttgaaccaacagctacagctgctgtctcttctgatgaactcatttcaacttcagaagcaacacgtcacagcgttgatgagatcgctcaaaagcctattattgatacgtctgagaaaaaccctatggaaacttttgttgaaccagaagcagtgcatagtagcgttgacgagagcattgaaaagcttgtagttgttacgtctgatgtggaaaatgatggagaaaatgtagcttcaaccacagaagatgaaataactgtgagggacacaataactgatagtggtagcatatccaataatgatgacacaaaagtggaagatctccaacttcctgtacctgaaacggccagtcttgaacccattaaagcggcttctggcagggaagaacttgtgtccaaagcattttacttggactctggttttgcttcactccaaagcccctttaaggcattggcaggtcgggaagatgcttattttatctctcaccacaattggataggtattgctgatggagtctctcagtggtcatttgaaggaatcaataagggaatgtatgctcaagaactcatgagcaactgtgaaaagattatttccaatgaaactgctaagataagtgacccagttcaagttctccatagaagtgtcaatgagactaagtcctctggatcatcaacagccttaattgctcatcttgacaataatgaactccacatagccaatattggagattcgggattcatggtcattagggatggcacagtattgcagaattcgtctccaatgtttcatcatttttgttttcccttgcatattacgcaaggctgtgatgtcctaaaacttgcagaggtttaccatgtgaacctggaagaaggcgatgttgtcatcgcagcaactgatgggctctttgataacttatacgaaaaagaaatcgtttcaatagtttgcgggtcactgaaacagagtctggaacctcagaaaatagcagagttggtagctgcaaaagcacaagaagtaggacgatctaagacagagagaacgccaattgctgacgcagctaaagaagaaggatacaatggacacaaaggtggtaaacttgatgctgttaccgtcaacatttcattcgtgaaaattgtctctacataaatatgcatcttcctattaattgtaaataatggagagagccgcacacattcacaacaccattctagtttttccaaaaatttcattgaaacgatgtacactggagtaagtttgcattcctgagctatatatgtgagccggatcagtcctggatctgacccgatatccagtttccgaccc

SEQ ID NO: 46361 - protein, 724 aa, Arabidopsis thaliana
  peptide (1)..(724): Ceres Seq. ID no. 15168897
MADHLILSLQAPPFLIFPCSLHRSWRFPGGIRYSVPEFRLSSQLQLANSISPSKSSASSSSPPENSAPEKFDLVSSTQLKDGSHVFRFGDASEIEKYLEAEEKARCVEVETQNAKIAEEASEVSRKQKKLVSSIIETSTEKEETAAPSDLSNVIKIKDRKRVRSPTKKKKETVNVSRSEDKIDAKSASVSNLSSIVSVAEAIPISSTEEEAVVEKEITAKSYNVEPLSSEAMKKVSVNKIGDCETNGYQENRMEVQARPSLSTQQEITPVSTIEIDDNLDVTEKPIEAEENLVAEPTATDDLSPDELLSTSEATHRSVDEIAQKPVIDTSEENLLNTFEAEENPVVEPTATAAVSSDELISTSEATRHSVDEIAQKPIIDTSEKNPMETFVEPEAVHSSVDESIEKLVVVTSDVENDGENVASTTEDEITVRDTITDSGSISNNDDTKVEDLQLPVPETASLEPIKAASGREELVSKAFYLDSGFASLQSPFKALAGREDAYFISHHNWIGIADGVSQWSFEGINKGMYAQELMSNCEKIISNETAKISDPVQVLHRSVNETKSSGSSTALIAHLDNNELHIANIGDSGFMVIRDGTVLQNSSPMFHHFCFPLHITQGCDVLKLAEVYHVNLEEGDVVIAATDGLFDNLYEKEIVSIVCGSLKQSLEPQKIAELVAAKAQEVGRSKTERTPIADAAKEEGYNGHKGGKLDAVTVNISFVKIVST

SEQ ID NO: 46362 - protein, 493 aa, Arabidopsis thaliana
  peptide (1)..(493): Ceres Seq. ID no. 15168898
MKKVSVNKIGDCETNGYQENRMEVQARPSLSTQQEITPVSTIEIDDNLDVTEKPIEAEENLVAEPTATDDLSPDELLSTSEATHRSVDEIAQKPVIDTSEENLLNTFEAEENPVVEPTATAAVSSDELISTSEATRHSVDEIAQKPIIDTSEKNPMETFVEPEAVHSSVDESIEKLVVVTSDVENDGENVASTTEDEITVRDTITDSGSISNNDDTKVEDLQLPVPETASLEPIKAASGREELVSKAFYLDSGFASLQSPFKALAGREDAYFISHHNWIGIADGVSQWSFEGINKGMYAQELMSNCEKIISNETAKISDPVQVLHRSVNETKSSGSSTALIAHLDNNELHIANIGDSGFMVIRDGTVLQNSSPMFHHFCFPLHITQGCDVLKLAEVYHVNLEEGDVVIAATDGLFDNLYEKEIVSIVCGSLKQSLEPQKIAELVAAKAQEVGRSKTERTPIADAAKEEGYNGHKGGKLDAVTVNISFVKIVST

SEQ ID NO: 46363 - protein, 472 aa, Arabidopsis thaliana
  peptide (1)..(472): Ceres Seq. ID no. 15168899
MEVQARPSLSTQQEITPVSTIEIDDNLDVTEKPIEAEENLVAEPTATDDLSPDELLSTSEATHRSVDEIAQKPVIDTSEENLLNTFEAEENPVVEPTATAAVSSDELISTSEATRHSVDEIAQKPIIDTSEKNPMETFVEPEAVHSSVDESIEKLVVVTSDVENDGENVASTTEDEITVRDTITDSGSISNNDDTKVEDLQLPVPETASLEPIKAASGREELVSKAFYLDSGFASLQSPFKALAGREDAYFISHHNWIGIADGVSQWSFEGINKGMYAQELMSNCEKIISNETAKISDPVQVLHRSVNETKSSGSSTALIAHLDNNELHIANIGDSGFMVIRDGTVLQNSSPMFHHFCFPLHITQGCDVLKLAEVYHVNLEEGDVVIAATDGLFDNLYEKEIVSIVCGSLKQSLEPQKIAELVAAKAQEVGRSKTERTPIADAAKEEGYNGHKGGKLDAVTVNISFVKIVST

SEQ ID NO: 46364 - DNA, 664 bp, Arabidopsis thaliana
  misc_feature (1)..(664): Ceres Seq. ID no. 12600865
  misc_feature (1)..(664): Ortholog of  Ceres SEQ ID NO 13575779 as cited in SEQ ID NO 20515
ttcggcgatctagggttttagttgtcgcacgaggaggaaaaatgccagcgggtcatggagttcgggcgagaacgagggatctgttcgcgaggccattcaggaagaagggttacattccactctcgacttacctgagaaccttcaaggtcggcgattacgtcgatgtgaaggtgaatggtgcgatccacaagggtatgcctcacaagttctaccacggtcgtactggtcgtatctggaacgtcactaaacgcgccgtcggtgttgaagtcaacaaacagattggcaacaggatcataaggaagaggattcatgtgcgtgtggagcatgtgcagcaatcaagatgtgctgaggagttcaagctgaggaagaagaagaatgatgagctcaaggctgcagccaaagccaatggtgagaccatcagcaccaagagacagcctaaaggacccaaaccaggattcatggtcgaaggaatgaccttggagactgtcactccaatcccgtacgatgtcgtcaacgatctcaagggaggctattagttctatcttcccagtgttttgcagttgttgcttccgtatttgagtttctcttcatgtgtcttagctacaatttctgtagaatctccagatattttatgaaacagatctttttatctcgtttataacta

SEQ ID NO: 46365 - protein, 177 aa, Arabidopsis thaliana
  peptide (1)..(177): Ceres Seq. ID no. 12600866
RRSRVLVVARGGKMPAGHGVRARTRDLFARPFRKKGYIPLSTYLRTFKVGDYVDVKVNGAIHKGMPHKFYHGRTGRIWNVTKRAVGVEVNKQIGNRIIRKRIHVRVEHVQQSRCAEEFKLRKKKNDELKAAAKANGETISTKRQPKGPKPGFMVEGMTLETVTPIPYDVVNDLKGGY

SEQ ID NO: 46366 - protein, 164 aa, Arabidopsis thaliana; identical to SEQ ID NO: 36570
  peptide (1)..(164): Ceres Seq. ID no. 12600867

SEQ ID NO: 46367 - protein, 113 aa, Arabidopsis thaliana; identical to SEQ ID NO: 36571
  peptide (1)..(113): Ceres Seq. ID no. 12600868

SEQ ID NO: 46368 - DNA, 2368 bp, Arabidopsis thaliana
  misc_feature (1)..(2368): Ceres Seq. ID no. 15176027
  misc_feature (1)..(2368): Ortholog of  Ceres SEQ ID NO 14302828 as cited in SEQ ID NO 65549
gacctttttcacttccttctcactgatcgtcgaacaataagaccgtcgcatctcccagttatggctatggccggagaatcttccggcaaaaaaattggagactgtgacggtaaagtcgcggggaacagacagcgaaaggtgggtcttatttacgacgagacgatgtgcaaacacgacacacctgacggcgaggatcaccctgagtgtcccgaccgcatcagagttatctgggagaagcttcagctcgccggagtttctcaaagatgtgtggttcttggtagtagcaaagcagaagataagcatctccaattggttcacacaaaggaccatgttaatttagttaagagtattagcacaaaacagaaagattatcggagaaacaggattgcttcacagttgaattcgatttatctgaatggaggttcatctgaagccgcatatcttgcagctggttctgttgtaaagttggcagaaaaagttgcagaaggagagttagattgtggttttgctattgtcaggcccccagggcaccatgctgaggcagatgaagccatgggtttttgtttattcaacaatgttgccgttgctgctagttttttactaaacgaaagaccggatctaggggtcaagaaaattctgatcgttgattgggatgtccatcacggaaatggtacccagaagatgttttggaaagatcctcgtgtactatttttctctgttcataggcatgagtatgggggtttctatccagcgggtgatgatggcgattataacatggttggggaaggtccaggtgaagggtttaacataaatgttccatgggatcaaggacgatgtggagatgcagattatcttgctgcatgggaccatatcttgattcctgtggcgagggaatttaacccggatgttatttttctttcagctggatttgatgcagctattaatgatccgctagggggttgttgtgtgaccccatatggatattcagttatgttgaagaagctgatggagtttgcacaaggaaagatagtgctggcgttagagggagggtacaatcttgactcaattgcaaagtcttcacttgcatgtgtccaagttttgcttgaagacaaacaaattcaaggacctccggaagcatacccattcgagtcgacatggcgtgtcatacaagcggtgcgcaagaggctatgcacatattggccttcacttgcagatgaattatcgtggaagctaattaatcagaaaactcctactccaatcatccttatctcaagctccgactctgaaactgaagacaacgcccaaggactcctggatcaaatgtcgaaactcagcattgaaaaccctcaaggtacactacttgaaaaccaccaagtagaacctgcatctacatcttggagagctgatctcgcaaaggttgacgtttggtatgcctcttttggatccaacatgtggaaaccaaggtttctttgctatattcaagggggacaggtcgatggattgaaaaaggtatgtgttggctcaatggataaaagtccaccaaaggaaacagtgtgggaaacatttccacatagattgttctttggccgtgaatcttcagttggttggggtgtaggaggagttgctttcaccaacccccttgctaatctcattgatcaaactcacatgtgtttgtaccgtatcacgcttgagcagttcaatgacgttctgtctcaagaaaatggtttgaatgtggattcagattctccggtctttgatctagctgctttgcagttagtagataacaaaggatccattttagaagctcctttgaatagttggtatggaaatgttgtctgcttgggaaaagaacgcgacattcctatacttacaatgacttgcacgctttccgctgttgagaaattcaaatccggtgagatccctataagacctcctgcaaaagcttatgccaacactttaataaggggacttgtggaaggaggaagattatctaaagaagaagctgaggcttacatagacaaggctgtgtctaaacctctctagtgtataattatttactcagaaaccgcccgtttgaacacgatttggagcttcgggtttctgagttattcaattaggataaaaaccacaagtttaggaatattgtgagacctttgaatttgtcttttgaaagagaggactgtgtcctctgttagctgtgttgtgcttgctccctaagcaaactctcaatgtattttagttatcttcgggttttaggctttaccaagaagctgtattcggtaaatgtattaaagaatcctccaaactgctttatattgaccggagagaaacattcttattcttcggaatggtactttgaagtttgaag

SEQ ID NO: 46369 - protein, 680 aa, Arabidopsis thaliana
  peptide (1)..(680): Ceres Seq. ID no. 15176028
DLFHFLLTDRRTIRPSHLPVMAMAGESSGKKIGDCDGKVAGNRQRKVGLIYDETMCKHDTPDGEDHPECPDRIRVIWEKLQLAGVSQRCVVLGSSKAEDKHLQLVHTKDHVNLVKSISTKQKDYRRNRIASQLNSIYLNGGSSEAAYLAAGSVVKLAEKVAEGELDCGFAIVRPPGHHAEADEAMGFCLFNNVAVAASFLLNERPDLGVKKILIVDWDVHHGNGTQKMFWKDPRVLFFSVHRHEYGGFYPAGDDGDYNMVGEGPGEGFNINVPWDQGRCGDADYLAAWDHILIPVAREFNPDVIFLSAGFDAAINDPLGGCCVTPYGYSVMLKKLMEFAQGKIVLALEGGYNLDSIAKSSLACVQVLLEDKQIQGPPEAYPFESTWRVIQAVRKRLCTYWPSLADELSWKLINQKTPTPIILISSSDSETEDNAQGLLDQMSKLSIENPQGTLLENHQVEPASTSWRADLAKVDVWYASFGSNMWKPRFLCYIQGGQVDGLKKVCVGSMDKSPPKETVWETFPHRLFFGRESSVGWGVGGVAFTNPLANLIDQTHMCLYRITLEQFNDVLSQENGLNVDSDSPVFDLAALQLVDNKGSILEAPLNSWYGNVVCLGKERDIPILTMTCTLSAVEKFKSGEIPIRPPAKAYANTLIRGLVEGGRLSKEEAEAYIDKAVSKPL

SEQ ID NO: 46370 - protein, 660 aa, Arabidopsis thaliana
  peptide (1)..(660): Ceres Seq. ID no. 15176029
MAMAGESSGKKIGDCDGKVAGNRQRKVGLIYDETMCKHDTPDGEDHPECPDRIRVIWEKLQLAGVSQRCVVLGSSKAEDKHLQLVHTKDHVNLVKSISTKQKDYRRNRIASQLNSIYLNGGSSEAAYLAAGSVVKLAEKVAEGELDCGFAIVRPPGHHAEADEAMGFCLFNNVAVAASFLLNERPDLGVKKILIVDWDVHHGNGTQKMFWKDPRVLFFSVHRHEYGGFYPAGDDGDYNMVGEGPGEGFNINVPWDQGRCGDADYLAAWDHILIPVAREFNPDVIFLSAGFDAAINDPLGGCCVTPYGYSVMLKKLMEFAQGKIVLALEGGYNLDSIAKSSLACVQVLLEDKQIQGPPEAYPFESTWRVIQAVRKRLCTYWPSLADELSWKLINQKTPTPIILISSSDSETEDNAQGLLDQMSKLSIENPQGTLLENHQVEPASTSWRADLAKVDVWYASFGSNMWKPRFLCYIQGGQVDGLKKVCVGSMDKSPPKETVWETFPHRLFFGRESSVGWGVGGVAFTNPLANLIDQTHMCLYRITLEQFNDVLSQENGLNVDSDSPVFDLAALQLVDNKGSILEAPLNSWYGNVVCLGKERDIPILTMTCTLSAVEKFKSGEIPIRPPAKAYANTLIRGLVEGGRLSKEEAEAYIDKAVSKPL

SEQ ID NO: 46371 - protein, 658 aa, Arabidopsis thaliana
  peptide (1)..(658): Ceres Seq. ID no. 15176030
MAGESSGKKIGDCDGKVAGNRQRKVGLIYDETMCKHDTPDGEDHPECPDRIRVIWEKLQLAGVSQRCVVLGSSKAEDKHLQLVHTKDHVNLVKSISTKQKDYRRNRIASQLNSIYLNGGSSEAAYLAAGSVVKLAEKVAEGELDCGFAIVRPPGHHAEADEAMGFCLFNNVAVAASFLLNERPDLGVKKILIVDWDVHHGNGTQKMFWKDPRVLFFSVHRHEYGGFYPAGDDGDYNMVGEGPGEGFNINVPWDQGRCGDADYLAAWDHILIPVAREFNPDVIFLSAGFDAAINDPLGGCCVTPYGYSVMLKKLMEFAQGKIVLALEGGYNLDSIAKSSLACVQVLLEDKQIQGPPEAYPFESTWRVIQAVRKRLCTYWPSLADELSWKLINQKTPTPIILISSSDSETEDNAQGLLDQMSKLSIENPQGTLLENHQVEPASTSWRADLAKVDVWYASFGSNMWKPRFLCYIQGGQVDGLKKVCVGSMDKSPPKETVWETFPHRLFFGRESSVGWGVGGVAFTNPLANLIDQTHMCLYRITLEQFNDVLSQENGLNVDSDSPVFDLAALQLVDNKGSILEAPLNSWYGNVVCLGKERDIPILTMTCTLSAVEKFKSGEIPIRPPAKAYANTLIRGLVEGGRLSKEEAEAYIDKAVSKPL

SEQ ID NO: 46372 - DNA, 1322 bp, Arabidopsis thaliana; identical to SEQ ID NO: 45469
  misc_feature (1)..(1322): Ceres Seq. ID no. 13646612
  misc_feature (1)..(1322): Ortholog of  Ceres SEQ ID NO 14311683 as cited in SEQ ID NO 51263
  misc_feature (1)..(1322): Ortholog of  Ceres SEQ ID NO 15177862 as cited in SEQ ID NO 56033
  misc_feature (1)..(1322): Ortholog of  Ceres SEQ ID NO 13661430 as cited in SEQ ID NO 61258
  misc_feature (1)..(1322): Ortholog of  Ceres SEQ ID NO 13590940 as cited in SEQ ID NO 68653
  misc_feature (1)..(1322): Ortholog of  Ceres SEQ ID NO 14301982 as cited in SEQ ID NO 0
  misc_feature (1)..(1322): Ortholog of  Ceres SEQ ID NO 15179001 as cited in SEQ ID NO 0
  misc_feature (1)..(1322): Ortholog of  Ceres SEQ ID NO 15180040 as cited in SEQ ID NO 0

SEQ ID NO: 46373 - protein, 329 aa, Arabidopsis thaliana; identical to SEQ ID NO: 45470
  peptide (1)..(329): Ceres Seq. ID no. 15219069

SEQ ID NO: 46374 - protein, 315 aa, Arabidopsis thaliana; identical to SEQ ID NO: 45471
  peptide (1)..(315): Ceres Seq. ID no. 15219070

SEQ ID NO: 46375 - DNA, 1497 bp, Arabidopsis thaliana
  misc_feature (1)..(1497): Ceres Seq. ID no. 13579206
  misc_feature (1)..(1497): Ortholog of  Ceres SEQ ID NO 13596816 as cited in SEQ ID NO 62287
gtggaagtacgagattcactggatttgatggctcgtcggctgtttctcctcctcctcgccgtcacggcagggttgagcttgacgggaacaaccgtcagagcagttggcataaattgggggacagaagcgtcgcaccctcttccgccttcaaaggttgtagagcttctgaaatcaaacggcattgtcaaagtgaagctcttcgatgccgacccaaaagttctccgagctctctctggttctaatattggtgtcactatcggaatccaaaattcgatgctcaagagcttgaatgcatccgtaaaggtagcagagagctgggtacatgacaatgtcactcgttacttcaacggtggaaacagagttcgaatcgagtatgtagcagttggagaagagccatttctccagagctatggcaatcagtataagccttttgtgattggggcagctatgaatatccaaaatgctttagttaaggcgaacttggcaaatgaagtgaaggttgtagtcccctcaagctttgattcctttctttctgaatctggtcgaccttcttcaggacactttagggctgacctcaacaagacgatgattgaactcctctcctttctcacaaagcaccactctcctttttttgtgacaatctctcctttcctaagctttcaccagaacaagaacatctcccttgactttagcctctttaaagaaacagcaaaggctcacaaagacggacgtaaaacctacagaaacagctttgatctaagctatgacacacttgtctctgcattgttcacaattgggttttcggaggtggatatcgttgtgtcaaagatcggttggcctacagatggagcagaaaatgcaacatcactgactgctgaggcgttctttaaaggactgatagttcacttggagaaaaagacggcctctctcccgcgtcctcctgttgaaacctacattgaaagtctcttggacgaagatcagagaaacttatctgctgggaactttgagaggcactggggagtgttcactttcgacggtcaagccaaatacaatttcagtttcaaccataagaatcaggtaaacgcgcagaatgttcagtaccttcctcctaagtggtgtgtggtgaacaataacaaggacttgtcaaacgcgtcagcaagagcattagaagcgtgtgctgttgcggactgtacatcgatacttcctggcgggtcgtgttcaggcatcagatggccaggcaacgtttcatacgcgttcaatagcttgtaccagcaaaatgatcacagtgcagaaagctgcaactttggtggacttggtttgatcactactgttgatccttctgaggataattgccggttctcgattcaacttgacacttctcattcatcttcgcaaactccaaatttctttcagagctggcctctcctcttattgttcctactgtccggactcttttaaagttgtagttatagcaaaattttggtggattttgcctcc

SEQ ID NO: 46376 - protein, 485 aa, Arabidopsis thaliana
  peptide (1)..(485): Ceres Seq. ID no. 13579207
VEVRDSLDLMARRLFLLLLAVTAGLSLTGTTVRAVGINWGTEASHPLPPSKVVELLKSNGIVKVKLFDADPKVLRALSGSNIGVTIGIQNSMLKSLNASVKVAESWVHDNVTRYFNGGNRVRIEYVAVGEEPFLQSYGNQYKPFVIGAAMNIQNALVKANLANEVKVVVPSSFDSFLSESGRPSSGHFRADLNKTMIELLSFLTKHHSPFFVTISPFLSFHQNKNISLDFSLFKETAKAHKDGRKTYRNSFDLSYDTLVSALFTIGFSEVDIVVSKIGWPTDGAENATSLTAEAFFKGLIVHLEKKTASLPRPPVETYIESLLDEDQRNLSAGNFERHWGVFTFDGQAKYNFSFNHKNQVNAQNVQYLPPKWCVVNNNKDLSNASARALEACAVADCTSILPGGSCSGIRWPGNVSYAFNSLYQQNDHSAESCNFGGLGLITTVDPSEDNCRFSIQLDTSHSSSQTPNFFQSWPLLLLFLLSGLF

SEQ ID NO: 46377 - protein, 476 aa, Arabidopsis thaliana
  peptide (1)..(476): Ceres Seq. ID no. 13579208
MARRLFLLLLAVTAGLSLTGTTVRAVGINWGTEASHPLPPSKVVELLKSNGIVKVKLFDADPKVLRALSGSNIGVTIGIQNSMLKSLNASVKVAESWVHDNVTRYFNGGNRVRIEYVAVGEEPFLQSYGNQYKPFVIGAAMNIQNALVKANLANEVKVVVPSSFDSFLSESGRPSSGHFRADLNKTMIELLSFLTKHHSPFFVTISPFLSFHQNKNISLDFSLFKETAKAHKDGRKTYRNSFDLSYDTLVSALFTIGFSEVDIVVSKIGWPTDGAENATSLTAEAFFKGLIVHLEKKTASLPRPPVETYIESLLDEDQRNLSAGNFERHWGVFTFDGQAKYNFSFNHKNQVNAQNVQYLPPKWCVVNNNKDLSNASARALEACAVADCTSILPGGSCSGIRWPGNVSYAFNSLYQQNDHSAESCNFGGLGLITTVDPSEDNCRFSIQLDTSHSSSQTPNFFQSWPLLLLFLLSGLF

SEQ ID NO: 46378 - protein, 394 aa, Arabidopsis thaliana
  peptide (1)..(394): Ceres Seq. ID no. 13579209
MLKSLNASVKVAESWVHDNVTRYFNGGNRVRIEYVAVGEEPFLQSYGNQYKPFVIGAAMNIQNALVKANLANEVKVVVPSSFDSFLSESGRPSSGHFRADLNKTMIELLSFLTKHHSPFFVTISPFLSFHQNKNISLDFSLFKETAKAHKDGRKTYRNSFDLSYDTLVSALFTIGFSEVDIVVSKIGWPTDGAENATSLTAEAFFKGLIVHLEKKTASLPRPPVETYIESLLDEDQRNLSAGNFERHWGVFTFDGQAKYNFSFNHKNQVNAQNVQYLPPKWCVVNNNKDLSNASARALEACAVADCTSILPGGSCSGIRWPGNVSYAFNSLYQQNDHSAESCNFGGLGLITTVDPSEDNCRFSIQLDTSHSSSQTPNFFQSWPLLLLFLLSGLF

SEQ ID NO: 46379 - DNA, 1610 bp, Arabidopsis thaliana; identical to SEQ ID NO: 39634
  misc_feature (1)..(1610): Ceres Seq. ID no. 13580607
  misc_feature (1)..(1610): Ortholog of  Ceres SEQ ID NO 13594345 as cited in SEQ ID NO 58043
  misc_feature (1)..(1610): Ortholog of  Ceres SEQ ID NO 14302832 as cited in SEQ ID NO 64926
  misc_feature (1)..(1610): Ortholog of  Ceres SEQ ID NO 13662880 as cited in SEQ ID NO 65422
  misc_feature (1)..(1610): Ortholog of  Ceres SEQ ID NO 12779098 as cited in SEQ ID NO 67698
  misc_feature (1)..(1610): Ortholog of  Ceres SEQ ID NO 13591190 as cited in SEQ ID NO 68044
  misc_feature (1)..(1610): Ortholog of  Ceres SEQ ID NO 13596089 as cited in SEQ ID NO 68373

SEQ ID NO: 46380 - protein, 287 aa, Arabidopsis thaliana; identical to SEQ ID NO: 39635
  peptide (1)..(287): Ceres Seq. ID no. 13580608

SEQ ID NO: 46381 - protein, 282 aa, Arabidopsis thaliana; identical to SEQ ID NO: 39636
  peptide (1)..(282): Ceres Seq. ID no. 13580609

SEQ ID NO: 46382 - protein, 281 aa, Arabidopsis thaliana; identical to SEQ ID NO: 39637
  peptide (1)..(281): Ceres Seq. ID no. 13580610

SEQ ID NO: 46383 - DNA, 3093 bp, Arabidopsis thaliana; identical to SEQ ID NO: 45040
  misc_feature (1)..(3093): Ceres Seq. ID no. 12600157
  misc_feature (1)..(3093): Ortholog of  Ceres SEQ ID NO 13600595 as cited in SEQ ID NO 629
  misc_feature (1)..(3093): Ortholog of  Ceres SEQ ID NO 13593379 as cited in SEQ ID NO 20573

SEQ ID NO: 46384 - protein, 856 aa, Arabidopsis thaliana; identical to SEQ ID NO: 45041
  peptide (1)..(856): Ceres Seq. ID no. 12600158

SEQ ID NO: 46385 - protein, 853 aa, Arabidopsis thaliana; identical to SEQ ID NO: 45042
  peptide (1)..(853): Ceres Seq. ID no. 12600159

SEQ ID NO: 46386 - protein, 794 aa, Arabidopsis thaliana; identical to SEQ ID NO: 45043
  peptide (1)..(794): Ceres Seq. ID no. 12600160

SEQ ID NO: 46387 - DNA, 2998 bp, Arabidopsis thaliana
  misc_feature (1)..(2998): Ceres Seq. ID no. 14309893
  misc_feature (1)..(2998): Ortholog of  Ceres SEQ ID NO 15176051 as cited in SEQ ID NO 53434
  misc_feature (1)..(2998): Ortholog of  Ceres SEQ ID NO 15170306 as cited in SEQ ID NO 58219
  misc_feature (1)..(2998): Ortholog of  Ceres SEQ ID NO 12465091 as cited in SEQ ID NO 65947
gagtcagaacgcaaccaaataaagaaagctctcaaactcagtcttgaagcatcaactttatatctaccatctcatcaactaactaattctttttaaaatggctttagctaatgagataatgggttctcgtctaatcttcgagagatcatcatcacttgcgtctccgtttcaatcgcgtttctccatcaagaagaggacacagagaacacagttctccatcaacccttttgatccgagacctatgagagccgttaactcaagcggcgttgtagcggccatcagcgaggatttggttaaaacgctgcgtattagcactgtcggtagaaaacaagagaagcaggaagaagaggagaagtcggtgaagtttaaggtgagagcagttgcgacggtgaggaacaaaaacaaagaggattttaaagaaactttggttaagcatttggatgcttttactgataaaatcggtagaaacgttgtcttggagcttattagtacccaagttgatccaaaaacgaatgagccaaagaagagtaaagcggcagttttgaaagattggtcaaagaaatcaaattcaaaggcggaaagagtccattacacggccgagttcacggtggattcagcctttggttccccaggagccatcaccgtgaccaacaaacaccaaaaagagttctttcttgagagcatcaccatcgagggtttcgcatgtggccctgttcacttcccctgcaactcttgggtccaatctcaaaaagaccatccatccaaacgaattctcttcactaatcagccttacttgccgagcgagacaccgtccggtctaagaacattaagggagaaagaattggagaatctaagaggaaatggtaaaggagaaagaaaattatcagacagaatctacgattatgatgtgtacaacgacataggaaatccggacatatcacgtgaactagcccgtcccacacttggtggccgtgaatttccttaccctagacgctgtcgaaccggccggtcttcaaccgacaccgatatgatgtctgagaggcgggtggagaaaccattaccgatgtatgtaccaagagatgagcagttcgaggagtctaagcagaacacttttgctgcatgtagacttaaggcggttttacataaccttataccttcactaaaagctagcattttggctgaggacttagctaactttggtgagatcgatagtctttacaaagaaggcttgcttctcaagttagggtttcaagatgatatgttcaagaaattccctttaccgaagatcgtcactaccctccaaaaatcaagcgagggcttgcttagatacgacactcctaaaatagtttcaaaggataaatacgcatggcttcgcgatgacgagttcgcacgccaagctatagctgggatcaacccggtcaacatagaacgagtcacgtcttatccaccggtcagcaatcttgaccctgaaatctacggaccaggtcttcactccgctctcacggaagaccacatcatcggtcaacttgatggcttaaccgtacaacaagcgttagagatgaaccgtttgtttatggtggactaccatgacatatacttaccgtttctagatagaatcaacgcgcttgatggacgcaaggcttacgcgactcgaaccatattgttcttgacccgactcggtacactcaagcctatcgccatcgagctaagcctcccttctcaatcaagctcaaaccaaaagtccaagcgcgtggtcacacctccagtagacgcaacctccaactggatgtggcagctagccaaggcccacgttgggtccaatgacgctggtgtccaccagcttgtgaatcattggttacgtactcatgcgtgtttggaaccgtttatattagctgctcatagacaattaagcgcaatgcatccgatattcaaattattagaccctcacatgaggtacactttggagatcaatgccgtggcacgacagactttgattagtgcggacggtgtgatcgagtcgtgcttcactgctggtcaatacggtctagagattagttccgctgcgtataagaacaaatggcggtttgatatggaaggtctccctgctgatctcatccgaagggggatggctgttccagacccaacacaaccacatgggcttaaattacttgttgaagactacccatacgccaacgacggtctcttattatggtccgcaatccaaacttgggtccgaacctacgtggaacgttattacgcaaactcgaacctaatccaaaccgatactgagctccaagcctggtactctgagtcaatcaacgtaggtcacgctgatcaccgcgacgccgagtggtggccgaagctttccaccgtcgaagatctcgtctccgtcatcaccaccatcatctggctcgcctccgcacaacacgcggcactcaacttcggacaatatccttacggtggctacgtcccgaaccgaccaccgctaatgcgtcggttgattcccgacgagtcagatcccgagttcacgagttttatcgaagatcctcaaaagtattttttctcgtcgatgccgagtttattgcaaacgacgaagtttatggcggtggttgatacattgtcgacacattcgccggatgaggagtatatcggagagagacaacaaccgtcgatatggactggagatgctgagatcgtagatgcgttttatggattctcggcggaaatcggacggatagagaaggagattgacaagaggaatcgtgatcctagctgtaggaatcgctgtggcgcgggagtgttaccgtatgagttgatggctccgagttctgaaccgggtgttacgtgtagaggagtgcctaatagtgtatctatttagaattattcaatttttcaaagtatagagaattttataagtatataattagattttgacgcagtatggtttatttgccgatattgtaaaattcttacaaggattttattatgttgatttttt

SEQ ID NO: 46388 - protein, 926 aa, Arabidopsis thaliana
  peptide (1)..(926): Ceres Seq. ID no. 14309894
MALANEIMGSRLIFERSSSLASPFQSRFSIKKRTQRTQFSINPFDPRPMRAVNSSGVVAAISEDLVKTLRISTVGRKQEKQEEEEKSVKFKVRAVATVRNKNKEDFKETLVKHLDAFTDKIGRNVVLELISTQVDPKTNEPKKSKAAVLKDWSKKSNSKAERVHYTAEFTVDSAFGSPGAITVTNKHQKEFFLESITIEGFACGPVHFPCNSWVQSQKDHPSKRILFTNQPYLPSETPSGLRTLREKELENLRGNGKGERKLSDRIYDYDVYNDIGNPDISRELARPTLGGREFPYPRRCRTGRSSTDTDMMSERRVEKPLPMYVPRDEQFEESKQNTFAACRLKAVLHNLIPSLKASILAEDLANFGEIDSLYKEGLLLKLGFQDDMFKKFPLPKIVTTLQKSSEGLLRYDTPKIVSKDKYAWLRDDEFARQAIAGINPVNIERVTSYPPVSNLDPEIYGPGLHSALTEDHIIGQLDGLTVQQALEMNRLFMVDYHDIYLPFLDRINALDGRKAYATRTILFLTRLGTLKPIAIELSLPSQSSSNQKSKRVVTPPVDATSNWMWQLAKAHVGSNDAGVHQLVNHWLRTHACLEPFILAAHRQLSAMHPIFKLLDPHMRYTLEINAVARQTLISADGVIESCFTAGQYGLEISSAAYKNKWRFDMEGLPADLIRRGMAVPDPTQPHGLKLLVEDYPYANDGLLLWSAIQTWVRTYVERYYANSNLIQTDTELQAWYSESINVGHADHRDAEWWPKLSTVEDLVSVITTIIWLASAQHAALNFGQYPYGGYVPNRPPLMRRLIPDESDPEFTSFIEDPQKYFFSSMPSLLQTTKFMAVVDTLSTHSPDEEYIGERQQPSIWTGDAEIVDAFYGFSAEIGRIEKEIDKRNRDPSCRNRCGAGVLPYELMAPSSEPGVTCRGVPNSVSI

SEQ ID NO: 46389 - protein, 919 aa, Arabidopsis thaliana
  peptide (1)..(919): Ceres Seq. ID no. 14309895
MGSRLIFERSSSLASPFQSRFSIKKRTQRTQFSINPFDPRPMRAVNSSGVVAAISEDLVKTLRISTVGRKQEKQEEEEKSVKFKVRAVATVRNKNKEDFKETLVKHLDAFTDKIGRNVVLELISTQVDPKTNEPKKSKAAVLKDWSKKSNSKAERVHYTAEFTVDSAFGSPGAITVTNKHQKEFFLESITIEGFACGPVHFPCNSWVQSQKDHPSKRILFTNQPYLPSETPSGLRTLREKELENLRGNGKGERKLSDRIYDYDVYNDIGNPDISRELARPTLGGREFPYPRRCRTGRSSTDTDMMSERRVEKPLPMYVPRDEQFEESKQNTFAACRLKAVLHNLIPSLKASILAEDLANFGEIDSLYKEGLLLKLGFQDDMFKKFPLPKIVTTLQKSSEGLLRYDTPKIVSKDKYAWLRDDEFARQAIAGINPVNIERVTSYPPVSNLDPEIYGPGLHSALTEDHIIGQLDGLTVQQALEMNRLFMVDYHDIYLPFLDRINALDGRKAYATRTILFLTRLGTLKPIAIELSLPSQSSSNQKSKRVVTPPVDATSNWMWQLAKAHVGSNDAGVHQLVNHWLRTHACLEPFILAAHRQLSAMHPIFKLLDPHMRYTLEINAVARQTLISADGVIESCFTAGQYGLEISSAAYKNKWRFDMEGLPADLIRRGMAVPDPTQPHGLKLLVEDYPYANDGLLLWSAIQTWVRTYVERYYANSNLIQTDTELQAWYSESINVGHADHRDAEWWPKLSTVEDLVSVITTIIWLASAQHAALNFGQYPYGGYVPNRPPLMRRLIPDESDPEFTSFIEDPQKYFFSSMPSLLQTTKFMAVVDTLSTHSPDEEYIGERQQPSIWTGDAEIVDAFYGFSAEIGRIEKEIDKRNRDPSCRNRCGAGVLPYELMAPSSEPGVTCRGVPNSVSI

SEQ ID NO: 46390 - protein, 878 aa, Arabidopsis thaliana
  peptide (1)..(878): Ceres Seq. ID no. 14309896
MRAVNSSGVVAAISEDLVKTLRISTVGRKQEKQEEEEKSVKFKVRAVATVRNKNKEDFKETLVKHLDAFTDKIGRNVVLELISTQVDPKTNEPKKSKAAVLKDWSKKSNSKAERVHYTAEFTVDSAFGSPGAITVTNKHQKEFFLESITIEGFACGPVHFPCNSWVQSQKDHPSKRILFTNQPYLPSETPSGLRTLREKELENLRGNGKGERKLSDRIYDYDVYNDIGNPDISRELARPTLGGREFPYPRRCRTGRSSTDTDMMSERRVEKPLPMYVPRDEQFEESKQNTFAACRLKAVLHNLIPSLKASILAEDLANFGEIDSLYKEGLLLKLGFQDDMFKKFPLPKIVTTLQKSSEGLLRYDTPKIVSKDKYAWLRDDEFARQAIAGINPVNIERVTSYPPVSNLDPEIYGPGLHSALTEDHIIGQLDGLTVQQALEMNRLFMVDYHDIYLPFLDRINALDGRKAYATRTILFLTRLGTLKPIAIELSLPSQSSSNQKSKRVVTPPVDATSNWMWQLAKAHVGSNDAGVHQLVNHWLRTHACLEPFILAAHRQLSAMHPIFKLLDPHMRYTLEINAVARQTLISADGVIESCFTAGQYGLEISSAAYKNKWRFDMEGLPADLIRRGMAVPDPTQPHGLKLLVEDYPYANDGLLLWSAIQTWVRTYVERYYANSNLIQTDTELQAWYSESINVGHADHRDAEWWPKLSTVEDLVSVITTIIWLASAQHAALNFGQYPYGGYVPNRPPLMRRLIPDESDPEFTSFIEDPQKYFFSSMPSLLQTTKFMAVVDTLSTHSPDEEYIGERQQPSIWTGDAEIVDAFYGFSAEIGRIEKEIDKRNRDPSCRNRCGAGVLPYELMAPSSEPGVTCRGVPNSVSI

SEQ ID NO: 46391 - DNA, 1157 bp, Arabidopsis thaliana
  misc_feature (1)..(1157): Ceres Seq. ID no. 14309885
  misc_feature (1)..(1157): Ortholog of  Ceres SEQ ID NO 15177718 as cited in SEQ ID NO 0
gaacaaagcaaacggctcatttctcagaaacaactcaaacatgggttccttcgacttgcctcacagttcatcgttcaagggagaaagtgaaatatttcttcggaatgtgttcgagaatatattgaaaacgtacctaaggaagaacccgacggcgaagacaatatgggaactggttcagtcgttggacaacgaaaagatctgctacgaccacttcactttcaggacactaaaggtcgatggttatggaatagactccttgtcgagttttttcatggcttatggatataaaattggtggtggacttgattttcccaagaagaaactacgagttctttggttttctccacctgatgttcacgttcctaatgatggtcacggtctaggcaacggccctttgccgcgacttgttatagctgaggttcttgtggacgaactaagccctgaatcacaggggataataaggaagtatttgaaacaagaaggtggcaagcaagcggttctttctagtactttggggtctttaatatgggagaagcctacatggaccgacttcaagcagcttgccaaagaaagcgaatttgcggcatggacgcttatccacggctacacaatgaatcatcttgcttttgcggttcatcgattcaaacatcgtttcagtgacatcaaattcgtcaaacagcatcttgaggaaaagggattcaaactcaacagtgacggagaaatcctcaaagtgagtcaagatggtctactatttcaagtttcatcgatctcggaaaggcttccggtaacatttgcagatggagtaactgaaacaatcccagcttcatacattgaattcactcagcgtcaagttcttccagagttcaaagatgtgccgcttgatgagatcaaagaatttcatagacgtgaagcttttgaactcgataacgccaaccacgtaatggaaagcacccgtttcacaactaaattctagaaccagacttgtcttgctcgacttagtatatgccaaatttgtgtaactatatatacttgtgtgtgtttgtgtgcaatcttttcatatatatgcatgtgtgtatttgcgatatctttatgttgttattttactgtgaagggacaatgtaagcatatgttatctctcatgatggtttttgttgatt

SEQ ID NO: 46392 - protein, 323 aa, Arabidopsis thaliana
  peptide (1)..(323): Ceres Seq. ID no. 14309886
NKANGSFLRNNSNMGSFDLPHSSSFKGESEIFLRNVFENILKTYLRKNPTAKTIWELVQSLDNEKICYDHFTFRTLKVDGYGIDSLSSFFMAYGYKIGGGLDFPKKKLRVLWFSPPDVHVPNDGHGLGNGPLPRLVIAEVLVDELSPESQGIIRKYLKQEGGKQAVLSSTLGSLIWEKPTWTDFKQLAKESEFAAWTLIHGYTMNHLAFAVHRFKHRFSDIKFVKQHLEEKGFKLNSDGEILKVSQDGLLFQVSSISERLPVTFADGVTETIPASYIEFTQRQVLPEFKDVPLDEIKEFHRREAFELDNANHVMESTRFTTKF

SEQ ID NO: 46393 - protein, 310 aa, Arabidopsis thaliana
  peptide (1)..(310): Ceres Seq. ID no. 14309887
MGSFDLPHSSSFKGESEIFLRNVFENILKTYLRKNPTAKTIWELVQSLDNEKICYDHFTFRTLKVDGYGIDSLSSFFMAYGYKIGGGLDFPKKKLRVLWFSPPDVHVPNDGHGLGNGPLPRLVIAEVLVDELSPESQGIIRKYLKQEGGKQAVLSSTLGSLIWEKPTWTDFKQLAKESEFAAWTLIHGYTMNHLAFAVHRFKHRFSDIKFVKQHLEEKGFKLNSDGEILKVSQDGLLFQVSSISERLPVTFADGVTETIPASYIEFTQRQVLPEFKDVPLDEIKEFHRREAFELDNANHVMESTRFTTKF

SEQ ID NO: 46394 - protein, 233 aa, Arabidopsis thaliana
  peptide (1)..(233): Ceres Seq. ID no. 14309888
MAYGYKIGGGLDFPKKKLRVLWFSPPDVHVPNDGHGLGNGPLPRLVIAEVLVDELSPESQGIIRKYLKQEGGKQAVLSSTLGSLIWEKPTWTDFKQLAKESEFAAWTLIHGYTMNHLAFAVHRFKHRFSDIKFVKQHLEEKGFKLNSDGEILKVSQDGLLFQVSSISERLPVTFADGVTETIPASYIEFTQRQVLPEFKDVPLDEIKEFHRREAFELDNANHVMESTRFTTKF

SEQ ID NO: 46395 - DNA, 3606 bp, Arabidopsis thaliana
  misc_feature (1)..(3606): Ceres Seq. ID no. 13509371
  misc_feature (1)..(3606): Ortholog of  Ceres SEQ ID NO 13624427 as cited in SEQ ID NO 0
atggattacttgaatttgctgatagagtttatggtgttggctgatagcttgtatcagatcttcttgcatgaagttatcaatgatttacacgaagaattcccggaatcgtcgtttttagcgtttaatttccgagaaggggagaaaaaaagcgtgtttgctgaaactctctgtgaatatgatgttactgttcttgagtatccgaggcagtatgaaggctgtcctatgcttcctttatcattgattcaacattttctccgtgtttgtgagagttggcttgctcgtgggaaccgtcaggatgttattcttcttcactgtgaaagaggaggatggccacttttggcttttattctagctagttttctgattttcaggaaagttcatagtggtgagcgtagaactcttgagattgtgcatcgagaggctcccaagggtctcttgcagctgctttcaccgttaaatccgtttccttctcaacttcgttatcttcagtatgtagcgaggaggaacattaattctgagtggccacctcctgaaagagctctttctttggattgtgtgataattcgaggtatcccaaactttgactctcaacatggctgcagaccgattatacgtatttttggaagaaactatagtagtaaatctggtctttcaacggagatggtgtattctatgtctgataagaaaaaaccccttcgccattacagacaggcagaatgtgacgtaatcaaaattgatatccagtgctgggttcaaggagatgttgtactggagtgtgtgcatatggatttggatccagaacgagaggttatgatgtttcgtgtgatgtttaatactgcatttatcaggtccaacatactaatgttgaactctgacaacttggatattctttgggaggccaaggatcattacccaaaagggtttcgagcagaggtcttgtttggagaagttgagaatgcatcgcctcagaaagttccaaccccaatagtaaatggtgatgagactggtggattgcccattgaagccttttctagagttcaagaactttttagcggtgtggatttggctgagaatggagatgatgctgctttgtggttgctgaaacaacttgctgccattaatgatgcaaaagagtttacaagatttcggcacaaagggagtttttattttaattctcctgactctgaagaggagacaaacacatctagtgccgctgatagttcagatgaaggctttgaagccattcagagacctcgtattcatataccttttgataatgatgatacagacgacattactttgtctgtcgctcacgaatcgtcagaggagcctcatgaattctctcatcaccatcatcatgaaattccagcgaaagacagtgtcgacaaccctttgaatcttccatcagatccaccatcttctggtgatcatgtcacacttctgcctccaccgccaccgccacctcctccccctctttttacgagcacaacttcattctcaccctcacagccacccccaccgccacctcctccccctctttttatgagcacaacttcattctcaccctcacagccacccccaccgccacctcctccccctctttttacgagcacaacttcattctcaccctcacagccacccccaccaccacctctccctagtttcagcaatagagatcctttgacaacattgcatcaacctatcaataaaactcctccaccaccacctcctcctcccccgccactgccatctagaagcatccctccgccattagctcaaccaccaccaccacgtcctcctcctcctcctcctccgcctccttcttcaagaagcattccttcgccctcagcaccaccgccaccgccaccaccgcctccgtcgtttgggagcacaggaaataagcgtcaggcgcaaccacctccacctccacctcctcctcctcccacaagaattcctgctgctaaatgtgcaccaccaccacccccgcctccacctacatctcattctggttctattcgtgttggcccaccttcgacaccaccaccacctccacctcctcctcctaaagctaatatttcaaatgcccccaagccaccagcccctccgccacttcctccttcatctacaaggttgggtgctccccctcctcctccaccaccaccactatccaagacccctgctccgcctccaccacctctatccaagacccctgttcctcctcctccaccagggctgggtcgtggtacaagtagtggcccaccaccactgggagcaaaaggttcaaatgcaccaccaccacctcctcctgcaggaagggggagagcttccttgggacttggaagaggccgaggtgtgagtgttcctactgctgcacctaagaaaaccgcgttaaaacctttgcattggtctaaagttactcgggcagcaaaaggtagtttgtgggctgatactcagaaacaggaaaatcaaccacgggccccagaaatagatatatcagagctcgagagtcttttttctgcagtttcagataccacagctaagaagagcacaggtcgccggggttctagtatcagcaaacctgagaaagttcaattggttgacctgcgaagagcaaataactgtgaaataatgctcacgaaaataaagattcctttgccagatatgcttagtgcagtgctagccttggattcattagctctggacattgaccaggttgaaaatctcatcaaattttgtccgaccaaggaagagatggaactgttgaggaattatactggtgacaaggaaatgcttggaaagtgtgaacaggttccacgtatagaagcaaagttacgagtgtttggctttaagattacctttgcttctcaggtggaggagttaaaaagctgcctaaatacaataaacgctgctactaaagaggtgaaggagtctgcaaagttgcgtcaaattatgcaaacaattttaacgttgggaaatgctctaaatcagggaactgcgagagggtctgctgttgggttcaaactagacagtctccttaaattatctgatactcgtgctagaaataacaaaatgactttgatgcattacttatgcaagcttgttggtgaaaaaatgccagaattgctggattttgctaatgaccttgttcacttagaagctgcttcaaagattgaattgaaaacgttggctgaagaaatgcaagcggcgactaaaggccttgaaaaggttgagcaagaactcatggcttcagaaaatgatggtgcaatttctttgggcttcagaaaggtcttgaaggagtttcttgatatggctgatgaggaagtgaagacgcttgcttcgctatattcagaagtgggaagaaatgcagattctttatctcactacttcggtgaggatccagctcgatgtccttttgagcaagtgaccaagattctgactctttttatgaaaacattcatcaaatcccgagaggagaatgaaaaacaagccgaggctgagaagaagaaactggagaaagaagcaattaaagagaagtcagcgacaaagaaagatggcgtcgataacgacaacgatcttatccagcagatccatagacatagaacatga

SEQ ID NO: 46396 - protein, 1201 aa, Arabidopsis thaliana
  peptide (1)..(1201): Ceres Seq. ID no. 13509372
MDYLNLLIEFMVLADSLYQIFLHEVINDLHEEFPESSFLAFNFREGEKKSVFAETLCEYDVTVLEYPRQYEGCPMLPLSLIQHFLRVCESWLARGNRQDVILLHCERGGWPLLAFILASFLIFRKVHSGERRTLEIVHREAPKGLLQLLSPLNPFPSQLRYLQYVARRNINSEWPPPERALSLDCVIIRGIPNFDSQHGCRPIIRIFGRNYSSKSGLSTEMVYSMSDKKKPLRHYRQAECDVIKIDIQCWVQGDVVLECVHMDLDPEREVMMFRVMFNTAFIRSNILMLNSDNLDILWEAKDHYPKGFRAEVLFGEVENASPQKVPTPIVNGDETGGLPIEAFSRVQELFSGVDLAENGDDAALWLLKQLAAINDAKEFTRFRHKGSFYFNSPDSEEETNTSSAADSSDEGFEAIQRPRIHIPFDNDDTDDITLSVAHESSEEPHEFSHHHHHEIPAKDSVDNPLNLPSDPPSSGDHVTLLPPPPPPPPPPLFTSTTSFSPSQPPPPPPPPPLFMSTTSFSPSQPPPPPPPPPLFTSTTSFSPSQPPPPPPLPSFSNRDPLTTLHQPINKTPPPPPPPPPPLPSRSIPPPLAQPPPPRPPPPPPPPPSSRSIPSPSAPPPPPPPPPSFGSTGNKRQAQPPPPPPPPPPTRIPAAKCAPPPPPPPPTSHSGSIRVGPPSTPPPPPPPPPKANISNAPKPPAPPPLPPSSTRLGAPPPPPPPPLSKTPAPPPPPLSKTPVPPPPPGLGRGTSSGPPPLGAKGSNAPPPPPPAGRGRASLGLGRGRGVSVPTAAPKKTALKPLHWSKVTRAAKGSLWADTQKQENQPRAPEIDISELESLFSAVSDTTAKKSTGRRGSSISKPEKVQLVDLRRANNCEIMLTKIKIPLPDMLSAVLALDSLALDIDQVENLIKFCPTKEEMELLRNYTGDKEMLGKCEQVPRIEAKLRVFGFKITFASQVEELKSCLNTINAATKEVKESAKLRQIMQTILTLGNALNQGTARGSAVGFKLDSLLKLSDTRARNNKMTLMHYLCKLVGEKMPELLDFANDLVHLEAASKIELKTLAEEMQAATKGLEKVEQELMASENDGAISLGFRKVLKEFLDMADEEVKTLASLYSEVGRNADSLSHYFGEDPARCPFEQVTKILTLFMKTFIKSREENEKQAEAEKKKLEKEAIKEKSATKKDGVDNDNDLIQQIHRHRT

SEQ ID NO: 46397 - protein, 1191 aa, Arabidopsis thaliana
  peptide (1)..(1191): Ceres Seq. ID no. 13509373
MVLADSLYQIFLHEVINDLHEEFPESSFLAFNFREGEKKSVFAETLCEYDVTVLEYPRQYEGCPMLPLSLIQHFLRVCESWLARGNRQDVILLHCERGGWPLLAFILASFLIFRKVHSGERRTLEIVHREAPKGLLQLLSPLNPFPSQLRYLQYVARRNINSEWPPPERALSLDCVIIRGIPNFDSQHGCRPIIRIFGRNYSSKSGLSTEMVYSMSDKKKPLRHYRQAECDVIKIDIQCWVQGDVVLECVHMDLDPEREVMMFRVMFNTAFIRSNILMLNSDNLDILWEAKDHYPKGFRAEVLFGEVENASPQKVPTPIVNGDETGGLPIEAFSRVQELFSGVDLAENGDDAALWLLKQLAAINDAKEFTRFRHKGSFYFNSPDSEEETNTSSAADSSDEGFEAIQRPRIHIPFDNDDTDDITLSVAHESSEEPHEFSHHHHHEIPAKDSVDNPLNLPSDPPSSGDHVTLLPPPPPPPPPPLFTSTTSFSPSQPPPPPPPPPLFMSTTSFSPSQPPPPPPPPPLFTSTTSFSPSQPPPPPPLPSFSNRDPLTTLHQPINKTPPPPPPPPPPLPSRSIPPPLAQPPPPRPPPPPPPPPSSRSIPSPSAPPPPPPPPPSFGSTGNKRQAQPPPPPPPPPPTRIPAAKCAPPPPPPPPTSHSGSIRVGPPSTPPPPPPPPPKANISNAPKPPAPPPLPPSSTRLGAPPPPPPPPLSKTPAPPPPPLSKTPVPPPPPGLGRGTSSGPPPLGAKGSNAPPPPPPAGRGRASLGLGRGRGVSVPTAAPKKTALKPLHWSKVTRAAKGSLWADTQKQENQPRAPEIDISELESLFSAVSDTTAKKSTGRRGSSISKPEKVQLVDLRRANNCEIMLTKIKIPLPDMLSAVLALDSLALDIDQVENLIKFCPTKEEMELLRNYTGDKEMLGKCEQVPRIEAKLRVFGFKITFASQVEELKSCLNTINAATKEVKESAKLRQIMQTILTLGNALNQGTARGSAVGFKLDSLLKLSDTRARNNKMTLMHYLCKLVGEKMPELLDFANDLVHLEAASKIELKTLAEEMQAATKGLEKVEQELMASENDGAISLGFRKVLKEFLDMADEEVKTLASLYSEVGRNADSLSHYFGEDPARCPFEQVTKILTLFMKTFIKSREENEKQAEAEKKKLEKEAIKEKSATKKDGVDNDNDLIQQIHRHRT

SEQ ID NO: 46398 - protein, 1127 aa, Arabidopsis thaliana
  peptide (1)..(1127): Ceres Seq. ID no. 13509374
MLPLSLIQHFLRVCESWLARGNRQDVILLHCERGGWPLLAFILASFLIFRKVHSGERRTLEIVHREAPKGLLQLLSPLNPFPSQLRYLQYVARRNINSEWPPPERALSLDCVIIRGIPNFDSQHGCRPIIRIFGRNYSSKSGLSTEMVYSMSDKKKPLRHYRQAECDVIKIDIQCWVQGDVVLECVHMDLDPEREVMMFRVMFNTAFIRSNILMLNSDNLDILWEAKDHYPKGFRAEVLFGEVENASPQKVPTPIVNGDETGGLPIEAFSRVQELFSGVDLAENGDDAALWLLKQLAAINDAKEFTRFRHKGSFYFNSPDSEEETNTSSAADSSDEGFEAIQRPRIHIPFDNDDTDDITLSVAHESSEEPHEFSHHHHHEIPAKDSVDNPLNLPSDPPSSGDHVTLLPPPPPPPPPPLFTSTTSFSPSQPPPPPPPPPLFMSTTSFSPSQPPPPPPPPPLFTSTTSFSPSQPPPPPPLPSFSNRDPLTTLHQPINKTPPPPPPPPPPLPSRSIPPPLAQPPPPRPPPPPPPPPSSRSIPSPSAPPPPPPPPPSFGSTGNKRQAQPPPPPPPPPPTRIPAAKCAPPPPPPPPTSHSGSIRVGPPSTPPPPPPPPPKANISNAPKPPAPPPLPPSSTRLGAPPPPPPPPLSKTPAPPPPPLSKTPVPPPPPGLGRGTSSGPPPLGAKGSNAPPPPPPAGRGRASLGLGRGRGVSVPTAAPKKTALKPLHWSKVTRAAKGSLWADTQKQENQPRAPEIDISELESLFSAVSDTTAKKSTGRRGSSISKPEKVQLVDLRRANNCEIMLTKIKIPLPDMLSAVLALDSLALDIDQVENLIKFCPTKEEMELLRNYTGDKEMLGKCEQVPRIEAKLRVFGFKITFASQVEELKSCLNTINAATKEVKESAKLRQIMQTILTLGNALNQGTARGSAVGFKLDSLLKLSDTRARNNKMTLMHYLCKLVGEKMPELLDFANDLVHLEAASKIELKTLAEEMQAATKGLEKVEQELMASENDGAISLGFRKVLKEFLDMADEEVKTLASLYSEVGRNADSLSHYFGEDPARCPFEQVTKILTLFMKTFIKSREENEKQAEAEKKKLEKEAIKEKSATKKDGVDNDNDLIQQIHRHRT

SEQ ID NO: 46399 - DNA, 1760 bp, Arabidopsis thaliana
  misc_feature (1)..(1760): Ceres Seq. ID no. 14309923
  misc_feature (1)..(1760): Ortholog of  Ceres SEQ ID NO 14312989 as cited in SEQ ID NO 59121
  misc_feature (1)..(1760): Ortholog of  Ceres SEQ ID NO 12586556 as cited in SEQ ID NO 64667
  misc_feature (1)..(1760): Ortholog of  Ceres SEQ ID NO 14316045 as cited in SEQ ID NO 66810
  misc_feature (1)..(1760): Ortholog of  Ceres SEQ ID NO 13660894 as cited in SEQ ID NO 67475
tccttgcgttctttgctttgtgctcagacaaaaccaatggctttgtctcaaggaatgcaaattcactcttacattatcaagtggggtttcctggcagatcttacggtttgcaactctctgcttaccatgtacaccttctgctcagacttgtattgttgttttaatttatttgaagatttcagaaacaacgcagattctgtttcttggaatactattctgacggcttgtttgcaacacgaacagccagtagagatgttgagattgtttaagctgatgcttgtgtctgaatgtgagccagatcacataactatgggtaatctgttgcggggttgtgtggaaatctcatctctaaagttgggaagccaagtccattgctatagtttgaaaaccgggttggcgcctgagcaatttataaaaaatggactgattgatatgtatgccaagtgtggatcactggggcaagcgagaaggatttttgattcaatggataacagagatgtagtttcgtggagcaccttgatagttggatatgcacagtctggatttggagaggaagctctcatattgttcaaggaaatgaaaagtgcgggcatagagccaaatcatgtaacttttgtcggtgttcttactgcctgtagtcatgttgggctggtggaagaaggcttgaaactgtatgcgaccatgcaaactgaacacgggatttcaccaacaaaagagcactgctcttgcgtggtggacttactggctcgtgctggccgtttaaatgaagctgagagttttatcgatgaaatgaagttggaacctgatgttgtcgtgtggaagactctactgtctgcatgtaaaacccaaggaaatgttcatctcgcccaaaaggctgctgaaaatattctgaaaatcgatcctttcaactctacagctcatgtattgctctgcagcatgcatgcttcttctggaaattgggaaaatgctgcattgttgaggagctcaatgaaaaagcatgatgttaaaaaaattccaggacagagctggatcgaagttgaggacaaaattcatatattctttgctgaggatatttttcatccagagagggacgatatatatacagtcctgcacaacatctggtcgcagatgctagatgagtgtaatccgcaacacaagaaaagactccagtttatccatgaaaccggataaacaagcatttaagttccatctgagagaagcacagaaaaatgccattgtggctactctatatcttgccttttccttttctgcagtctgttgtcatgagattgacgcagcgtacatagttgccagcgtgtctattaaataaggcatttgatgaggatgaacaggttaccacattgggttgctacagacaagcgggatgggcaacaaatgcagtgctatacaaactacgaaaagaggatacatctcaacttatctgatgagtacaacaaatttgagttaagatgatttgaagaaggccatgaagcaaaactatctgctgggtatgaacatgtaaaagctccagactccttgagtctcgtagaagtgacgacgcaacttctttcttcttatatgtctagaaatggatcaaacactggactaagaatccggaaatcgtatcgcaaaacgaatcaaaatgatgaaagttttagtctcttatacatctgtgattattgagctaataaaacaacttgatacgaaacaatcatgggacgtcaatgatagtttagttgatggatctgtttgtaaaaatc

SEQ ID NO: 46400 - protein, 396 aa, Arabidopsis thaliana
  peptide (1)..(396): Ceres Seq. ID no. 14309924
SLRSLLCAQTKPMALSQGMQIHSYIIKWGFLADLTVCNSLLTMYTFCSDLYCCFNLFEDFRNNADSVSWNTILTACLQHEQPVEMLRLFKLMLVSECEPDHITMGNLLRGCVEISSLKLGSQVHCYSLKTGLAPEQFIKNGLIDMYAKCGSLGQARRIFDSMDNRDVVSWSTLIVGYAQSGFGEEALILFKEMKSAGIEPNHVTFVGVLTACSHVGLVEEGLKLYATMQTEHGISPTKEHCSCVVDLLARAGRLNEAESFIDEMKLEPDVVVWKTLLSACKTQGNVHLAQKAAENILKIDPFNSTAHVLLCSMHASSGNWENAALLRSSMKKHDVKKIPGQSWIEVEDKIHIFFAEDIFHPERDDIYTVLHNIWSQMLDECNPQHKKRLQFIHETG

SEQ ID NO: 46401 - protein, 384 aa, Arabidopsis thaliana
  peptide (1)..(384): Ceres Seq. ID no. 14309925
MALSQGMQIHSYIIKWGFLADLTVCNSLLTMYTFCSDLYCCFNLFEDFRNNADSVSWNTILTACLQHEQPVEMLRLFKLMLVSECEPDHITMGNLLRGCVEISSLKLGSQVHCYSLKTGLAPEQFIKNGLIDMYAKCGSLGQARRIFDSMDNRDVVSWSTLIVGYAQSGFGEEALILFKEMKSAGIEPNHVTFVGVLTACSHVGLVEEGLKLYATMQTEHGISPTKEHCSCVVDLLARAGRLNEAESFIDEMKLEPDVVVWKTLLSACKTQGNVHLAQKAAENILKIDPFNSTAHVLLCSMHASSGNWENAALLRSSMKKHDVKKIPGQSWIEVEDKIHIFFAEDIFHPERDDIYTVLHNIWSQMLDECNPQHKKRLQFIHETG

SEQ ID NO: 46402 - protein, 378 aa, Arabidopsis thaliana
  peptide (1)..(378): Ceres Seq. ID no. 14309926
MQIHSYIIKWGFLADLTVCNSLLTMYTFCSDLYCCFNLFEDFRNNADSVSWNTILTACLQHEQPVEMLRLFKLMLVSECEPDHITMGNLLRGCVEISSLKLGSQVHCYSLKTGLAPEQFIKNGLIDMYAKCGSLGQARRIFDSMDNRDVVSWSTLIVGYAQSGFGEEALILFKEMKSAGIEPNHVTFVGVLTACSHVGLVEEGLKLYATMQTEHGISPTKEHCSCVVDLLARAGRLNEAESFIDEMKLEPDVVVWKTLLSACKTQGNVHLAQKAAENILKIDPFNSTAHVLLCSMHASSGNWENAALLRSSMKKHDVKKIPGQSWIEVEDKIHIFFAEDIFHPERDDIYTVLHNIWSQMLDECNPQHKKRLQFIHETG

SEQ ID NO: 46403 - DNA, 1395 bp, Arabidopsis thaliana
  misc_feature (1)..(1395): Ceres Seq. ID no. 12601784
  misc_feature (1)..(1395): Ortholog of  Ceres SEQ ID NO 15171293 as cited in SEQ ID NO 51744
agagctctattcccatcaagaaacacacttcggaagatggagatcactaacgttaccgagtatgatgcaatcgcaaagcagaagctgcctaagatggtgtacgactactatgcatctggtgcagaagaccaatggactcttcaagagaacagaaacgcttttgcaaggatcctctttcggcctcggattctgattgatgtgagcaagattgacatgacaaccacccgtcttggggttcaagatctcgatgcccatcatggttgctccaactgccatgcaaaagatggctcaccctgatggggaatatgctactgctagagctgcatctgcagctggaactatcatgacactatcttcatgggctacttcaagtgttgaagaagttgcttccacagggccaggaatccgattcttccagctctatgtatacaagaacaggaaggtggttgagcagctcgtgagaagagccgagaaagctgggttcaaagccattgctctcactgtagacaccccaaggctaggtcgcagagagtctgatatcaagaacagattcactttgcctccaaacctgacattgaagaactttgaaggtcttgaccttggaaagatggacgaggccaatgactctggcttggcttcgtatgttgctggtcaaattgaccgtaccttgagctggaaggatatccagtggctccaaacaatcaccaacatgccaattcttgtcaagggtgttcttacaggagaggatgcaaggatagcgattcaagctggagcagcagggatcattgtgtcaaatcatggagctcgccagcttgattatgtcccagcaacaatctcagcccttgaagaggttgtcaaagcaacacaaggacgagttcctgtcttcttggatggtggtgttcgacgtggcactgatgtcttcaaggcacttgcacttggagcctctggaatatttattggaagaccagtggtttttgcactagctgctgaaggagaagccggagtcaaaaaggtgcttcaaatgttgcgtgatgagttcgagctaaccatggcactaagtgggtgccggtcactcagtgaaatcacccgtaaccacattgtcacggaatgggacactccacgccatttgcccaggttatagagaagaaaaaaaaaacagagaacagaaacaacacggcaccaaaacgtattcatattctgattgatcactttgcttctactctgctatatttatatctcgaaaaacttgtttctccctatatcggatcacaaaaacgtgcgtagagattctctgtaatgctatttggctacattttacctttccgtttattcttattgcttgtacaatagatgttgattcctacaataccaatgaatactaaaatctgttcccgg

SEQ ID NO: 46404 - protein, 297 aa, Arabidopsis thaliana
  peptide (1)..(297): Ceres Seq. ID no. 12601785
MPIMVAPTAMQKMAHPDGEYATARAASAAGTIMTLSSWATSSVEEVASTGPGIRFFQLYVYKNRKVVEQLVRRAEKAGFKAIALTVDTPRLGRRESDIKNRFTLPPNLTLKNFEGLDLGKMDEANDSGLASYVAGQIDRTLSWKDIQWLQTITNMPILVKGVLTGEDARIAIQAGAAGIIVSNHGARQLDYVPATISALEEVVKATQGRVPVFLDGGVRRGTDVFKALALGASGIFIGRPVVFALAAEGEAGVKKVLQMLRDEFELTMALSGCRSLSEITRNHIVTEWDTPRHLPRL

SEQ ID NO: 46405 - protein, 294 aa, Arabidopsis thaliana
  peptide (1)..(294): Ceres Seq. ID no. 12601786
MVAPTAMQKMAHPDGEYATARAASAAGTIMTLSSWATSSVEEVASTGPGIRFFQLYVYKNRKVVEQLVRRAEKAGFKAIALTVDTPRLGRRESDIKNRFTLPPNLTLKNFEGLDLGKMDEANDSGLASYVAGQIDRTLSWKDIQWLQTITNMPILVKGVLTGEDARIAIQAGAAGIIVSNHGARQLDYVPATISALEEVVKATQGRVPVFLDGGVRRGTDVFKALALGASGIFIGRPVVFALAAEGEAGVKKVLQMLRDEFELTMALSGCRSLSEITRNHIVTEWDTPRHLPRL

SEQ ID NO: 46406 - protein, 288 aa, Arabidopsis thaliana
  peptide (1)..(288): Ceres Seq. ID no. 12601787
MQKMAHPDGEYATARAASAAGTIMTLSSWATSSVEEVASTGPGIRFFQLYVYKNRKVVEQLVRRAEKAGFKAIALTVDTPRLGRRESDIKNRFTLPPNLTLKNFEGLDLGKMDEANDSGLASYVAGQIDRTLSWKDIQWLQTITNMPILVKGVLTGEDARIAIQAGAAGIIVSNHGARQLDYVPATISALEEVVKATQGRVPVFLDGGVRRGTDVFKALALGASGIFIGRPVVFALAAEGEAGVKKVLQMLRDEFELTMALSGCRSLSEITRNHIVTEWDTPRHLPRL

SEQ ID NO: 46407 - DNA, 1197 bp, Arabidopsis thaliana
  misc_feature (1)..(1197): Ceres Seq. ID no. 12574522
  misc_feature (1)..(1197): Ortholog of  Ceres SEQ ID NO 15168476 as cited in SEQ ID NO 60262
ggagtttttttttttccatttcttctcattctcaaattctctttcttagtttggttgttttgatgcagaaatcgactgagttcgtaacttgttgttgtctgatcttttaaagattcaaccttttttggtccgatcatggctgttgctgagaatgctggtgtcaaagtggactcttctggtcagaatttagacaacaacaacactgctgcttcagctaccgagacgacaaagccgccatgtcctgatgatgatcaaagccctaaatctgactcatccactcctcttaccatcgattcgactcctgaaactgacgatcggatcaatgagactgctcaaaaggttcagactttaaatgggtttagtggaaatggtgagagagataacaatggagagatcaaagatttggctgatgcgttttctaagcttaatccgatggctcaggagtttgttcctccttctcttgctcgaagtcaatctggggttttgagaaatggattagggtttactaacaattttgcagccccacctaaacttgctgatgggaatgatcattttcctagaaggagaaggagttttggccaagggaagcgaagaatgaacaaaaggacaagcttggctcagaaggatgatgtaatcaggagaactgtatatgtctctgacatcgaccaacaggttacagaggagaacctcgcaggtgtctttattaactgtggacaggttgttgattgtcgtgtatgcggtgatccaaattctgtccttcgtttcgctttcattgaatttaccaatgaagagggagctagagctgctttgagcatgtcgggtactgtgctaggtttttaccctcttaaggttcttccttccaaaacagctattgctcctgttaacccgacttttcttccacgatctgaggatgagcgtgagatgtgcgttaggactgtttactgtaccaacattgacaagcggatcactcaaattgacttgaaaggcttctttgaaatgctttgcggggaggttcatcgtctgaggcttggagactatcaccaccaaacccgtattgcttttgttgagtttgcgatggcggaaagcgcaattgctgcgcttcactgcagcggtattgtcttgggggcactcccaataagggtaagtccatcgaagacaccagtaaggccgcattttccccgcgctgagttcaagtga

SEQ ID NO: 46408 - protein, 353 aa, Arabidopsis thaliana
  peptide (1)..(353): Ceres Seq. ID no. 12574523
MAVAENAGVKVDSSGQNLDNNNTAASATETTKPPCPDDDQSPKSDSSTPLTIDSTPETDDRINETAQKVQTLNGFSGNGERDNNGEIKDLADAFSKLNPMAQEFVPPSLARSQSGVLRNGLGFTNNFAAPPKLADGNDHFPRRRRSFGQGKRRMNKRTSLAQKDDVIRRTVYVSDIDQQVTEENLAGVFINCGQVVDCRVCGDPNSVLRFAFIEFTNEEGARAALSMSGTVLGFYPLKVLPSKTAIAPVNPTFLPRSEDEREMCVRTVYCTNIDKRITQIDLKGFFEMLCGEVHRLRLGDYHHQTRIAFVEFAMAESAIAALHCSGIVLGALPIRVSPSKTPVRPHFPRAEFK

SEQ ID NO: 46409 - protein, 254 aa, Arabidopsis thaliana
  peptide (1)..(254): Ceres Seq. ID no. 12574524
MAQEFVPPSLARSQSGVLRNGLGFTNNFAAPPKLADGNDHFPRRRRSFGQGKRRMNKRTSLAQKDDVIRRTVYVSDIDQQVTEENLAGVFINCGQVVDCRVCGDPNSVLRFAFIEFTNEEGARAALSMSGTVLGFYPLKVLPSKTAIAPVNPTFLPRSEDEREMCVRTVYCTNIDKRITQIDLKGFFEMLCGEVHRLRLGDYHHQTRIAFVEFAMAESAIAALHCSGIVLGALPIRVSPSKTPVRPHFPRAEFK

SEQ ID NO: 46410 - protein, 200 aa, Arabidopsis thaliana
  peptide (1)..(200): Ceres Seq. ID no. 12574525
MNKRTSLAQKDDVIRRTVYVSDIDQQVTEENLAGVFINCGQVVDCRVCGDPNSVLRFAFIEFTNEEGARAALSMSGTVLGFYPLKVLPSKTAIAPVNPTFLPRSEDEREMCVRTVYCTNIDKRITQIDLKGFFEMLCGEVHRLRLGDYHHQTRIAFVEFAMAESAIAALHCSGIVLGALPIRVSPSKTPVRPHFPRAEFK

SEQ ID NO: 46411 - DNA, 1706 bp, Arabidopsis thaliana; identical to SEQ ID NO: 46320
  misc_feature (1)..(1706): Ceres Seq. ID no. 13591923
  misc_feature (1)..(1706): Ortholog of  Ceres SEQ ID NO 14307863 as cited in SEQ ID NO 20504

SEQ ID NO: 46412 - protein, 495 aa, Arabidopsis thaliana; identical to SEQ ID NO: 46321
  peptide (1)..(495): Ceres Seq. ID no. 13591924

SEQ ID NO: 46413 - protein, 450 aa, Arabidopsis thaliana; identical to SEQ ID NO: 46322
  peptide (1)..(450): Ceres Seq. ID no. 13591925

SEQ ID NO: 46414 - protein, 415 aa, Arabidopsis thaliana; identical to SEQ ID NO: 46323
  peptide (1)..(415): Ceres Seq. ID no. 13591926

SEQ ID NO: 46415 - DNA, 3191 bp, Arabidopsis thaliana
  misc_feature (1)..(3191): Ceres Seq. ID no. 13578685
  misc_feature (1)..(3191): Ortholog of  Ceres SEQ ID NO 14316144 as cited in SEQ ID NO 52397
gtttcttcttcatggagacttgaaagcttttaaagtatatctaaaaacgcagtcgttttaagactgtgtgtgagaaatggctctgtttagagatattgttcttcttgggtttctcttctgcttgagcttagtagctactgtgacttcagaggagggagcaacgttgctggagattaagaagtcattcaaagatgtgaacaatgttctttatgactggacaacttcaccttcttcggattattgtgtctggagaggtgtgtcttgtgaaaatgtcaccttcaatgttgttgctcttaatttgtcagatttgaatcttgatggagaaatctcacctgctattggagatctcaagagtctcttgtcaattgatctgcgaggtaatcgcttgtctggacaaatccctgatgagattggtgactgttcttctttgcaaaacttagacttatccttcaatgaattaagtggtgacataccgttttcgatttcgaagttgaagcaacttgagcagctgattctgaagaataaccaattgataggaccgatcccttcaacactttcacagattccaaacctgaaaattctggacttggcacagaataaactcagtggtgagataccaagacttatttactggaatgaagttcttcagtatcttgggttgcgaggaaacaacttagtcggtaacatttctccagatttgtgtcaactgactggtctttggtattttgacgtaagaaacaacagtttgactggtagtatacctgagacgataggaaattgcactgccttccaggttttggacttgtcctacaatcagctaactggtgagatcccttttgacatcggcttcctgcaagttgcaacattatcattgcaaggcaatcaactctctgggaagattccatcagtgattggtctcatgcaagcccttgcagtcttagatctaagtggcaacttgttgagtggatctattcctccgattctcggaaatcttactttcaccgagaaattgtatttgcacagtaacaagctgactggttcaattccacctgagcttggaaacatgtcaaaactccattacctggaactcaatgataatcatctcacgggtcatataccaccagagcttgggaagcttactgacttgtttgatctgaatgtggccaacaatgatctggaaggacctatacctgatcatctgagctcttgcacaaatctaaacagcttaaatgttcatgggaacaagtttagtggcactataccccgagcatttcaaaagctagaaagtatgacttaccttaatctgtccagcaacaatatcaaaggtccaatcccggttgagctatctcgtatcggtaacttagatacattggatctttccaacaacaagataaatggaatcattccttcttcccttggtgatttggagcatcttctcaagatgaacttgagtagaaatcatataactggtgtagttccaggcgactttggaaatctaagaagcatcatggaaatagatctttcaaataatgatatctctggcccaattccagaagagcttaaccaattacagaacataattttgctgagactggaaaataataacctgactggtaatgttggttcattagccaactgtctcagtctcactgtattgaatgtatctcataacaacctcgtaggtgatatccctaagaacaataacttctcaagattttcaccagacagcttcattggcaatcctggtctttgcggtagttggctaaactcaccgtgtcatgattctcgtcgaactgtacgagtgtcaatctctagagcagctattcttggaatagctattgggggacttgtgatccttctcatggtcttaatagcagcttgccgaccgcataatcctcctccttttcttgatggatcacttgacaaaccagtaacttattcgacaccgaagctcgtcatccttcatatgaacatggcactccacgtttacgaggatatcatgagaatgacagagaatctaagtgagaagtatatcattgggcacggagcatcaagcactgtatacaaatgtgttttgaagaattgtaaaccggttgcgattaagcggctttactctcacaacccacagtcaatgaaacagtttgaaacagaactcgagatgctaagtagcatcaagcacagaaatcttgtgagcctacaagcttattccctctctcacttggggagtcttctgttctatgactatttggaaaatggtagcctctgggatcttcttcatggccctacgaagaaaaagactcttgattgggacacacggcttaagatagcatatggtgcagcacaaggtttagcttatctacaccatgactgtagtccaaggatcattcacagagacgtgaagtcgtccaacattctcttggacaaagacttagaggctcgtttgacagattttggaatagcgaaaagcttgtgtgtgtcaaagtcacatacttcaacttacgtgatgggcacgataggttacatagaccccgagtatgctcgcacttcacggctcactgagaaatccgatgtctacagttatggaatagtccttcttgagttgttaacccgaaggaaagccgttgatgacgaatccaatctccaccatctgataatgtcaaagacggggaacaatgaagtgatggaaatggcagatccagacatcacatcgacgtgtaaagatctcggtgtggtgaagaaagttttccaactggcactcctatgcaccaaaagacagccgaatgatcgacccacaatgcaccaggtgactcgtgttctcggcagttttatgctatcggaacaaccacctgctgcgactgacacgtcagcgacgctggctggttcgtgctacgtcgatgagtatgcaaatctcaagactcctcattctgtcaattgctcttccatgagtgcttctgatgctcaactgtttcttcggtttggacaagttatttctcagaacagtgagtagtttttcgttaggaggagaatctttaaaacggtatcttttcgttgcgttaagctgttagaaaaattaatgtctcatgtaaagtattatgcactgccttattattattagacaagtgtgtggtgtgaatatgtcttcagactggcacttagacttcctataagttcttgcctatctaagtttttct

SEQ ID NO: 46416 - protein, 976 aa, Arabidopsis thaliana
  peptide (1)..(976): Ceres Seq. ID no. 13578686
MALFRDIVLLGFLFCLSLVATVTSEEGATLLEIKKSFKDVNNVLYDWTTSPSSDYCVWRGVSCENVTFNVVALNLSDLNLDGEISPAIGDLKSLLSIDLRGNRLSGQIPDEIGDCSSLQNLDLSFNELSGDIPFSISKLKQLEQLILKNNQLIGPIPSTLSQIPNLKILDLAQNKLSGEIPRLIYWNEVLQYLGLRGNNLVGNISPDLCQLTGLWYFDVRNNSLTGSIPETIGNCTAFQVLDLSYNQLTGEIPFDIGFLQVATLSLQGNQLSGKIPSVIGLMQALAVLDLSGNLLSGSIPPILGNLTFTEKLYLHSNKLTGSIPPELGNMSKLHYLELNDNHLTGHIPPELGKLTDLFDLNVANNDLEGPIPDHLSSCTNLNSLNVHGNKFSGTIPRAFQKLESMTYLNLSSNNIKGPIPVELSRIGNLDTLDLSNNKINGIIPSSLGDLEHLLKMNLSRNHITGVVPGDFGNLRSIMEIDLSNNDISGPIPEELNQLQNIILLRLENNNLTGNVGSLANCLSLTVLNVSHNNLVGDIPKNNNFSRFSPDSFIGNPGLCGSWLNSPCHDSRRTVRVSISRAAILGIAIGGLVILLMVLIAACRPHNPPPFLDGSLDKPVTYSTPKLVILHMNMALHVYEDIMRMTENLSEKYIIGHGASSTVYKCVLKNCKPVAIKRLYSHNPQSMKQFETELEMLSSIKHRNLVSLQAYSLSHLGSLLFYDYLENGSLWDLLHGPTKKKTLDWDTRLKIAYGAAQGLAYLHHDCSPRIIHRDVKSSNILLDKDLEARLTDFGIAKSLCVSKSHTSTYVMGTIGYIDPEYARTSRLTEKSDVYSYGIVLLELLTRRKAVDDESNLHHLIMSKTGNNEVMEMADPDITSTCKDLGVVKKVFQLALLCTKRQPNDRPTMHQVTRVLGSFMLSEQPPAATDTSATLAGSCYVDEYANLKTPHSVNCSSMSASDAQLFLRFGQVISQNSE

SEQ ID NO: 46417 - protein, 695 aa, Arabidopsis thaliana
  peptide (1)..(695): Ceres Seq. ID no. 13578687
MQALAVLDLSGNLLSGSIPPILGNLTFTEKLYLHSNKLTGSIPPELGNMSKLHYLELNDNHLTGHIPPELGKLTDLFDLNVANNDLEGPIPDHLSSCTNLNSLNVHGNKFSGTIPRAFQKLESMTYLNLSSNNIKGPIPVELSRIGNLDTLDLSNNKINGIIPSSLGDLEHLLKMNLSRNHITGVVPGDFGNLRSIMEIDLSNNDISGPIPEELNQLQNIILLRLENNNLTGNVGSLANCLSLTVLNVSHNNLVGDIPKNNNFSRFSPDSFIGNPGLCGSWLNSPCHDSRRTVRVSISRAAILGIAIGGLVILLMVLIAACRPHNPPPFLDGSLDKPVTYSTPKLVILHMNMALHVYEDIMRMTENLSEKYIIGHGASSTVYKCVLKNCKPVAIKRLYSHNPQSMKQFETELEMLSSIKHRNLVSLQAYSLSHLGSLLFYDYLENGSLWDLLHGPTKKKTLDWDTRLKIAYGAAQGLAYLHHDCSPRIIHRDVKSSNILLDKDLEARLTDFGIAKSLCVSKSHTSTYVMGTIGYIDPEYARTSRLTEKSDVYSYGIVLLELLTRRKAVDDESNLHHLIMSKTGNNEVMEMADPDITSTCKDLGVVKKVFQLALLCTKRQPNDRPTMHQVTRVLGSFMLSEQPPAATDTSATLAGSCYVDEYANLKTPHSVNCSSMSASDAQLFLRFGQVISQNSE

SEQ ID NO: 46418 - protein, 647 aa, Arabidopsis thaliana
  peptide (1)..(647): Ceres Seq. ID no. 13578688
MSKLHYLELNDNHLTGHIPPELGKLTDLFDLNVANNDLEGPIPDHLSSCTNLNSLNVHGNKFSGTIPRAFQKLESMTYLNLSSNNIKGPIPVELSRIGNLDTLDLSNNKINGIIPSSLGDLEHLLKMNLSRNHITGVVPGDFGNLRSIMEIDLSNNDISGPIPEELNQLQNIILLRLENNNLTGNVGSLANCLSLTVLNVSHNNLVGDIPKNNNFSRFSPDSFIGNPGLCGSWLNSPCHDSRRTVRVSISRAAILGIAIGGLVILLMVLIAACRPHNPPPFLDGSLDKPVTYSTPKLVILHMNMALHVYEDIMRMTENLSEKYIIGHGASSTVYKCVLKNCKPVAIKRLYSHNPQSMKQFETELEMLSSIKHRNLVSLQAYSLSHLGSLLFYDYLENGSLWDLLHGPTKKKTLDWDTRLKIAYGAAQGLAYLHHDCSPRIIHRDVKSSNILLDKDLEARLTDFGIAKSLCVSKSHTSTYVMGTIGYIDPEYARTSRLTEKSDVYSYGIVLLELLTRRKAVDDESNLHHLIMSKTGNNEVMEMADPDITSTCKDLGVVKKVFQLALLCTKRQPNDRPTMHQVTRVLGSFMLSEQPPAATDTSATLAGSCYVDEYANLKTPHSVNCSSMSASDAQLFLRFGQVISQNSE

SEQ ID NO: 46419 - DNA, 1664 bp, Arabidopsis thaliana; identical to SEQ ID NO: 26269
  misc_feature (1)..(1664): Ceres Seq. ID no. 13591642
  misc_feature (1)..(1664): Ortholog of  Ceres SEQ ID NO 14305697 as cited in SEQ ID NO 52505
  misc_feature (1)..(1664): Ortholog of  Ceres SEQ ID NO 15179023 as cited in SEQ ID NO 0

SEQ ID NO: 46420 - protein, 448 aa, Arabidopsis thaliana; identical to SEQ ID NO: 26270
  peptide (1)..(448): Ceres Seq. ID no. 13591643

SEQ ID NO: 46421 - protein, 296 aa, Arabidopsis thaliana; identical to SEQ ID NO: 26271
  peptide (1)..(296): Ceres Seq. ID no. 13591644

SEQ ID NO: 46422 - DNA, 2186 bp, Arabidopsis thaliana; identical to SEQ ID NO: 45056
  misc_feature (1)..(2186): Ceres Seq. ID no. 13575826
  misc_feature (1)..(2186): Ortholog of  Ceres SEQ ID NO 13663839 as cited in SEQ ID NO 60834
  misc_feature (1)..(2186): Ortholog of  Ceres SEQ ID NO 14313284 as cited in SEQ ID NO 67146
  misc_feature (1)..(2186): Ortholog of  Ceres SEQ ID NO 14308925 as cited in SEQ ID NO 0

SEQ ID NO: 46423 - protein, 699 aa, Arabidopsis thaliana; identical to SEQ ID NO: 45057
  peptide (1)..(699): Ceres Seq. ID no. 15222635

SEQ ID NO: 46424 - protein, 615 aa, Arabidopsis thaliana; identical to SEQ ID NO: 45058
  peptide (1)..(615): Ceres Seq. ID no. 15222636

SEQ ID NO: 46425 - protein, 594 aa, Arabidopsis thaliana; identical to SEQ ID NO: 45059
  peptide (1)..(594): Ceres Seq. ID no. 15222637

SEQ ID NO: 46426 - DNA, 1698 bp, Arabidopsis thaliana
  misc_feature (1)..(1698): Ceres Seq. ID no. 14309962
  misc_feature (1)..(1698): Ortholog of  Ceres SEQ ID NO 13639663 as cited in SEQ ID NO 57850
agatttgagtctactcgttttttcttatctatcgcaaaacaaactctcccgtcgtcaccattcgattacgggagtgtaatggctcttatacaatttggaagttcatgtgttgctcaatgggggattcttcgtcctcggtttgctgttaaagctttttatccaagcagattggagtctcaccatgacaattgcatcagccaaataaattgtctgggagcttcaaggtcgagtatgtttgcacagggctctttacccttcttgtcattgacgggagtatctcctaatacattctcgtagaggagctcgcttcactgttagagctgatactgatttctattctgtccttggagtctcgaaaaatgcaaccaaagctgagattaaaagcgcttatcggaagctcgctaggagttatcatccagatgtgaacaaggatgctggggcagaagataaatttaaagaaataagtaatgcatatgagatcttatcagatgatgagaaaagatctctatacgacagatatggcgaggcaggagttaaaggcgctggaatgggaggcatgggggattatagtaatccgtttgatctatttgagtcattattcgaaggaatgggtgggatgggaggaatgggcggtggaatgggtagtagaggctcaaggagcagagctatcgatggtgaagatgagtattactcactaatcttgaatttcaaagaagcggttttcggtattgagaaagaaattgagatatctcggttagagagctgtgggacttgcaatggttctggagctaaagcgggaaccaaaccaaccaaatgcaaaacatgtggcgggcaaggacaggtggtagcatcaacgaggacaccactcggtgtattccaacaagtgatgacttgctctccgtgtaacggaactggggagatatcaaaaccgtgtggtgcatgctcaggagatggacgtgtgagaaggacaaagcggattagtcttaaagttcctgcgggtgtggattctggaagtaggttaagagtgaggggagaagggaatgcaggaaagagaggtggatcaccgggagatctctttgcggttattgaggttattccagatccggttttgaagcgtgatgatacaaatatactttatacgtgtaagatatcgtatgtagatgccatattggggacgactttgaggtaccaacagtggatggagaggtggatttgaaagtaccggcagggacacaaccaagcacgacattggtgatggctaaaaaaggagttccggttttgaataagagcaagatgagaggtgatcagttagtgagagtgcaagttgagattcctaagagattgagtaaagaagagaagatgcttgttgaggagctggctgatatgagcaagaacaaggtagctaatagcaggagataaaccaacacacaatattagtgaaatgtgatattatatagattcatcgttctctgcttgtcttctttctaatggttcttctaatgatggagaagataagcaagaggaagaagaaagaattattaggtgagaggaaaatctgaagaactctgtttttgggttttcctcttcaatttttgtgttttacttttaaaacaaattttatgggtttatcaggattcagggtaggtcttgattgtattgtactgctatttttatacatttgaatcttcttttcttatt

SEQ ID NO: 46427 - protein, 222 aa, Arabidopsis thaliana
  peptide (1)..(222): Ceres Seq. ID no. 14309963
MGGMGDYSNPFDLFESLFEGMGGMGGMGGGMGSRGSRSRAIDGEDEYYSLILNFKEAVFGIEKEIEISRLESCGTCNGSGAKAGTKPTKCKTCGGQGQVVASTRTPLGVFQQVMTCSPCNGTGEISKPCGACSGDGRVRRTKRISLKVPAGVDSGSRLRVRGEGNAGKRGGSPGDLFAVIEVIPDPVLKRDDTNILYTCKISYVDAILGTTLRYQQWMERWI

SEQ ID NO: 46428 - protein, 219 aa, Arabidopsis thaliana
  peptide (1)..(219): Ceres Seq. ID no. 14309964
MGDYSNPFDLFESLFEGMGGMGGMGGGMGSRGSRSRAIDGEDEYYSLILNFKEAVFGIEKEIEISRLESCGTCNGSGAKAGTKPTKCKTCGGQGQVVASTRTPLGVFQQVMTCSPCNGTGEISKPCGACSGDGRVRRTKRISLKVPAGVDSGSRLRVRGEGNAGKRGGSPGDLFAVIEVIPDPVLKRDDTNILYTCKISYVDAILGTTLRYQQWMERWI

SEQ ID NO: 46429 - protein, 202 aa, Arabidopsis thaliana
  peptide (1)..(202): Ceres Seq. ID no. 14309965
MGGMGGMGGGMGSRGSRSRAIDGEDEYYSLILNFKEAVFGIEKEIEISRLESCGTCNGSGAKAGTKPTKCKTCGGQGQVVASTRTPLGVFQQVMTCSPCNGTGEISKPCGACSGDGRVRRTKRISLKVPAGVDSGSRLRVRGEGNAGKRGGSPGDLFAVIEVIPDPVLKRDDTNILYTCKISYVDAILGTTLRYQQWMERWI

SEQ ID NO: 46430 - DNA, 1152 bp, Arabidopsis thaliana
  misc_feature (1)..(1152): Ceres Seq. ID no. 12576001
  misc_feature (1)..(1152): Ortholog of  Ceres SEQ ID NO 14312320 as cited in SEQ ID NO 59385
gacgaggttcccaactttttcaccactggctcctctgtgattgattccattcccgtctaaaatatctcagatctcagatttcagatctctcagttcaactttctcattcatcacagatcatagtgtacgaagatggcggctatggcggcgaagcttcatatatcgacgaaatcggatcagagcaatgtgcgattgcctagactgatcaacctgtcgcgtgatccaaccgctagagtcttgtttccacgaaacggatcagtttcttcgctccacaccaacttctcttctccaaatataatggttccatgcgccggaggtggtggtggtggaagcatcggtaatcacggcggtggaagtggaagcggaggaggtggtggtggttatggaggttcagaagaagaagaatcgtctccatggggaccattagggttatttatccaaggatggagatcacgagttgcagctgattctcaattccctttcaaggtactaatggaaatgcttgttggtgttagcgccaatgtacttggcgacatggcttcacgccctaatttcggattgaacgagctagatttcgtcttctccactctcgttgtaggttcgattctcaatttcacactcatgtacctcttagctccttctgcaatatctcatggatcctccaatttgttgcctggaatctttagaagctgtccttcgagccatatgtttgaacagggtaacttcacccttatgaaccgttttgggactcttgtgtacaaaggaatggtttttgctaccgtgggattagctgcaggtcttgttggaaccgctatctctaacgggttgatcatgctgaggaaaaagattgatccgagcttcgaaacgccgaacaaaccaccacctacgctgctgaattctttaacttgggcaacgcatatgggagtgagcgccaatgtgaggtaccaaacgttgaatggggctgaattcttgctggaaaagtcattgccgccattggtgtttaaaacaagtgtgattgctttgagggttgtgaacaatgttttgggaggaatgtcgtttgttacattggcgaggatgactggatcacagtcggtggaggaggagaagaagatagagatgtcagagatatcagagaaggagaaagaggattga

SEQ ID NO: 46431 - protein, 339 aa, Arabidopsis thaliana
  peptide (1)..(339): Ceres Seq. ID no. 12576002
MAAMAAKLHISTKSDQSNVRLPRLINLSRDPTARVLFPRNGSVSSLHTNFSSPNIMVPCAGGGGGGSIGNHGGGSGSGGGGGGYGGSEEEESSPWGPLGLFIQGWRSRVAADSQFPFKVLMEMLVGVSANVLGDMASRPNFGLNELDFVFSTLVVGSILNFTLMYLLAPSAISHGSSNLLPGIFRSCPSSHMFEQGNFTLMNRFGTLVYKGMVFATVGLAAGLVGTAISNGLIMLRKKIDPSFETPNKPPPTLLNSLTWATHMGVSANVRYQTLNGAEFLLEKSLPPLVFKTSVIALRVVNNVLGGMSFVTLARMTGSQSVEEEKKIEMSEISEKEKED

SEQ ID NO: 46432 - protein, 336 aa, Arabidopsis thaliana
  peptide (1)..(336): Ceres Seq. ID no. 12576003
MAAKLHISTKSDQSNVRLPRLINLSRDPTARVLFPRNGSVSSLHTNFSSPNIMVPCAGGGGGGSIGNHGGGSGSGGGGGGYGGSEEEESSPWGPLGLFIQGWRSRVAADSQFPFKVLMEMLVGVSANVLGDMASRPNFGLNELDFVFSTLVVGSILNFTLMYLLAPSAISHGSSNLLPGIFRSCPSSHMFEQGNFTLMNRFGTLVYKGMVFATVGLAAGLVGTAISNGLIMLRKKIDPSFETPNKPPPTLLNSLTWATHMGVSANVRYQTLNGAEFLLEKSLPPLVFKTSVIALRVVNNVLGGMSFVTLARMTGSQSVEEEKKIEMSEISEKEKED

SEQ ID NO: 46433 - protein, 284 aa, Arabidopsis thaliana
  peptide (1)..(284): Ceres Seq. ID no. 12576004
MVPCAGGGGGGSIGNHGGGSGSGGGGGGYGGSEEEESSPWGPLGLFIQGWRSRVAADSQFPFKVLMEMLVGVSANVLGDMASRPNFGLNELDFVFSTLVVGSILNFTLMYLLAPSAISHGSSNLLPGIFRSCPSSHMFEQGNFTLMNRFGTLVYKGMVFATVGLAAGLVGTAISNGLIMLRKKIDPSFETPNKPPPTLLNSLTWATHMGVSANVRYQTLNGAEFLLEKSLPPLVFKTSVIALRVVNNVLGGMSFVTLARMTGSQSVEEEKKIEMSEISEKEKED

SEQ ID NO: 46434 - DNA, 2255 bp, Arabidopsis thaliana
  misc_feature (1)..(2255): Ceres Seq. ID no. 14310031
  misc_feature (1)..(2255): Ortholog of  Ceres SEQ ID NO 15180386 as cited in SEQ ID NO 0
gagaaccttctttttccggcgagggaaaagcttcctcagccctaatcgctaaatcgatgaaattatgctcccaacgtttaacggtttaaagatcattccaaaaactcaaccttttgcgtgtctcctctcgccatgaccctaatctcaagatttttgatctctagagtgattagtagaactctgttttcgaatcagaataatagaacagctattaatgtttctgtaaagttgccacaattcagaattcagagtaatggatatcacacattgggtcttcttcataatgttaaaggaaggtttttaggtagtaatcatcatcagcttgcgcgtaggagctattcgattgcagttgcgagtaatgtagttaagcaacatgctcaagtctcttggggaaggcttgtacagagagtaactctgagtcgtagttggaacttacctcggataagtcagattgctcaagcgtgtagcttgtctttagcccgttcgcacttcttgttacctggtttattggctcttacctatagacaagtggcgtatgcgcaaagggtggttccaaatcctgtggtctattctccttcacacatttctccttataggagttcgataaacttccctatcgttctctcgtctttagtgttttctgcggtcaagggtgttgttctgaacgggagagctctttatttagcaattttgttttctccaaatgttattatggcgttgttgggatttgcttgcgggcctcgttacagacagctgcagtatgaggtcctccatcgaactctggagaaagcaggtcctgcttttatcaaatttggtcaatggattgctacgcgacctgatcggtttaataaggatttgtgtttgcagctttcaaagcttcacagtaatgctcctgagcacagttttgcgttcaccaaaaagagcattgaaaatgcatttggtcgtaaactctctgagatatttgaggaatttgatgaggcgccagtggcatctgggagtatagctcaagtacaccgagcttccttgaagtttcagtatgcaggacaaaaggtgaagtcctcggaagttgctgtgaaagttagacatccttgtgttgaggaaacgatgaagcgagattttgtgataattaatttcgtggcgaggctaaccacttttattccggggttaaattggcttagattggacgagtgtgtgcaacagtttagtgtctacatgttgtcccaagttgatctctcaagggaagcttctcatttgagtcggtttatatataacttccgtggatggaaagatgtctcttttcctaagcccatctatcctctaatacatcccgctgttttagtcgagacgtatgagcacggagagagtgtggctcgttatgttgatggctccgaaggacaagaaaaacttaaggctaaagtagctcatatcggaactaatgctctcttgaaaatgctcctggtcgacaacttcattcatgcagatatgcatcctgggaatattcttgtccggccaaacaatactagaagaggtctattcagatcgaggaagccacacatcgttttcctagatgtgggcatgactgcagaactttcaaaaactgaccgagataacctactcggatttttcaaggccgttgcacgtagagacggccggactgctgctgaacgaacacttaaattatctaaacaacagaattgtcctgatccacaggcctttatcaaggaagtagaagaagcatttacattctggggaacagaggaaggggatctagtccatccagcggattgtatgcacgaactattcgagaaaatgaggagtcatagagttaatatcgacggcaatgtgtccaccgtcatgtttacaacattagttctcgagggttggcaacggaaactggatccaggatacgatgtgatgcgtacgctacaaacaatgctgctgaaaacggattggatgaaatcactttcttacacgatcgatggacttatggctccgtagattgaaaaggttcaatctttgattcttttacccatttaacacttgagagccacatttttgttttgttgccttaggatgtgaagaagaaccaaaacatatattttagagaaaaacaaaggaaaagtcctttactgttttgtcttcttcttatcttttgcttattctttgattattctttttgctagaaattggaattcttcatcattctaaaacagagaatttgtattttgggtatatatcagttttgaatttcctcg

SEQ ID NO: 46435 - protein, 621 aa, Arabidopsis thaliana
  peptide (1)..(621): Ceres Seq. ID no. 14310032
MTLISRFLISRVISRTLFSNQNNRTAINVSVKLPQFRIQSNGYHTLGLLHNVKGRFLGSNHHQLARRSYSIAVASNVVKQHAQVSWGRLVQRVTLSRSWNLPRISQIAQACSLSLARSHFLLPGLLALTYRQVAYAQRVVPNPVVYSPSHISPYRSSINFPIVLSSLVFSAVKGVVLNGRALYLAILFSPNVIMALLGFACGPRYRQLQYEVLHRTLEKAGPAFIKFGQWIATRPDRFNKDLCLQLSKLHSNAPEHSFAFTKKSIENAFGRKLSEIFEEFDEAPVASGSIAQVHRASLKFQYAGQKVKSSEVAVKVRHPCVEETMKRDFVIINFVARLTTFIPGLNWLRLDECVQQFSVYMLSQVDLSREASHLSRFIYNFRGWKDVSFPKPIYPLIHPAVLVETYEHGESVARYVDGSEGQEKLKAKVAHIGTNALLKMLLVDNFIHADMHPGNILVRPNNTRRGLFRSRKPHIVFLDVGMTAELSKTDRDNLLGFFKAVARRDGRTAAERTLKLSKQQNCPDPQAFIKEVEEAFTFWGTEEGDLVHPADCMHELFEKMRSHRVNIDGNVSTVMFTTLVLEGWQRKLDPGYDVMRTLQTMLLKTDWMKSLSYTIDGLMAP

SEQ ID NO: 46436 - protein, 428 aa, Arabidopsis thaliana
  peptide (1)..(428): Ceres Seq. ID no. 14310033
MALLGFACGPRYRQLQYEVLHRTLEKAGPAFIKFGQWIATRPDRFNKDLCLQLSKLHSNAPEHSFAFTKKSIENAFGRKLSEIFEEFDEAPVASGSIAQVHRASLKFQYAGQKVKSSEVAVKVRHPCVEETMKRDFVIINFVARLTTFIPGLNWLRLDECVQQFSVYMLSQVDLSREASHLSRFIYNFRGWKDVSFPKPIYPLIHPAVLVETYEHGESVARYVDGSEGQEKLKAKVAHIGTNALLKMLLVDNFIHADMHPGNILVRPNNTRRGLFRSRKPHIVFLDVGMTAELSKTDRDNLLGFFKAVARRDGRTAAERTLKLSKQQNCPDPQAFIKEVEEAFTFWGTEEGDLVHPADCMHELFEKMRSHRVNIDGNVSTVMFTTLVLEGWQRKLDPGYDVMRTLQTMLLKTDWMKSLSYTIDGLMAP

SEQ ID NO: 46437 - DNA, 2369 bp, Arabidopsis thaliana
  misc_feature (1)..(2369): Ceres Seq. ID no. 12574176
  misc_feature (1)..(2369): Ortholog of  Ceres SEQ ID NO 12460981 as cited in SEQ ID NO 65146
atctcctccattttctctcttctctctttttataagaactcttcttcttcttcttctctctcaattccatctctctctctctttctagttcttgttccctttcgaatcaagtgatcatggctcaagaagagatacagaaacctactgcctctgttccagtggttaaggaggaaactcctgccccggttaaggaggttgaggtgccggttactacggagaaagctgtggctgcgcctgctccggaagctacggaggagaaagttgtgtctgaggtggcggtgcctgaaacagaggtgacggcggtgaaagaggaggaggttgcgacgggaaaggagatcttgcaatcggagtcgtttaaggaggaaggctatttggcttctgaattacaggaagctgagaagaatgctttggctgagttaaaggagttggttagggaggctttgaacaagcgtgaattcaccgcgccaccgccaccaccagctccggtaaaggaagagaaagttgaggagaagaaaacagaggaaacagaggaaaagaaggaagaagttaaaacagaggaaaaatctcttgaggctgaaaccaaagaagaggagaaatctgctgctccggccaccgtagagaccaagaaagaagagatcttggccgctccggctccgatcgtcgcagagaccaagaaggaagagacaccagttgctcctgctccggtagagactaaaccggctgctccggtcgttgcagagacaaagaaggaagaaatattaccagctgctccggtcaccacagagaccaaggtggaagagaaagtcgttccagtagaaaccacaccggctgctccagtcaccacagagaccaaggaagaagagaaagccgctccggtcaccacagagaccaaggaggaagagaaagcagctccgggagagaccaagaaagaagagaaagcaaccgcctctactcaggtcaagagggcctcaaaatttattaaagatatatttgtctcagtcaccactagcgagaagaagaaggaagaagagaaaccagcagtagtaacaatcgagaaggctttcgcagctgatcaagaagaagaaacaaaaaccgttgaagcagtcgaagaatcaatcgtctccatcactcttccagagacagctgcatacgtagagccagaagaagtctcaatctggggaatcccacttctagaggacgaaagatccgacgtgatcctcctcaaattcctccgtgcacgtgacttcaaggtcaaagaagccttcacgatgctgaaaaacaccgtccaatggcgcaaagagaacaagatcgacgacctagtctcagaagatcttgaaggaagcgagtttgagaagttggtgttcactcacggtgtcgacaaacaaggacatgtcgtgatctatagctcgtacggtgagtttcagaacaaggagattttctcagataaagagaagcttagcaagtttctcaaatggaggattcagttccaagagaagtgtgtgaggtctcttgactttagccctgaggctaagtcatcgttcgtgttcgttagtgacttcaggaacgctcctggacttggtcagagagcattgtggcagttcattaaacgcgccgttaagcaattcgaagataactatccagagtttgtcgctaaagagctgttcattaatgtcccatggtggtacattccttactacaaaacattcggaagtatcattacatcgccaaggacaaggagcaagatggtcctttctggtccatccaaatccgctgagaccattttcaaatacgtagctcctgaagtagtcccggttaagtatggtggactcagcaaagatagtccattcaccgttgaagatggagtcaccgaggccgtagttaaatcgacatctaaatataccattgatttgcctgctacagagggttccacgctctcatgggagcttagggttttgggtgcggacgtgagctacggagctcaatttgagccaagcaatgaggcaagctacaccgtgattgtctctaagaaccggaaggtcggtttaactgatgaaccggtgataaccgattctttcaaggcaagtgaggcgggaaaggtcgtgatcacgattgacaaccaaacctttaagaagaagaaggtgctctacaggtccaaaacccaagcataagattatgtgtccgatctttgaatgaatgaagaaacaagaaagatggttgggaattttaattcatttaatttagtacgtttattcatttgtgtatttttgaaacctaaaagaaggtttgtgttttatggatggttttgatttgttttggtgatgggatttttttttgttgatgattcttatatatacaaaatatttgtgtgc

SEQ ID NO: 46438 - protein, 683 aa, Arabidopsis thaliana
  peptide (1)..(683): Ceres Seq. ID no. 12574177
MAQEEIQKPTASVPVVKEETPAPVKEVEVPVTTEKAVAAPAPEATEEKVVSEVAVPETEVTAVKEEEVATGKEILQSESFKEEGYLASELQEAEKNALAELKELVREALNKREFTAPPPPPAPVKEEKVEEKKTEETEEKKEEVKTEEKSLEAETKEEEKSAAPATVETKKEEILAAPAPIVAETKKEETPVAPAPVETKPAAPVVAETKKEEILPAAPVTTETKVEEKVVPVETTPAAPVTTETKEEEKAAPVTTETKEEEKAAPGETKKEEKATASTQVKRASKFIKDIFVSVTTSEKKKEEEKPAVVTIEKAFAADQEEETKTVEAVEESIVSITLPETAAYVEPEEVSIWGIPLLEDERSDVILLKFLRARDFKVKEAFTMLKNTVQWRKENKIDDLVSEDLEGSEFEKLVFTHGVDKQGHVVIYSSYGEFQNKEIFSDKEKLSKFLKWRIQFQEKCVRSLDFSPEAKSSFVFVSDFRNAPGLGQRALWQFIKRAVKQFEDNYPEFVAKELFINVPWWYIPYYKTFGSIITSPRTRSKMVLSGPSKSAETIFKYVAPEVVPVKYGGLSKDSPFTVEDGVTEAVVKSTSKYTIDLPATEGSTLSWELRVLGADVSYGAQFEPSNEASYTVIVSKNRKVGLTDEPVITDSFKASEAGKVVITIDNQTFKKKKVLYRSKTQA

SEQ ID NO: 46439 - DNA, 1454 bp, Arabidopsis thaliana
  misc_feature (1)..(1454): Ceres Seq. ID no. 14315696
  misc_feature (1)..(1454): Ortholog of  Ceres SEQ ID NO 13596554 as cited in SEQ ID NO 62818
gagcttcttgaagcagatcaagatcaagaaagaacacttttgtgaacttcttcttccccacatctcctaaaagcttcacacacaccaaaccaagcgtttcttttcttatctactcgattatcaacacatcttttcctgaaactccttccacatctttgtctgatcatggtgaaggaaacagtgtattatgatgttcttggtgtcactccctctgcttctgaggaagagattcgcaaggcttattacatcaaggcaagacaagttcatcctgacaagaatcaaggtgatcctctagctgctgaaaagtttcaggttcttggtgaagcttaccaggttctaagtgatcctgttcatcgtgaagcgtatgatcggactggaaaattctcagctcccaaagaaacaatggttgatccaacggctgttttcgctcttcttttcggaagtgaactattcgaggattatatcggtcacttggctgttgcatcaatggcttccactcaaatggcttctgaaatcgaaaactctgatcagtttcaagacaaactaaaggctgttcagaaagaaagagaagaaaacctttcaaggtttctcaaagattttctgagtcaatatgtccacggagacaaagaaggattcataagccgcgcagaatctgaagccaagagactttcagatgcagcttttggagcggatatgttgcatacaattggatatgtatacacaagacaagcagctcaagaacttgggaagagagctctttacttaggagttccatttgtagctgaatgggttaggaacaaaggtcattcttggaaatcacagattagtgcagctaaaggagctttacagttacttcagctgcaagaagagagtaaccggagattaaagaaagatgggactagtccagcaaatgagttagagtctcatattcagaccaacaaagaaacattgatgggatctttgtggaaacttaatgttgtcgacattgaagtgactctgttacatgtgtgtcagatggtcttgcgcgaaaacaatttgagaaaggaggagctcaagtctagagcaatggctctcaagattcttgggaagatttttcagcaagaaaagcaatcgaagaacggtacaacatcaagaaaagaagatgaagacagcgacgatgatgacagtagcagcgatgacgattcttcacaaccactttcatacagaactcctctgcttactcaggggattggtagacttttcagatgtctctgcaatccagcattcgatgtagacgatgatgaaattgtatacaaaggcaaatgatcaataccacactcaaatatttcaatttgatgggtctcacatgtgaaatgtgatgcagcttcttaagttattaattctttataaatatatgtaatgatgataattgatgggatcaaacttaacaaattgttaaaataagtttattttcc

SEQ ID NO: 46440 - protein, 379 aa, Arabidopsis thaliana
  peptide (1)..(379): Ceres Seq. ID no. 14315697
MVKETVYYDVLGVTPSASEEEIRKAYYIKARQVHPDKNQGDPLAAEKFQVLGEAYQVLSDPVHREAYDRTGKFSAPKETMVDPTAVFALLFGSELFEDYIGHLAVASMASTQMASEIENSDQFQDKLKAVQKEREENLSRFLKDFLSQYVHGDKEGFISRAESEAKRLSDAAFGADMLHTIGYVYTRQAAQELGKRALYLGVPFVAEWVRNKGHSWKSQISAAKGALQLLQLQEESNRRLKKDGTSPANELESHIQTNKETLMGSLWKLNVVDIEVTLLHVCQMVLRENNLRKEELKSRAMALKILGKIFQQEKQSKNGTTSRKEDEDSDDDDSSSDDDSSQPLSYRTPLLTQGIGRLFRCLCNPAFDVDDDEIVYKGK

SEQ ID NO: 46441 - protein, 300 aa, Arabidopsis thaliana
  peptide (1)..(300): Ceres Seq. ID no. 14315698
MVDPTAVFALLFGSELFEDYIGHLAVASMASTQMASEIENSDQFQDKLKAVQKEREENLSRFLKDFLSQYVHGDKEGFISRAESEAKRLSDAAFGADMLHTIGYVYTRQAAQELGKRALYLGVPFVAEWVRNKGHSWKSQISAAKGALQLLQLQEESNRRLKKDGTSPANELESHIQTNKETLMGSLWKLNVVDIEVTLLHVCQMVLRENNLRKEELKSRAMALKILGKIFQQEKQSKNGTTSRKEDEDSDDDDSSSDDDSSQPLSYRTPLLTQGIGRLFRCLCNPAFDVDDDEIVYKGK

SEQ ID NO: 46442 - protein, 272 aa, Arabidopsis thaliana
  peptide (1)..(272): Ceres Seq. ID no. 14315699
MASTQMASEIENSDQFQDKLKAVQKEREENLSRFLKDFLSQYVHGDKEGFISRAESEAKRLSDAAFGADMLHTIGYVYTRQAAQELGKRALYLGVPFVAEWVRNKGHSWKSQISAAKGALQLLQLQEESNRRLKKDGTSPANELESHIQTNKETLMGSLWKLNVVDIEVTLLHVCQMVLRENNLRKEELKSRAMALKILGKIFQQEKQSKNGTTSRKEDEDSDDDDSSSDDDSSQPLSYRTPLLTQGIGRLFRCLCNPAFDVDDDEIVYKGK

SEQ ID NO: 46443 - DNA, 2589 bp, Arabidopsis thaliana
  misc_feature (1)..(2589): Ceres Seq. ID no. 12600667
  misc_feature (1)..(2589): Ortholog of  Ceres SEQ ID NO 15173102 as cited in SEQ ID NO 61106
aaaaaacacaaacatcacatgtatacacacatatagttacaaacacacatacacaaaacacagatatataaaaatgtcttgttataataaagcactattgatcggcaacaaagtcgtcgttatacttgtattcctcttatgtttggttcactcgtcagagtcacttcgaccactgtttgcatgtgatccagcaaacgggttaacccggacgctccggttctgtcgggccaatgtaccgatccatgtgagagttcaagatttgctcggaaggctcacgttgcaggagaagatccgcaacctcgtcaacaatgctgccgccgtaccacgtctcggtattggaggctatgagtggtggtccgaggctctccacggcatttccgacgttggtccaggcgctaagttcggtggtgcttttcccggtgccaccagcttccctcaggtcatcaccaccgcagcttctttcaaccagtctctatgggaagagatcggacgggtggtgtctgatgaggcaagagctatgtacaatggtggcgtggccggtctgacatattggagtccgaatgtgaatatcttgagggacccgcggtggggccgaggccaagaaactcccggagaagatcctatcgttgccgcaaaatatgccgccagctacgtccggggacttcagggtactgctgccggtaaccgccttaaagtcgccgcatgttgcaaacattacactgcttatgatcttgataattggaatggcgtcgaccgtttccacttcaacgctaaggtcacccaacaagatttagaggacacatacaacgtgccattcaaatcatgtgtttacgaaggaaaagtagcgagtgtaatgtgttcgtacaaccaagtcaatggaaagcccacatgtgctgatgaaaatctcttaaagaacactattcgtggtcaatggcgtctcaatgggtacattgtctcagattgtgactctgttgatgttttcttcaaccaacaacattacactagcactccggaagaagccgccgccagatccattaaagccggtttggacttggactgcgggccgtttttggcgattttcacggaaggtgcagtgaagaaaggattgttaacggagaatgacatcaatttagcacttgctaatacattaacagtccaaatgagacttggtatgtttgatggtaaccttgggccgtacgctaatcttgggccaagagatgtttgtactccggcccataaacatttagctcttgaagcagcccatcaagggattgttcttctcaaaaactctgctcgctctcttccactctcccccagacgccaccgcaccgtcgccgtgattggtccaaactccgacgtcactgagactatgatcggcaactatgcagggaaagcatgcgcctatacgtcgccgttgcaagggatttcaagatacgcgaggacacttcaccaagctggctgtgccggcgtggcttgcaaagggaaccaaggatttggtgcagcggaggcagcggcgcgtgaagccgacgcgacggttcttgtgatgggattagatcagtcgatagaggcagagacacgagatcgaaccgggcttctcttaccgggttatcaacaagacctagtgacccgtgtagctcaagcttctagaggtccagtcattttggtccttatgagtggtggaccaatcgatgtaaccttcgctaagaatgatcctcgtgttgctgccatcatttgggctgggtatccgggtcaagcgggtggagctgccatcgccaatatcatctttggtgctgctaatcccggaggaaaactaccaatgacatggtatccacaagattacgtggccaaagtgccaatgacggtaatggccatgagagcatccggtaattatccaggaaggacatacagattctacaaaggtccagtagtatttccatttgggttcggtttaagttacactaccttcactcatagtttggccaaaagcccattggcccaactatcagtttcactctccaatctcaactctgccaataccattctcaactcttcatcacactccatcaaagtgtctcacaccaactgcaattcatttccgaaaatgccccttcacgtcgaagtatcaaacacaggtgaattcgatggaacacacacggtgtttgtatttgctgagccgccgataaacggaataaaaggattgggtgtgaacaaacaattgatagcgttcgagaaggttcatgtcatggcaggggcaaaacagaccgttcaagttgatgttgatgcttgcaagcatcttggtgtagtggatgagtatggaaagaggagaatcccaatgggtgagcataagctgcacattggtgaccttaaacatactattttggtccaaccgcaactttgacggacgcataaaaaaaccaacaaataaggaaagcattttaacaaagtggagtgtttcctcttatttatataatatagagagataggtttattttcttatgaaattattactcaagaaagtatgaatttgtaaagaaccaccaaagggttgcttcttggttgtgtcttttttcctttaatttttttttggac

SEQ ID NO: 46444 - protein, 798 aa, Arabidopsis thaliana
  peptide (1)..(798): Ceres Seq. ID no. 12600668
KNTNITCIHTYSYKHTYTKHRYIKMSCYNKALLIGNKVVVILVFLLCLVHSSESLRPLFACDPANGLTRTLRFCRANVPIHVRVQDLLGRLTLQEKIRNLVNNAAAVPRLGIGGYEWWSEALHGISDVGPGAKFGGAFPGATSFPQVITTAASFNQSLWEEIGRVVSDEARAMYNGGVAGLTYWSPNVNILRDPRWGRGQETPGEDPIVAAKYAASYVRGLQGTAAGNRLKVAACCKHYTAYDLDNWNGVDRFHFNAKVTQQDLEDTYNVPFKSCVYEGKVASVMCSYNQVNGKPTCADENLLKNTIRGQWRLNGYIVSDCDSVDVFFNQQHYTSTPEEAAARSIKAGLDLDCGPFLAIFTEGAVKKGLLTENDINLALANTLTVQMRLGMFDGNLGPYANLGPRDVCTPAHKHLALEAAHQGIVLLKNSARSLPLSPRRHRTVAVIGPNSDVTETMIGNYAGKACAYTSPLQGISRYARTLHQAGCAGVACKGNQGFGAAEAAAREADATVLVMGLDQSIEAETRDRTGLLLPGYQQDLVTRVAQASRGPVILVLMSGGPIDVTFAKNDPRVAAIIWAGYPGQAGGAAIANIIFGAANPGGKLPMTWYPQDYVAKVPMTVMAMRASGNYPGRTYRFYKGPVVFPFGFGLSYTTFTHSLAKSPLAQLSVSLSNLNSANTILNSSSHSIKVSHTNCNSFPKMPLHVEVSNTGEFDGTHTVFVFAEPPINGIKGLGVNKQLIAFEKVHVMAGAKQTVQVDVDACKHLGVVDEYGKRRIPMGEHKLHIGDLKHTILVQPQL

SEQ ID NO: 46445 - protein, 774 aa, Arabidopsis thaliana
  peptide (1)..(774): Ceres Seq. ID no. 12600669
MSCYNKALLIGNKVVVILVFLLCLVHSSESLRPLFACDPANGLTRTLRFCRANVPIHVRVQDLLGRLTLQEKIRNLVNNAAAVPRLGIGGYEWWSEALHGISDVGPGAKFGGAFPGATSFPQVITTAASFNQSLWEEIGRVVSDEARAMYNGGVAGLTYWSPNVNILRDPRWGRGQETPGEDPIVAAKYAASYVRGLQGTAAGNRLKVAACCKHYTAYDLDNWNGVDRFHFNAKVTQQDLEDTYNVPFKSCVYEGKVASVMCSYNQVNGKPTCADENLLKNTIRGQWRLNGYIVSDCDSVDVFFNQQHYTSTPEEAAARSIKAGLDLDCGPFLAIFTEGAVKKGLLTENDINLALANTLTVQMRLGMFDGNLGPYANLGPRDVCTPAHKHLALEAAHQGIVLLKNSARSLPLSPRRHRTVAVIGPNSDVTETMIGNYAGKACAYTSPLQGISRYARTLHQAGCAGVACKGNQGFGAAEAAAREADATVLVMGLDQSIEAETRDRTGLLLPGYQQDLVTRVAQASRGPVILVLMSGGPIDVTFAKNDPRVAAIIWAGYPGQAGGAAIANIIFGAANPGGKLPMTWYPQDYVAKVPMTVMAMRASGNYPGRTYRFYKGPVVFPFGFGLSYTTFTHSLAKSPLAQLSVSLSNLNSANTILNSSSHSIKVSHTNCNSFPKMPLHVEVSNTGEFDGTHTVFVFAEPPINGIKGLGVNKQLIAFEKVHVMAGAKQTVQVDVDACKHLGVVDEYGKRRIPMGEHKLHIGDLKHTILVQPQL

SEQ ID NO: 46446 - protein, 626 aa, Arabidopsis thaliana
  peptide (1)..(626): Ceres Seq. ID no. 12600670
MYNGGVAGLTYWSPNVNILRDPRWGRGQETPGEDPIVAAKYAASYVRGLQGTAAGNRLKVAACCKHYTAYDLDNWNGVDRFHFNAKVTQQDLEDTYNVPFKSCVYEGKVASVMCSYNQVNGKPTCADENLLKNTIRGQWRLNGYIVSDCDSVDVFFNQQHYTSTPEEAAARSIKAGLDLDCGPFLAIFTEGAVKKGLLTENDINLALANTLTVQMRLGMFDGNLGPYANLGPRDVCTPAHKHLALEAAHQGIVLLKNSARSLPLSPRRHRTVAVIGPNSDVTETMIGNYAGKACAYTSPLQGISRYARTLHQAGCAGVACKGNQGFGAAEAAAREADATVLVMGLDQSIEAETRDRTGLLLPGYQQDLVTRVAQASRGPVILVLMSGGPIDVTFAKNDPRVAAIIWAGYPGQAGGAAIANIIFGAANPGGKLPMTWYPQDYVAKVPMTVMAMRASGNYPGRTYRFYKGPVVFPFGFGLSYTTFTHSLAKSPLAQLSVSLSNLNSANTILNSSSHSIKVSHTNCNSFPKMPLHVEVSNTGEFDGTHTVFVFAEPPINGIKGLGVNKQLIAFEKVHVMAGAKQTVQVDVDACKHLGVVDEYGKRRIPMGEHKLHIGDLKHTILVQPQL

SEQ ID NO: 46447 - DNA, 1488 bp, Arabidopsis thaliana
  misc_feature (1)..(1488): Ceres Seq. ID no. 13592020
  misc_feature (1)..(1488): Ortholog of  Ceres SEQ ID NO 14314404 as cited in SEQ ID NO 57421
  misc_feature (1)..(1488): Ortholog of  Ceres SEQ ID NO 13493536 as cited in SEQ ID NO 58515
  misc_feature (1)..(1488): Ortholog of  Ceres SEQ ID NO 15225741 as cited in SEQ ID NO 59606
  misc_feature (1)..(1488): Ortholog of  Ceres SEQ ID NO 12618461 as cited in SEQ ID NO 64349
ggtgaagctccgatctgagtttttagcaatggcgaaactaaaccctaaattcatctctttgattcttttcgctctcgtggtgatcgtctctgctgaagttatcttcgaggagaaattcgaagatggatgggagaagagatgggtaaaatctgactggaagaaagatgataatactgctggggaatggaaacacacagctggaaattggtctggtgatgctaacgataaaggtatccaaactagcgaggactacagattctacgctatatcagctgaattccctgagtttagcaacaaggataagaccttagtcttccaattctctgtcaagcatgagcagaagcttgactgtggtggtggctacatgaagttgctaagtgatgatgttgaccagacgaaattcggaggagacactccttacagcattatgtttgggccagatatttgtggctacagcactaagaaagtacatgctatccttacttacaatggaaccaaccatttgatcaagaaggaggtcccatgtgagactgatcagcttactcacgtgtacaccttcgtcctccgtccagatgctacttacagtattttgattgataatgttgagaagcaaactggtagcctttactctgactgggatcttctcccagcaaagaagattaaggatccaagtgctaagaagcctgaggactgggatgacaaagagtacattccagatccagaagacactaagccagcgggatatgatgacatcccaaaggagattccagacactgacgcaaagaagcctgaggactgggatgatgaagaagatggtgagtggactgcccctaccattcccaaccccgagtacaatggtgaatggaagcccaagaaaattaagaaccccgcttacaagggcaagtggaaggctccaatgatcgacaaccctgaattcaaggatgacccagaactctatgtcttccccaaattgaagtatgttggagttgagttgtggcaggtgaaatctggttccttgttcgacaatgtcttggtcagcgatgacccagagtacgctaagaagttggccgaggaaacctggggaaagcacaaggatgcggagaaagcagcatttgacgaagctgagaagaagagagaggaagaggaatcaaaggatgctcctgctgaatccgacgctgaggaagaagcagaagatgatgacaatgaaggagatgactcagacaatgaatcaaagtctgaggaaaccaaggaggccgaggaaaccaaggaagccgaggaaaccgatgccgcccatgacgagctctaagcaaaggtggaggattaaaaagttttcagagtcttaattgttcttttaaacttttcttttaaaaggaattctttagctctagtttggttggaatgtagaactttttagctattattatggtgaaatggttgtggtaactttgttttagactttgagaaaatcctgactttctccttctcttt

SEQ ID NO: 46448 - protein, 434 aa, Arabidopsis thaliana
  peptide (1)..(434): Ceres Seq. ID no. 13592021
VKLRSEFLAMAKLNPKFISLILFALVVIVSAEVIFEEKFEDGWEKRWVKSDWKKDDNTAGEWKHTAGNWSGDANDKGIQTSEDYRFYAISAEFPEFSNKDKTLVFQFSVKHEQKLDCGGGYMKLLSDDVDQTKFGGDTPYSIMFGPDICGYSTKKVHAILTYNGTNHLIKKEVPCETDQLTHVYTFVLRPDATYSILIDNVEKQTGSLYSDWDLLPAKKIKDPSAKKPEDWDDKEYIPDPEDTKPAGYDDIPKEIPDTDAKKPEDWDDEEDGEWTAPTIPNPEYNGEWKPKKIKNPAYKGKWKAPMIDNPEFKDDPELYVFPKLKYVGVELWQVKSGSLFDNVLVSDDPEYAKKLAEETWGKHKDAEKAAFDEAEKKREEEESKDAPAESDAEEEAEDDDNEGDDSDNESKSEETKEAEETKEAEETDAAHDEL

SEQ ID NO: 46449 - protein, 425 aa, Arabidopsis thaliana
  peptide (1)..(425): Ceres Seq. ID no. 13592022
MAKLNPKFISLILFALVVIVSAEVIFEEKFEDGWEKRWVKSDWKKDDNTAGEWKHTAGNWSGDANDKGIQTSEDYRFYAISAEFPEFSNKDKTLVFQFSVKHEQKLDCGGGYMKLLSDDVDQTKFGGDTPYSIMFGPDICGYSTKKVHAILTYNGTNHLIKKEVPCETDQLTHVYTFVLRPDATYSILIDNVEKQTGSLYSDWDLLPAKKIKDPSAKKPEDWDDKEYIPDPEDTKPAGYDDIPKEIPDTDAKKPEDWDDEEDGEWTAPTIPNPEYNGEWKPKKIKNPAYKGKWKAPMIDNPEFKDDPELYVFPKLKYVGVELWQVKSGSLFDNVLVSDDPEYAKKLAEETWGKHKDAEKAAFDEAEKKREEEESKDAPAESDAEEEAEDDDNEGDDSDNESKSEETKEAEETKEAEETDAAHDEL

SEQ ID NO: 46450 - protein, 313 aa, Arabidopsis thaliana
  peptide (1)..(313): Ceres Seq. ID no. 13592023
MKLLSDDVDQTKFGGDTPYSIMFGPDICGYSTKKVHAILTYNGTNHLIKKEVPCETDQLTHVYTFVLRPDATYSILIDNVEKQTGSLYSDWDLLPAKKIKDPSAKKPEDWDDKEYIPDPEDTKPAGYDDIPKEIPDTDAKKPEDWDDEEDGEWTAPTIPNPEYNGEWKPKKIKNPAYKGKWKAPMIDNPEFKDDPELYVFPKLKYVGVELWQVKSGSLFDNVLVSDDPEYAKKLAEETWGKHKDAEKAAFDEAEKKREEEESKDAPAESDAEEEAEDDDNEGDDSDNESKSEETKEAEETKEAEETDAAHDEL

SEQ ID NO: 46451 - DNA, 750 bp, Arabidopsis thaliana
  misc_feature (1)..(750): Ceres Seq. ID no. 13578557
  misc_feature (1)..(750): Ortholog of  Ceres SEQ ID NO 15177083 as cited in SEQ ID NO 51917
  misc_feature (1)..(750): Ortholog of  Ceres SEQ ID NO 12609093 as cited in SEQ ID NO 52008
  misc_feature (1)..(750): Ortholog of  Ceres SEQ ID NO 12609839 as cited in SEQ ID NO 52022
  misc_feature (1)..(750): Ortholog of  Ceres SEQ ID NO 13638931 as cited in SEQ ID NO 52200
  misc_feature (1)..(750): Ortholog of  Ceres SEQ ID NO 13638885 as cited in SEQ ID NO 55803
  misc_feature (1)..(750): Ortholog of  Ceres SEQ ID NO 14301452 as cited in SEQ ID NO 60984
  misc_feature (1)..(750): Ortholog of  Ceres SEQ ID NO 12587429 as cited in SEQ ID NO 63113
  misc_feature (1)..(750): Ortholog of  Ceres SEQ ID NO 12615635 as cited in SEQ ID NO 63133
  misc_feature (1)..(750): Ortholog of  Ceres SEQ ID NO 12586351 as cited in SEQ ID NO 64028
  misc_feature (1)..(750): Ortholog of  Ceres SEQ ID NO 15173174 as cited in SEQ ID NO 64046
  misc_feature (1)..(750): Ortholog of  Ceres SEQ ID NO 13654441 as cited in SEQ ID NO 67814
  misc_feature (1)..(750): Ortholog of  Ceres SEQ ID NO 12635608 as cited in SEQ ID NO 0
  misc_feature (1)..(750): Ortholog of  Ceres SEQ ID NO 14309027 as cited in SEQ ID NO 0
tctctcttcgagtcggttcttaatctccgggataaaatggcgaccgaggacgtgaagctgatcggctcatgggcgagtgtttacgtcatgagggcgaggatcgctctccacctcaaatctattagctacgaattccttcaggagacgtatggttcaaagagcgaattgctcctcaaatcaaacccggttcacaagaagatgccggttctgattcacgctgacaaaccggtgtgcgagtccaacatcatcgttcattatatcgacgaggcttggaactcttctggaccttccattctcccgtcccatccatacgaccgggccattgctcggttttgggctgcctacatagacgatcagtggtttatctctgtgagaagtatcctaacagctcaaggagacgaagagaagaaagcagccatagctcaagttgaagaaaggaccaagcttctggagaaagcattcaacgattgtagccaaggaaaaccgttcttcaacggtgaccatatcggttacctcgacattgccttggggagcttcttaggttggtggagagtcgtcgagttggatgccaatcataaatttcttgatgagaccaaaactccctctctagtcaaatgggcagagcggttctgtgatgatcccgctgtgaaacctataatgcccgagattacaaagctcgctgaattcgcaaggaagctctttcctaagcggcaagcataaactggattactaggatgtaagttatataat

SEQ ID NO: 46452 - protein, 239 aa, Arabidopsis thaliana
  peptide (1)..(239): Ceres Seq. ID no. 13578558
SLFESVLNLRDKMATEDVKLIGSWASVYVMRARIALHLKSISYEFLQETYGSKSELLLKSNPVHKKMPVLIHADKPVCESNIIVHYIDEAWNSSGPSILPSHPYDRAIARFWAAYIDDQWFISVRSILTAQGDEEKKAAIAQVEERTKLLEKAFNDCSQGKPFFNGDHIGYLDIALGSFLGWWRVVELDANHKFLDETKTPSLVKWAERFCDDPAVKPIMPEITKLAEFARKLFPKRQA

SEQ ID NO: 46453 - protein, 227 aa, Arabidopsis thaliana
  peptide (1)..(227): Ceres Seq. ID no. 13578559
MATEDVKLIGSWASVYVMRARIALHLKSISYEFLQETYGSKSELLLKSNPVHKKMPVLIHADKPVCESNIIVHYIDEAWNSSGPSILPSHPYDRAIARFWAAYIDDQWFISVRSILTAQGDEEKKAAIAQVEERTKLLEKAFNDCSQGKPFFNGDHIGYLDIALGSFLGWWRVVELDANHKFLDETKTPSLVKWAERFCDDPAVKPIMPEITKLAEFARKLFPKRQA

SEQ ID NO: 46454 - protein, 210 aa, Arabidopsis thaliana
  peptide (1)..(210): Ceres Seq. ID no. 13578560
MRARIALHLKSISYEFLQETYGSKSELLLKSNPVHKKMPVLIHADKPVCESNIIVHYIDEAWNSSGPSILPSHPYDRAIARFWAAYIDDQWFISVRSILTAQGDEEKKAAIAQVEERTKLLEKAFNDCSQGKPFFNGDHIGYLDIALGSFLGWWRVVELDANHKFLDETKTPSLVKWAERFCDDPAVKPIMPEITKLAEFARKLFPKRQA

SEQ ID NO: 46455 - DNA, 1035 bp, Arabidopsis thaliana; identical to SEQ ID NO: 43858
  misc_feature (1)..(1035): Ceres Seq. ID no. 13592062
  misc_feature (1)..(1035): Ortholog of  Ceres SEQ ID NO 13598589 as cited in SEQ ID NO 65254

SEQ ID NO: 46456 - protein, 267 aa, Arabidopsis thaliana [sequence omitted]

SEQ ID NO: 46457 - DNA, 1591 bp, Arabidopsis thaliana
  misc_feature (1)..(1591): Ceres Seq. ID no. 15168713
  misc_feature (1)..(1591): Ortholog of  Ceres SEQ ID NO 13596034 as cited in SEQ ID NO 62066
aaatttctccgatttggatctgtctccaactggcaagggtgacaatggctagctccaagggatcacagagtgttagaaacttgatgtacccgggaaagcatgctttgctcccaccaaaaataccgtttcctagtgtatcagcatcgtattccgagtatattcctactggtttgattggttcaagacatggtcagaagcttagtaatgagaaaacacatcaccagcgaacttcctccgagagccatttggtagaagagcttcccttttggcttgatgatcttctcaatgagcagccggaaagccctgctcgaaaatgtggtcatcggcgttcatcaagtgactcttacgcttatctagatgtggctaatgctacaaacataagtttgactctccaaaatgatttcagttataggaatactgttttatccactcaaagaggagtccaagagcttgaccggaataaaaatgctcaggatgctgccttctactctggtgctagttttctgaaacagaagagtcgtcagcgggattctttggtggcaactggggcttgtccttcttggttacctttcgctcgtgagaacggtggcggaaaaaacttgggagctttatatatgtctcaagatgcaacagtaatatcgtcagaaagaaagaactatgctgaacctttttctcatgacccaaaaatgttatcttctgaggaaaacaactccaatccttcgcctgtgacttatgaagctgacaacacaaaacgagccaaacagcaatttgcacaaagatcacgggtccgtaagctccagtacatatctgagctagaaagaaatgtacagacattgcaggcagaaggctccaaagtttcagctgaacttgattttctcaaccagaggaatcttattctgagtatggaaaataaagctctcaagaagcgtctcgaaagtatagctcaggagaagcttatcaaacaattggaacaagaagtgttggaaaaggagattgggagactacgagcgttgtatcagcaacaacaacaaactcaaaaaccatcagccagtcacggacgtgctactagcaaagatctcgactctcagttctccagtctttcactgaacaccaaagattccaactgtaggcgtgactctgtatctgtgatgggtcaattccacttttagtaaatgtctctctacccactggttcattagagatcttaagggcctggcgattcaccaagatcaggccctaatctaccacctcaccgcagacgtttttaactcccccgtcgttttttttatatttttcttatggttgacaagttaactcaccagtgcacctggaaaccctatattacttccaggagatggcttgcctgaggtggtttagttcgaagatcagacacctggacttcatttatctggtgattgttgtagcgacttgtaatatgttatgaatatattcgaacccggactcatttctggagttgtacaatgatctccactgctgtattttatgtttacttgtaaaatgatgcattcccttcgagtgaatgcttcatgtaaagaagttgacattttctgtagtactatccccaagcgtc

SEQ ID NO: 46458 - protein, 388 aa, Arabidopsis thaliana
  peptide (1)..(388): Ceres Seq. ID no. 15168714
ISPIWICLQLARVTMASSKGSQSVRNLMYPGKHALLPPKIPFPSVSASYSEYIPTGLIGSRHGQKLSNEKTHHQRTSSESHLVEELPFWLDDLLNEQPESPARKCGHRRSSSDSYAYLDVANATNISLTLQNDFSYRNTVLSTQRGVQELDRNKNAQDAAFYSGASFLKQKSRQRDSLVATGACPSWLPFARENGGGKNLGALYMSQDATVISSERKNYAEPFSHDPKMLSSEENNSNPSPVTYEADNTKRAKQQFAQRSRVRKLQYISELERNVQTLQAEGSKVSAELDFLNQRNLILSMENKALKKRLESIAQEKLIKQLEQEVLEKEIGRLRALYQQQQQTQKPSASHGRATSKDLDSQFSSLSLNTKDSNCRRDSVSVMGQFHF

SEQ ID NO: 46459 - protein, 374 aa, Arabidopsis thaliana
  peptide (1)..(374): Ceres Seq. ID no. 15168715
MASSKGSQSVRNLMYPGKHALLPPKIPFPSVSASYSEYIPTGLIGSRHGQKLSNEKTHHQRTSSESHLVEELPFWLDDLLNEQPESPARKCGHRRSSSDSYAYLDVANATNISLTLQNDFSYRNTVLSTQRGVQELDRNKNAQDAAFYSGASFLKQKSRQRDSLVATGACPSWLPFARENGGGKNLGALYMSQDATVISSERKNYAEPFSHDPKMLSSEENNSNPSPVTYEADNTKRAKQQFAQRSRVRKLQYISELERNVQTLQAEGSKVSAELDFLNQRNLILSMENKALKKRLESIAQEKLIKQLEQEVLEKEIGRLRALYQQQQQTQKPSASHGRATSKDLDSQFSSLSLNTKDSNCRRDSVSVMGQFHF

SEQ ID NO: 46460 - protein, 361 aa, Arabidopsis thaliana
  peptide (1)..(361): Ceres Seq. ID no. 15168716
MYPGKHALLPPKIPFPSVSASYSEYIPTGLIGSRHGQKLSNEKTHHQRTSSESHLVEELPFWLDDLLNEQPESPARKCGHRRSSSDSYAYLDVANATNISLTLQNDFSYRNTVLSTQRGVQELDRNKNAQDAAFYSGASFLKQKSRQRDSLVATGACPSWLPFARENGGGKNLGALYMSQDATVISSERKNYAEPFSHDPKMLSSEENNSNPSPVTYEADNTKRAKQQFAQRSRVRKLQYISELERNVQTLQAEGSKVSAELDFLNQRNLILSMENKALKKRLESIAQEKLIKQLEQEVLEKEIGRLRALYQQQQQTQKPSASHGRATSKDLDSQFSSLSLNTKDSNCRRDSVSVMGQFHF

SEQ ID NO: 46461 - DNA, 2234 bp, Arabidopsis thaliana; identical to SEQ ID NO: 46268
  misc_feature (1)..(2234): Ceres Seq. ID no. 14310012
  misc_feature (1)..(2234): Ortholog of  Ceres SEQ ID NO 13655755 as cited in SEQ ID NO 65117

SEQ ID NO: 46462 - protein, 640 aa, Arabidopsis thaliana; identical to SEQ ID NO: 46269
  peptide (1)..(640): Ceres Seq. ID no. 14310013

SEQ ID NO: 46463 - protein, 610 aa, Arabidopsis thaliana; identical to SEQ ID NO: 46270
  peptide (1)..(610): Ceres Seq. ID no. 14310014

SEQ ID NO: 46464 - protein, 584 aa, Arabidopsis thaliana; identical to SEQ ID NO: 46271
  peptide (1)..(584): Ceres Seq. ID no. 14310015

SEQ ID NO: 46465 - DNA, 2529 bp, Arabidopsis thaliana
  misc_feature (1)..(2529): Ceres Seq. ID no. 15168709
  misc_feature (1)..(2529): Ortholog of  Ceres SEQ ID NO 14307253 as cited in SEQ ID NO 54783
  misc_feature (1)..(2529): Ortholog of  Ceres SEQ ID NO 13657138 as cited in SEQ ID NO 65923
  misc_feature (1)..(2529): Ortholog of  Ceres SEQ ID NO 13584744 as cited in SEQ ID NO 69137
gaacgtgattcgcccttttctctttgcccaagagctatacgacaatacctccaccacaccccacacacacacacgagagacagagagagagagaggaaatttgctactgagagatacattcagtgagtgtgtgtctgtcaccgtggaggagaaacggaaggaggatagatgaaaccgaccggagaaggaggaggggaagtcgccggagcggtggcggaaggttcggcgttgttaattgtaggagtaaagccagatgaatggagtagagaggttcttacatggtctttggtgaatgtagcgcgtcctggagatcgaatcgttgctcttcatgttctcgattactctctagagggctcaacgtcgcttatttcgttggttaggaattttgatactatgcttggtgtttatgaaagcttctgcaacttaaaacaggtagatttgaagttgaaggttttcagagggaagtcagctaggaaagttcttgtacaagaagttaaatcgtgtggagctacaagtttaatcgttggttcctctaggaaacatcacactatccgttcttcagcttctttagccaagtattgtgccaggaatcttgccaaggatgtctctgtttttgctgttaaaagtggcaagattatgttccgcagtgtacctaataccaatggtgcagatggtccacagatgaatattccctctttagtttgtggatcaccagatattgctattgaagcggcaaagattggaaacagttttagcccggctagaacgagctcacgctggacaagaactagtcgtagttcgtcattgcagtctcctgacagcttaggtgtagacaatttgttggctttagtgccagtacaaacaaatgagactgattctggttcccttgagtcaggaccaggttggcattttcttcgcgggctttacggtaataatcgaaaaagctggaccaaagtttctgctaagaaggctgtacttcagtgggtttcgaggctgcgaggtcggcattcagaaactgtaatctatctggataggaaacggagtgactctggttgtgatgaagaatgctcttctagtattgatggtgaagatgtttctatatcacggtttggttctgagcttatgcagtcacctctttctcctttcattggatcaaacaacattccagaagagctggaaggtctacatgaaaagtactcttccacatgtagattattcacatacgaggaagtcttgtcaattacctcaaactttgcatctgagaacttggttggagaaggtggtaatagttatgtttatagaggagatctaccagatggcagggaattagctgtcaaaatattgaaaccttgtctggatgtgttgaaggaatttatactggaaattgaagtcattaccagtgtacatcacaaaaatatagtatctctctttggtttctgtttcgagaataataatttgatgctggtatacgattatctaccacgaggaagccttgaagagaaccttcatggcaatagaaaggatgcaaagaaatttggctggatggagagatataaggtggcagtgggtgttgccgaggcgttagactatctgcataatactcatgatccagaagtaattcaccgggatgtcaaatcttctaatgttcttttggcagatgattttgagccacagctctcagatttcggattcgccagcttggcttcaagtacctcacagcatgtagcgggtggggatattgccgggacatttggttacctagcaccagagtacttcatgcacggtaaagtaaccgacaagattgatgtctatgcttttggtgttgtattgctcgagctcatatcgggtagaaaaccaatctgcgtcgaccagtctaaaggccaggagagccttgtcttgtgggcaaacccaattctagatagtggaaagtttgctcagttactggatcccagtctagaaaatgataacagtaacgatctaatcgagaaactattgttagctgccacgctatgcatcaaacgcacacctcatgaccgtccgcaaattggccttgtcctaaagatattacaaggggaagaagaagcaacagagtggggaaagcaacaagtgagagcctcagaagacgtgagcgcatatttgacaaatatagaatcacacataaacctcgcattgcttgatttggaagatgatgcagcttctgatagcagccctgaagctagtagtatctctgttgaggaatacttgaaagggcgatggagccgcactgctagcttcaacttcaactaataatttttactagtttaaccccgaaaatcccaaaatttgacgatattgtaagttgtgtaaattgaatcgattttctgagattctcaagctttaagttgtgtcaatttaggaagagtgaatagctcttgtagagaggacttaagttggaatttgttttctttgttttgtcagagcagaaaatgtttcaagtgttccactttcatatcggttttaaaagtttaaaaatgtataagtgttccggtt

SEQ ID NO: 46466 - protein, 705 aa, Arabidopsis thaliana
  peptide (1)..(705): Ceres Seq. ID no. 15168710
MKPTGEGGGEVAGAVAEGSALLIVGVKPDEWSREVLTWSLVNVARPGDRIVALHVLDYSLEGSTSLISLVRNFDTMLGVYESFCNLKQVDLKLKVFRGKSARKVLVQEVKSCGATSLIVGSSRKHHTIRSSASLAKYCARNLAKDVSVFAVKSGKIMFRSVPNTNGADGPQMNIPSLVCGSPDIAIEAAKIGNSFSPARTSSRWTRTSRSSSLQSPDSLGVDNLLALVPVQTNETDSGSLESGPGWHFLRGLYGNNRKSWTKVSAKKAVLQWVSRLRGRHSETVIYLDRKRSDSGCDEECSSSIDGEDVSISRFGSELMQSPLSPFIGSNNIPEELEGLHEKYSSTCRLFTYEEVLSITSNFASENLVGEGGNSYVYRGDLPDGRELAVKILKPCLDVLKEFILEIEVITSVHHKNIVSLFGFCFENNNLMLVYDYLPRGSLEENLHGNRKDAKKFGWMERYKVAVGVAEALDYLHNTHDPEVIHRDVKSSNVLLADDFEPQLSDFGFASLASSTSQHVAGGDIAGTFGYLAPEYFMHGKVTDKIDVYAFGVVLLELISGRKPICVDQSKGQESLVLWANPILDSGKFAQLLDPSLENDNSNDLIEKLLLAATLCIKRTPHDRPQIGLVLKILQGEEEATEWGKQQVRASEDVSAYLTNIESHINLALLDLEDDAASDSSPEASSISVEEYLKGRWSRTASFNFN

SEQ ID NO: 46467 - protein, 630 aa, Arabidopsis thaliana
  peptide (1)..(630): Ceres Seq. ID no. 15168711
MLGVYESFCNLKQVDLKLKVFRGKSARKVLVQEVKSCGATSLIVGSSRKHHTIRSSASLAKYCARNLAKDVSVFAVKSGKIMFRSVPNTNGADGPQMNIPSLVCGSPDIAIEAAKIGNSFSPARTSSRWTRTSRSSSLQSPDSLGVDNLLALVPVQTNETDSGSLESGPGWHFLRGLYGNNRKSWTKVSAKKAVLQWVSRLRGRHSETVIYLDRKRSDSGCDEECSSSIDGEDVSISRFGSELMQSPLSPFIGSNNIPEELEGLHEKYSSTCRLFTYEEVLSITSNFASENLVGEGGNSYVYRGDLPDGRELAVKILKPCLDVLKEFILEIEVITSVHHKNIVSLFGFCFENNNLMLVYDYLPRGSLEENLHGNRKDAKKFGWMERYKVAVGVAEALDYLHNTHDPEVIHRDVKSSNVLLADDFEPQLSDFGFASLASSTSQHVAGGDIAGTFGYLAPEYFMHGKVTDKIDVYAFGVVLLELISGRKPICVDQSKGQESLVLWANPILDSGKFAQLLDPSLENDNSNDLIEKLLLAATLCIKRTPHDRPQIGLVLKILQGEEEATEWGKQQVRASEDVSAYLTNIESHINLALLDLEDDAASDSSPEASSISVEEYLKGRWSRTASFNFN

SEQ ID NO: 46468 - protein, 549 aa, Arabidopsis thaliana
  peptide (1)..(549): Ceres Seq. ID no. 15168712
MFRSVPNTNGADGPQMNIPSLVCGSPDIAIEAAKIGNSFSPARTSSRWTRTSRSSSLQSPDSLGVDNLLALVPVQTNETDSGSLESGPGWHFLRGLYGNNRKSWTKVSAKKAVLQWVSRLRGRHSETVIYLDRKRSDSGCDEECSSSIDGEDVSISRFGSELMQSPLSPFIGSNNIPEELEGLHEKYSSTCRLFTYEEVLSITSNFASENLVGEGGNSYVYRGDLPDGRELAVKILKPCLDVLKEFILEIEVITSVHHKNIVSLFGFCFENNNLMLVYDYLPRGSLEENLHGNRKDAKKFGWMERYKVAVGVAEALDYLHNTHDPEVIHRDVKSSNVLLADDFEPQLSDFGFASLASSTSQHVAGGDIAGTFGYLAPEYFMHGKVTDKIDVYAFGVVLLELISGRKPICVDQSKGQESLVLWANPILDSGKFAQLLDPSLENDNSNDLIEKLLLAATLCIKRTPHDRPQIGLVLKILQGEEEATEWGKQQVRASEDVSAYLTNIESHINLALLDLEDDAASDSSPEASSISVEEYLKGRWSRTASFNFN

SEQ ID NO: 46469 - DNA, 2416 bp, Arabidopsis thaliana
  misc_feature (1)..(2416): Ceres Seq. ID no. 15168717
  misc_feature (1)..(2416): Ortholog of  Ceres SEQ ID NO 15180156 as cited in SEQ ID NO 0
tcactagtccccccccccccccatttgtttatttcatcgtccaaatttttgacagtatttttttgtttgttagagaagggcgagagagagtgactttttttgtttgcctttgttaatggcttgtgtgtgagattcattgaattttttgaaaattctgacgaataaaaaccctatctaccaatcacaaaccctagatttttgttatcttcttcatccgaagattctctttgatctgtgtctccttccttctgattctcccatttcatttcattgattcttttgattcgattctattcgagctcaattttgtagatcagaacccagaatcgaatttgggataacttgaacaatatccttggtaacttgttgatctgaatttgagtgaagaagacatcgaattcaagtttggtgtgggagattttttttaatggagtgatgatgatttaaagaggaagataaagggaacgatgactggattgggtgttcgatccagtagctatggttccttggagaagacgggacttaacggcgtcgttttacctatccagatcactaccacgacgcgtaccaaaccatctaagatgcagaaagatagagaaggtattgtacattggatctgcaaattcgctggtcgtaagaaggttggcatgttgcttctcttcttaatctccgccgtcgtcttccttcgcgtcctttacgtcggaaaaggtgaagatagtcaggaaggtcaaggtcctccgagtcttcatttcaatggcagttcaggcgtaaattattcaaatatgttacaaacaaatgaagagctaaacatgaatattggaaatatatcgttcaaggcaaaagaagttattgtgttccctcctcctcctatacattttcttggttattcgcttcctcaaggtcatccttgtaacagtttcactttacctcccccaccagcagacaggaaaagaacaggaccacgcccatgcccggtatgttaccttccagtagaagaagcagttgccttgatgccaaatgccccatcattttcccctgttcttaagaacttaacgtatatatatgaagaaccgttaaacagagagacagagtttggagggtcagattttggtggttatcctactttgaaacataggaatgattcttttgacattaaagaaacaatgagtgtacattgtgggtttgtcaaaggacctcaacctggtcgaaatacaggatttgacattgatgaggcagatcttcttgaaatgaagcagtgtcgtgggatagttgttgcttcagcagtatttgatgcttttgatgatgtaaaagccccacaaaatatcagtaaatatgcggaggaaacagtttgcttctacatgtttgttgatgaagagactgaatcaattttgaagagagaacgaggccttgatggcaataagaaagtagggatatggagagttgttgttgttcataatctcccctattcagatggaaggcgcaatggaaaggtgcccaagcttcttgtccataggatgtttccaaatgctcgctattctttatggattgacggaaaactagaacttgtcgtcgatccatatcaaattcttgaaagattcttgtggaggaaaaatgctacttttgctatttctagacattacaaacgatttgatgtcttagtggaagccgaagcaaataaagctgctggtaaatatgataatgcttctatcgactttcaagtggatttttacaagaacgaagggttaaccccttattctgtcgcaaagctcccaatcacaagcgacgtacccgagggttgtgtcattttaagagagcatgttcccataagcaacctcttcacttgtctttggttcaacgaagttgaccgattcacttctagagatcaaatcagtttctcaacagtaagagataagatcgcagcaaaaacaaactggacagtaagcatgttccttgattgtgaaagacgcaattttgtagttcagagatatcaccgagcagaacaagaaagatttgcaaggcaacgacctccggtgcctaattttcctcctccaccaccttcgccgcctccaccagttttaatcagcagcgatttgcctagaaaaatgtcaagtggaagagcggttagcacaacgccgcctagaagacgaggaagagacagacggtctggtcaaaggggtcacaggaaagctaacttgccagtaagattaccagattcagcttaagagttggcgtccgtcttcttcttcttcttcatggtcactctcatcaccaacatcacattccaattttaccacacagtatgtttattttttttgtttctctatttgattctaaggattcaaaatcaattttttaatgtatatatatacacgaacattttgtacttggataataaattatagtgttcgaatttttg

SEQ ID NO: 46470 - protein, 584 aa, Arabidopsis thaliana
  peptide (1)..(584): Ceres Seq. ID no. 15168718
MTGLGVRSSSYGSLEKTGLNGVVLPIQITTTTRTKPSKMQKDREGIVHWICKFAGRKKVGMLLLFLISAVVFLRVLYVGKGEDSQEGQGPPSLHFNGSSGVNYSNMLQTNEELNMNIGNISFKAKEVIVFPPPPIHFLGYSLPQGHPCNSFTLPPPPADRKRTGPRPCPVCYLPVEEAVALMPNAPSFSPVLKNLTYIYEEPLNRETEFGGSDFGGYPTLKHRNDSFDIKETMSVHCGFVKGPQPGRNTGFDIDEADLLEMKQCRGIVVASAVFDAFDDVKAPQNISKYAEETVCFYMFVDEETESILKRERGLDGNKKVGIWRVVVVHNLPYSDGRRNGKVPKLLVHRMFPNARYSLWIDGKLELVVDPYQILERFLWRKNATFAISRHYKRFDVLVEAEANKAAGKYDNASIDFQVDFYKNEGLTPYSVAKLPITSDVPEGCVILREHVPISNLFTCLWFNEVDRFTSRDQISFSTVRDKIAAKTNWTVSMFLDCERRNFVVQRYHRAEQERFARQRPPVPNFPPPPPSPPPPVLISSDLPRKMSSGRAVSTTPPRRRGRDRRSGQRGHRKANLPVRLPDSA

SEQ ID NO: 46471 - protein, 546 aa, Arabidopsis thaliana
  peptide (1)..(546): Ceres Seq. ID no. 15168719
MQKDREGIVHWICKFAGRKKVGMLLLFLISAVVFLRVLYVGKGEDSQEGQGPPSLHFNGSSGVNYSNMLQTNEELNMNIGNISFKAKEVIVFPPPPIHFLGYSLPQGHPCNSFTLPPPPADRKRTGPRPCPVCYLPVEEAVALMPNAPSFSPVLKNLTYIYEEPLNRETEFGGSDFGGYPTLKHRNDSFDIKETMSVHCGFVKGPQPGRNTGFDIDEADLLEMKQCRGIVVASAVFDAFDDVKAPQNISKYAEETVCFYMFVDEETESILKRERGLDGNKKVGIWRVVVVHNLPYSDGRRNGKVPKLLVHRMFPNARYSLWIDGKLELVVDPYQILERFLWRKNATFAISRHYKRFDVLVEAEANKAAGKYDNASIDFQVDFYKNEGLTPYSVAKLPITSDVPEGCVILREHVPISNLFTCLWFNEVDRFTSRDQISFSTVRDKIAAKTNWTVSMFLDCERRNFVVQRYHRAEQERFARQRPPVPNFPPPPPSPPPPVLISSDLPRKMSSGRAVSTTPPRRRGRDRRSGQRGHRKANLPVRLPDSA

SEQ ID NO: 46472 - protein, 524 aa, Arabidopsis thaliana
  peptide (1)..(524): Ceres Seq. ID no. 15168720
MLLLFLISAVVFLRVLYVGKGEDSQEGQGPPSLHFNGSSGVNYSNMLQTNEELNMNIGNISFKAKEVIVFPPPPIHFLGYSLPQGHPCNSFTLPPPPADRKRTGPRPCPVCYLPVEEAVALMPNAPSFSPVLKNLTYIYEEPLNRETEFGGSDFGGYPTLKHRNDSFDIKETMSVHCGFVKGPQPGRNTGFDIDEADLLEMKQCRGIVVASAVFDAFDDVKAPQNISKYAEETVCFYMFVDEETESILKRERGLDGNKKVGIWRVVVVHNLPYSDGRRNGKVPKLLVHRMFPNARYSLWIDGKLELVVDPYQILERFLWRKNATFAISRHYKRFDVLVEAEANKAAGKYDNASIDFQVDFYKNEGLTPYSVAKLPITSDVPEGCVILREHVPISNLFTCLWFNEVDRFTSRDQISFSTVRDKIAAKTNWTVSMFLDCERRNFVVQRYHRAEQERFARQRPPVPNFPPPPPSPPPPVLISSDLPRKMSSGRAVSTTPPRRRGRDRRSGQRGHRKANLPVRLPDSA

SEQ ID NO: 46473 - DNA, 1852 bp, Arabidopsis thaliana
  misc_feature (1)..(1852): Ceres Seq. ID no. 12574781
  misc_feature (1)..(1852): Ortholog of  Ceres SEQ ID NO 13599900 as cited in SEQ ID NO 531
gggagagaatctcgatcaaaggcttcgaagctctctcttttttttttggtgtgtctaaatctctcacgcacgacgttgagagagctctttcctttgcgatcttgttgtcttcctctgctccgatcgaattcacaaccagctttaataagcattgtagttcaacttgaatttattggcggttgttgaagctgtgtagctattaacaattggggctatgcattcaacgattttctgctcgtgaagaaggaatataacttatttataaggtttcagtcttagacatgtcgtgtttcgattgcagtggttatgatgtctcaagttgtcttattcatctcgctgaatggcatcctttggaatagtcaagttctccgggcttgaagccctcgaaaccccttttatcgcggggttcctcagttaacttgaggattttatatttcatcatacatttgaggagcaatttgtttttttattttatttttgagaaggagatcatgtttcgtgatagttttttgtttgcccgtaccatcggttgctttggatgctttggcagttctggtagtagaaaccaacaatcgcctaagccctacgatgatgatacacattcctgtgatagtgatgtaactagcactgcaagaggagaagaagaagaagatgaagaagaagtagagcagaagagccgctctaaacgatctgaggaaattttgaaatatagattagataatggattaatctgcagacacattccagtgagagaaactaatgaacttatacgtggagaggatgaaaatggtgacaagacaatcaatgagtatgttcgcgtgtgtaaaattggatccggtagctatggtaaagtggttttatatcgaagcactttagacggccagtattatgctatcaaggcatttcacaagtcgcatttattaaggctaagggtggcaccgtcagagactgctatgagtgatgttcttcgtgaggttatgattatgaaaattttggagcatcctaacatcgttaacctcattgaggtgatagatgaccctgaaactgatcatttttacatggttcttgaatacgttgatggaaaatgggtgtatgacggttctggaccgccgggtgctctcggagagaaaactgctagaaagtatttgcgggatattgttactggactgatgtatcttcatgctcatgatgttattcacggggacattaaacccgacaatttgctggttactagtagcggtacagtgaagataggagatttcagtgtcagccaagttttcaaggatgatgacgatcagctgcgccgatctcccgggactcctgtcttcactgctccagaatgttgtttagtatcaggtataacgtatagtggcagagctgcggatacatgggcagtgggagttacattgtattgtatgatattgggacaatacccgtttcttgcggatactcttcaggacacctacgacaagattgttaacaaccctctgataatcccggatggattgaatcctcttctcagagatttgatcgaaggtctcctttgcaaagatccgagccagagaatgacactgaagaatgtgtcggagcatccatgggtcattggagaagacgggcatgtcccggagtatttttgttggtgcaaacgcaatgctgcctcaaagattgaagaaggagaagctaatgggatctctgaaacctcagatcctaactaaaaaaactttgatgcttttgatcgttttaagaaatgtacaagctttgaagaatagatgcatctacttaaccgtacaagtttgacctcgcttggggtcattgtttttctttttatttaattctagatcattttcatgtt

SEQ ID NO: 46474 - protein, 407 aa, Arabidopsis thaliana
  peptide (1)..(407): Ceres Seq. ID no. 12574782
MFRDSFLFARTIGCFGCFGSSGSRNQQSPKPYDDDTHSCDSDVTSTARGEEEEDEEEVEQKSRSKRSEEILKYRLDNGLICRHIPVRETNELIRGEDENGDKTINEYVRVCKIGSGSYGKVVLYRSTLDGQYYAIKAFHKSHLLRLRVAPSETAMSDVLREVMIMKILEHPNIVNLIEVIDDPETDHFYMVLEYVDGKWVYDGSGPPGALGEKTARKYLRDIVTGLMYLHAHDVIHGDIKPDNLLVTSSGTVKIGDFSVSQVFKDDDDQLRRSPGTPVFTAPECCLVSGITYSGRAADTWAVGVTLYCMILGQYPFLADTLQDTYDKIVNNPLIIPDGLNPLLRDLIEGLLCKDPSQRMTLKNVSEHPWVIGEDGHVPEYFCWCKRNAASKIEEGEANGISETSDPN

SEQ ID NO: 46475 - protein, 253 aa, Arabidopsis thaliana
  peptide (1)..(253): Ceres Seq. ID no. 12574783
MSDVLREVMIMKILEHPNIVNLIEVIDDPETDHFYMVLEYVDGKWVYDGSGPPGALGEKTARKYLRDIVTGLMYLHAHDVIHGDIKPDNLLVTSSGTVKIGDFSVSQVFKDDDDQLRRSPGTPVFTAPECCLVSGITYSGRAADTWAVGVTLYCMILGQYPFLADTLQDTYDKIVNNPLIIPDGLNPLLRDLIEGLLCKDPSQRMTLKNVSEHPWVIGEDGHVPEYFCWCKRNAASKIEEGEANGISETSDPN

SEQ ID NO: 46476 - protein, 245 aa, Arabidopsis thaliana
  peptide (1)..(245): Ceres Seq. ID no. 12574784
MIMKILEHPNIVNLIEVIDDPETDHFYMVLEYVDGKWVYDGSGPPGALGEKTARKYLRDIVTGLMYLHAHDVIHGDIKPDNLLVTSSGTVKIGDFSVSQVFKDDDDQLRRSPGTPVFTAPECCLVSGITYSGRAADTWAVGVTLYCMILGQYPFLADTLQDTYDKIVNNPLIIPDGLNPLLRDLIEGLLCKDPSQRMTLKNVSEHPWVIGEDGHVPEYFCWCKRNAASKIEEGEANGISETSDPN

SEQ ID NO: 46477 - DNA, 1965 bp, Arabidopsis thaliana
  misc_feature (1)..(1965): Ceres Seq. ID no. 14310049
  misc_feature (1)..(1965): Ortholog of  Ceres SEQ ID NO 14311882 as cited in SEQ ID NO 51638
  misc_feature (1)..(1965): Ortholog of  Ceres SEQ ID NO 14314567 as cited in SEQ ID NO 52335
  misc_feature (1)..(1965): Ortholog of  Ceres SEQ ID NO 14308803 as cited in SEQ ID NO 55038
  misc_feature (1)..(1965): Ortholog of  Ceres SEQ ID NO 13595437 as cited in SEQ ID NO 56562
  misc_feature (1)..(1965): Ortholog of  Ceres SEQ ID NO 14315985 as cited in SEQ ID NO 57720
attctcctcaaaaccctaatttctcacatctgtaaagaaaaattctccctaaacttaaccctcctgtagaaaaaaaaaaaaaccctggtaattatgagtgttttaggagaaattcttctgaaattaagattccgccatggaagcttttgatctttctcttcactagttttacttaattttcaacacacaataacaaaaacaaaaaaatctctttgccccttttctctgaatcttacgtcctctggatctttcttctctctctctctctcttgtctatactttaagtgtctgtctgaagaagcttgaatctgtcgtgatcatcaagattcaagttctgtctttttgagtctttttcttctacttctattgagtttctcttccttaattgtcggaatcagaatcttttcagatggaggagagagaaggaactaacatcaacaacatcccaaccagttttggtctgaaacaacatgaaactcctcttcctcctcctggttacccaccacggtctgaaaaccctaatctttttccggtgggtcaatccagcacttcctccgccgccgccgcggtgaaaccttctgagaatgttgctcctccttttagcttaacaatgccggtggagaattcttcttctgagttgaagaagaagagagggagaccaagaaagtataaccctgatggctcactcgctgtgactctctctcctatgcctatctcatcctccgttccgttgacgtcggagtttggttctcggaaacgaggaagaggtcgaggaagaggcagaggaagaggacgaggacgtggacaaggacaaggaagcagagagcccaataacaacaacaacgacaacaattggctcaagaatcctcagatgttcgaatttaacaacaacactcctacttctggtggaggaggacctgctgaaattgtcagtccaagttttacacctcatgtgctcacagtaaatgccggtgaggatgtgacaatgaagataatgacattctctcaacaaggctcgcgtgctatttgtattctttcagcgaacggtcccatatccaatgttacacttcgtcaatctatgacatctggtggtactctcacttatgagggtcattttgagattctttctttgacgggttcgtttataccaagcgagagtggaggaacccgaagcagagctggtgggatgagtgtctctcttgcaggacaagatggtcgtgtctttggtggtggacttgctggtctctttattgccgctggtcctgttcaggtaatggtagggagttttatagcgggtcaggaggaatcgcagcagcagcagcagcagataaagaagcaaagaagggaaagactcgggatcccgacaacaacacaagcttctaatatctcattcggtggctcagcggaagatcctaaggctagatacgggctcaacaagcctgttgttattcagccaccaccggtgtctgcaccacctgtgtccttttcgcatgaaccaagtactaacaccgtccatggttactatgcaaataacacagctaaccatatcaaggatctcttctcttccctccctggagaagatggggaagaagatgaggatgatttagaaggtgaagatgatgaagaattcggaggccatagcgaatctgacaccgaggttccaagctgatgatcgatggaaagaatccgacatatatgtgttatgaatcttgagttgttttatttcggtgtcttcagatttttttagagcgtaatggtattttttttctttcagattgttagttgttaaagtcttaaacagagatatttcactaaaagttagggtttactagaggatgtaatctttagggttctttgacttgtgtctttcttttaatcctcagatggttgttgtaggcttgtagccaatcttagtgtgtgttcaaactctctccttcaatcaaactccccaatgacttcattttg

SEQ ID NO: 46478 - protein, 419 aa, Arabidopsis thaliana
  peptide (1)..(419): Ceres Seq. ID no. 14310050
MEEREGTNINNIPTSFGLKQHETPLPPPGYPPRSENPNLFPVGQSSTSSAAAAVKPSENVAPPFSLTMPVENSSSELKKKRGRPRKYNPDGSLAVTLSPMPISSSVPLTSEFGSRKRGRGRGRGRGRGRGRGQGQGSREPNNNNNDNNWLKNPQMFEFNNNTPTSGGGGPAEIVSPSFTPHVLTVNAGEDVTMKIMTFSQQGSRAICILSANGPISNVTLRQSMTSGGTLTYEGHFEILSLTGSFIPSESGGTRSRAGGMSVSLAGQDGRVFGGGLAGLFIAAGPVQVMVGSFIAGQEESQQQQQQIKKQRRERLGIPTTTQASNISFGGSAEDPKARYGLNKPVVIQPPPVSAPPVSFSHEPSTNTVHGYYANNTANHIKDLFSSLPGEDGEEDEDDLEGEDDEEFGGHSESDTEVPS

SEQ ID NO: 46479 - protein, 352 aa, Arabidopsis thaliana
  peptide (1)..(352): Ceres Seq. ID no. 14310051
MPVENSSSELKKKRGRPRKYNPDGSLAVTLSPMPISSSVPLTSEFGSRKRGRGRGRGRGRGRGRGQGQGSREPNNNNNDNNWLKNPQMFEFNNNTPTSGGGGPAEIVSPSFTPHVLTVNAGEDVTMKIMTFSQQGSRAICILSANGPISNVTLRQSMTSGGTLTYEGHFEILSLTGSFIPSESGGTRSRAGGMSVSLAGQDGRVFGGGLAGLFIAAGPVQVMVGSFIAGQEESQQQQQQIKKQRRERLGIPTTTQASNISFGGSAEDPKARYGLNKPVVIQPPPVSAPPVSFSHEPSTNTVHGYYANNTANHIKDLFSSLPGEDGEEDEDDLEGEDDEEFGGHSESDTEVPS

SEQ ID NO: 46480 - protein, 320 aa, Arabidopsis thaliana
  peptide (1)..(320): Ceres Seq. ID no. 14310052
MPISSSVPLTSEFGSRKRGRGRGRGRGRGRGRGQGQGSREPNNNNNDNNWLKNPQMFEFNNNTPTSGGGGPAEIVSPSFTPHVLTVNAGEDVTMKIMTFSQQGSRAICILSANGPISNVTLRQSMTSGGTLTYEGHFEILSLTGSFIPSESGGTRSRAGGMSVSLAGQDGRVFGGGLAGLFIAAGPVQVMVGSFIAGQEESQQQQQQIKKQRRERLGIPTTTQASNISFGGSAEDPKARYGLNKPVVIQPPPVSAPPVSFSHEPSTNTVHGYYANNTANHIKDLFSSLPGEDGEEDEDDLEGEDDEEFGGHSESDTEVPS

SEQ ID NO: 46481 - DNA, 1151 bp, Arabidopsis thaliana
  misc_feature (1)..(1151): Ceres Seq. ID no. 12600794
  misc_feature (1)..(1151): Ortholog of  Ceres SEQ ID NO 13595660 as cited in SEQ ID NO 56750
  misc_feature (1)..(1151): Ortholog of  Ceres SEQ ID NO 12608154 as cited in SEQ ID NO 57350
accaccacaggctcattgacagaaagagagtgggagagagacatgacgggctgtgtgaattctatttctccgccgccggtgactttataccggcatcgtgcctctccgtcacggtcgtccttctcattatccggcgatgccttacactctctttaccggcaccgacgtgtatcaagatctccgtcgattatcgctcccaaatttcagattgtggcggctgaaaaatcggagcctctgaaaattatgatatcaggagctcctgcttctggtaaaggtacacaatgcgagctgattactcacaaatatggtttggtgcatatctctgctggagatttgctgagggctgaaatcgcttctggaagtgaaaatggaagacgtgctaaagaacatatggagaaaggacaattggtccctgatgaaatagttgtaatgatggtaaaagatcgtttatcacagacagattcagagcaaaaaggatggcttttggatggatatccaaggagtgcatcacaggcaacagctctcaagggatttggattccagcctgatctattcattgtcctcgaagttcctgaagaaattctaattgaaagagttgttgggcgtcgattggatcctgtcacaggaaagatctaccacttgaagtattcgcctccagagacagaagagattgctgttagactcacccaacgttttgatgataccgaagagaaggcaaaactgcggctgaagactcataaccaaaatgtgagtgatgtgctttctatgtacgacgatataacaattaagatcgagggaaaccgctcaaaagaggaagtgtttgcccagatcgattcttctctgtccgaattgcttcaagagaggaacactgctccaagttcacttttaagttgattcgttcttggtacaaacctgatgaagtgcttacccagatcgacactactatgtccaaattgcttcaacagaggaactctgcttcaagttcacttgtaagttgaatcattcttagcaaggacctaaccagcggtaaatatcctttcttgcatttatcacactcgattgatatctcttgtatcgcaataacgggttgttttgtcgccagtaagacaatgtacctcacacctcagaaatatgcagaccttcttcttatt

SEQ ID NO: 46482 - protein, 297 aa, Arabidopsis thaliana
  peptide (1)..(297): Ceres Seq. ID no. 12600795
TTTGSLTEREWERDMTGCVNSISPPPVTLYRHRASPSRSSFSLSGDALHSLYRHRRVSRSPSIIAPKFQIVAAEKSEPLKIMISGAPASGKGTQCELITHKYGLVHISAGDLLRAEIASGSENGRRAKEHMEKGQLVPDEIVVMMVKDRLSQTDSEQKGWLLDGYPRSASQATALKGFGFQPDLFIVLEVPEEILIERVVGRRLDPVTGKIYHLKYSPPETEEIAVRLTQRFDDTEEKAKLRLKTHNQNVSDVLSMYDDITIKIEGNRSKEEVFAQIDSSLSELLQERNTAPSSLLS

SEQ ID NO: 46483 - protein, 283 aa, Arabidopsis thaliana
  peptide (1)..(283): Ceres Seq. ID no. 12600796
MTGCVNSISPPPVTLYRHRASPSRSSFSLSGDALHSLYRHRRVSRSPSIIAPKFQIVAAEKSEPLKIMISGAPASGKGTQCELITHKYGLVHISAGDLLRAEIASGSENGRRAKEHMEKGQLVPDEIVVMMVKDRLSQTDSEQKGWLLDGYPRSASQATALKGFGFQPDLFIVLEVPEEILIERVVGRRLDPVTGKIYHLKYSPPETEEIAVRLTQRFDDTEEKAKLRLKTHNQNVSDVLSMYDDITIKIEGNRSKEEVFAQIDSSLSELLQERNTAPSSLLS

SEQ ID NO: 46484 - protein, 216 aa, Arabidopsis thaliana
  peptide (1)..(216): Ceres Seq. ID no. 12600797
MISGAPASGKGTQCELITHKYGLVHISAGDLLRAEIASGSENGRRAKEHMEKGQLVPDEIVVMMVKDRLSQTDSEQKGWLLDGYPRSASQATALKGFGFQPDLFIVLEVPEEILIERVVGRRLDPVTGKIYHLKYSPPETEEIAVRLTQRFDDTEEKAKLRLKTHNQNVSDVLSMYDDITIKIEGNRSKEEVFAQIDSSLSELLQERNTAPSSLLS

SEQ ID NO: 46485 - DNA, 2608 bp, Arabidopsis thaliana
  misc_feature (1)..(2608): Ceres Seq. ID no. 12576083
  misc_feature (1)..(2608): Ortholog of  Ceres SEQ ID NO 13600595 as cited in SEQ ID NO 629
  misc_feature (1)..(2608): Ortholog of  Ceres SEQ ID NO 13593379 as cited in SEQ ID NO 20573
ggagagtgatttggtcacactcaaacaagcacacaaaacaagaaagatatttggaagctctaaaaagataaatcttgtttttccctcctaattgtaaagaagagggctttagacttttagaacaacactcgagggaagtacgacgacgaagaagagctaacaacgataatgaatcgggttactactgaaagcattgcgtctacggcgatactggtggtgatggtgtttctcttctcgtggagatctatcgaggcggcgaatgtatcctacgaccaccgttctctcaccatcggcaatcgccgtcagctcattatctccgccgccattcactatcccagaagcgtccctgctatgtggccatctcttgttcaaacagcaaaagaaggaggctgcaacgcaatcgagtcttatgtcttctggaatggccatgagccatctcctggaaagtattattttggtggccggtataatatagtgaagtttatcaagattgttcaacaagctggaatgcatatgattctacgaattggtccttttgttgccgccgagtggaattacgggggagtcccggtttggctgcattacgtgccaggaacagtcttcagagcggataatgagccatggaagcattacatggagagtttcacgacgtatatagtaaacctgttgaaacaagagaagctttttgcacctcagggcggtccaataatcttgtctcaggtggaaaacgagtacgggtattatgaaaaggattacggagaaggagggaaaaggtatgctcaatggtctgcttctatggctgtttcacagaatattggtgttccatggatgatgtgccagcaatgggatgctcctcccactgtgattagtacctgcaatggcttttactgtgaccaattcacacctaatacaccagataaacccaagatttggactgagaactggcctggatggtttaaaacttttggaggcagagaccctcacagaccagcagaggatgtagcctactctgttgctcggtttttcgggaaaggtggaagtgttcacaactactacatgtatcacggaggaactaattttggacgtacttcaggaggaccttttatcactacaagctatgactatgaagctcccatcgatgagtatggattgcctagattaccaaaatggggacaccttaaggatctccacaaagctataatgctctctgaaaacttgctgataagtggcgagcatcaaaattttacattaggccattcactcgaggctgatgtgtacacagactcttcgggaacttgtgctgcgtttctgtcaaacttggatgataaaaatgacaaggcggtgatgtttcgaaacacatcataccacttgcctgcttggtcagttagcattctacctgactgcaagaccgaggttttcaacacagcaaaggtaacttcgaagtcctccaaggttgaaatgctacctgaagatttgaaatcttcatcaggtcttaaatgggaagtattctcggagaaaccgggtatttggggcgcagcagattttgtgaaaaatgaacttgttgaccacatcaacaccacaaaggacacaactgactatctttggtacacaacaagtataacagtcagtgaaaatgaagcgttcttgaagaaaggaagctccccggttctgtttattgaatcaaaagggcatactcttcatgttttcatcaacaaagagtacttaggaactgcgacagggaatgggactcatgtgcctttcaaactcaagaaaccagttgctctcaaagcgggcgaaaacaatattgatttgcttagcatgactgttggtctagcgaatgcaggatccttttacgaatgggttggagctggacttacaagcgtctcaatcaaaggtttcaacaagggcacattgaatttgacaaacagcaaatggtcctacaagctcggcgtggaaggagagcatctagaactgttcaagccaggtaactccggggctgtgaaatggacggtgactacgaaacctcccaagaaacagcctctgacttggtataaggttgtgatagagccaccttctgggagtgagccggttgggcttgatatgatcagtatggggaaaggaatggcatggttaaatggtgaagagataggaagatattggcccaggattgctagaaagaacagcccgaacgacgagtgcgtaaaagaatgcgattacagaggcaaattcatgccggataaatgcctaactggatgtggagagccatctcagagatggtatcatgttccaagatcatggtttaagtcttccgggaatgagctggtgatcttcgaggagaaaggcggcaatcccatgaagataaagttgtccaaaaggaaagtatcggtggtgtaagcaagtagaacaagttaaagatgatgatgcaaaacgtgagattgcaatcaagaaagacgagattttgtttgtgttgtatttgtttgttacaacaagtcggaactcgaaaaacgatgaaacaaaatccccaattttatgaacttaacacagtttttcatcatcacaagctgtaactgggccaccgaccactgatatttgttacagtttatgggct

SEQ ID NO: 46486 - protein, 741 aa, Arabidopsis thaliana
  peptide (1)..(741): Ceres Seq. ID no. 12576084
MNRVTTESIASTAILVVMVFLFSWRSIEAANVSYDHRSLTIGNRRQLIISAAIHYPRSVPAMWPSLVQTAKEGGCNAIESYVFWNGHEPSPGKYYFGGRYNIVKFIKIVQQAGMHMILRIGPFVAAEWNYGGVPVWLHYVPGTVFRADNEPWKHYMESFTTYIVNLLKQEKLFAPQGGPIILSQVENEYGYYEKDYGEGGKRYAQWSASMAVSQNIGVPWMMCQQWDAPPTVISTCNGFYCDQFTPNTPDKPKIWTENWPGWFKTFGGRDPHRPAEDVAYSVARFFGKGGSVHNYYMYHGGTNFGRTSGGPFITTSYDYEAPIDEYGLPRLPKWGHLKDLHKAIMLSENLLISGEHQNFTLGHSLEADVYTDSSGTCAAFLSNLDDKNDKAVMFRNTSYHLPAWSVSILPDCKTEVFNTAKVTSKSSKVEMLPEDLKSSSGLKWEVFSEKPGIWGAADFVKNELVDHINTTKDTTDYLWYTTSITVSENEAFLKKGSSPVLFIESKGHTLHVFINKEYLGTATGNGTHVPFKLKKPVALKAGENNIDLLSMTVGLANAGSFYEWVGAGLTSVSIKGFNKGTLNLTNSKWSYKLGVEGEHLELFKPGNSGAVKWTVTTKPPKKQPLTWYKVVIEPPSGSEPVGLDMISMGKGMAWLNGEEIGRYWPRIARKNSPNDECVKECDYRGKFMPDKCLTGCGEPSQRWYHVPRSWFKSSGNELVIFEEKGGNPMKIKLSKRKVSVV

SEQ ID NO: 46487 - protein, 724 aa, Arabidopsis thaliana
  peptide (1)..(724): Ceres Seq. ID no. 12576085
MVFLFSWRSIEAANVSYDHRSLTIGNRRQLIISAAIHYPRSVPAMWPSLVQTAKEGGCNAIESYVFWNGHEPSPGKYYFGGRYNIVKFIKIVQQAGMHMILRIGPFVAAEWNYGGVPVWLHYVPGTVFRADNEPWKHYMESFTTYIVNLLKQEKLFAPQGGPIILSQVENEYGYYEKDYGEGGKRYAQWSASMAVSQNIGVPWMMCQQWDAPPTVISTCNGFYCDQFTPNTPDKPKIWTENWPGWFKTFGGRDPHRPAEDVAYSVARFFGKGGSVHNYYMYHGGTNFGRTSGGPFITTSYDYEAPIDEYGLPRLPKWGHLKDLHKAIMLSENLLISGEHQNFTLGHSLEADVYTDSSGTCAAFLSNLDDKNDKAVMFRNTSYHLPAWSVSILPDCKTEVFNTAKVTSKSSKVEMLPEDLKSSSGLKWEVFSEKPGIWGAADFVKNELVDHINTTKDTTDYLWYTTSITVSENEAFLKKGSSPVLFIESKGHTLHVFINKEYLGTATGNGTHVPFKLKKPVALKAGENNIDLLSMTVGLANAGSFYEWVGAGLTSVSIKGFNKGTLNLTNSKWSYKLGVEGEHLELFKPGNSGAVKWTVTTKPPKKQPLTWYKVVIEPPSGSEPVGLDMISMGKGMAWLNGEEIGRYWPRIARKNSPNDECVKECDYRGKFMPDKCLTGCGEPSQRWYHVPRSWFKSSGNELVIFEEKGGNPMKIKLSKRKVSVV

SEQ ID NO: 46488 - protein, 680 aa, Arabidopsis thaliana
  peptide (1)..(680): Ceres Seq. ID no. 12576086
MWPSLVQTAKEGGCNAIESYVFWNGHEPSPGKYYFGGRYNIVKFIKIVQQAGMHMILRIGPFVAAEWNYGGVPVWLHYVPGTVFRADNEPWKHYMESFTTYIVNLLKQEKLFAPQGGPIILSQVENEYGYYEKDYGEGGKRYAQWSASMAVSQNIGVPWMMCQQWDAPPTVISTCNGFYCDQFTPNTPDKPKIWTENWPGWFKTFGGRDPHRPAEDVAYSVARFFGKGGSVHNYYMYHGGTNFGRTSGGPFITTSYDYEAPIDEYGLPRLPKWGHLKDLHKAIMLSENLLISGEHQNFTLGHSLEADVYTDSSGTCAAFLSNLDDKNDKAVMFRNTSYHLPAWSVSILPDCKTEVFNTAKVTSKSSKVEMLPEDLKSSSGLKWEVFSEKPGIWGAADFVKNELVDHINTTKDTTDYLWYTTSITVSENEAFLKKGSSPVLFIESKGHTLHVFINKEYLGTATGNGTHVPFKLKKPVALKAGENNIDLLSMTVGLANAGSFYEWVGAGLTSVSIKGFNKGTLNLTNSKWSYKLGVEGEHLELFKPGNSGAVKWTVTTKPPKKQPLTWYKVVIEPPSGSEPVGLDMISMGKGMAWLNGEEIGRYWPRIARKNSPNDECVKECDYRGKFMPDKCLTGCGEPSQRWYHVPRSWFKSSGNELVIFEEKGGNPMKIKLSKRKVSVV

SEQ ID NO: 46489 - DNA, 1480 bp, Arabidopsis thaliana; identical to SEQ ID NO: 45927
  misc_feature (1)..(1480): Ceres Seq. ID no. 13591502
  misc_feature (1)..(1480): Ortholog of  Ceres SEQ ID NO 15176851 as cited in SEQ ID NO 61348

SEQ ID NO: 46490 - protein, 396 aa, Arabidopsis thaliana; identical to SEQ ID NO: 45928
  peptide (1)..(396): Ceres Seq. ID no. 13591503

SEQ ID NO: 46491 - protein, 350 aa, Arabidopsis thaliana; identical to SEQ ID NO: 45929
  peptide (1)..(350): Ceres Seq. ID no. 13591504

SEQ ID NO: 46492 - DNA, 1010 bp, Arabidopsis thaliana
  misc_feature (1)..(1010): Ceres Seq. ID no. 15168836
  misc_feature (1)..(1010): Ortholog of  Ceres SEQ ID NO 14301822 as cited in SEQ ID NO 66211
tccaaaacaaacctcggaagagaaaattggagcgaaggagcgatagatatggcgtcggcgtcctcgtctgacggagttgccggaaggattcagaacgcttctttggttcttgtctccgataacagttccacgcttgctgatatccgcaaagctgtggcaatgatgaagaacattgcagttcaattggagaaagaaaatcaaacggacaaggttaaggaccttgaaaattctgtggctgagttattggatttgcatagtgattgtaatcaccgttcgacagcaattcaatccgttgcaaatcggtaccaacccgtggaacaattaacggactttaaaaagttgcttgatgatgaattcacaaagctcaaggctacaccttcctcagtgccacaaaatgatcatttgatgcgccagttcagggaagcagtttggaatgttcatcatgcaggtgaaccaatgcctggtgacgatgatgaggacattgttatgaccagtactcagtgccctcttctaaacatgacatgtcccttgagcgggaagcctgtcactgaattagcagatccagttcgcagtatggattgcaggcacgtctatgaaaaatctgtaatcctgcattacatagtcaacaatcaaaatgcgaattgtcctgtagcagggtgccgaggtaaactgcagaatagcaaagtgatttgtgatgcaatgttgaagtttgaaatagaggagatgcgctcgttgaacaaacaatctaatagggctgaagtgattgaagacttcacagaagatgtggatgaagattagagatcagacatttcttggaccgggttttaagcgctgcaatgaaacaagttgaagccatatgtttcacaactttttgctattcttagtccgttcggtatattttatcaaacgtgaaatttgataccaattgtttccactttatggaggatgtaaatagtcgatctcttccgattctgaattcaactgctggtttttttgtcaagtttacgttc

SEQ ID NO: 46493 - protein, 265 aa, Arabidopsis thaliana
  peptide (1)..(265): Ceres Seq. ID no. 15168837
SKTNLGRENWSEGAIDMASASSSDGVAGRIQNASLVLVSDNSSTLADIRKAVAMMKNIAVQLEKENQTDKVKDLENSVAELLDLHSDCNHRSTAIQSVANRYQPVEQLTDFKKLLDDEFTKLKATPSSVPQNDHLMRQFREAVWNVHHAGEPMPGDDDEDIVMTSTQCPLLNMTCPLSGKPVTELADPVRSMDCRHVYEKSVILHYIVNNQNANCPVAGCRGKLQNSKVICDAMLKFEIEEMRSLNKQSNRAEVIEDFTEDVDED

SEQ ID NO: 46494 - protein, 249 aa, Arabidopsis thaliana
  peptide (1)..(249): Ceres Seq. ID no. 15168838
MASASSSDGVAGRIQNASLVLVSDNSSTLADIRKAVAMMKNIAVQLEKENQTDKVKDLENSVAELLDLHSDCNHRSTAIQSVANRYQPVEQLTDFKKLLDDEFTKLKATPSSVPQNDHLMRQFREAVWNVHHAGEPMPGDDDEDIVMTSTQCPLLNMTCPLSGKPVTELADPVRSMDCRHVYEKSVILHYIVNNQNANCPVAGCRGKLQNSKVICDAMLKFEIEEMRSLNKQSNRAEVIEDFTEDVDED

SEQ ID NO: 46495 - protein, 212 aa, Arabidopsis thaliana
  peptide (1)..(212): Ceres Seq. ID no. 15168839
MMKNIAVQLEKENQTDKVKDLENSVAELLDLHSDCNHRSTAIQSVANRYQPVEQLTDFKKLLDDEFTKLKATPSSVPQNDHLMRQFREAVWNVHHAGEPMPGDDDEDIVMTSTQCPLLNMTCPLSGKPVTELADPVRSMDCRHVYEKSVILHYIVNNQNANCPVAGCRGKLQNSKVICDAMLKFEIEEMRSLNKQSNRAEVIEDFTEDVDED

SEQ ID NO: 46496 - DNA, 2087 bp, Arabidopsis thaliana
  misc_feature (1)..(2087): Ceres Seq. ID no. 12574967
  misc_feature (1)..(2087): Ortholog of  Ceres SEQ ID NO 13584839 as cited in SEQ ID NO 60676
acttctccacttttgttcgtcatcctcttcaaaatttcttcaatttgattctgcaatttccttaatctctctctggattaagtttcagtttcttcttagcccgccatggatgctcagcgagctctgttggacgaactaatgggcgcagctcgtaatctgacagacgaagagagaagagggttcaaggaggttaagtgggacgatagagaagtatgtgcattctatatggttcgattttgtcctcatgacctctttgttaacacgaaaagcgatcttggagcatgctcgagaattcatgatccaaagttgaaagaaagcttcgagaactctccgaggcatgattcctatgtgcctaaattcgaggctgagcttgcacagttttgcgagaagttggtgaatgatcttgataggaaagttaggcgtgggcgagaacgtcttgcacaagaagttgaaccggttccaccaccttctctatcagcagagaaagctgaacaattgtctgtcttggaggagaaagttaagaaccttttggaacaagtggaagcacttggtgaagaaggcaaagtggatgaagctgaagcgctaatgaggaaggtggaagggctaaatgctgagaagacagtgttgttacaacgaccaactgacaaggtactcgcgatggctcaggagaagaagatggcattgtgtgaggtttgtggttcatttcttgtggctaatgatgcagtagaaagaacacagtctcatgtcactggaaagcaacatgttggctatggcttggttcgggattttattgctgaacaaaaagctgctaaagataaaggaaaggaagaagaaagactagtaagaggaaaagaagcagatgataagaggaaaccaagggagaaggaaagcgagagtaagaggagtggttctagtgatagagaaagatatcgtgatcgagaccgaaacagagatggtgacagacacagagaccgtggtagagattatagaaagccttatgacaggagatcgaggagtgggagagaggaccgagatcgaagcaggtcacgatctcctcatggaaggtctggtcacagaagggtgtcgagaagccccattcgccaatactagtttgagaccctcgtggaaggtctggtcacgaaagggtgttgagaagcaccatttgccagtactagtttgagataaggtgttgtcactatgtcttggggccaggaactttgcaaattaatgagctattctaagagtttgagaccttaccgattctccttcatcggttatttgttaagaggtcaaaagcgttgaggtaggtattacccgtaaaacttttacattttcattgtatttctcgatacttgagatgctatagcgtcattttattttatttttgtcttttggtacaccatttcaagtttgatatacctttctgatttaaagaatacagaatcgggattgttgggatcgaatgacacgaatctatttgaggtaacaaatatacaacagaagtcatccttaatagaagttttgggttttgaatttggtttattttcttcgagttctctgtctgcacttaggtgtatacacagaaggaatgataatctttggctttggggttaggtataactgttgcatttcttggaatctagccttcaatggattggtctgcatgatatctgatttctatcgggtaaactcactccgttgtttatgaacttttaataatcttttccaaactccaaggctagagcattatagtaaaacagtaggtaaggtattctctggtgggagcaagaactgttttggtggtctgtgttgaggttccaagaacagctgtgttgttggtctaccacaaagccggatggcgtctttgtaatcctggcttaaatcctgatctaaacatttacaactttgtctttttttttttttttttttttgccgatttctcctctacagtctatttgattcaaacaagagctcagcatatgaaaccattgtttcggggctcctggtttgcagctatagataagcttcttttatatggcaaacttgtaagaatgacgcaacatttgtcaaaataaaagttgttgatg

SEQ ID NO: 46497 - protein, 334 aa, Arabidopsis thaliana
  peptide (1)..(334): Ceres Seq. ID no. 12574968
MDAQRALLDELMGAARNLTDEERRGFKEVKWDDREVCAFYMVRFCPHDLFVNTKSDLGACSRIHDPKLKESFENSPRHDSYVPKFEAELAQFCEKLVNDLDRKVRRGRERLAQEVEPVPPPSLSAEKAEQLSVLEEKVKNLLEQVEALGEEGKVDEAEALMRKVEGLNAEKTVLLQRPTDKVLAMAQEKKMALCEVCGSFLVANDAVERTQSHVTGKQHVGYGLVRDFIAEQKAAKDKGKEEERLVRGKEADDKRKPREKESESKRSGSSDRERYRDRDRNRDGDRHRDRGRDYRKPYDRRSRSGREDRDRSRSRSPHGRSGHRRVSRSPIRQY

SEQ ID NO: 46498 - protein, 323 aa, Arabidopsis thaliana
  peptide (1)..(323): Ceres Seq. ID no. 12574969
MGAARNLTDEERRGFKEVKWDDREVCAFYMVRFCPHDLFVNTKSDLGACSRIHDPKLKESFENSPRHDSYVPKFEAELAQFCEKLVNDLDRKVRRGRERLAQEVEPVPPPSLSAEKAEQLSVLEEKVKNLLEQVEALGEEGKVDEAEALMRKVEGLNAEKTVLLQRPTDKVLAMAQEKKMALCEVCGSFLVANDAVERTQSHVTGKQHVGYGLVRDFIAEQKAAKDKGKEEERLVRGKEADDKRKPREKESESKRSGSSDRERYRDRDRNRDGDRHRDRGRDYRKPYDRRSRSGREDRDRSRSRSPHGRSGHRRVSRSPIRQY

SEQ ID NO: 46499 - protein, 294 aa, Arabidopsis thaliana
  peptide (1)..(294): Ceres Seq. ID no. 12574970
MVRFCPHDLFVNTKSDLGACSRIHDPKLKESFENSPRHDSYVPKFEAELAQFCEKLVNDLDRKVRRGRERLAQEVEPVPPPSLSAEKAEQLSVLEEKVKNLLEQVEALGEEGKVDEAEALMRKVEGLNAEKTVLLQRPTDKVLAMAQEKKMALCEVCGSFLVANDAVERTQSHVTGKQHVGYGLVRDFIAEQKAAKDKGKEEERLVRGKEADDKRKPREKESESKRSGSSDRERYRDRDRNRDGDRHRDRGRDYRKPYDRRSRSGREDRDRSRSRSPHGRSGHRRVSRSPIRQY

SEQ ID NO: 46500 - DNA, 1380 bp, Arabidopsis thaliana
  misc_feature (1)..(1380): Ceres Seq. ID no. 12574971
  misc_feature (1)..(1380): Ortholog of  Ceres SEQ ID NO 13594151 as cited in SEQ ID NO 58886
ggcgattatgcttttaatggctcctcctctcttctctatcccttaagcgctctctctcaaatctcaatcatccttcttctcatctagaaaccccttatcttggagtaatcagagagtttgaaaacaccagaaatcatggcgacaggaccagttgttcatcctcaaccagttagaggtgatcccatcgacctcaaaaacgcagcagcaaagaatcgtcgtgctcttggcgacattggaaacgtcgattctcttattggagtcgaaggaggaaagcttaaccgccccattactcgtaactttcgtgctcagttgctagaaaacgcacaagttgcagccgccgctaacaaaaaggctccgattcttgatggagttactaagaaacaagaagttgtaagagcggttcaaaagaaagcaagaggtgataagcgtgagccgtcaaaaccaatcgaagtgattgtgataagtcctgatacaaacgaggttgctaaagctaaagagaacaagaagaaagtgacatactcttcggttcttgatgctcgaagcaaggctgcttctaagactttggatattgattatgtcgacaaagaaaatgatcttgctgctgtggaatacgttgaggatatgtacattttctacaaagaagttgtgaatgagagcaaacctcagatgtatatgcatacacaacctgagattgatgagaagatgagatcaatccttattgattggcttgtagaagttcatgtcaagtttgatctctcccctgagactctttacctcactgtcaacataattgatcgttttctttctctgaagactgtgcctagaagagaactacagcttgtaggtgttagtgctttgcttatagcttcgaagtacgaagaaatctggcctcctcaggtcaatgatttggtatatgtgactgataactcctacaacagcagacagattctagtgatggagaaaaccattttggggaatcttgaatggtacttgacagttccaacacagtatgtgttccttgtgaggtttattaaagcctcgggttctgaccagaaactggagaacttggttcactttctagctgagttgggtttgatgcatcacgacagtttaatgttctgtccttccatgcttgctgcatcagcggtctacacagcaaggtgttgcttgaacaagactcctacttggactgatacactgaaattccacacaggctactccgaatctcagctcatggattgctcaaagcttttagctttcattcactcgaaagcgggggagagcaagctacgtggtgtgttgaagaagtattcgaaacttggaagaggtgctgttgctctgatttcaccagccaagtctcttatgtcatctgctccatga

SEQ ID NO: 46501 - protein, 414 aa, Arabidopsis thaliana
  peptide (1)..(414): Ceres Seq. ID no. 12574972
MATGPVVHPQPVRGDPIDLKNAAAKNRRALGDIGNVDSLIGVEGGKLNRPITRNFRAQLLENAQVAAAANKKAPILDGVTKKQEVVRAVQKKARGDKREPSKPIEVIVISPDTNEVAKAKENKKKVTYSSVLDARSKAASKTLDIDYVDKENDLAAVEYVEDMYIFYKEVVNESKPQMYMHTQPEIDEKMRSILIDWLVEVHVKFDLSPETLYLTVNIIDRFLSLKTVPRRELQLVGVSALLIASKYEEIWPPQVNDLVYVTDNSYNSRQILVMEKTILGNLEWYLTVPTQYVFLVRFIKASGSDQKLENLVHFLAELGLMHHDSLMFCPSMLAASAVYTARCCLNKTPTWTDTLKFHTGYSESQLMDCSKLLAFIHSKAGESKLRGVLKKYSKLGRGAVALISPAKSLMSSAP

SEQ ID NO: 46502 - protein, 252 aa, Arabidopsis thaliana
  peptide (1)..(252): Ceres Seq. ID no. 12574973
MYIFYKEVVNESKPQMYMHTQPEIDEKMRSILIDWLVEVHVKFDLSPETLYLTVNIIDRFLSLKTVPRRELQLVGVSALLIASKYEEIWPPQVNDLVYVTDNSYNSRQILVMEKTILGNLEWYLTVPTQYVFLVRFIKASGSDQKLENLVHFLAELGLMHHDSLMFCPSMLAASAVYTARCCLNKTPTWTDTLKFHTGYSESQLMDCSKLLAFIHSKAGESKLRGVLKKYSKLGRGAVALISPAKSLMSSAP

SEQ ID NO: 46503 - protein, 237 aa, Arabidopsis thaliana
  peptide (1)..(237): Ceres Seq. ID no. 12574974
MYMHTQPEIDEKMRSILIDWLVEVHVKFDLSPETLYLTVNIIDRFLSLKTVPRRELQLVGVSALLIASKYEEIWPPQVNDLVYVTDNSYNSRQILVMEKTILGNLEWYLTVPTQYVFLVRFIKASGSDQKLENLVHFLAELGLMHHDSLMFCPSMLAASAVYTARCCLNKTPTWTDTLKFHTGYSESQLMDCSKLLAFIHSKAGESKLRGVLKKYSKLGRGAVALISPAKSLMSSAP

SEQ ID NO: 46504 - DNA, 1698 bp, Arabidopsis thaliana
  misc_feature (1)..(1698): Ceres Seq. ID no. 12574979
  misc_feature (1)..(1698): Ortholog of  Ceres SEQ ID NO 14315257 as cited in SEQ ID NO 52552
  misc_feature (1)..(1698): Ortholog of  Ceres SEQ ID NO 15168421 as cited in SEQ ID NO 60131
  misc_feature (1)..(1698): Ortholog of  Ceres SEQ ID NO 13597574 as cited in SEQ ID NO 64677
  misc_feature (1)..(1698): Ortholog of  Ceres SEQ ID NO 13597843 as cited in SEQ ID NO 64850
  misc_feature (1)..(1698): Ortholog of  Ceres SEQ ID NO 13597678 as cited in SEQ ID NO 65375
  misc_feature (1)..(1698): Ortholog of  Ceres SEQ ID NO 15176787 as cited in SEQ ID NO 66468
  misc_feature (1)..(1698): Ortholog of  Ceres SEQ ID NO 13596180 as cited in SEQ ID NO 67941
  misc_feature (1)..(1698): Ortholog of  Ceres SEQ ID NO 13591190 as cited in SEQ ID NO 68044
  misc_feature (1)..(1698): Ortholog of  Ceres SEQ ID NO 13595961 as cited in SEQ ID NO 68223
accgaaacatcttcaaccttcaataggagaaaccaattctcaattgctacaaaaatataaatattttgaaaaatgaaactggagctggtgttcataccatcacctggtgacggacatctccggccattagtggaggtagctaagcttcatgttgaccgtgacgaccatctctccatcaccatcatcatcatccctcagatgcatggatttagtagcagtaactcttcttcttacatcgcttctctctcctctgattctgaagaacgtcttagctacaacgttctctccgtccctgataaaccagactccgatgacaccaaaccacattttttcgactacattgataacttcaagccgcaggtcaaagccacggtggaaaaacttactgacccgggtccaccagattcgccgtcgcgtcttgctggattcgtggtggatatgttttgcatgatgatgattgatgtcgctaatgagtttggtgttcccagttacatgttttacacatccaacgcaacgtttcttggattgcaagttcatgttgaatacctttacgacgttaagaactatgacgttagtgacctcaaggactcggacactactgagctggaagttccttgtttgactcgtcctttaccggttaagtgtttcccctcggttctattaaccaaggagtggttaccggttatgtttagacaaaccagaagattccgagaaactaaaggtattttggtaaatacattcgctgagcttgagcctcaagctatgaagtttttctccggcgtagatagtcctctgcctacggtgtacacagttggaccggttatgaatcttaaaatcaacggtccaaattcatctgacgataagcaatcggagatcctacggtggctagacgagcagccacgtaaatccgttgttttcctctgtttcggaagcatgggaggtttccgtgagggccaagctaaagaaatcgcaatcgcgcttgagcgaagtggtcaccgctttgtctggtctcttcgtcgtgctcaaccaaaaggatcgataggacctcccgaagaatttacgaatcttgaggaaattctcccggaaggattcttggaacggacggcagagataggaaagattgtaggttgggctccacaaagcgccattctagcaaatcctgcgatcggagggttcgtgtcgcattgtggatggaactcgacgctagagagtctatggttcggagttccgatggctacgtggccgctttacgcagagcaacaagttaacgcgttcgagatggttgaggagctagggctagcggtggaggtccgaaatagtttccgaggagatttcatggcggcggatgatgagttgatgacggcagaggagatagagagagggatccggtgtttgatggagcaggatagtgacgtgaggagtagagtgaaggagatgagcgagaagagtcacgtagctttaatggacggtggatcttcgcacgttgctcttctaaagtttattcaagacgtcactaagaatatctcttgaatctaagatgatgaggctcgtctcagaagacgaagaaacatatatattagcacttataagaaaaagacatgttggcagagattcaagacatatatctcttgaaccagattagtaacttactgtattttttctttctttacttgcattgatattaaaattacattcact

SEQ ID NO: 46505 - protein, 485 aa, Arabidopsis thaliana
  peptide (1)..(485): Ceres Seq. ID no. 12574980
MKLELVFIPSPGDGHLRPLVEVAKLHVDRDDHLSITIIIIPQMHGFSSSNSSSYIASLSSDSEERLSYNVLSVPDKPDSDDTKPHFFDYIDNFKPQVKATVEKLTDPGPPDSPSRLAGFVVDMFCMMMIDVANEFGVPSYMFYTSNATFLGLQVHVEYLYDVKNYDVSDLKDSDTTELEVPCLTRPLPVKCFPSVLLTKEWLPVMFRQTRRFRETKGILVNTFAELEPQAMKFFSGVDSPLPTVYTVGPVMNLKINGPNSSDDKQSEILRWLDEQPRKSVVFLCFGSMGGFREGQAKEIAIALERSGHRFVWSLRRAQPKGSIGPPEEFTNLEEILPEGFLERTAEIGKIVGWAPQSAILANPAIGGFVSHCGWNSTLESLWFGVPMATWPLYAEQQVNAFEMVEELGLAVEVRNSFRGDFMAADDELMTAEEIERGIRCLMEQDSDVRSRVKEMSEKSHVALMDGGSSHVALLKFIQDVTKNIS

SEQ ID NO: 46506 - protein, 443 aa, Arabidopsis thaliana
  peptide (1)..(443): Ceres Seq. ID no. 12574981
MHGFSSSNSSSYIASLSSDSEERLSYNVLSVPDKPDSDDTKPHFFDYIDNFKPQVKATVEKLTDPGPPDSPSRLAGFVVDMFCMMMIDVANEFGVPSYMFYTSNATFLGLQVHVEYLYDVKNYDVSDLKDSDTTELEVPCLTRPLPVKCFPSVLLTKEWLPVMFRQTRRFRETKGILVNTFAELEPQAMKFFSGVDSPLPTVYTVGPVMNLKINGPNSSDDKQSEILRWLDEQPRKSVVFLCFGSMGGFREGQAKEIAIALERSGHRFVWSLRRAQPKGSIGPPEEFTNLEEILPEGFLERTAEIGKIVGWAPQSAILANPAIGGFVSHCGWNSTLESLWFGVPMATWPLYAEQQVNAFEMVEELGLAVEVRNSFRGDFMAADDELMTAEEIERGIRCLMEQDSDVRSRVKEMSEKSHVALMDGGSSHVALLKFIQDVTKNIS

SEQ ID NO: 46507 - protein, 363 aa, Arabidopsis thaliana
  peptide (1)..(363): Ceres Seq. ID no. 12574982
MFCMMMIDVANEFGVPSYMFYTSNATFLGLQVHVEYLYDVKNYDVSDLKDSDTTELEVPCLTRPLPVKCFPSVLLTKEWLPVMFRQTRRFRETKGILVNTFAELEPQAMKFFSGVDSPLPTVYTVGPVMNLKINGPNSSDDKQSEILRWLDEQPRKSVVFLCFGSMGGFREGQAKEIAIALERSGHRFVWSLRRAQPKGSIGPPEEFTNLEEILPEGFLERTAEIGKIVGWAPQSAILANPAIGGFVSHCGWNSTLESLWFGVPMATWPLYAEQQVNAFEMVEELGLAVEVRNSFRGDFMAADDELMTAEEIERGIRCLMEQDSDVRSRVKEMSEKSHVALMDGGSSHVALLKFIQDVTKNIS

SEQ ID NO: 46508 - DNA, 948 bp, Arabidopsis thaliana
  misc_feature (1)..(948): Ceres Seq. ID no. 14310073
  misc_feature (1)..(948): Ortholog of  Ceres SEQ ID NO 13599132 as cited in SEQ ID NO 0
gttccttctcttcttcgatcagacgattcaatcgcttctcactcaaaccacttcgctccttcgcatccatgtcttcttcttcccccgacgctgctcagactcctctaaccaccgctccttatggctcctggaaatctccaatactggacaagtcgaggttgggcatttgttgatgtcaattatggtggaagcacaggttatggtcgagagtatcgagagcggttgttaaggcagtggggaatagtcgacgttgatgactgttgtggctgtgctaaatacttggtatcttctggcaaggcagatgttaagcggctctgtatatctggcggttctgcaggaggttacacaactcttgcatcattggcgttcagggatgttttcaaagctggagcgtccttatacggagtggctgatttaaaaatgttgaaagaagaaggtcataaatttgaatcccgttatatcgacaatcttgttggagatgaaaaagatttctatgagagatcaccaatcaatttcgtcgataagttctcttgtcccatcatccttttccaaggactagaagacaaggttgtaactccagatcaatcacgtaaaatctatgaagcattaaagaaaaaaggtctgcctgttgctcttgtcgagtacgaaggagaacaacacggttttcgcaaggcggaaaacatcaaatacacacttgagcaacagatggtgttctttgcccgagtggttggagggttcaaagttgctgatgacatcactcctttgaaaattgacaacttcgacacttagaaaacgatgcttaaatagatatgtttggaaaagatttgctttttttttattatttagagaaaatacaggcttggactaacgttttcggataatttgttcatcaaaagtccaaaaccttctatattcactagaatgggaatacctaggaggtggctcggc

SEQ ID NO: 46509 - protein, 222 aa, Arabidopsis thaliana
  peptide (1)..(222): Ceres Seq. ID no. 14310074
MAPGNLQYWTSRGWAFVDVNYGGSTGYGREYRERLLRQWGIVDVDDCCGCAKYLVSSGKADVKRLCISGGSAGGYTTLASLAFRDVFKAGASLYGVADLKMLKEEGHKFESRYIDNLVGDEKDFYERSPINFVDKFSCPIILFQGLEDKVVTPDQSRKIYEALKKKGLPVALVEYEGEQHGFRKAENIKYTLEQQMVFFARVVGGFKVADDITPLKIDNFDT

SEQ ID NO: 46510 - protein, 122 aa, Arabidopsis thaliana
  peptide (1)..(122): Ceres Seq. ID no. 14310075
MLKEEGHKFESRYIDNLVGDEKDFYERSPINFVDKFSCPIILFQGLEDKVVTPDQSRKIYEALKKKGLPVALVEYEGEQHGFRKAENIKYTLEQQMVFFARVVGGFKVADDITPLKIDNFDT

SEQ ID NO: 46511 - DNA, 2390 bp, Arabidopsis thaliana
  misc_feature (1)..(2390): Ceres Seq. ID no. 14315727
  misc_feature (1)..(2390): Ortholog of  Ceres SEQ ID NO 15179283 as cited in SEQ ID NO 0
aaaaaaattgattctgtaatttcagcgagtcgtctcgtctagctctcacttttgttcgtctcttctgcgtcaaacatttccaccattttcgtttcttaaacctttcttcagctcttctcttcgtcaatctgcgatagtggaattgaagtctcttcggtgagtttctttactaatggagaccgccgcttcgagcgtagctacaactcgtggcggttcccttcagaatccgtcgccgacggctccgtcaagaaaagagtggcgcgccgtttcggattcacaagacaccacagattatgtggatttggaacagttaaagctgaacaggacagatgagagaacgatttatgagaatggaagagaacaggatggttattcaaatagtgagatgttgcagcaacagattcttaatgtttctagaaagaaaggagaattacagcagttggagattgagcttcgagctcagatgattgcgagacatgagatcatggagatccagagcaactatgaatctcaattcacagagtatgctaatgctgctgctagaatgcaggagcaacttcatgagaatgagagatctattcgggaggcagagaggaagttagaagagaaagacagagagctacatgcgattaaactagataatgaagcggcttgggccaaagagggtatcctaagagaacaaaataaagaacttgccacattcagaagagagcgtgatcactctgaagatgagaggtcccagaatatacataaaatatctgaacttcaggagcatattcaagagaaagagagtcagctcagtgaattgcaggaacaaaataggattgctcaagaaactatcctgtacaaggatgagcaactaagagaagcacaaggttggattgctcgtgcccaagagattgatgctttacaatcatctacaaatcattcgttgcaggctgaattgcgagaacgtactgagcagtataaccagctctggcatggttgtcagaggcagtttgcagagatggagagattgcatgtgcacacagtgcaacagcttcagcaagagcttgctaatgtaagggaagctggtggttccaaaacaaactccggtggagcctcccagactattcagaacagcgggaaccaatttgatgctcatggaaacagcgcagaaagtgcaaacattagtgtccattcaaatggaaaaagcgcagataacatctcatcttttacttcaactgatgataaggctacccagaacaaccgtgttgatgggatatcagcttccaatcttgcgacacatgggttccttcaagctggtcagatgacccctctgcattcatttgtcatgcatcaacaagagatttctcagcttgttcagcctcaggtcccttcacaacatattgaacaatcagtgttgctacagcaaaaggctcaggctgtaccagatagttcacagatgcctatgcagaatcatgtgcatccatctcaaggtgttcatggcttggtacaatcctttggtcaagggtacggagatattcaaactagccaagtagcacaatacggaactacgacaacaccatcctctgtgaatgaacaggcagtggaatctggcaatggagattataatggatctaatcagtcagagaataactttcaagacatttcttcacagttccgtgatgccctaaggcttgattctcattcccagaatcagaaacctgaggaactcaatggtcaggtttcacctgatgaacacagtggtgctaaatccattgtccctgaaactctagtctcatccggaaaacctgagaggaactcagagtgcgctctgctcgatgaaaggtcgcttttgacatgcatcctccgtactataccagctggtgggagaatcagaatcagttcaacgcttccaaaccgtttgggcaaaatgctagcccctctacactggcatgattacaggaaaaagtacgggaagctggatgattttgttgctagccatcttgagttattttcgatagaggatgactacattcaagttagagacggtgcacagaaaatggtagcagcatcagcagcagcagccaaagtggcagcagcagctgcagcttcgtcatccccaaactccatctatgtggctatgactcctatggctcagtctcaagggttaaagaagaatgacaacagagttaggcagagctctgattttatggtgaagcagcaaagaaagctctgattttacaagtcaagcttttcaaagtaaaagcgtattagagtgaggctaaacaatctcctatcttgtttttcattttttggtgtatccccgaagctaagatatacattcataattacttttgccctttcaatagtatcaatgcttaaagtcgacaatgtttattttaaag

SEQ ID NO: 46512 - protein, 682 aa, Arabidopsis thaliana
  peptide (1)..(682): Ceres Seq. ID no. 14315728
METAASSVATTRGGSLQNPSPTAPSRKEWRAVSDSQDTTDYVDLEQLKLNRTDERTIYENGREQDGYSNSEMLQQQILNVSRKKGELQQLEIELRAQMIARHEIMEIQSNYESQFTEYANAAARMQEQLHENERSIREAERKLEEKDRELHAIKLDNEAAWAKEGILREQNKELATFRRERDHSEDERSQNIHKISELQEHIQEKESQLSELQEQNRIAQETILYKDEQLREAQGWIARAQEIDALQSSTNHSLQAELRERTEQYNQLWHGCQRQFAEMERLHVHTVQQLQQELANVREAGGSKTNSGGASQTIQNSGNQFDAHGNSAESANISVHSNGKSADNISSFTSTDDKATQNNRVDGISASNLATHGFLQAGQMTPLHSFVMHQQEISQLVQPQVPSQHIEQSVLLQQKAQAVPDSSQMPMQNHVHPSQGVHGLVQSFGQGYGDIQTSQVAQYGTTTTPSSVNEQAVESGNGDYNGSNQSENNFQDISSQFRDALRLDSHSQNQKPEELNGQVSPDEHSGAKSIVPETLVSSGKPERNSECALLDERSLLTCILRTIPAGGRIRISSTLPNRLGKMLAPLHWHDYRKKYGKLDDFVASHLELFSIEDDYIQVRDGAQKMVAASAAAAKVAAAAAASSSPNSIYVAMTPMAQSQGLKKNDNRVRQSSDFMVKQQRKL

SEQ ID NO: 46513 - protein, 611 aa, Arabidopsis thaliana
  peptide (1)..(611): Ceres Seq. ID no. 14315729
MLQQQILNVSRKKGELQQLEIELRAQMIARHEIMEIQSNYESQFTEYANAAARMQEQLHENERSIREAERKLEEKDRELHAIKLDNEAAWAKEGILREQNKELATFRRERDHSEDERSQNIHKISELQEHIQEKESQLSELQEQNRIAQETILYKDEQLREAQGWIARAQEIDALQSSTNHSLQAELRERTEQYNQLWHGCQRQFAEMERLHVHTVQQLQQELANVREAGGSKTNSGGASQTIQNSGNQFDAHGNSAESANISVHSNGKSADNISSFTSTDDKATQNNRVDGISASNLATHGFLQAGQMTPLHSFVMHQQEISQLVQPQVPSQHIEQSVLLQQKAQAVPDSSQMPMQNHVHPSQGVHGLVQSFGQGYGDIQTSQVAQYGTTTTPSSVNEQAVESGNGDYNGSNQSENNFQDISSQFRDALRLDSHSQNQKPEELNGQVSPDEHSGAKSIVPETLVSSGKPERNSECALLDERSLLTCILRTIPAGGRIRISSTLPNRLGKMLAPLHWHDYRKKYGKLDDFVASHLELFSIEDDYIQVRDGAQKMVAASAAAAKVAAAAAASSSPNSIYVAMTPMAQSQGLKKNDNRVRQSSDFMVKQQRKL

SEQ ID NO: 46514 - protein, 585 aa, Arabidopsis thaliana
  peptide (1)..(585): Ceres Seq. ID no. 14315730
MIARHEIMEIQSNYESQFTEYANAAARMQEQLHENERSIREAERKLEEKDRELHAIKLDNEAAWAKEGILREQNKELATFRRERDHSEDERSQNIHKISELQEHIQEKESQLSELQEQNRIAQETILYKDEQLREAQGWIARAQEIDALQSSTNHSLQAELRERTEQYNQLWHGCQRQFAEMERLHVHTVQQLQQELANVREAGGSKTNSGGASQTIQNSGNQFDAHGNSAESANISVHSNGKSADNISSFTSTDDKATQNNRVDGISASNLATHGFLQAGQMTPLHSFVMHQQEISQLVQPQVPSQHIEQSVLLQQKAQAVPDSSQMPMQNHVHPSQGVHGLVQSFGQGYGDIQTSQVAQYGTTTTPSSVNEQAVESGNGDYNGSNQSENNFQDISSQFRDALRLDSHSQNQKPEELNGQVSPDEHSGAKSIVPETLVSSGKPERNSECALLDERSLLTCILRTIPAGGRIRISSTLPNRLGKMLAPLHWHDYRKKYGKLDDFVASHLELFSIEDDYIQVRDGAQKMVAASAAAAKVAAAAAASSSPNSIYVAMTPMAQSQGLKKNDNRVRQSSDFMVKQQRKL

SEQ ID NO: 46515 - DNA, 3171 bp, Arabidopsis thaliana
  misc_feature (1)..(3171): Ceres Seq. ID no. 12574388
  misc_feature (1)..(3171): Ortholog of  Ceres SEQ ID NO 15180362 as cited in SEQ ID NO 0
atgtctagccgccatgacaaagagaaaggcgtcaatgttcaagtcctcctccgatgcaggccatttagcgatgatgaattgagaagcaatgcgcctcaggttctcacttgtaatgatttgcaaagagaagttgctgtttcccaaaacatcgctgggaagcatattgatagggttttcacttttgataaggtgtttggaccatcagcacaacagaaggatttgtatgatcaagccgttgttccaattgtgaatgaagtacttgaaggttttaattgtactatatttgcgtatggtcagactggtactggtaaaacatatacaatggaaggagaatgtagaagatcaaagagcgcaccttgtggaggtcttccggcagaagcaggtgttatacctagagctgtgaaacaaatatttgatacgcttgagggtcagcaagctgagtacagtgttaaagtcacgtttttggaactctacaatgaagagattaccgatttgcttgctcctgaagatctatccagagttgctgctgaagaaaaacaaaagaagccgttgcctctcatggaggacggcaaaggtggtgttcttgttagaggattggaagaggaaatcgtgacaagtgccaatgaaatctttactttgcttgagagaggttcctctaaacggagaactgcagaaacattcttgaataaacaatcaagtcggtcacattctctcttctcaataacaatacatatcaaagaagctactccagaaggtgaagaactaatcaagtgtggcaagctcaacttggttgacttggcagggtcagaaaatatatcacgttctggtgctagggatggccgggctcgagaagctggtgaaataaacaaaagtcttcttacattaggacgagtgatcagcgctttggttgaacatcttggacacgttccttacagggatagtaagctcacccgtttactacgtgattcacttggtgggagaacaaagacatgtatcatagccacagtttcacctgccgttcattgtctggaggaaacattaagtactcttgattatgcacacagggctaagaatattagaaacaaaccagaggttaaccagaaaatgatgaaatctactttgataaaggacctttatggtgaaatagaacgacttaaggcggaggtatacgcttcccgtgagaaaaatggtgtttatatgccaaaagagagatactaccaagaggagagtgagagaaaggtaatggctgagcagattgaacagatgggtggtcagatagagaattaccaaaaacaacttgaggagttgcaagataagtatgtcggtcaagtgcgggagtgctctgatctgactaccaagcttgatatcaccgagaaaaacttgagccaaacatgcaaagtgcttgcttccacaaacgaggaattgaagaaatctcaatatgccatgaaagagaaagatttcatcatttcagagcagaaaaaatctgaaaatgtactggttcaacaagcttgcattttgcaatccaacctagagaaagctactaaagacaattcttcattacaccaaaagattggaagagaggacaagcttagtgcggataacagaaaagtggtggacaattatcaagtagaactttctgaacaaatttcaaatctgttcaatagggttgcttcttgtctctcccagcaaaatgtacaccttcagggtgttaacaaactgtcccaatctcgtttagaggcacacaacaaggcgatcctagaaatgaaaaagaaggttaaagcttcaagggatttatatagttctcacttggaggcagtgcagaatgtagttcggttacacaaggcaaacgcgaatgcttgtcttgaggaagtttcagcattgacgacttcaagtgcatgttccattgatgaatttcttgcttcaggagatgaaacaacatcgtcgttatttgatgaacttcagagtgctctctcgtcccatcagggagaaatggctctctttgcgagggaactgagacaaaggttccacacaacgatggagcaaactcaggagatgtctgaatacacaagtacgttctttcagaagcttatggaagagtctaaaaatgctgagactcgtgctgcagaggcaaatgatagtcaaataaacagcattattgattttcagaagacttacgaggctcagtcaaaatctgatacagataaacttattgcagatttaactaacctagtctcaagtcacattcgtcgccaacacgaattggttgattcaagactccataactttaaagatgccgtctcttccaacaaaactttcttggacgaacatgtctctgctgttaataatctgacgaaagacgcaaaaagaaagtgggagacattttccatgcaagctgagaatgaagccagagaaggtgctgatttctcggctgcaaaacattgtcgaatggagttactgcttcagcaatctgtgggtcatgcggaatcagctttcaaacactgcaagataactcatgaatctctaaaggagatgaccagtaagcaagtcacagatgtctcttcacttgttaggtctgcttgtgatagtaacgagcagcacgatgccgaagtagattctgcaaggactgctgctgaaaaagatgtaacaaagaacagcgatgatataatccagcaaattgaacgcatgtcagaggatgaaaaagcgtctgtatcaaaaatcctggaaaatgtcaggtcgcatgaaaaaactcttgaaagtttccaacaggatcagtgttgccaagccagatgcatcgaggataaagctcaagaaacttttcaacaacaatacatggagtatgagcccacaggtgcaactccaacaaagaatgaaccagagatcccaaccaaagccaccattgaatcactacgagccatgccaattgagacattagttgaagagttccgtgaaaacaactcttatgaatcctttgcgaccaaggaaacaaaaccgcaacagctaacacggtcgcctctctcacaattgaaattctcttacagtaatcgaagttctcaaagacggtttgttctactattacataatgcgaatcttggaccctttttggttatgatggtttgtgatatgtgcatgcatataccacttgatcactttctatatatgactcaaccatga

SEQ ID NO: 46516 - protein, 1056 aa, Arabidopsis thaliana
  peptide (1)..(1056): Ceres Seq. ID no. 12574389
MSSRHDKEKGVNVQVLLRCRPFSDDELRSNAPQVLTCNDLQREVAVSQNIAGKHIDRVFTFDKVFGPSAQQKDLYDQAVVPIVNEVLEGFNCTIFAYGQTGTGKTYTMEGECRRSKSAPCGGLPAEAGVIPRAVKQIFDTLEGQQAEYSVKVTFLELYNEEITDLLAPEDLSRVAAEEKQKKPLPLMEDGKGGVLVRGLEEEIVTSANEIFTLLERGSSKRRTAETFLNKQSSRSHSLFSITIHIKEATPEGEELIKCGKLNLVDLAGSENISRSGARDGRAREAGEINKSLLTLGRVISALVEHLGHVPYRDSKLTRLLRDSLGGRTKTCIIATVSPAVHCLEETLSTLDYAHRAKNIRNKPEVNQKMMKSTLIKDLYGEIERLKAEVYASREKNGVYMPKERYYQEESERKVMAEQIEQMGGQIENYQKQLEELQDKYVGQVRECSDLTTKLDITEKNLSQTCKVLASTNEELKKSQYAMKEKDFIISEQKKSENVLVQQACILQSNLEKATKDNSSLHQKIGREDKLSADNRKVVDNYQVELSEQISNLFNRVASCLSQQNVHLQGVNKLSQSRLEAHNKAILEMKKKVKASRDLYSSHLEAVQNVVRLHKANANACLEEVSALTTSSACSIDEFLASGDETTSSLFDELQSALSSHQGEMALFARELRQRFHTTMEQTQEMSEYTSTFFQKLMEESKNAETRAAEANDSQINSIIDFQKTYEAQSKSDTDKLIADLTNLVSSHIRRQHELVDSRLHNFKDAVSSNKTFLDEHVSAVNNLTKDAKRKWETFSMQAENEAREGADFSAAKHCRMELLLQQSVGHAESAFKHCKITHESLKEMTSKQVTDVSSLVRSACDSNEQHDAEVDSARTAAEKDVTKNSDDIIQQIERMSEDEKASVSKILENVRSHEKTLESFQQDQCCQARCIEDKAQETFQQQYMEYEPTGATPTKNEPEIPTKATIESLRAMPIETLVEEFRENNSYESFATKETKPQQLTRSPLSQLKFSYSNRSSQRRFVLLLHNANLGPFLVMMVCDMCMHIPLDHFLYMTQP

SEQ ID NO: 46517 - protein, 949 aa, Arabidopsis thaliana
  peptide (1)..(949): Ceres Seq. ID no. 12574390
MEGECRRSKSAPCGGLPAEAGVIPRAVKQIFDTLEGQQAEYSVKVTFLELYNEEITDLLAPEDLSRVAAEEKQKKPLPLMEDGKGGVLVRGLEEEIVTSANEIFTLLERGSSKRRTAETFLNKQSSRSHSLFSITIHIKEATPEGEELIKCGKLNLVDLAGSENISRSGARDGRAREAGEINKSLLTLGRVISALVEHLGHVPYRDSKLTRLLRDSLGGRTKTCIIATVSPAVHCLEETLSTLDYAHRAKNIRNKPEVNQKMMKSTLIKDLYGEIERLKAEVYASREKNGVYMPKERYYQEESERKVMAEQIEQMGGQIENYQKQLEELQDKYVGQVRECSDLTTKLDITEKNLSQTCKVLASTNEELKKSQYAMKEKDFIISEQKKSENVLVQQACILQSNLEKATKDNSSLHQKIGREDKLSADNRKVVDNYQVELSEQISNLFNRVASCLSQQNVHLQGVNKLSQSRLEAHNKAILEMKKKVKASRDLYSSHLEAVQNVVRLHKANANACLEEVSALTTSSACSIDEFLASGDETTSSLFDELQSALSSHQGEMALFARELRQRFHTTMEQTQEMSEYTSTFFQKLMEESKNAETRAAEANDSQINSIIDFQKTYEAQSKSDTDKLIADLTNLVSSHIRRQHELVDSRLHNFKDAVSSNKTFLDEHVSAVNNLTKDAKRKWETFSMQAENEAREGADFSAAKHCRMELLLQQSVGHAESAFKHCKITHESLKEMTSKQVTDVSSLVRSACDSNEQHDAEVDSARTAAEKDVTKNSDDIIQQIERMSEDEKASVSKILENVRSHEKTLESFQQDQCCQARCIEDKAQETFQQQYMEYEPTGATPTKNEPEIPTKATIESLRAMPIETLVEEFRENNSYESFATKETKPQQLTRSPLSQLKFSYSNRSSQRRFVLLLHNANLGPFLVMMVCDMCMHIPLDHFLYMTQP

SEQ ID NO: 46518 - protein, 870 aa, Arabidopsis thaliana
  peptide (1)..(870): Ceres Seq. ID no. 12574391
MEDGKGGVLVRGLEEEIVTSANEIFTLLERGSSKRRTAETFLNKQSSRSHSLFSITIHIKEATPEGEELIKCGKLNLVDLAGSENISRSGARDGRAREAGEINKSLLTLGRVISALVEHLGHVPYRDSKLTRLLRDSLGGRTKTCIIATVSPAVHCLEETLSTLDYAHRAKNIRNKPEVNQKMMKSTLIKDLYGEIERLKAEVYASREKNGVYMPKERYYQEESERKVMAEQIEQMGGQIENYQKQLEELQDKYVGQVRECSDLTTKLDITEKNLSQTCKVLASTNEELKKSQYAMKEKDFIISEQKKSENVLVQQACILQSNLEKATKDNSSLHQKIGREDKLSADNRKVVDNYQVELSEQISNLFNRVASCLSQQNVHLQGVNKLSQSRLEAHNKAILEMKKKVKASRDLYSSHLEAVQNVVRLHKANANACLEEVSALTTSSACSIDEFLASGDETTSSLFDELQSALSSHQGEMALFARELRQRFHTTMEQTQEMSEYTSTFFQKLMEESKNAETRAAEANDSQINSIIDFQKTYEAQSKSDTDKLIADLTNLVSSHIRRQHELVDSRLHNFKDAVSSNKTFLDEHVSAVNNLTKDAKRKWETFSMQAENEAREGADFSAAKHCRMELLLQQSVGHAESAFKHCKITHESLKEMTSKQVTDVSSLVRSACDSNEQHDAEVDSARTAAEKDVTKNSDDIIQQIERMSEDEKASVSKILENVRSHEKTLESFQQDQCCQARCIEDKAQETFQQQYMEYEPTGATPTKNEPEIPTKATIESLRAMPIETLVEEFRENNSYESFATKETKPQQLTRSPLSQLKFSYSNRSSQRRFVLLLHNANLGPFLVMMVCDMCMHIPLDHFLYMTQP

SEQ ID NO: 46519 - DNA, 2188 bp, Arabidopsis thaliana; identical to SEQ ID NO: 43111
  misc_feature (1)..(2188): Ceres Seq. ID no. 12574396
  misc_feature (1)..(2188): Ortholog of  Ceres SEQ ID NO 13591098 as cited in SEQ ID NO 64770

SEQ ID NO: 46520 - protein, 611 aa, Arabidopsis thaliana; identical to SEQ ID NO: 43112
  peptide (1)..(611): Ceres Seq. ID no. 12574397

SEQ ID NO: 46521 - protein, 505 aa, Arabidopsis thaliana; identical to SEQ ID NO: 43113
  peptide (1)..(505): Ceres Seq. ID no. 12574398

SEQ ID NO: 46522 - protein, 494 aa, Arabidopsis thaliana; identical to SEQ ID NO: 43114
  peptide (1)..(494): Ceres Seq. ID no. 12574399

SEQ ID NO: 46523 - DNA, 2649 bp, Arabidopsis thaliana
  misc_feature (1)..(2649): Ceres Seq. ID no. 13592024
  misc_feature (1)..(2649): Ortholog of  Ceres SEQ ID NO 13595900 as cited in SEQ ID NO 69289
ttctcttctctctccattttgggaactttcatccataaacttctatttttctcatcgcaaacttgaaccgtcgtaaccctaaatcgccatcttcatcatcggcaaatcgaatctccgattatatatcaaatagcttaccaaatccgacatgacccaggccctcgttttcggaggactataatgatcggactcttcgtgtcccgtctcgattgcatggggtttgagctatgccggagcttcgccgtggagtccgccgtggccgtgttactgatgctgtagctcccaatcagcttccgcaaacacctacagaaaagaaaccgaagaagagtaccgttaaagctccaaaaccggttgccggcggagttacaggagttgcagagaggccgaggactagattagcggcgaggaaattaaaggaggaagataaagagatacctcaggagattccggttgttgtgccgtctaaggatagcgatatcgataaaaacaagggtaaagaggtagtcgttgaagaagagaagaaagatatggctattggtaatgatagtggtggctctaacaaggcggctgctcaggaagaagaaggaaatactgctcctttccctgagagggttcaagttggaggatcaccactatataaagttgagagaaagctggggaagggtggttttggacaagtatttgtcggacgtcgtattagtggcggtaatgatcgtagtgcaggagctagcatcttggaggttgctctaaagtttgagcataggagcagcaagggttgcaactatggtcctccacatgagtggcaggtttacaacaccttgggtggtagccatggagtccctagagtacatttcaaaggcaggcaaggagactattatgtcatggttatggacatgcttgggcctagcttatgggatttatggaatacttcagggcaagcaatgtcctcggaaatggtagcttgcattgcggttgaatcactttccatccttgaaaagatgcatgcaaaaggttatgtgcatggggatgttaagccagaaaatttcttactcggccagccttcaacgtctcaagagaaaaaactgtttcttgttgatttgggactagctacaaagtggagagaaggtggtagcggacaacatgttgaatatgatcaacgtcctgatatgtttagagggacagttagatacgcaagtgcacatgctcatttagggagaactgctagcagaagggatgatctggaatcattagcatatacactgatctttcttcaccgaggtagattgccatggcaaggatatcagggagataacaagtcattccttgtttgcaaaaagaagatggcaacatcgccggatatgctttgttgtttttgtccccctcctttcaaacaatttcttgagatcgtggtaaatatgaaatttgatgaagaacccaactatggaaagttagtatctctgtttcaagacctcttgggcgaaaatccggcaattaggcctataaacacagagggtgctcaaaagatcatattccaagttggccagaagcgaggtaggttgagcattggggaggaagaagaagatgcccctaggaaaaaggtccgtctaggagtccctgcaacgcaatggatatcgatttacaatgccaggcaaccaatgaagcagaggtatcattataatgtggctgatataagactggcacagcatattgagagaggtattgcagatggtttgttgataagctgtgtatcatcatgttcgaatctctgggcattgataatggatgctggaactggcttcacgcaccaagtctatgaactctctcctgtattcttgcacaaggaatggattatggagcagtgggagaagaactactacattagttctattgctggtgcaagcaatggaagctccttagttgtcatgtcaaaaggtacgcagtatacacagcagtcttacaaagtaagcgattcattcccgttcaagtggataaacaagaaatggagagaaggcttccatgtaacctcaatggcaacagctggaaatcgatggggtgttgttatgtcccgcaattctggctacagtgaacaggttgtggaacttgattttctgtatccaagtgaaggcatccacaggcgttgggatggtggattcagaatcacatcaacagcagccacaaccgatcaagctgctctcatcctaagcatcccacgtcgtagacttgttgatgagacacaagagacgttacgtacctctcaattccccagcacacacgtcaaggaaaaatggggaaagaatctctaccttgcatcgttaagctatggccgaactgtatcttgagacttattagtaaaaactgttgaaggacgagagaaatatgtttctaagtctcggctcctattccttatccaaccctatggcctctcaggctctgttgtgcttcttcttttttttcagttgaattgtgaagcaaaaatgtggtgattgtgttgtttattccccccttgtgaaggggattgagccataatcaccagtttacctacacatttccctcgaaattgctatatttaatttttaaatcaagaaaagatatttttgtcaccaaatattctatagttgtccaattctgtaacctaattatcgaattcat

SEQ ID NO: 46524 - protein, 703 aa, Arabidopsis thaliana
  peptide (1)..(703): Ceres Seq. ID no. 13592025
MPELRRGVRRGRVTDAVAPNQLPQTPTEKKPKKSTVKAPKPVAGGVTGVAERPRTRLAARKLKEEDKEIPQEIPVVVPSKDSDIDKNKGKEVVVEEEKKDMAIGNDSGGSNKAAAQEEEGNTAPFPERVQVGGSPLYKVERKLGKGGFGQVFVGRRISGGNDRSAGASILEVALKFEHRSSKGCNYGPPHEWQVYNTLGGSHGVPRVHFKGRQGDYYVMVMDMLGPSLWDLWNTSGQAMSSEMVACIAVESLSILEKMHAKGYVHGDVKPENFLLGQPSTSQEKKLFLVDLGLATKWREGGSGQHVEYDQRPDMFRGTVRYASAHAHLGRTASRRDDLESLAYTLIFLHRGRLPWQGYQGDNKSFLVCKKKMATSPDMLCCFCPPPFKQFLEIVVNMKFDEEPNYGKLVSLFQDLLGENPAIRPINTEGAQKIIFQVGQKRGRLSIGEEEEDAPRKKVRLGVPATQWISIYNARQPMKQRYHYNVADIRLAQHIERGIADGLLISCVSSCSNLWALIMDAGTGFTHQVYELSPVFLHKEWIMEQWEKNYYISSIAGASNGSSLVVMSKGTQYTQQSYKVSDSFPFKWINKKWREGFHVTSMATAGNRWGVVMSRNSGYSEQVVELDFLYPSEGIHRRWDGGFRITSTAATTDQAALILSIPRRRLVDETQETLRTSQFPSTHVKEKWGKNLYLASLSYGRTVS

SEQ ID NO: 46525 - protein, 603 aa, Arabidopsis thaliana
  peptide (1)..(603): Ceres Seq. ID no. 13592026
MAIGNDSGGSNKAAAQEEEGNTAPFPERVQVGGSPLYKVERKLGKGGFGQVFVGRRISGGNDRSAGASILEVALKFEHRSSKGCNYGPPHEWQVYNTLGGSHGVPRVHFKGRQGDYYVMVMDMLGPSLWDLWNTSGQAMSSEMVACIAVESLSILEKMHAKGYVHGDVKPENFLLGQPSTSQEKKLFLVDLGLATKWREGGSGQHVEYDQRPDMFRGTVRYASAHAHLGRTASRRDDLESLAYTLIFLHRGRLPWQGYQGDNKSFLVCKKKMATSPDMLCCFCPPPFKQFLEIVVNMKFDEEPNYGKLVSLFQDLLGENPAIRPINTEGAQKIIFQVGQKRGRLSIGEEEEDAPRKKVRLGVPATQWISIYNARQPMKQRYHYNVADIRLAQHIERGIADGLLISCVSSCSNLWALIMDAGTGFTHQVYELSPVFLHKEWIMEQWEKNYYISSIAGASNGSSLVVMSKGTQYTQQSYKVSDSFPFKWINKKWREGFHVTSMATAGNRWGVVMSRNSGYSEQVVELDFLYPSEGIHRRWDGGFRITSTAATTDQAALILSIPRRRLVDETQETLRTSQFPSTHVKEKWGKNLYLASLSYGRTVS

SEQ ID NO: 46526 - protein, 485 aa, Arabidopsis thaliana
  peptide (1)..(485): Ceres Seq. ID no. 13592027
MVMDMLGPSLWDLWNTSGQAMSSEMVACIAVESLSILEKMHAKGYVHGDVKPENFLLGQPSTSQEKKLFLVDLGLATKWREGGSGQHVEYDQRPDMFRGTVRYASAHAHLGRTASRRDDLESLAYTLIFLHRGRLPWQGYQGDNKSFLVCKKKMATSPDMLCCFCPPPFKQFLEIVVNMKFDEEPNYGKLVSLFQDLLGENPAIRPINTEGAQKIIFQVGQKRGRLSIGEEEEDAPRKKVRLGVPATQWISIYNARQPMKQRYHYNVADIRLAQHIERGIADGLLISCVSSCSNLWALIMDAGTGFTHQVYELSPVFLHKEWIMEQWEKNYYISSIAGASNGSSLVVMSKGTQYTQQSYKVSDSFPFKWINKKWREGFHVTSMATAGNRWGVVMSRNSGYSEQVVELDFLYPSEGIHRRWDGGFRITSTAATTDQAALILSIPRRRLVDETQETLRTSQFPSTHVKEKWGKNLYLASLSYGRTVS

SEQ ID NO: 46527 - DNA, 2765 bp, Arabidopsis thaliana
  misc_feature (1)..(2765): Ceres Seq. ID no. 13579248
  misc_feature (1)..(2765): Ortholog of  Ceres SEQ ID NO 13590241 as cited in SEQ ID NO 63878
  misc_feature (1)..(2765): Ortholog of  Ceres SEQ ID NO 13660597 as cited in SEQ ID NO 67655
  misc_feature (1)..(2765): Ortholog of  Ceres SEQ ID NO 15179308 as cited in SEQ ID NO 0
atggagcagaagagcgtgttgttgtcagctttaggtgttggtgttgggttagggattgggttagcatcaggtcaaagtttgggaagatgggcaaacgggtcaggttctgttgaagatggactcaccggagaacagattgagcaagagttgattagacaaattgttgatggtagagaaagtactgtcacttttgaagagtttccgtatttcttaagcaagagaactcgagaattgttgacaagtgttgcatatgttcatttaaaagagtatgatatatcgaagcacactcggaatcttgcacctgcaagtaaagccattctactttctggtcctgcggaattttatcagcaaatgcttgcaaaagctttgtctcattactttgaatcaaagctattgttgttagatataactgacttctctattaagatacagagtaaatatggatgcaccaagagagaaccttttcacaagaggtctatttctgagttaacattagataaagtgtcgagtttgatgggttccttctctatgctctctcaacgcgaagttgaaccaagagggacattgcgtcgacacaccagtggaaatgatcttaaatcaaggagtactgagagctctaatcgtcttccaagacacaagagaaatgcttctgctgcttctgatatcagtagcatatcttcccgctcttcgagttctgtttcagcttccagaaaacgcactacaaatctatgtttcgacgagaaacttttcctgcaatcactttacaaggtcttgagttctgtatcggaaacaactccgctaatcatatacttgagagatgttgagaagcttcttgagtcagaaagattctacaagttgttccaaaggctcttgaacaagctctctggtcctgtcttaattcttggctcaagagtattagaacctgaagatgattgccaagaagtagacgaaagtatttccgctctatttccttacaacatcgagatcagaccaccagaagatgaatctcagctcgtgagctggaaatctcggttagaagacgacatgaaaatgattcagtttcaagacaacaagaaccacattgcagaggttcttgctgctaatgatatccaatgcgatgacttgtcttcgatatgccacgcagatacaatgtgtttgagtaaccatattgaggaaattgtggtttctgcaatcacttatcatttgatacacaccaaagaaccagaatacagaaacggaaagcttgtaatatcttccaaaagtttgtctcatggactaagtatattccaagaaggtggaaacagatcatttgaagactcgttgaagctagatacaaacactgactctaagcgaaaaggaggagaagtatgttcaaagagtgagtcaaaatctggtcctgaaaacaaaaacgagtcagaaatatcacttccttcaaacaagaatgacaatccattacctccaaaagcacctgaggttgttcctgataatgagtttgagaagcgtataagaccagaagttataccagcaaatgagattggtgtgacatttgcagatattggttctctagacgaaacaaaagattcgcttcaagaacttgtaatgcttccacttagaagaccggatctttttcaaggcggtcttctcaagccatgtagaggaatcctattattcggtccacctggtactggcaaaacaatgcttgcaaaagcaattgcaaatgaagctggagctagtttcatcaatgtctccatgtctacaatcacttcaaaatggtttggagaagacgaaaagaatgtgagagctctgtttactttagcagctaaagtatctccaacgattatatttgtggatgaagttgatagtatgttgggacaaaggacaagagttggagagcatgaagctatgaggaagattaagaatgagtttatgacacattgggatgggctaatgacgaaacccggtgaaaggattctcgttcttgcagcgacaaacagaccgtttgatcttgatgaagctatcattaggaggtttgagagaagaataatggtgggacttccttcgattgagagcagagagaagatcttgagaactttgttgtcgaaagagaaaacagagaatcttgatttccatgagcttgggcagataacagaaggctacagtggaagtgatctcaagaacttatgcatcacagctgcttatagaccagttagagagctgattcagcaggaaagattgaaagatcaggagaggaagaagagagaagaagcaggaaaaggcacagaagaatcaaaagaagaagaagcagaagcttctgaggaaagagttattacattgagacctttgaacatggaagacatgagaaaagctaaaaaccaggtagctgcgagttttgcatcagaaggagcaggaatgaatgagctaaagcaatggaatgatttgtatggagaaggaggctcaaggaaaaaggaacagctcacttacttcctctgaaaattgcaaacagatattgatgtgtgtttcttgatgcacacgatatatatataacaaagagatcccgcatatcacaaagaaagagtcttcaattacttgttaggccattccatttttagataactttttaggtttcatcttattctctttctttttgtgttttatagaattttctacaaaactatgatttttttttatatgttcatatttatgtcattgtgaatgtgtagttaatgtagtaaagatattttataaaaatattatgattgtttgtt

SEQ ID NO: 46528 - protein, 829 aa, Arabidopsis thaliana
  peptide (1)..(829): Ceres Seq. ID no. 13579249
MEQKSVLLSALGVGVGLGIGLASGQSLGRWANGSGSVEDGLTGEQIEQELIRQIVDGRESTVTFEEFPYFLSKRTRELLTSVAYVHLKEYDISKHTRNLAPASKAILLSGPAEFYQQMLAKALSHYFESKLLLLDITDFSIKIQSKYGCTKREPFHKRSISELTLDKVSSLMGSFSMLSQREVEPRGTLRRHTSGNDLKSRSTESSNRLPRHKRNASAASDISSISSRSSSSVSASRKRTTNLCFDEKLFLQSLYKVLSSVSETTPLIIYLRDVEKLLESERFYKLFQRLLNKLSGPVLILGSRVLEPEDDCQEVDESISALFPYNIEIRPPEDESQLVSWKSRLEDDMKMIQFQDNKNHIAEVLAANDIQCDDLSSICHADTMCLSNHIEEIVVSAITYHLIHTKEPEYRNGKLVISSKSLSHGLSIFQEGGNRSFEDSLKLDTNTDSKRKGGEVCSKSESKSGPENKNESEISLPSNKNDNPLPPKAPEVVPDNEFEKRIRPEVIPANEIGVTFADIGSLDETKDSLQELVMLPLRRPDLFQGGLLKPCRGILLFGPPGTGKTMLAKAIANEAGASFINVSMSTITSKWFGEDEKNVRALFTLAAKVSPTIIFVDEVDSMLGQRTRVGEHEAMRKIKNEFMTHWDGLMTKPGERILVLAATNRPFDLDEAIIRRFERRIMVGLPSIESREKILRTLLSKEKTENLDFHELGQITEGYSGSDLKNLCITAAYRPVRELIQQERLKDQERKKREEAGKGTEESKEEEAEASEERVITLRPLNMEDMRKAKNQVAASFASEGAGMNELKQWNDLYGEGGSRKKEQLTYFL

SEQ ID NO: 46529 - protein, 712 aa, Arabidopsis thaliana
  peptide (1)..(712): Ceres Seq. ID no. 13579250
MLAKALSHYFESKLLLLDITDFSIKIQSKYGCTKREPFHKRSISELTLDKVSSLMGSFSMLSQREVEPRGTLRRHTSGNDLKSRSTESSNRLPRHKRNASAASDISSISSRSSSSVSASRKRTTNLCFDEKLFLQSLYKVLSSVSETTPLIIYLRDVEKLLESERFYKLFQRLLNKLSGPVLILGSRVLEPEDDCQEVDESISALFPYNIEIRPPEDESQLVSWKSRLEDDMKMIQFQDNKNHIAEVLAANDIQCDDLSSICHADTMCLSNHIEEIVVSAITYHLIHTKEPEYRNGKLVISSKSLSHGLSIFQEGGNRSFEDSLKLDTNTDSKRKGGEVCSKSESKSGPENKNESEISLPSNKNDNPLPPKAPEVVPDNEFEKRIRPEVIPANEIGVTFADIGSLDETKDSLQELVMLPLRRPDLFQGGLLKPCRGILLFGPPGTGKTMLAKAIANEAGASFINVSMSTITSKWFGEDEKNVRALFTLAAKVSPTIIFVDEVDSMLGQRTRVGEHEAMRKIKNEFMTHWDGLMTKPGERILVLAATNRPFDLDEAIIRRFERRIMVGLPSIESREKILRTLLSKEKTENLDFHELGQITEGYSGSDLKNLCITAAYRPVRELIQQERLKDQERKKREEAGKGTEESKEEEAEASEERVITLRPLNMEDMRKAKNQVAASFASEGAGMNELKQWNDLYGEGGSRKKEQLTYFL

SEQ ID NO: 46530 - protein, 658 aa, Arabidopsis thaliana
  peptide (1)..(658): Ceres Seq. ID no. 13579251
MGSFSMLSQREVEPRGTLRRHTSGNDLKSRSTESSNRLPRHKRNASAASDISSISSRSSSSVSASRKRTTNLCFDEKLFLQSLYKVLSSVSETTPLIIYLRDVEKLLESERFYKLFQRLLNKLSGPVLILGSRVLEPEDDCQEVDESISALFPYNIEIRPPEDESQLVSWKSRLEDDMKMIQFQDNKNHIAEVLAANDIQCDDLSSICHADTMCLSNHIEEIVVSAITYHLIHTKEPEYRNGKLVISSKSLSHGLSIFQEGGNRSFEDSLKLDTNTDSKRKGGEVCSKSESKSGPENKNESEISLPSNKNDNPLPPKAPEVVPDNEFEKRIRPEVIPANEIGVTFADIGSLDETKDSLQELVMLPLRRPDLFQGGLLKPCRGILLFGPPGTGKTMLAKAIANEAGASFINVSMSTITSKWFGEDEKNVRALFTLAAKVSPTIIFVDEVDSMLGQRTRVGEHEAMRKIKNEFMTHWDGLMTKPGERILVLAATNRPFDLDEAIIRRFERRIMVGLPSIESREKILRTLLSKEKTENLDFHELGQITEGYSGSDLKNLCITAAYRPVRELIQQERLKDQERKKREEAGKGTEESKEEEAEASEERVITLRPLNMEDMRKAKNQVAASFASEGAGMNELKQWNDLYGEGGSRKKEQLTYFL

SEQ ID NO: 46531 - DNA, 1252 bp, Arabidopsis thaliana
  misc_feature (1)..(1252): Ceres Seq. ID no. 13591768
  misc_feature (1)..(1252): Ortholog of  Ceres SEQ ID NO 14303542 as cited in SEQ ID NO 63539
  misc_feature (1)..(1252): Ortholog of  Ceres SEQ ID NO 12407937 as cited in SEQ ID NO 0
gagtccattttcgcgagcttccgtgtccaagagctcctcgaccatggcgtcttgtttacaagcatccatgaattctctgcttccacgctcttcttctttttctcctcatcctcctctatcttcgaattcatccgggagaagaaacttgaagacttttcgttacgcctttcgcgccaaagcctctgccaaaatccctatgcctccgataaatccaaaggatcctttcctctccacgctcgcttctattgccgcgaattctccggaaaagcttctcaatcggccggttaacgctgatgtgccgccatatcttgacatctttgactcccctcagctcatgtcttctcctgcacaggttgaaagatcagtggcttataacgagcaccgaccgagaactcctccaccagacttgccatctatgcttcttgacgggagaattgtttacattggaatgcctcttgtgccggcagtgactgagctagttgtcgctgagctaatgtatcttcagtggctggatcccaaggaacccatttacatttacatcaactccacagggaccactcgtgatgatggagagacggttggaatggaatcagaagggtttgcgatctatgactctttgatgcaacttaaaaacgaggtacatacagtatgtgtgggagcagccataggtcaggcctgtctattactttctgcgggaaccaagggtaaacggtttatgatgccacatgccaaagcgatgattcagcaaccacgtgtaccttcttctgggttgatgcctgccagtgatgtcctgattcgggccaaagaggtcattacaaatagggatatacttgtggaactactatcaaagcatactgggaattccgtggagactgtagctaacgtaatgagaaggccatattacatggatgcaccaaaagctaaagaatttggagtcattgacaggattctttggcgcggtcaagaaaagattattgcggacgtggttccttcagaggaattcgacaagaatgcagggattaaaagcgtagtatgagtctagtcttaagttttcttggcctaaatcatactgcgtcatggagaagaacaaatagactgaccaaaatcacattggccgcagactgccttgtttcaaatcacttggtaaatgtgaacatgcgattaggagaatcatacttaaaggatcttgaaatattatgataaaattgtaatgtgtttgttcgttagcaatagtaaatacaatcttcaactc

SEQ ID NO: 46532 - protein, 344 aa, Arabidopsis thaliana
  peptide (1)..(344): Ceres Seq. ID no. 13591769
SPFSRASVSKSSSTMASCLQASMNSLLPRSSSFSPHPPLSSNSSGRRNLKTFRYAFRAKASAKIPMPPINPKDPFLSTLASIAANSPEKLLNRPVNADVPPYLDIFDSPQLMSSPAQVERSVAYNEHRPRTPPPDLPSMLLDGRIVYIGMPLVPAVTELVVAELMYLQWLDPKEPIYIYINSTGTTRDDGETVGMESEGFAIYDSLMQLKNEVHTVCVGAAIGQACLLLSAGTKGKRFMMPHAKAMIQQPRVPSSGLMPASDVLIRAKEVITNRDILVELLSKHTGNSVETVANVMRRPYYMDAPKAKEFGVIDRILWRGQEKIIADVVPSEEFDKNAGIKSVV

SEQ ID NO: 46533 - protein, 330 aa, Arabidopsis thaliana
  peptide (1)..(330): Ceres Seq. ID no. 13591770
MASCLQASMNSLLPRSSSFSPHPPLSSNSSGRRNLKTFRYAFRAKASAKIPMPPINPKDPFLSTLASIAANSPEKLLNRPVNADVPPYLDIFDSPQLMSSPAQVERSVAYNEHRPRTPPPDLPSMLLDGRIVYIGMPLVPAVTELVVAELMYLQWLDPKEPIYIYINSTGTTRDDGETVGMESEGFAIYDSLMQLKNEVHTVCVGAAIGQACLLLSAGTKGKRFMMPHAKAMIQQPRVPSSGLMPASDVLIRAKEVITNRDILVELLSKHTGNSVETVANVMRRPYYMDAPKAKEFGVIDRILWRGQEKIIADVVPSEEFDKNAGIKSVV

SEQ ID NO: 46534 - protein, 322 aa, Arabidopsis thaliana
  peptide (1)..(322): Ceres Seq. ID no. 13591771
MNSLLPRSSSFSPHPPLSSNSSGRRNLKTFRYAFRAKASAKIPMPPINPKDPFLSTLASIAANSPEKLLNRPVNADVPPYLDIFDSPQLMSSPAQVERSVAYNEHRPRTPPPDLPSMLLDGRIVYIGMPLVPAVTELVVAELMYLQWLDPKEPIYIYINSTGTTRDDGETVGMESEGFAIYDSLMQLKNEVHTVCVGAAIGQACLLLSAGTKGKRFMMPHAKAMIQQPRVPSSGLMPASDVLIRAKEVITNRDILVELLSKHTGNSVETVANVMRRPYYMDAPKAKEFGVIDRILWRGQEKIIADVVPSEEFDKNAGIKSVV

SEQ ID NO: 46535 - DNA, 2086 bp, Arabidopsis thaliana
  misc_feature (1)..(2086): Ceres Seq. ID no. 12639069
  misc_feature (1)..(2086): Ortholog of  Ceres SEQ ID NO 13659971 as cited in SEQ ID NO 67565
  misc_feature (1)..(2086): Ortholog of  Ceres SEQ ID NO 13500385 as cited in SEQ ID NO 67583
tctctctctctcgctactctcatcttcaccgtacgcttcttcgatctacgcttctctctagctatagcttccattgtcacgattcctcccaaagcgtagaatgtggaaccctagatacctcaaattcagctagagatctatctactttcacctctattactttctacttctgaaacccctcatcagagctacacacagtgatgggaaactgttgcagatctcccgcagcagttgctagagaagacgtgaaatccaactattccggccacgatcacgcccgcaaagacgccgccggcggtaaaaaatcggcgccgattcgagttctaagcgatgttcccaaggaaaacatcgaggaccgttacttactcgacagagaactcggccgcggcgagtttggtgtcacttacctctgtatcgagaggtcctcgcgtgacctactcgcttgcaaatcgatctccaagaggaagcttagaactgctgtggatattgaagatgttaaaagagaagtagcgattatgaagcatttgcctaagagttcgagtattgttactttgaaagaagcttgtgaggatgataatgctgtgcatttggttatggagctttgtgaaggtggcgagcttttcgatcggattgttgcgagaggtcattatacggagcgtgctgctgctggtgttactaagactattgttgaggttgtgcagctttgtcataagcatggtgtgattcatagagatttgaagcccgagaactttttgtttgctaataagaaggagaactcgcctttgaaagctattgattttggattgtcgattttcttcaagccaggtgagaaattctctgagattgttgggagtccatattacatggcacctgaggtgcttaagcggaattatggacccgaaatagatatttggagtgctggagtgattctttatattctcttgtgtggagttcctccgttctgggcagagtcagaacagggagttgctcaggctattctgcgtggagtaattgattttaagagggaaccgtggccaaacatttctgagaccgctaagaatctagtcagacaaatgttagagcctgatccaaagcgtcggctgactgcaaagcaagtgcttgagcacccatggattcagaacgcaaagaaagctcccaatgttcctcttggagatgttgtgaagtcgaggttgaagcaattttcagtgatgaaccgattcaagagaaaagctttaagggttattgccgaatttttatctacggaagaagtagaagacatcaaagtaatgttcaacaagatggatactgataatgatggtatagtttccattgaggagttgaaagccggacttcgtgattttagtacacagctagcggaatcagaagttcagatgcttattgaagcggtggatactaaaggaaaaggaactctagactatggagaatttgtagcagtgtctctccacctgcaaaaggtagcaaacgatgagcatctccgcaaagccttctcttactttgacaaggatggaaatgggtacattttgccccaggagctttgtgacgccttaaaggaagatggaggagatgactgtgtggatgtcgccaatgatatattccaagaagttgacacagacaaggatgggagaataagctacgaagagtttgcggcaatgatgaaaacaggaacggattggagaaaggcgtctcgtcattactcaagagggagattcaatagcctaagcatcaagctaatgaaggacgggtctttgaacctaggcaacgaatagcgaatcaaagtgaagaagccgcaatagggtctttagtgtctgtctctcacgccacgttctcgtgcacgtcaagtattaaaccaagagaaggtaaaacttgggattcagaattcatatctttttgtacatctttcgttttttaacctttctatttttggtgattatgttatctgtgttcttttttttattggtttatgggttgagttgtgtttgtttagtttgttctggtagaaatccaaaagacatgagaatcagtgtttgatgtgtagaaggaaaaaaaaccaaagaccatttctggt

SEQ ID NO: 46536 - protein, 528 aa, Arabidopsis thaliana
  peptide (1)..(528): Ceres Seq. ID no. 12639070
MGNCCRSPAAVAREDVKSNYSGHDHARKDAAGGKKSAPIRVLSDVPKENIEDRYLLDRELGRGEFGVTYLCIERSSRDLLACKSISKRKLRTAVDIEDVKREVAIMKHLPKSSSIVTLKEACEDDNAVHLVMELCEGGELFDRIVARGHYTERAAAGVTKTIVEVVQLCHKHGVIHRDLKPENFLFANKKENSPLKAIDFGLSIFFKPGEKFSEIVGSPYYMAPEVLKRNYGPEIDIWSAGVILYILLCGVPPFWAESEQGVAQAILRGVIDFKREPWPNISETAKNLVRQMLEPDPKRRLTAKQVLEHPWIQNAKKAPNVPLGDVVKSRLKQFSVMNRFKRKALRVIAEFLSTEEVEDIKVMFNKMDTDNDGIVSIEELKAGLRDFSTQLAESEVQMLIEAVDTKGKGTLDYGEFVAVSLHLQKVANDEHLRKAFSYFDKDGNGYILPQELCDALKEDGGDDCVDVANDIFQEVDTDKDGRISYEEFAAMMKTGTDWRKASRHYSRGRFNSLSIKLMKDGSLNLGNE

SEQ ID NO: 46537 - protein, 423 aa, Arabidopsis thaliana
  peptide (1)..(423): Ceres Seq. ID no. 12639071
MKHLPKSSSIVTLKEACEDDNAVHLVMELCEGGELFDRIVARGHYTERAAAGVTKTIVEVVQLCHKHGVIHRDLKPENFLFANKKENSPLKAIDFGLSIFFKPGEKFSEIVGSPYYMAPEVLKRNYGPEIDIWSAGVILYILLCGVPPFWAESEQGVAQAILRGVIDFKREPWPNISETAKNLVRQMLEPDPKRRLTAKQVLEHPWIQNAKKAPNVPLGDVVKSRLKQFSVMNRFKRKALRVIAEFLSTEEVEDIKVMFNKMDTDNDGIVSIEELKAGLRDFSTQLAESEVQMLIEAVDTKGKGTLDYGEFVAVSLHLQKVANDEHLRKAFSYFDKDGNGYILPQELCDALKEDGGDDCVDVANDIFQEVDTDKDGRISYEEFAAMMKTGTDWRKASRHYSRGRFNSLSIKLMKDGSLNLGNE

SEQ ID NO: 46538 - protein, 397 aa, Arabidopsis thaliana
  peptide (1)..(397): Ceres Seq. ID no. 12639072
MELCEGGELFDRIVARGHYTERAAAGVTKTIVEVVQLCHKHGVIHRDLKPENFLFANKKENSPLKAIDFGLSIFFKPGEKFSEIVGSPYYMAPEVLKRNYGPEIDIWSAGVILYILLCGVPPFWAESEQGVAQAILRGVIDFKREPWPNISETAKNLVRQMLEPDPKRRLTAKQVLEHPWIQNAKKAPNVPLGDVVKSRLKQFSVMNRFKRKALRVIAEFLSTEEVEDIKVMFNKMDTDNDGIVSIEELKAGLRDFSTQLAESEVQMLIEAVDTKGKGTLDYGEFVAVSLHLQKVANDEHLRKAFSYFDKDGNGYILPQELCDALKEDGGDDCVDVANDIFQEVDTDKDGRISYEEFAAMMKTGTDWRKASRHYSRGRFNSLSIKLMKDGSLNLGNE

SEQ ID NO: 46539 - DNA, 2742 bp, Arabidopsis thaliana
  misc_feature (1)..(2742): Ceres Seq. ID no. 12574600
  misc_feature (1)..(2742): Ortholog of  Ceres SEQ ID NO 13600310 as cited in SEQ ID NO 5086
aaagagacagaagaaacaagaaccatttgtgaaatcaagaaccatcattattccatcaccagacacagaattgttcaatcatttgacaaaaaccttctaatccatacccttttgtcaaaatcaacacttgggttttcaatagtttatagctttaaacccataagaacgaatctggttctgtttctctggttaatgattgagattcttcaaagttttgattttttttgtagattgcttcatcttcaattttcacttttcatttgtattaaacattttcttgttccgaggggttttcttgtttctgacaaataaaaaaaaactttccttttctctctctgttttgaatttacattaatcaattatctgtctcctgaggttttatgacaactcaagttgtcttcttgttcaaagttctgcaataaattataataattgataagtttagagttctttttcctttgttcctaactaccattctttacattggatacgttgagtttgttgtctttgtctccattccactcccacttccacttttttttttgtcagatattggatctcgttcaggtcaaatgttgatttcagctgaaaaaggagagatcttgatccctcaatctccacttagctctgaatctgttgttcctttggtctatactgatgtcaatgttgttcctgaacatgaaagtaatcagcttgagaagtcaatatcaaaccttgaagaagaagtttttgaattgaagttgaagcttaagtctttggatgaaaagagaaagcaagttctgaataagattatagacactaaaggaagtatacgtgtgttttgtagagttagaccatttctattaacggaaaggagaccgattagggaacctgtttcgtttggaccagataatgttgttataagatctgctggaagtagtaaagaatttgagtttgataaagtttttcatcaatcagcaactcaagaagaagttttcggagaagtgaaaccgattcttagatctgctcttgatggtcacaatgtatgtgtcttggcgtatggtcaaacgggaactggcaagacttttaccatggatggcacaagtgagcaaccaggtcttgctcctagagctattaaagagcttttcaatgaagcttcaatggaccaaacacattccgtgacatttaggatgagtatgttggaaatctacatgggtaacttgaaagatttgttgtctgcaagacagtctttgaagtcatatgaagcctcagctaaatgtaaccttaatattcaagtagactcaaagggttcggttgaaattgagggtttgactgaagtggaagtaatggattttacaaaggctagatggtggtataacaaagggagacgagtgagatcaacttcttggacaaatgtaaacgaaacttcgagcagatctcattgtttaacaaggatcacgatctttcgtcgtggagatgcggtggggtcaaaaactgaagttagcaagctttggatgatagatcttggaggaagtgagaggctcttgaaaacaggagctatagggcaaactatggatgaaggtagagccataaacctctcactttccgctcttggagacgtgattgcagcgttaaggagaaagaagggacatgtgccttacagaaacagcaagctaactcaaattcttaaagattctctaggtactagatcaaaagttctgatgcttgtgcacataagtccacgtgatgaagatgttggtgaaacaatctgctctctcagctttactaaacgtgcgagagctgtagagtctaacagaggattaacagcagaactacaaaagctaagagaaaagaaaatatcggaacttgaagaggaaatggaagaaactcaagaaggttgcaagaagatcaaagcgcggttacaggaagtagagtgtctggttaatgaacacaagaaactcttttggatcaccaatgataagtatctagaagacattgaaaagaaagctatttcgcctttagatcatctgaaagacaccgatgcaactccaatatcatctgataaactagtcaaaataaggaagagttctggttttgtcccacgtttcatgacttcaactgttgctagtcgccaaaggcaaacaatgtcagagaaggaaatcaatgcaaaggctcagagcatacgatcagtggctaaaaatcttactcagttctccacttctcagtcgcttagtctctctgactcacgaagcaaagctctcctaagaagatcatacacaaaaccgcttcaagctgcagctaacagtggaacaccaccagaaacgcctaaaagacatatcaaagataattctttacagagaaagaatatgaatgatacttcttcaccaaggagcaagatggttacttcatcggatccaaatgtgagagctaaactgtgtcaccacaaacgaagaatgtcaagcttgacatgatctaacagttatctttcttttccatctgttgtgaaagtgctgagttgtttttagacttgtggtttgagcctgagtaggatgaggcggtgtcctccatagaaaccacttggctaatggtcccattttaagaccattggaactcgtggagtttgcggttctggttttaaaaggatatgttttgtttgtgattgtttcacagaatttttctttgggttggtgatagtttggtgttggatgtttgtatggggttcacagaaactggatcataattaatattccagattctttcttc

SEQ ID NO: 46540 - protein, 625 aa, Arabidopsis thaliana
  peptide (1)..(625): Ceres Seq. ID no. 12574601
MLISAEKGEILIPQSPLSSESVVPLVYTDVNVVPEHESNQLEKSISNLEEEVFELKLKLKSLDEKRKQVLNKIIDTKGSIRVFCRVRPFLLTERRPIREPVSFGPDNVVIRSAGSSKEFEFDKVFHQSATQEEVFGEVKPILRSALDGHNVCVLAYGQTGTGKTFTMDGTSEQPGLAPRAIKELFNEASMDQTHSVTFRMSMLEIYMGNLKDLLSARQSLKSYEASAKCNLNIQVDSKGSVEIEGLTEVEVMDFTKARWWYNKGRRVRSTSWTNVNETSSRSHCLTRITIFRRGDAVGSKTEVSKLWMIDLGGSERLLKTGAIGQTMDEGRAINLSLSALGDVIAALRRKKGHVPYRNSKLTQILKDSLGTRSKVLMLVHISPRDEDVGETICSLSFTKRARAVESNRGLTAELQKLREKKISELEEEMEETQEGCKKIKARLQEVECLVNEHKKLFWITNDKYLEDIEKKAISPLDHLKDTDATPISSDKLVKIRKSSGFVPRFMTSTVASRQRQTMSEKEINAKAQSIRSVAKNLTQFSTSQSLSLSDSRSKALLRRSYTKPLQAAANSGTPPETPKRHIKDNSLQRKNMNDTSSPRSKMVTSSDPNVRAKLCHHKRRMSSLT

SEQ ID NO: 46541 - protein, 459 aa, Arabidopsis thaliana
  peptide (1)..(459): Ceres Seq. ID no. 12574602
MDGTSEQPGLAPRAIKELFNEASMDQTHSVTFRMSMLEIYMGNLKDLLSARQSLKSYEASAKCNLNIQVDSKGSVEIEGLTEVEVMDFTKARWWYNKGRRVRSTSWTNVNETSSRSHCLTRITIFRRGDAVGSKTEVSKLWMIDLGGSERLLKTGAIGQTMDEGRAINLSLSALGDVIAALRRKKGHVPYRNSKLTQILKDSLGTRSKVLMLVHISPRDEDVGETICSLSFTKRARAVESNRGLTAELQKLREKKISELEEEMEETQEGCKKIKARLQEVECLVNEHKKLFWITNDKYLEDIEKKAISPLDHLKDTDATPISSDKLVKIRKSSGFVPRFMTSTVASRQRQTMSEKEINAKAQSIRSVAKNLTQFSTSQSLSLSDSRSKALLRRSYTKPLQAAANSGTPPETPKRHIKDNSLQRKNMNDTSSPRSKMVTSSDPNVRAKLCHHKRRMSSLT

SEQ ID NO: 46542 - protein, 436 aa, Arabidopsis thaliana
  peptide (1)..(436): Ceres Seq. ID no. 12574603
MDQTHSVTFRMSMLEIYMGNLKDLLSARQSLKSYEASAKCNLNIQVDSKGSVEIEGLTEVEVMDFTKARWWYNKGRRVRSTSWTNVNETSSRSHCLTRITIFRRGDAVGSKTEVSKLWMIDLGGSERLLKTGAIGQTMDEGRAINLSLSALGDVIAALRRKKGHVPYRNSKLTQILKDSLGTRSKVLMLVHISPRDEDVGETICSLSFTKRARAVESNRGLTAELQKLREKKISELEEEMEETQEGCKKIKARLQEVECLVNEHKKLFWITNDKYLEDIEKKAISPLDHLKDTDATPISSDKLVKIRKSSGFVPRFMTSTVASRQRQTMSEKEINAKAQSIRSVAKNLTQFSTSQSLSLSDSRSKALLRRSYTKPLQAAANSGTPPETPKRHIKDNSLQRKNMNDTSSPRSKMVTSSDPNVRAKLCHHKRRMSSLT

SEQ ID NO: 46543 - DNA, 2374 bp, Arabidopsis thaliana
  misc_feature (1)..(2374): Ceres Seq. ID no. 12601157
  misc_feature (1)..(2374): Ortholog of  Ceres SEQ ID NO 13597732 as cited in SEQ ID NO 64810
aattctcttcttctcatccatagcttccgacgagagagaagaagcaaagcaaaattcgatcgctctgggtttttgatcttttagggtttctggcaaatttggatggaaacctcaactttatccaaagataatcataaaggaagaagctttcgttgttgtttccattgttgcagctccttcaaaaactcttgtctctattgctttcacagctaagaattctcgattccatcgttgtcgttttcgattttgacgaaattgggttcttctagattttggttatggaccgtatagctcaatcagatctctctttaggattcggtagctcccacgctttacctctacctcatcctcctagaatcccaatcgctgatgactcaatcacgcttcagattgattccagcttccgtccttcgtctaatcctatgcctcctgttcctcttcagttacttgagcagagattcgatgtcaccggatcctgtagccgagttgttgaggaggacgatgaggttgttggtgataatgatgatgatgatcaaagagaagaggagcaatttattctcttgggtcatcctatgaagttgaaacgaggtagaggtgggaattcgtattcattggcatcatcaagtccttgtaagagatttgtagttgattcagggattgaaagtaggcgagctgttgttagagcttggggtaatcagtcgattgaagaagctgatcctgagattcatgagtttatggaaaaggagaagcagagacaatttagaggtattgagcttatagcttctgagaatttcgtgtgtagagctgtgatggaagctttaggaagtcatttgactaataagtactctgaaggaatgcctggagctagatactatacggggaatcagtatattgatcagattgagattctttgccaagagcgtgcgcttgcagcttttggactaaatcatgagaaatggggagttaatgtgcagccttattcgtgcacttctgccaatttcgctgttttcactggtcttttgatgcccggtgaacgaattatgggattggattctccctcaggtggtcatatgagtcatgggtattatacaccaggtgggaagaaagtctctggtgcgtctatattctttgagagctttccatataaggttgaccctcgtacagggtatattgattacgataagcttgaggaaaaggcgcttgactatcgtcctaagatacttatttgtggtgggagttcatatccgagggactgggaattccctaggtttaggcatattgcagacaaatgtggagctgttttgatgtttgacatggcacagattagtggtcttgtcgctgccaaggaaagtccaaatccattcgattattgcgatattgttacctcaacaacacacaagtctctccgtggccctaggggcggcatcatattttacaagagaggcttgaagcccaagaagcaaagcataaatcttaatcactgtgagagcaatatccagtatgattttgaagaaaaaatcaacttttctgtctttccatcgttgcaaggggggcctcacaataaccatatagctgctctagccattgccctcaagcaggccgcttcaccagagtacaagctttacatgcgacaggtcaaaaaaaatgctaaggctttagcatctgctttgataagcagaaagtgcaagctgataacaggtggcaccgataatcatttgcttctctgggatctgactcctttgggcttgacaggcaaggtgtatgagaaagtttgcgagatgtgccatatcacggtcaacaaagtggccattttcagcgaaaacggtgttatttcccctggaggagtgagaataggcagtccggctatgacctcaagaggttgtttagaaccagaatttgagacaatggctgattttctatatagagctgctcagatagctagtgctgcacaaagggaacacgggaagttgcaaaaggaaccgctcaaaagcatctatcactgtaaagagattgcagatcttcggaaccaagtcgaagcttttgctactcagtttgcaatgcctgcctttgacatgtgagtcagcctgaagaacgagaccagctcaatctctcttcattttttgttgccatggtaatccatacacccatttctctgttttacaatgtcaacattccctaaattcttagtttaatatttgggggcaaaacaaacttgtgtgtgtttctatggtcgtttattcttcaatgcgtgtgtacatagacattgggctgtgttgggtattagtgtatccctctgtgttcttttagaatggtaataataatgcagttgaaatttatttttctagaaaagggaatgatatgctttcaagatgtt

SEQ ID NO: 46544 - protein, 599 aa, Arabidopsis thaliana
  peptide (1)..(599): Ceres Seq. ID no. 12601158
MDRIAQSDLSLGFGSSHALPLPHPPRIPIADDSITLQIDSSFRPSSNPMPPVPLQLLEQRFDVTGSCSRVVEEDDEVVGDNDDDDQREEEQFILLGHPMKLKRGRGGNSYSLASSSPCKRFVVDSGIESRRAVVRAWGNQSIEEADPEIHEFMEKEKQRQFRGIELIASENFVCRAVMEALGSHLTNKYSEGMPGARYYTGNQYIDQIEILCQERALAAFGLNHEKWGVNVQPYSCTSANFAVFTGLLMPGERIMGLDSPSGGHMSHGYYTPGGKKVSGASIFFESFPYKVDPRTGYIDYDKLEEKALDYRPKILICGGSSYPRDWEFPRFRHIADKCGAVLMFDMAQISGLVAAKESPNPFDYCDIVTSTTHKSLRGPRGGIIFYKRGLKPKKQSINLNHCESNIQYDFEEKINFSVFPSLQGGPHNNHIAALAIALKQAASPEYKLYMRQVKKNAKALASALISRKCKLITGGTDNHLLLWDLTPLGLTGKVYEKVCEMCHITVNKVAIFSENGVISPGGVRIGSPAMTSRGCLEPEFETMADFLYRAAQIASAAQREHGKLQKEPLKSIYHCKEIADLRNQVEAFATQFAMPAFDM

SEQ ID NO: 46545 - protein, 551 aa, Arabidopsis thaliana
  peptide (1)..(551): Ceres Seq. ID no. 12601159
MPPVPLQLLEQRFDVTGSCSRVVEEDDEVVGDNDDDDQREEEQFILLGHPMKLKRGRGGNSYSLASSSPCKRFVVDSGIESRRAVVRAWGNQSIEEADPEIHEFMEKEKQRQFRGIELIASENFVCRAVMEALGSHLTNKYSEGMPGARYYTGNQYIDQIEILCQERALAAFGLNHEKWGVNVQPYSCTSANFAVFTGLLMPGERIMGLDSPSGGHMSHGYYTPGGKKVSGASIFFESFPYKVDPRTGYIDYDKLEEKALDYRPKILICGGSSYPRDWEFPRFRHIADKCGAVLMFDMAQISGLVAAKESPNPFDYCDIVTSTTHKSLRGPRGGIIFYKRGLKPKKQSINLNHCESNIQYDFEEKINFSVFPSLQGGPHNNHIAALAIALKQAASPEYKLYMRQVKKNAKALASALISRKCKLITGGTDNHLLLWDLTPLGLTGKVYEKVCEMCHITVNKVAIFSENGVISPGGVRIGSPAMTSRGCLEPEFETMADFLYRAAQIASAAQREHGKLQKEPLKSIYHCKEIADLRNQVEAFATQFAMPAFDM

SEQ ID NO: 46546 - protein, 501 aa, Arabidopsis thaliana
  peptide (1)..(501): Ceres Seq. ID no. 12601160
MKLKRGRGGNSYSLASSSPCKRFVVDSGIESRRAVVRAWGNQSIEEADPEIHEFMEKEKQRQFRGIELIASENFVCRAVMEALGSHLTNKYSEGMPGARYYTGNQYIDQIEILCQERALAAFGLNHEKWGVNVQPYSCTSANFAVFTGLLMPGERIMGLDSPSGGHMSHGYYTPGGKKVSGASIFFESFPYKVDPRTGYIDYDKLEEKALDYRPKILICGGSSYPRDWEFPRFRHIADKCGAVLMFDMAQISGLVAAKESPNPFDYCDIVTSTTHKSLRGPRGGIIFYKRGLKPKKQSINLNHCESNIQYDFEEKINFSVFPSLQGGPHNNHIAALAIALKQAASPEYKLYMRQVKKNAKALASALISRKCKLITGGTDNHLLLWDLTPLGLTGKVYEKVCEMCHITVNKVAIFSENGVISPGGVRIGSPAMTSRGCLEPEFETMADFLYRAAQIASAAQREHGKLQKEPLKSIYHCKEIADLRNQVEAFATQFAMPAFDM

SEQ ID NO: 46547 - DNA, 1619 bp, Arabidopsis thaliana
  misc_feature (1)..(1619): Ceres Seq. ID no. 14315711
  misc_feature (1)..(1619): Ortholog of  Ceres SEQ ID NO 15176588 as cited in SEQ ID NO 60461
ggttgtctttctcttgcactctctctagttccaaaccctagcaattcctctgttttcaccattttcggagattatcaccttctccccgattcgccgccttgtgattacatctacgtaaagagtttctggtagaaattttccctcttttagctgcagattggcatcagattccgttctggatgtgtaggtgatcgattttacgcgtcggtgatgatagctaacggattcgagagtatggataaagaacgagtcaggaaacgtcctcgtatgacctgggacgaggccccagctgaaccagaggctaaaagggctgtgattaaaggacatggaagcgatgggaggattttgtcaccaccattaagggacgatgatcgtgatggtcattatgttttcagtttgagggacaatctcactcctagatataaaatacttagcaagatgggtgaaggcacatttggtcgggttttggaatgttgggatcgtgatacaaaagaatatgtggcaataaagataattcgaagcattaagaaataccgggatgcagcaatgattgaaattgatgtacttcagaaacttgttaagagtgataaaggccgcacacgctgtgtacagatgaagaactggtttgattaccgaaatcatatttgcattgtgttcgagaagcttgggccaagtttgtttgactttctaaagagaaataaatactccgcatttcctctggcccttgttcgggattttggatgccagcttttggaatctgtagcatatatgcacgagttacagttagttcacaccgacctcaagcctgagaacattctgttggtgtcttctgaaaatgtaaagcttcctgacaataagaggagtgctgcaaatgagacacatttcaggtgcttaccaaagtcaagcgccattaaactgattgattttggcagtactgtttgtgataaccggattcatcactccattgtccaaacaagacattacagatcccccgaggtcattttaggtctaggatggagttaccagtgtgacttatggagtataggttgtatactatttgaactatgcacgggtgaggctctctttcagacgcatgataacctagaacatctagctatgatggagagggcgcttggacctttacctgaacatatgactcgaaaagccagccggggtgctgagaaatatttcaggagagggtgtcggttgaattggccagaaggagccaactctagagaaagtattagggctgtaaaaagacttgatcgtctcaaggatatggtatcgaaacatgttgacaacacgagatctagatttgcagatctattgtatggtttattggcatatgatccatctgagcgtctcacagcaaacgaagctcttgaccatcctttctttaagagctcaagttgagaagaagcaaaatcagaaccataaaatgtagaattttacttggtaacaagtttttttgttagattcctctaaagctcccgttctcagtagcaccaaacagtagtattcctatttcagttacgagtttggctacgtttattctggaaaatacctctgttgtacattgtgttgttgagaatataaaacttgcatcatattttgaaacc

SEQ ID NO: 46548 - protein, 400 aa, Arabidopsis thaliana
  peptide (1)..(400): Ceres Seq. ID no. 14315712
MIANGFESMDKERVRKRPRMTWDEAPAEPEAKRAVIKGHGSDGRILSPPLRDDDRDGHYVFSLRDNLTPRYKILSKMGEGTFGRVLECWDRDTKEYVAIKIIRSIKKYRDAAMIEIDVLQKLVKSDKGRTRCVQMKNWFDYRNHICIVFEKLGPSLFDFLKRNKYSAFPLALVRDFGCQLLESVAYMHELQLVHTDLKPENILLVSSENVKLPDNKRSAANETHFRCLPKSSAIKLIDFGSTVCDNRIHHSIVQTRHYRSPEVILGLGWSYQCDLWSIGCILFELCTGEALFQTHDNLEHLAMMERALGPLPEHMTRKASRGAEKYFRRGCRLNWPEGANSRESIRAVKRLDRLKDMVSKHVDNTRSRFADLLYGLLAYDPSERLTANEALDHPFFKSSS

SEQ ID NO: 46549 - protein, 392 aa, Arabidopsis thaliana
  peptide (1)..(392): Ceres Seq. ID no. 14315713
MDKERVRKRPRMTWDEAPAEPEAKRAVIKGHGSDGRILSPPLRDDDRDGHYVFSLRDNLTPRYKILSKMGEGTFGRVLECWDRDTKEYVAIKIIRSIKKYRDAAMIEIDVLQKLVKSDKGRTRCVQMKNWFDYRNHICIVFEKLGPSLFDFLKRNKYSAFPLALVRDFGCQLLESVAYMHELQLVHTDLKPENILLVSSENVKLPDNKRSAANETHFRCLPKSSAIKLIDFGSTVCDNRIHHSIVQTRHYRSPEVILGLGWSYQCDLWSIGCILFELCTGEALFQTHDNLEHLAMMERALGPLPEHMTRKASRGAEKYFRRGCRLNWPEGANSRESIRAVKRLDRLKDMVSKHVDNTRSRFADLLYGLLAYDPSERLTANEALDHPFFKSSS

SEQ ID NO: 46550 - protein, 381 aa, Arabidopsis thaliana
  peptide (1)..(381): Ceres Seq. ID no. 14315714
MTWDEAPAEPEAKRAVIKGHGSDGRILSPPLRDDDRDGHYVFSLRDNLTPRYKILSKMGEGTFGRVLECWDRDTKEYVAIKIIRSIKKYRDAAMIEIDVLQKLVKSDKGRTRCVQMKNWFDYRNHICIVFEKLGPSLFDFLKRNKYSAFPLALVRDFGCQLLESVAYMHELQLVHTDLKPENILLVSSENVKLPDNKRSAANETHFRCLPKSSAIKLIDFGSTVCDNRIHHSIVQTRHYRSPEVILGLGWSYQCDLWSIGCILFELCTGEALFQTHDNLEHLAMMERALGPLPEHMTRKASRGAEKYFRRGCRLNWPEGANSRESIRAVKRLDRLKDMVSKHVDNTRSRFADLLYGLLAYDPSERLTANEALDHPFFKSSS

SEQ ID NO: 46551 - DNA, 2452 bp, Arabidopsis thaliana
  misc_feature (1)..(2452): Ceres Seq. ID no. 14309946
  misc_feature (1)..(2452): Ortholog of  Ceres SEQ ID NO 14310784 as cited in SEQ ID NO 58503
  misc_feature (1)..(2452): Ortholog of  Ceres SEQ ID NO 14312180 as cited in SEQ ID NO 59480
gaatttccaacatgttttgtttatagaaattgaataaaatcaaacgcgccttcatcttcaagttaaaaatcaaatcttaattagtgaagacaaagaagaagaagacattattttaagtgagttctctctctgtcacactcacaaagctttatactttctggctactgcaagctcatcactgaaaagagcttaaaccagagagatctgataagagaaattttagagtctctctgcttcaacaagatctacatcgaccaggaaattagaaagaatcatgggttctaagcataacccaccagggaataacagatcgagaagtacactatctctactcgttgtggttggtttatgttgtttcttctatcttcttggagcatggcaaaagagtgggtttggtaaaggagatagcatagctatggagattacaaagcaagcgcagtgtactgacattgtcactgatcttgattttgaacctcatcacaacacagtgaagatcccacataaagctgatcccaaacctgtttctttcaaaccgtgtgatgtgaagctcaaggattacacgccttgtcaagagcaagaccgagctatgaagttcccgagagagaacatgatttacagagagagacattgtcctcctgataatgagaagctgcgttgtcttgttccagctcctaaagggtatatgactcctttcccttggcctaaaagcagagattatgttcactatgctaatgctcctttcaagagcttgactgtcgaaaaagctggacagaattgggttcagtttcaagggaatgtgtttaaattccctggtggaggaactatgtttcctcaaggtgctgatgcgtatattgaagagctagcttctgttatccctatcaaagatggctctgttagaaccgcattggacactggatgtggggttgctagttggggtgcttatatgcttaagaggaatgttttgactatgtcgtttgcgccaagggataaccacgaagcacaagtccagtttgcgcttgagagaggtgttccagcgattatcgctgttcttggatcaatccttcttccttaccctgcaagagcctttgacatggctcaatgctctcgatgcttgataccatggaccgcaaacgagggaacatacttaatggaagtagatagagtcttgagacctggaggttactgggtcttatcgggtcctccaatcaactggaagacatggcacaagacgtggaaccgaactaaagcagagctaaatgccgagcaaaagagaatagagggaatcgcagagtccttatgctgggagaagaagtatgagaagggagacattgcaattttcagaaagaaaataaacgatagatcatgcgatagatcaacaccggttgacacctgcaaaagaaaggacactgacgatgtctggtacaaggagatagaaacgtgtgtaacaccattccctaaagtatcaaacgaagaagaagttgctggaggaaagctaaagaagttccccgagaggctattcgcagtgcctccaagtatctctaaaggtttgattaatggcgtcgacgaggaatcataccaagaagacatcaatctatggaagaagcgagtgaccggatacaagagaattaacagactgataggttccaccagataccgtaatgtgatggatatgaacgccggtcttggtggattcgctgctgcgcttgaatagcctaaatcatgggttatgaatgtgattccaaccattaacaagaacacattgagtgttgtttatgagagaggtctcattggtatctatcatgactggtgtgaaggcttttcaacttatccaagaacatacgatttcattcacgctagtggtgtcttcagcttgtatcagcacagctgcaaacttgaggatattcttcttgaaactgatcggattttacgaccggaagggattgtgattttccgggatgaggttgatgttttgaatgatgtgaggaagatcgttgatggaatgagatgggatactaagttaatggatcatgaagacggtcctctcgtgccggagaagattcttgtcgccacgaagcagtattgggtagccggcgacgatggaaacaattctccgtcgtcttctaatagtgaagaagaataaaacaaaaacaaaaaactcctcaggttactaagcttgaagtgtagatctattttacaacataaaattcttatcaaaaaaggaaggaatcagaatttccattaaagaaaggtgtcaaaaaaaagttgtaaaactatatagtagtgatcaagacgaatatgtgcatttatgttttatttttgttccctagtttttaattttatttttgaaggaagaaaaaattagttccatgtgtttttgcaagatagttgaaaccttggacgcttgttatgtatgatgcgatcttgacattttttaataacagttattttaaat

SEQ ID NO: 46552 - protein, 478 aa, Arabidopsis thaliana
  peptide (1)..(478): Ceres Seq. ID no. 14309947
MGSKHNPPGNNRSRSTLSLLVVVGLCCFFYLLGAWQKSGFGKGDSIAMEITKQAQCTDIVTDLDFEPHHNTVKIPHKADPKPVSFKPCDVKLKDYTPCQEQDRAMKFPRENMIYRERHCPPDNEKLRCLVPAPKGYMTPFPWPKSRDYVHYANAPFKSLTVEKAGQNWVQFQGNVFKFPGGGTMFPQGADAYIEELASVIPIKDGSVRTALDTGCGVASWGAYMLKRNVLTMSFAPRDNHEAQVQFALERGVPAIIAVLGSILLPYPARAFDMAQCSRCLIPWTANEGTYLMEVDRVLRPGGYWVLSGPPINWKTWHKTWNRTKAELNAEQKRIEGIAESLCWEKKYEKGDIAIFRKKINDRSCDRSTPVDTCKRKDTDDVWYKEIETCVTPFPKVSNEEEVAGGKLKKFPERLFAVPPSISKGLINGVDEESYQEDINLWKKRVTGYKRINRLIGSTRYRNVMDMNAGLGGFAAALE

SEQ ID NO: 46553 - protein, 431 aa, Arabidopsis thaliana
  peptide (1)..(431): Ceres Seq. ID no. 14309948
MEITKQAQCTDIVTDLDFEPHHNTVKIPHKADPKPVSFKPCDVKLKDYTPCQEQDRAMKFPRENMIYRERHCPPDNEKLRCLVPAPKGYMTPFPWPKSRDYVHYANAPFKSLTVEKAGQNWVQFQGNVFKFPGGGTMFPQGADAYIEELASVIPIKDGSVRTALDTGCGVASWGAYMLKRNVLTMSFAPRDNHEAQVQFALERGVPAIIAVLGSILLPYPARAFDMAQCSRCLIPWTANEGTYLMEVDRVLRPGGYWVLSGPPINWKTWHKTWNRTKAELNAEQKRIEGIAESLCWEKKYEKGDIAIFRKKINDRSCDRSTPVDTCKRKDTDDVWYKEIETCVTPFPKVSNEEEVAGGKLKKFPERLFAVPPSISKGLINGVDEESYQEDINLWKKRVTGYKRINRLIGSTRYRNVMDMNAGLGGFAAALE

SEQ ID NO: 46554 - protein, 374 aa, Arabidopsis thaliana
  peptide (1)..(374): Ceres Seq. ID no. 14309949
MKFPRENMIYRERHCPPDNEKLRCLVPAPKGYMTPFPWPKSRDYVHYANAPFKSLTVEKAGQNWVQFQGNVFKFPGGGTMFPQGADAYIEELASVIPIKDGSVRTALDTGCGVASWGAYMLKRNVLTMSFAPRDNHEAQVQFALERGVPAIIAVLGSILLPYPARAFDMAQCSRCLIPWTANEGTYLMEVDRVLRPGGYWVLSGPPINWKTWHKTWNRTKAELNAEQKRIEGIAESLCWEKKYEKGDIAIFRKKINDRSCDRSTPVDTCKRKDTDDVWYKEIETCVTPFPKVSNEEEVAGGKLKKFPERLFAVPPSISKGLINGVDEESYQEDINLWKKRVTGYKRINRLIGSTRYRNVMDMNAGLGGFAAALE

SEQ ID NO: 46555 - DNA, 2125 bp, Arabidopsis thaliana
  misc_feature (1)..(2125): Ceres Seq. ID no. 12575278
  misc_feature (1)..(2125): Ortholog of  Ceres SEQ ID NO 14313768 as cited in SEQ ID NO 54247
aaggagagaatctgaagaagctgaaccagacgaaccataaaccgaggcgagagaggagagagcgagggaggtgatctcttaccacctcttcgtctccggcggcgagaaattcagtttcaatcggagaagagaggaaaaacaaagcgatacgcgagagaaaaagttgtgcaacgatgtcaaagaagaaatcggctgccatgacgcttaaggacttccatggcggctcaataccatctgatctccctctcccttccgctcctggagtgactccgaaggttattccggatcgacctgtttttgatagagcgccttgggggaattcaattggcaggccagatcagagagcaagaccgagttcgtctcatgctattagaaatctcgatgataaatcactgtttctgcctcacaatgtcaatatcggacgtaatttcagtgaagatgaacggaagcctctggatggtcactctgctcctcgtagagtggtcagtgatgatgtttttcggtttgcgaataaccgtttggagatgaaagcagactcggttttagctgggaggcatagtggttgggcagctggtcctttgactcattctgggactggtaatattgagaactcagtgtcaggaaatcactctaatatttggaatgggaggaaggaggtatcagttgctaacaatgagcctggacagtctccatggactaaacaaccagctgtttcgaatttggtccatacaagtgcgcttgaccaagtgtcttcaggaggatggcagtccaagcttttggttccttctcagatgggttttgatgttgttaagcattcagagatagataccagagtttataagactaatagccctgtgattagtcaaggggttgagccacatggaacacatgtagaacgggcactgattgctgaagatgggatccagcgtgggaaaaaactctcccgtgagtatgagaaaatccctggtccaacttatgtggatgctaaggaagcgaaaattgtagcaaacaccaacgataaacctcatccaaaatactctgacgttaagcctgctggacatttggtgcagccaactgccccttctgaagttgtggaaagacctaagctgaacctgcttcctcggacaaaaccacttgaaagtgtggagaaacctgtgaatgacgaaaaactggaaaatagtgcttcagtccttatacaacgtgaaaatgcgacacagaaaagtttcaacaattcaaaatctggtttgtctacagatgagattcctaaccagccggctgagcggcccaagttgaatctgaagcctgtggcacagttgcttgagcagccagaagttaaaactgaaaaggacagaagtgcggtttttggtggtgccagaccacgagagctggtgttgaaggagagaggcattgatgagcccgagcatcacaaattggatcaaccgacagataggatggtcctcaaaccgattgaaagagttccagagcatgcaagtcaaaggccagtgagttctccacgtgacatgagaacgaggaaattcgaccaaaaggatgggcgaaatgtaagcgacattgccagatccgaaactcagaggagaaactggcgtgaaaatgaaaacaagagcgcaagacagcaacagcagactcaggagaagacaagacatccatcaccagagacatggcgaaagccggttccccagaaactggattcaccaaatggaacagggattcgtcacggaaaagcagcttctgctcttgagctagctcaagcctattctcctttctctgaccctaaatctggaattggaagcagcaacagttttaacaaaagccgcaacaaccaaacgcagcagcaacccttctctcggttggtaggatcgacaacaacaggaagacagattaatgggtactgagtcatcgttcgtttgttctctcgaattggttttagtcccgattaattggatcttaataacacatcttatgtggtttgggatcgttattggagatttgaatgtgatatgttcccttaagaacggggtcgggttacataagccagatatgattacactgtgttcttcattcttctttggttatacattttattttaaccgttcgtttggaagatttg

SEQ ID NO: 46556 - protein, 578 aa, Arabidopsis thaliana
  peptide (1)..(578): Ceres Seq. ID no. 12575279
MSKKKSAAMTLKDFHGGSIPSDLPLPSAPGVTPKVIPDRPVFDRAPWGNSIGRPDQRARPSSSHAIRNLDDKSLFLPHNVNIGRNFSEDERKPLDGHSAPRRVVSDDVFRFANNRLEMKADSVLAGRHSGWAAGPLTHSGTGNIENSVSGNHSNIWNGRKEVSVANNEPGQSPWTKQPAVSNLVHTSALDQVSSGGWQSKLLVPSQMGFDVVKHSEIDTRVYKTNSPVISQGVEPHGTHVERALIAEDGIQRGKKLSREYEKIPGPTYVDAKEAKIVANTNDKPHPKYSDVKPAGHLVQPTAPSEVVERPKLNLLPRTKPLESVEKPVNDEKLENSASVLIQRENATQKSFNNSKSGLSTDEIPNQPAERPKLNLKPVAQLLEQPEVKTEKDRSAVFGGARPRELVLKERGIDEPEHHKLDQPTDRMVLKPIERVPEHASQRPVSSPRDMRTRKFDQKDGRNVSDIARSETQRRNWRENENKSARQQQQTQEKTRHPSPETWRKPVPQKLDSPNGTGIRHGKAASALELAQAYSPFSDPKSGIGSSNSFNKSRNNQTQQQPFSRLVGSTTTGRQINGY

SEQ ID NO: 46557 - protein, 570 aa, Arabidopsis thaliana
  peptide (1)..(570): Ceres Seq. ID no. 12575280
MTLKDFHGGSIPSDLPLPSAPGVTPKVIPDRPVFDRAPWGNSIGRPDQRARPSSSHAIRNLDDKSLFLPHNVNIGRNFSEDERKPLDGHSAPRRVVSDDVFRFANNRLEMKADSVLAGRHSGWAAGPLTHSGTGNIENSVSGNHSNIWNGRKEVSVANNEPGQSPWTKQPAVSNLVHTSALDQVSSGGWQSKLLVPSQMGFDVVKHSEIDTRVYKTNSPVISQGVEPHGTHVERALIAEDGIQRGKKLSREYEKIPGPTYVDAKEAKIVANTNDKPHPKYSDVKPAGHLVQPTAPSEVVERPKLNLLPRTKPLESVEKPVNDEKLENSASVLIQRENATQKSFNNSKSGLSTDEIPNQPAERPKLNLKPVAQLLEQPEVKTEKDRSAVFGGARPRELVLKERGIDEPEHHKLDQPTDRMVLKPIERVPEHASQRPVSSPRDMRTRKFDQKDGRNVSDIARSETQRRNWRENENKSARQQQQTQEKTRHPSPETWRKPVPQKLDSPNGTGIRHGKAASALELAQAYSPFSDPKSGIGSSNSFNKSRNNQTQQQPFSRLVGSTTTGRQINGY

SEQ ID NO: 46558 - protein, 461 aa, Arabidopsis thaliana
  peptide (1)..(461): Ceres Seq. ID no. 12575281
MKADSVLAGRHSGWAAGPLTHSGTGNIENSVSGNHSNIWNGRKEVSVANNEPGQSPWTKQPAVSNLVHTSALDQVSSGGWQSKLLVPSQMGFDVVKHSEIDTRVYKTNSPVISQGVEPHGTHVERALIAEDGIQRGKKLSREYEKIPGPTYVDAKEAKIVANTNDKPHPKYSDVKPAGHLVQPTAPSEVVERPKLNLLPRTKPLESVEKPVNDEKLENSASVLIQRENATQKSFNNSKSGLSTDEIPNQPAERPKLNLKPVAQLLEQPEVKTEKDRSAVFGGARPRELVLKERGIDEPEHHKLDQPTDRMVLKPIERVPEHASQRPVSSPRDMRTRKFDQKDGRNVSDIARSETQRRNWRENENKSARQQQQTQEKTRHPSPETWRKPVPQKLDSPNGTGIRHGKAASALELAQAYSPFSDPKSGIGSSNSFNKSRNNQTQQQPFSRLVGSTTTGRQINGY

SEQ ID NO: 46559 - DNA, 1882 bp, Arabidopsis thaliana
  misc_feature (1)..(1882): Ceres Seq. ID no. 12575282
  misc_feature (1)..(1882): Ortholog of  Ceres SEQ ID NO 14315362 as cited in SEQ ID NO 59401
tctctctctcttctgagatttttccgtcgaaatattaaaaagaaatttgcagatacagaacttgttctaatctctctctgttttttttccctatgaattttatataatacgaaagagacacacaacactgtattatctttgcttctctcttctctctctttctatctctacagagtaaagttctgatcgtgtctcttatcgtttacccaaaaacccttgtttgatctctcgtctcttgttttcttctgccctcgaagttttcaggttatgtggtggaggttgtttccaatttaaagtatgtacctttaggttagaaattaggcttatttgtttctccagtgggtttcattgtagaaacaaattgaattttaggtgttaatgtgagattaggaaacagaatctctgcttttaacaaggtaataggagaatagggtttagtagaagaaaggttaaaactttgtgatgggtaataagttgggaaggaagaggcaagtggtggaagaaaggtatacaaagcctcaaggtttgtatgtgaataaagatgtcgacgttaaaaagctcagaaaactgattgtggagtctaagcttgctccttgctatcctggagacgatgaaagctgtcatgatcttgaagaatgtccaatttgttttctgtactatcctagcctcaatagatcaagatgttgcatgaaaagcatttgtacagagtgttttttgcaaatgaagaatcctaattcagctcggcctactcagtgccctttttgtaaaactcccaactatgctgtcgagtatcgtggagtcaagtcaaaggaggaaaagggcattgaacaagttgaagagcaacgggtaatagaagccaaaataaggatgaggcagaaagaaatgcaggatgatgaagagaaaatgcagaaacgtcttgaatcatgttcctctagcacaagcgcaatgactggcgagatggaatatggttcaacttcagccatatcttataactccctcatggatgacggggaaattgctccatcgcagaacgcatctgttgttagacaacattcccgcccgcgaggaaacagggaggatgaggttgacgttgaccttgaggaattgatggtcatggaagcaatatggctctctgttcaggaaacagggacgcagagaaattcagcttcaggggaaattacctcttctaggcagtatgtaacagataatcatagttatgtttcttcaccaccacgagtgactccaatcgtagaaccagcaacaccgtcttcatcatctggtgggctttcttgtgcaatctccgcacttgctgaacgccaaatggttggcgaatcctccagtcacaatcataatcacaatgtcaacgtttcttcatacagtatgcttcccggaaattgtgacagttactacgacatagaacaagaggtagatggcatagacaaccatcatcatcatcgtcatcattacgagatgggagaaacaggaagcagcaacagctatgtaagttcttacatgacaggcgagggcttccacaactttcctcctcctccacctctggtcattgttccagagagttttgaggaacagatgatgatggctatggctgtgtctatggcagaggttcatgccacgacgacatgtgcaccaactgaagttacctggcaataaataggataataatggaaactcatgggtctgaatctgatgatgattataacttcattcatatatgtctgttcctataggaagaaagaaaagaaacgaaatgatttccagttttaatagaaaaaggttgggttgtgttacagcttctttaattctttgtggttcttctttttcaatctgcattgacaaaaaatttgaagatcacttgttttgtgtc

SEQ ID NO: 46560 - protein, 401 aa, Arabidopsis thaliana
  peptide (1)..(401): Ceres Seq. ID no. 12575283
MGNKLGRKRQVVEERYTKPQGLYVNKDVDVKKLRKLIVESKLAPCYPGDDESCHDLEECPICFLYYPSLNRSRCCMKSICTECFLQMKNPNSARPTQCPFCKTPNYAVEYRGVKSKEEKGIEQVEEQRVIEAKIRMRQKEMQDDEEKMQKRLESCSSSTSAMTGEMEYGSTSAISYNSLMDDGEIAPSQNASVVRQHSRPRGNREDEVDVDLEELMVMEAIWLSVQETGTQRNSASGEITSSRQYVTDNHSYVSSPPRVTPIVEPATPSSSSGGLSCAISALAERQMVGESSSHNHNHNVNVSSYSMLPGNCDSYYDIEQEVDGIDNHHHHRHHYEMGETGSSNSYVSSYMTGEGFHNFPPPPPLVIVPESFEEQMMMAMAVSMAEVHATTTCAPTEVTWQ

SEQ ID NO: 46561 - protein, 326 aa, Arabidopsis thaliana
  peptide (1)..(326): Ceres Seq. ID no. 12575284
MKSICTECFLQMKNPNSARPTQCPFCKTPNYAVEYRGVKSKEEKGIEQVEEQRVIEAKIRMRQKEMQDDEEKMQKRLESCSSSTSAMTGEMEYGSTSAISYNSLMDDGEIAPSQNASVVRQHSRPRGNREDEVDVDLEELMVMEAIWLSVQETGTQRNSASGEITSSRQYVTDNHSYVSSPPRVTPIVEPATPSSSSGGLSCAISALAERQMVGESSSHNHNHNVNVSSYSMLPGNCDSYYDIEQEVDGIDNHHHHRHHYEMGETGSSNSYVSSYMTGEGFHNFPPPPPLVIVPESFEEQMMMAMAVSMAEVHATTTCAPTEVTWQ

SEQ ID NO: 46562 - protein, 315 aa, Arabidopsis thaliana
  peptide (1)..(315): Ceres Seq. ID no. 12575285
MKNPNSARPTQCPFCKTPNYAVEYRGVKSKEEKGIEQVEEQRVIEAKIRMRQKEMQDDEEKMQKRLESCSSSTSAMTGEMEYGSTSAISYNSLMDDGEIAPSQNASVVRQHSRPRGNREDEVDVDLEELMVMEAIWLSVQETGTQRNSASGEITSSRQYVTDNHSYVSSPPRVTPIVEPATPSSSSGGLSCAISALAERQMVGESSSHNHNHNVNVSSYSMLPGNCDSYYDIEQEVDGIDNHHHHRHHYEMGETGSSNSYVSSYMTGEGFHNFPPPPPLVIVPESFEEQMMMAMAVSMAEVHATTTCAPTEVTWQ

SEQ ID NO: 46563 - DNA, 1357 bp, Arabidopsis thaliana
  misc_feature (1)..(1357): Ceres Seq. ID no. 14309927
  misc_feature (1)..(1357): Ortholog of  Ceres SEQ ID NO 13638156 as cited in SEQ ID NO 58588
aagagcagatcctcagctcgttgaagacttggagaagcatctttatgtaaatgccgctttagagcgtttggagcagagaaaattgtactggaatgagcataagctctctatttacagcaaagtgtgcacaacggctagaaatcagactcaatcattgtcacctcctgatgtttctcgagttggttatcaagcacccagctggggccatggagcgccagatagcggctccaatgatcaagataaatcaactgaagattcttcagcggataagtcagatggagaatctcaatcaagtttggaaaagggttgtgataatgatcttggtcatcctctagaagatcaagacgcaccgtcgtcttcctcatgcaatggaagtaaaggtttcctgtctcaccaaattgacaccaaagacctgaaggacaacgacgcgtacaacttttatcagtctgttgatggtcagcacattatccttcacactttgaatgtgaagtgccttctgcatcactatggaagctatgactttcttccaccaagattgagtggaaagatactggaaatggaaaccattacccaatcagaagcgataaggagacgctaccgctttttaagtcatttttctttatcaactacacttcagatatgtgagattgatatgaaggaatccttgcctcctgatgcatttgctccatttatacatgaaattaagaagcgtgagaagcagcggaaagaacgtgcttggaaggatcgaaaaaataaaatcaaagctgaagtagctgcagctgcagagcttgtaccattgatggccagttttgggcagtcgtcttctagtgatgactttcccccattttccttggatgactttgaagctctgggaaactctgccccaatatcatcaagccctccaaacattggagagagaagttccttctcacatgtgacaaggctcggtttcgcagctggtcacgactccccaaacctgaataacgagccaacaaacgttcaaagcagcagcagcagcagtgaagtctcaaacgcaaccacaggtgcaagaaacacaaacataacatccttcgcgagtgtagcttcaagaacaacaacaccaatggcaccaaccgtcaaagagcccggtaagagagggaagaaacagagccgagtacttctatcgacaactagtgtacgccgttactgaaaaggcctatggatttgtgtatgtataataatcttttcatctaagaaaaactgaataaagaaagaaccagagattatggtgagtgagtaagtgtaaaactcaaacttgggctttgtttctttttgcaacccatgtgactgataatgaaggtgtctctcattactactc

SEQ ID NO: 46564 - protein, 395 aa, Arabidopsis thaliana
  peptide (1)..(395): Ceres Seq. ID no. 14309928
RADPQLVEDLEKHLYVNAALERLEQRKLYWNEHKLSIYSKVCTTARNQTQSLSPPDVSRVGYQAPSWGHGAPDSGSNDQDKSTEDSSADKSDGESQSSLEKGCDNDLGHPLEDQDAPSSSSCNGSKGFLSHQIDTKDLKDNDAYNFYQSVDGQHIILHTLNVKCLLHHYGSYDFLPPRLSGKILEMETITQSEAIRRRYRFLSHFSLSTTLQICEIDMKESLPPDAFAPFIHEIKKREKQRKERAWKDRKNKIKAEVAAAAELVPLMASFGQSSSSDDFPPFSLDDFEALGNSAPISSSPPNIGERSSFSHVTRLGFAAGHDSPNLNNEPTNVQSSSSSSEVSNATTGARNTNITSFASVASRTTTPMAPTVKEPGKRGKKQSRVLLSTTSVRRY

SEQ ID NO: 46565 - protein, 210 aa, Arabidopsis thaliana
  peptide (1)..(210): Ceres Seq. ID no. 14309929
METITQSEAIRRRYRFLSHFSLSTTLQICEIDMKESLPPDAFAPFIHEIKKREKQRKERAWKDRKNKIKAEVAAAAELVPLMASFGQSSSSDDFPPFSLDDFEALGNSAPISSSPPNIGERSSFSHVTRLGFAAGHDSPNLNNEPTNVQSSSSSSEVSNATTGARNTNITSFASVASRTTTPMAPTVKEPGKRGKKQSRVLLSTTSVRRY

SEQ ID NO: 46566 - DNA, 1882 bp, Arabidopsis thaliana
  misc_feature (1)..(1882): Ceres Seq. ID no. 13591806
  misc_feature (1)..(1882): Ortholog of  Ceres SEQ ID NO 15171739 as cited in SEQ ID NO 57134
agtttttaaaaaccttctctcatcctcttcctcaagcctccctcctcctctttaatctcaccagtcaccatgaaagtttagagattttttgaaagaacaaacagatatcgaattcgagttttgcaaaaatggtatcggtggaggaacctttatctcattccaattccactcgctttccgttaacaaccgatttctacggttcatcatcgccgtcggcggcgaggttacaccgtcaagctggccggtcgatgagaacagtgagatctaacttctatcaaagcggagatcaatcttgctcattcgtcggctcaatcggcgataaatcagagtatgcgtcggagtttctctcggattccgtcatcgacatgagactcggcgagcttgctttgaaaaacagtaattctctcaattcaaacgcttcctcaatgaaagaggaagcgtttctcgacatttctcaggcgtttagtgatttttccgcttgtagtagtgatatctccggcgagttacagcgtcttgcttgcttgccgtcgccggaggctgatagaaatgagagcggcggagataacgaagcggagcatgatccagagttagagagagagccttgtctagggtttctacagagagaaaacttctctacagagattatcgagtgtatttcgccggaagatctgcagccaactgtgaaactatgcatcgacggacttcgttcctcttcggtggcgataaagcgatctgctgcggcgaagctacggctattggcgaagaatcgagcggataatcgtgtgttgattggggaatctggagctattcaagctttgattccacttcttcgttgtaacgatccatggacgcaagagcacgcagttacagctctgttaaacctcctcgttacacgaccagaacaaagctgtaatcgccgcaggaggagcgattaaatcactagtgtgggtactcaaaacggggacggagacttcaaagcagaacgctgcatgtgctttgcttagtttggcgctattggaggagaacaaaggctcaatcggagcttgcggtgctattccgccgctggtttctcttctgttgaacggatcttgcaggggaaagaaggatgcgttgacgacgctctacaagctgtgtacgcttcagcaaaacaaggagagagcggtcactgctggagcggtgaagccgttggtggaccttgtggctgaggaagggactggtatggcggagaaagctatggtggttctgagtagccttgcagcgatagatgatggcaaagaggctattgtcgaggaaggagggatcgcagcgcttgttgaggccatcgaggatggatctgtgaaagggaaagaatttgcgatcttgacgctgttgcagctttgttctgatagcgttagaaaccgtgggttgcttgtgagggaaggcgcgattcctccgcttgtgggcctctctcagagcggctccgtcagtgttagagctaagcgcaaggcagaaagacttctggggtatcttcgggagccaaggaaggaggcaagttcatcaagcccatgaaatgcaaccatgtggaggtttcatcagtctagtatgtatatactgagtgtatgtttggtgggttttgtatagcgtcttttgtgtagactgtaaaagagagatcaaatgattaccagaaacttgactgacttttgatctctctcatgtattgatggttaagctagtttttgaggagtttcaagggagagtgcttatttatttggtttacaagtctagcattcaggttttggcttctggtttgtgagggtgggtggattatgctgatttttaaggcaaaaagctttgtagtagcgtcggcaaatggcttgttcaagaactaagcaatttttaatcg

SEQ ID NO: 46567 - protein, 268 aa, Arabidopsis thaliana
  peptide (1)..(268): Ceres Seq. ID no. 13591807
MVSVEEPLSHSNSTRFPLTTDFYGSSSPSAARLHRQAGRSMRTVRSNFYQSGDQSCSFVGSIGDKSEYASEFLSDSVIDMRLGELALKNSNSLNSNASSMKEEAFLDISQAFSDFSACSSDISGELQRLACLPSPEADRNESGGDNEAEHDPELEREPCLGFLQRENFSTEIIECISPEDLQPTVKLCIDGLRSSSVAIKRSAAAKLRLLAKNRADNRVLIGESGAIQALIPLLRCNDPWTQEHAVTALLNLLVTRPEQSCNRRRRSD

SEQ ID NO: 46568 - protein, 228 aa, Arabidopsis thaliana
  peptide (1)..(228): Ceres Seq. ID no. 13591808
MRTVRSNFYQSGDQSCSFVGSIGDKSEYASEFLSDSVIDMRLGELALKNSNSLNSNASSMKEEAFLDISQAFSDFSACSSDISGELQRLACLPSPEADRNESGGDNEAEHDPELEREPCLGFLQRENFSTEIIECISPEDLQPTVKLCIDGLRSSSVAIKRSAAAKLRLLAKNRADNRVLIGESGAIQALIPLLRCNDPWTQEHAVTALLNLLVTRPEQSCNRRRRSD

SEQ ID NO: 46569 - protein, 189 aa, Arabidopsis thaliana
  peptide (1)..(189): Ceres Seq. ID no. 13591809
MRLGELALKNSNSLNSNASSMKEEAFLDISQAFSDFSACSSDISGELQRLACLPSPEADRNESGGDNEAEHDPELEREPCLGFLQRENFSTEIIECISPEDLQPTVKLCIDGLRSSSVAIKRSAAAKLRLLAKNRADNRVLIGESGAIQALIPLLRCNDPWTQEHAVTALLNLLVTRPEQSCNRRRRSD

SEQ ID NO: 46570 - DNA, 1776 bp, Arabidopsis thaliana
  misc_feature (1)..(1776): Ceres Seq. ID no. 13579260
  misc_feature (1)..(1776): Ortholog of  Ceres SEQ ID NO 14308698 as cited in SEQ ID NO 58663
attcgccgacttattctcctctgttctctgcatttggattgatgccactttaatactttgaggatcaagacttcgtaaaagattgtttctgtaaaacgcaacaccatgcctctgtttgagcttttcaggctcaccaaagctaagcttgaatctgctcaagacaggaacccttctccacctgtagatgaagttgtggagctggtgtgggaaaatggtcagatatcaactcaaagtcagtcaagtagatcgaggaacattcctccaccacaagcaaactcttctagagctagagagattggaaatggctcaaagacgactatggtggacgagatccctatgtcagtgccatcactaatgacgggtttgagtcaagacgatgactttgttccatggttgaatcatcatccctcccttgatggatattgctctgatttcttgcgtgatgtgtcgtctcctgttactgtcaacgagcaagagagtgatatggcggtaaaccaaactgctttcccgttgtttcagagaagaaaggatggcaatgaatcagctcctgctgcttcttcgtcgcagtataacggtttccaatcgcattctctgtatggaagtgatagagctagagatcttcctagccaacaaaccaatccggatcggtttactcagacgcaggaaccactaattactagtaacaagcctagtttggtcaacttttcacatttcttacgccctgcaacttttgcgaagactactaataataaccttcatgacactaaagaaaagagtcctcaaagcccgccaaatgtgtttcagaccagagttcttggagctaaagactctgaagataaggttcttaacgagtctgttgcttctgctacgcctaaagataaccaaaaggcttgcctaatatcagaggactcatgtagaaaagaccaagagagtgaaaaagcagttgtatgttcttctgttggctcgggtaatagtctcgatggcccatccgaaagtccttcactttctttaaagagaaagcattcgaatattcaagacattgactgtcatagtgaagatgtggaagaagaatcaggagatggaagaaaggaagcaggtccatctcgaacgggtttgggttcaaagagaagccgctctgcagaagtgcataatctgtctgaaaggagacggcgtgataggatcaacgagaagatgcgtgccctgcaagaactcattccaaactgtaacaaggtggacaaagcttcgatgctagatgaagccatcgagtatctcaagtcactccaacttcaagtgcagatcatgtcaatggcgtctggttactatctgccaccggcggttatgttcccaccgggtatggggcattacccggcagcagctgctgcaatggcaatgggtatgggaatgccttatgcaatgggcttgcctgatttgagccgtggtggttcatcggttaaccacggaccacagttccaagtctcggggatgcaacaacaaccagtggcgatgggtattccacgtgtctctggtggtggtatctttgccggttcttcgacgattggcaatggctcgactagagatttatctggttctaaagatcaaacaacgacgaataacaacagtaacttgaaaccaataaagagaaaacaggggtcttctgatcagttttgtggatcgtcgtgacataaatacaaacttatgaactgatgtattgtttatttgtagcattcaaacaaatctattttataatcctaaacaaaattaatttgtgttcgttat

SEQ ID NO: 46571 - protein, 524 aa, Arabidopsis thaliana
  peptide (1)..(524): Ceres Seq. ID no. 13579261
MPLFELFRLTKAKLESAQDRNPSPPVDEVVELVWENGQISTQSQSSRSRNIPPPQANSSRAREIGNGSKTTMVDEIPMSVPSLMTGLSQDDDFVPWLNHHPSLDGYCSDFLRDVSSPVTVNEQESDMAVNQTAFPLFQRRKDGNESAPAASSSQYNGFQSHSLYGSDRARDLPSQQTNPDRFTQTQEPLITSNKPSLVNFSHFLRPATFAKTTNNNLHDTKEKSPQSPPNVFQTRVLGAKDSEDKVLNESVASATPKDNQKACLISEDSCRKDQESEKAVVCSSVGSGNSLDGPSESPSLSLKRKHSNIQDIDCHSEDVEEESGDGRKEAGPSRTGLGSKRSRSAEVHNLSERRRRDRINEKMRALQELIPNCNKVDKASMLDEAIEYLKSLQLQVQIMSMASGYYLPPAVMFPPGMGHYPAAAAAMAMGMGMPYAMGLPDLSRGGSSVNHGPQFQVSGMQQQPVAMGIPRVSGGGIFAGSSTIGNGSTRDLSGSKDQTTTNNNSNLKPIKRKQGSSDQFCGSS

SEQ ID NO: 46572 - protein, 453 aa, Arabidopsis thaliana
  peptide (1)..(453): Ceres Seq. ID no. 13579262
MVDEIPMSVPSLMTGLSQDDDFVPWLNHHPSLDGYCSDFLRDVSSPVTVNEQESDMAVNQTAFPLFQRRKDGNESAPAASSSQYNGFQSHSLYGSDRARDLPSQQTNPDRFTQTQEPLITSNKPSLVNFSHFLRPATFAKTTNNNLHDTKEKSPQSPPNVFQTRVLGAKDSEDKVLNESVASATPKDNQKACLISEDSCRKDQESEKAVVCSSVGSGNSLDGPSESPSLSLKRKHSNIQDIDCHSEDVEEESGDGRKEAGPSRTGLGSKRSRSAEVHNLSERRRRDRINEKMRALQELIPNCNKVDKASMLDEAIEYLKSLQLQVQIMSMASGYYLPPAVMFPPGMGHYPAAAAAMAMGMGMPYAMGLPDLSRGGSSVNHGPQFQVSGMQQQPVAMGIPRVSGGGIFAGSSTIGNGSTRDLSGSKDQTTTNNNSNLKPIKRKQGSSDQFCGSS

SEQ ID NO: 46573 - protein, 447 aa, Arabidopsis thaliana
  peptide (1)..(447): Ceres Seq. ID no. 13579263
MSVPSLMTGLSQDDDFVPWLNHHPSLDGYCSDFLRDVSSPVTVNEQESDMAVNQTAFPLFQRRKDGNESAPAASSSQYNGFQSHSLYGSDRARDLPSQQTNPDRFTQTQEPLITSNKPSLVNFSHFLRPATFAKTTNNNLHDTKEKSPQSPPNVFQTRVLGAKDSEDKVLNESVASATPKDNQKACLISEDSCRKDQESEKAVVCSSVGSGNSLDGPSESPSLSLKRKHSNIQDIDCHSEDVEEESGDGRKEAGPSRTGLGSKRSRSAEVHNLSERRRRDRINEKMRALQELIPNCNKVDKASMLDEAIEYLKSLQLQVQIMSMASGYYLPPAVMFPPGMGHYPAAAAAMAMGMGMPYAMGLPDLSRGGSSVNHGPQFQVSGMQQQPVAMGIPRVSGGGIFAGSSTIGNGSTRDLSGSKDQTTTNNNSNLKPIKRKQGSSDQFCGSS

SEQ ID NO: 46574 - DNA, 1923 bp, Arabidopsis thaliana
  misc_feature (1)..(1923): Ceres Seq. ID no. 15175511
  misc_feature (1)..(1923): Ortholog of  Ceres SEQ ID NO 15171739 as cited in SEQ ID NO 57134
gatcaccagataccaacagctacaagtttttaaaaaccttctctcatcctcttcctcaagcctccctcctcctctttaatctcaccagtcaccatgaaagtttagagattttttgaaagaacaaacagatatcgaattcgagttttgcaaaaatggtatcggtggaggaacctttatctcattccaattccactcgctttccgttaacaaccgatttctacggttcatcatcgccgtcggcggcgaggttacaccgtcaagctggccggtcgatgagaacagtgagatctaacttctatcaaagcggagatcaatcttgctcattcgtcggctcaatcggcgataaatcagagtatgcgtcggagtttctctcggattccgtcatcgacatgagactcggcgagcttgctttgaaaaacagtaattctctcaattcaaacgcttcctcaatgaaagaggaagcgtttctcgacatttctcaggcgtttagtgatttttccgcttgtagtagtgatatctccggcgagttacagcgtcttgcttgcttgccgtcgccggaggctgatagaaatgagagcggcggagataacgaagcggagcatgatccagagttagagagagagccttgtctagggtttctacagagagaaaacttctctacagagattatcgagtgtatttcgccggaagatctgcagccaactgtgaaactatgcatcgacggacttcgttcctcttcggtggcgataaagcgatctgctgcggcgaagctacggctattggcgaagaatcgagcggataatcgtgtgttgattggggaatctggagctattcaagctttgattccacttcttcgttgtaaagatccatggacgcaagagcacgcagttacagctctgttaaacctctcgttacacgaccagaacaaagctgtaatcgccgcaggaggagcgattaaatcactagtgtgggtactcaaaacggggacggagacttcaaagcagaacgctgcatgtgctttgcttagtttggcgctattggaggagaacaaaggctcaatcggagcttgcggtgctattccgccgctggtttctcttctgttgaacggatcttgcaggggaaagaaggatgcgttgacgacgctctacaagctgtgtacgcttcagcaaaacaaggagagagcggtcactgctggagcggtgaagccgttggtggaccttgtggctgaggaagggactggtatggcggagaaagctatggtggttctgagtagccttgcagcgatagatgatggcaaagaggctattgtcgaggaaggagggatcgcagagcttgttgaggccatcgaggatggatctgtgaaagggaaagaatttgcgatcttgacgctgttgcagctttgttctgatagcgttagaaaccgtgggttgcttgtgagggaaggcgcgattcctccgcttgtgggcctctctcagagcggctccgtcagtgttagagctaagcgcaaggcagaaagacttctggggtatcttcgggagccaaggaaggaggcaagttcatcaagcccatgaaatgcaaccatgtggaggtttcatcagtctagtatgtatatactgagtgtatgtttggtgggttttgtatagcgtcttttgtgtagactgtaaaagagagatcaaatgattaccagaaacttgactgacttttgatctctctcatgtattgatggttaagctagtttttgaggagtttcaagggagagtgcttatttatttggtttacaagtctagcattcaggttttggcttctggtttgtgagggtgggtggattatgctgatttttaaggcaaaaagctttgtagtagcgtcggcaaatggcttgttcaagaactaagcaatttttaatcgatatttcttgatcaaaag

SEQ ID NO: 46575 - protein, 472 aa, Arabidopsis thaliana
  peptide (1)..(472): Ceres Seq. ID no. 15175512
MVSVEEPLSHSNSTRFPLTTDFYGSSSPSAARLHRQAGRSMRTVRSNFYQSGDQSCSFVGSIGDKSEYASEFLSDSVIDMRLGELALKNSNSLNSNASSMKEEAFLDISQAFSDFSACSSDISGELQRLACLPSPEADRNESGGDNEAEHDPELEREPCLGFLQRENFSTEIIECISPEDLQPTVKLCIDGLRSSSVAIKRSAAAKLRLLAKNRADNRVLIGESGAIQALIPLLRCKDPWTQEHAVTALLNLSLHDQNKAVIAAGGAIKSLVWVLKTGTETSKQNAACALLSLALLEENKGSIGACGAIPPLVSLLLNGSCRGKKDALTTLYKLCTLQQNKERAVTAGAVKPLVDLVAEEGTGMAEKAMVVLSSLAAIDDGKEAIVEEGGIAELVEAIEDGSVKGKEFAILTLLQLCSDSVRNRGLLVREGAIPPLVGLSQSGSVSVRAKRKAERLLGYLREPRKEASSSSP

SEQ ID NO: 46576 - protein, 432 aa, Arabidopsis thaliana
  peptide (1)..(432): Ceres Seq. ID no. 15175513
MRTVRSNFYQSGDQSCSFVGSIGDKSEYASEFLSDSVIDMRLGELALKNSNSLNSNASSMKEEAFLDISQAFSDFSACSSDISGELQRLACLPSPEADRNESGGDNEAEHDPELEREPCLGFLQRENFSTEIIECISPEDLQPTVKLCIDGLRSSSVAIKRSAAAKLRLLAKNRADNRVLIGESGAIQALIPLLRCKDPWTQEHAVTALLNLSLHDQNKAVIAAGGAIKSLVWVLKTGTETSKQNAACALLSLALLEENKGSIGACGAIPPLVSLLLNGSCRGKKDALTTLYKLCTLQQNKERAVTAGAVKPLVDLVAEEGTGMAEKAMVVLSSLAAIDDGKEAIVEEGGIAELVEAIEDGSVKGKEFAILTLLQLCSDSVRNRGLLVREGAIPPLVGLSQSGSVSVRAKRKAERLLGYLREPRKEASSSSP

SEQ ID NO: 46577 - protein, 393 aa, Arabidopsis thaliana
  peptide (1)..(393): Ceres Seq. ID no. 15175514
MRLGELALKNSNSLNSNASSMKEEAFLDISQAFSDFSACSSDISGELQRLACLPSPEADRNESGGDNEAEHDPELEREPCLGFLQRENFSTEIIECISPEDLQPTVKLCIDGLRSSSVAIKRSAAAKLRLLAKNRADNRVLIGESGAIQALIPLLRCKDPWTQEHAVTALLNLSLHDQNKAVIAAGGAIKSLVWVLKTGTETSKQNAACALLSLALLEENKGSIGACGAIPPLVSLLLNGSCRGKKDALTTLYKLCTLQQNKERAVTAGAVKPLVDLVAEEGTGMAEKAMVVLSSLAAIDDGKEAIVEEGGIAELVEAIEDGSVKGKEFAILTLLQLCSDSVRNRGLLVREGAIPPLVGLSQSGSVSVRAKRKAERLLGYLREPRKEASSSSP

SEQ ID NO: 46578 - DNA, 2082 bp, Arabidopsis thaliana
  misc_feature (1)..(2082): Ceres Seq. ID no. 13578760
  misc_feature (1)..(2082): Ortholog of  Ceres SEQ ID NO 13655298 as cited in SEQ ID NO 68914
gatgattggctttgcccacgagagagagagaaagattccacctgggttgggtcgtgaagaaagagaagaagaaaccgaagaagctcgaagaagaacgaaggagattcttcctttccccagatttttcgtttgaagaagaatcgaaaaacttagatttttggttttgctttcggagttattcgaatttgaaatatctgaatctgttgattcatttattctccgcatgaagctgtgttggtgaagtttttcggagatttagggtttctgagttgttcctcgtttggttggtgaataaagcgaagatgaacgtgatgcgtcgtctcaagagcattgcttcgggtcggacctccatttcttcggatcctggtggggactatgcgttgaagagagctaagctggatcaagagaacgacaacttgtgtgttgatccaatgcaggttgaccaaaatagttcttgttttgagatgaaagctgacgttttgtcacaagaaagtgttgctggaacgtcaaatgtgcctgctgtatcggaaaaacccgtggatgatcagcttcccgatgttatgatcgaaatgaagattagagacgagcgaaatgccaaccgcgaggataaggatatggaaacaactgttgtaaacggcagtgggaccgaaacgggacaagttattacgacgacagttgggggtagagatggaaagccaaagcagactatctcatacatggcccagcgagtggttggaaccggctcattcggagtagtgttccaggccaagtgcctggaaacgggtgaacaagttgcaattaagaaggttctgcaggataaaagatacaagaacagagaacttcagatcatgcgtttgcaagaccatcccaacgttgtgcggctgaggcattctttcttttcaacaactgacaaggatgagctgtatctcaaccttgtccttgagtatgttcccgaaactgtatacagagcatcgaagcactataccaaaatgaatcagcatatgccaattatctttgttcagctctatacttatcagatttgccgtgcgctgaactacttacatcgcgtggttggggtgtgtcaccgtgacattaagccacaaaatctactggttaatccccaaactcatcaattaaaaatatgcgattttggaagcgcaaagatgttggtacccggtgaacctaacatatcctatatatgctcccggtactacagggccccagaacttatatttggggcgacagagtataccaatgccattgacatgtggtccggcggttgtgtcatggcagagcttttacttggtcaaccactgtttcccggggaaagtggcattgatcagctggtggagataatcaagattcttgggacgcctacaagagaagaaatacggtgtatgaatccgaattacacagagttcaagtttcctcaaatcaaagctcacccgtggcacaagattttccacaagcgaatgccacctgaagcagtagacctcgtctcaagactccttcagtactcaccaaaccttcgttgcactgcattggaagcttgtgcacaccccttctttgatgacttacgggatccaaatgtttcactgccaaatggaagagcactgcctccattgtttaacttcactgcccaagaacttgcgggtgcatcaacagagctgcgacagcgtctaattccagcacattgccagggaacgggaagtagctcttaggatcatttatagcgtgtccaaatccagctttctttctctccctctatttactgcagtgtgtacatcaattttgaaccacttctgcttccaagcttttgtcgccggaggagagattggaaatctgtacgccgggacctgatgaggtgtgaaataactggggtcatgaagcttcttcttcttcttctgactggcttttctctcaatttgctatccttgttattttcaccttcactttcatttttttgtttttttttccacaaatctgaccccccttatatgtttggtgtatcatttttatgtgtttgtaatccatcaagatcattttcccttgccctaatattgcaagctaagattccgtttc

SEQ ID NO: 46579 - protein, 472 aa, Arabidopsis thaliana
  peptide (1)..(472): Ceres Seq. ID no. 13578761
MNVMRRLKSIASGRTSISSDPGGDYALKRAKLDQENDNLCVDPMQVDQNSSCFEMKADVLSQESVAGTSNVPAVSEKPVDDQLPDVMIEMKIRDERNANREDKDMETTVVNGSGTETGQVITTTVGGRDGKPKQTISYMAQRVVGTGSFGVVFQAKCLETGEQVAIKKVLQDKRYKNRELQIMRLQDHPNVVRLRHSFFSTTDKDELYLNLVLEYVPETVYRASKHYTKMNQHMPIIFVQLYTYQICRALNYLHRVVGVCHRDIKPQNLLVNPQTHQLKICDFGSAKMLVPGEPNISYICSRYYRAPELIFGATEYTNAIDMWSGGCVMAELLLGQPLFPGESGIDQLVEIIKILGTPTREEIRCMNPNYTEFKFPQIKAHPWHKIFHKRMPPEAVDLVSRLLQYSPNLRCTALEACAHPFFDDLRDPNVSLPNGRALPPLFNFTAQELAGASTELRQRLIPAHCQGTGSSS

SEQ ID NO: 46580 - protein, 469 aa, Arabidopsis thaliana
  peptide (1)..(469): Ceres Seq. ID no. 13578762
MRRLKSIASGRTSISSDPGGDYALKRAKLDQENDNLCVDPMQVDQNSSCFEMKADVLSQESVAGTSNVPAVSEKPVDDQLPDVMIEMKIRDERNANREDKDMETTVVNGSGTETGQVITTTVGGRDGKPKQTISYMAQRVVGTGSFGVVFQAKCLETGEQVAIKKVLQDKRYKNRELQIMRLQDHPNVVRLRHSFFSTTDKDELYLNLVLEYVPETVYRASKHYTKMNQHMPIIFVQLYTYQICRALNYLHRVVGVCHRDIKPQNLLVNPQTHQLKICDFGSAKMLVPGEPNISYICSRYYRAPELIFGATEYTNAIDMWSGGCVMAELLLGQPLFPGESGIDQLVEIIKILGTPTREEIRCMNPNYTEFKFPQIKAHPWHKIFHKRMPPEAVDLVSRLLQYSPNLRCTALEACAHPFFDDLRDPNVSLPNGRALPPLFNFTAQELAGASTELRQRLIPAHCQGTGSSS

SEQ ID NO: 46581 - protein, 429 aa, Arabidopsis thaliana
  peptide (1)..(429): Ceres Seq. ID no. 13578763
MQVDQNSSCFEMKADVLSQESVAGTSNVPAVSEKPVDDQLPDVMIEMKIRDERNANREDKDMETTVVNGSGTETGQVITTTVGGRDGKPKQTISYMAQRVVGTGSFGVVFQAKCLETGEQVAIKKVLQDKRYKNRELQIMRLQDHPNVVRLRHSFFSTTDKDELYLNLVLEYVPETVYRASKHYTKMNQHMPIIFVQLYTYQICRALNYLHRVVGVCHRDIKPQNLLVNPQTHQLKICDFGSAKMLVPGEPNISYICSRYYRAPELIFGATEYTNAIDMWSGGCVMAELLLGQPLFPGESGIDQLVEIIKILGTPTREEIRCMNPNYTEFKFPQIKAHPWHKIFHKRMPPEAVDLVSRLLQYSPNLRCTALEACAHPFFDDLRDPNVSLPNGRALPPLFNFTAQELAGASTELRQRLIPAHCQGTGSSS

SEQ ID NO: 46582 - DNA, 1702 bp, Arabidopsis thaliana; identical to SEQ ID NO: 45012
  misc_feature (1)..(1702): Ceres Seq. ID no. 12600391
  misc_feature (1)..(1702): Ortholog of  Ceres SEQ ID NO 13598882 as cited in SEQ ID NO 0

SEQ ID NO: 46583 - protein, 376 aa, Arabidopsis thaliana; identical to SEQ ID NO: 45013
  peptide (1)..(376): Ceres Seq. ID no. 12600392

SEQ ID NO: 46584 - protein, 246 aa, Arabidopsis thaliana; identical to SEQ ID NO: 45014
  peptide (1)..(246): Ceres Seq. ID no. 12600393

SEQ ID NO: 46585 - protein, 203 aa, Arabidopsis thaliana; identical to SEQ ID NO: 45015
  peptide (1)..(203): Ceres Seq. ID no. 12600394

SEQ ID NO: 46586 - DNA, 2257 bp, Arabidopsis thaliana
  misc_feature (1)..(2257): Ceres Seq. ID no. 14309985
  misc_feature (1)..(2257): Ortholog of  Ceres SEQ ID NO 14308455 as cited in SEQ ID NO 55108
  misc_feature (1)..(2257): Ortholog of  Ceres SEQ ID NO 14316344 as cited in SEQ ID NO 60120
gttttgtttttgaatcagatccttattcttgacctttcgatcagattcatggcaacgactcaatcacacacctcagatcttacttcagaggagcaacctgctagtttggacatcatgaaggagcagactgtcccggcaaacaacgagacatcagcctcttttaagtcctcccaggaagctccagttgtagttcatccagcaaaagttgctccacttactggaccttatggtttagccggtgattttgccggacacttaccgagcagcatcctctctcctcaagcacaaggcttttactatagaggttatgaaaaccccacaggcgaatgggacgagtattcctcgtatgtcaatgttgaaggattggacatcacatctcctgttggcttcaatgagaatgcttctctggtctaccaaacgggatatggatacaaccctcaaatgccatatgggccatattcccctgcagcaagtcccttgccttctgagggacagttgtattctccacaacagtttccgttttcaggggcatcaccgtattaccagcaggtagttcctcctagcatgcaatatattacttctccaactcagcccgagctcaccagccttgtcggtgttgaccaacaaggtgataacatcggaccacgccagtcctaccatcctcatcccattggaccgtttaatggaaaccagccaaaccttggttttcctgaatggcagcaaggttttgacgggggaatatggtcggattggtccaagccttctgatatgcacaggcattcttcttctatttctccggctttatctcctcagccactcggctcatatggatcatatggccagaacatacccatggggtcacagcgacagagatcattttacggttttggatctggttcgaactcttataacagaggttatatgcatagtggtggtcgtggccagggttctaactatggaagtagactaatttctaatgtgggtatgggaaaccaaggctggattggggttgacaacagtcgagggcgtggaagggttagtgatccatctttgggtggtgcttataatggtacttttgatatcctcaatgagcaaaatcgaggaccaagggcttcaaagcccaagactcaggtcttagaggagcttgattctgctgctgattctaagaaaaataacaaaggcagtgcaaaggagcacgaggaatccaacaacgcagactttgtcaccgactacactaacgccaagttgttcatcatcaagtcttacagtgaagacaatgttcacaaaagcatcaaatacaatgtatgggctagcacccctaatggcaacaaaaagcttgacgctgcttatcgtgaggccaaggatgagaaagaaccgtgtccactttttcttctgttctcggtaaatgcgagctctcaattctgtggtgtagcagagatggttggacctgttgattttgagaagagcgttgattactggcaacaagataaatggagtggacagttcccagtgaagtggcacattatcaaagatgttccaaacagccagttccgccacattatattggaaaacaatgacaataagcctgtgactaatagtcgagacacccaagaagtaaaactggaacagggcatcgagaagctgaagatcttcaagaactacgacgctgacacgtcaatcttggatgatttcgggttttatgaagagcgggagaaaattatacaagaccggaaggcaagaagacagccaagcttgccatctgcaggagtagtagcaggagaaaatgaacataaacctgcttctgctgcattacccacagacttcatgaagaacatgtccaagagttttgcgcaagttgtccgcttggacgaaggcagcaaagaagcagtcaaggccagttcatctccagatgcaattacaacagcagcagtctcttctggtcaatccaactagtaagtaaaagacatcaattagcaaagactatgttttcaaattccataatatgatcttttgtttgttctaagaaggtatttcaaatgaaattttacgtctgaccgggtctggtttttgtgtaaagtaagcctctttcctccgcccttttctgcttcaggggtatttagccaaaatttgattcatttccctcttttcaatgttctataataccctcactcttctgagttgatagaagaagaagatgaagaagataatgtatgaaagacaatataatgtttctcttgtaaagttggcctcatttatc

SEQ ID NO: 46587 - protein, 650 aa, Arabidopsis thaliana
  peptide (1)..(650): Ceres Seq. ID no. 14309986
VLFLNQILILDLSIRFMATTQSHTSDLTSEEQPASLDIMKEQTVPANNETSASFKSSQEAPVVVHPAKVAPLTGPYGLAGDFAGHLPSSILSPQAQGFYYRGYENPTGEWDEYSSYVNVEGLDITSPVGFNENASLVYQTGYGYNPQMPYGPYSPAASPLPSEGQLYSPQQFPFSGASPYYQQVVPPSMQYITSPTQPELTSLVGVDQQGDNIGPRQSYHPHPIGPFNGNQPNLGFPEWQQGFDGGIWSDWSKPSDMHRHSSSISPALSPQPLGSYGSYGQNIPMGSQRQRSFYGFGSGSNSYNRGYMHSGGRGQGSNYGSRLISNVGMGNQGWIGVDNSRGRGRVSDPSLGGAYNGTFDILNEQNRGPRASKPKTQVLEELDSAADSKKNNKGSAKEHEESNNADFVTDYTNAKLFIIKSYSEDNVHKSIKYNVWASTPNGNKKLDAAYREAKDEKEPCPLFLLFSVNASSQFCGVAEMVGPVDFEKSVDYWQQDKWSGQFPVKWHIIKDVPNSQFRHIILENNDNKPVTNSRDTQEVKLEQGIEKLKIFKNYDADTSILDDFGFYEEREKIIQDRKARRQPSLPSAGVVAGENEHKPASAALPTDFMKNMSKSFAQVVRLDEGSKEAVKASSSPDAITTAAVSSGQSN

SEQ ID NO: 46588 - protein, 634 aa, Arabidopsis thaliana
  peptide (1)..(634): Ceres Seq. ID no. 14309987
MATTQSHTSDLTSEEQPASLDIMKEQTVPANNETSASFKSSQEAPVVVHPAKVAPLTGPYGLAGDFAGHLPSSILSPQAQGFYYRGYENPTGEWDEYSSYVNVEGLDITSPVGFNENASLVYQTGYGYNPQMPYGPYSPAASPLPSEGQLYSPQQFPFSGASPYYQQVVPPSMQYITSPTQPELTSLVGVDQQGDNIGPRQSYHPHPIGPFNGNQPNLGFPEWQQGFDGGIWSDWSKPSDMHRHSSSISPALSPQPLGSYGSYGQNIPMGSQRQRSFYGFGSGSNSYNRGYMHSGGRGQGSNYGSRLISNVGMGNQGWIGVDNSRGRGRVSDPSLGGAYNGTFDILNEQNRGPRASKPKTQVLEELDSAADSKKNNKGSAKEHEESNNADFVTDYTNAKLFIIKSYSEDNVHKSIKYNVWASTPNGNKKLDAAYREAKDEKEPCPLFLLFSVNASSQFCGVAEMVGPVDFEKSVDYWQQDKWSGQFPVKWHIIKDVPNSQFRHIILENNDNKPVTNSRDTQEVKLEQGIEKLKIFKNYDADTSILDDFGFYEEREKIIQDRKARRQPSLPSAGVVAGENEHKPASAALPTDFMKNMSKSFAQVVRLDEGSKEAVKASSSPDAITTAAVSSGQSN

SEQ ID NO: 46589 - protein, 612 aa, Arabidopsis thaliana
  peptide (1)..(612): Ceres Seq. ID no. 14309988
MKEQTVPANNETSASFKSSQEAPVVVHPAKVAPLTGPYGLAGDFAGHLPSSILSPQAQGFYYRGYENPTGEWDEYSSYVNVEGLDITSPVGFNENASLVYQTGYGYNPQMPYGPYSPAASPLPSEGQLYSPQQFPFSGASPYYQQVVPPSMQYITSPTQPELTSLVGVDQQGDNIGPRQSYHPHPIGPFNGNQPNLGFPEWQQGFDGGIWSDWSKPSDMHRHSSSISPALSPQPLGSYGSYGQNIPMGSQRQRSFYGFGSGSNSYNRGYMHSGGRGQGSNYGSRLISNVGMGNQGWIGVDNSRGRGRVSDPSLGGAYNGTFDILNEQNRGPRASKPKTQVLEELDSAADSKKNNKGSAKEHEESNNADFVTDYTNAKLFIIKSYSEDNVHKSIKYNVWASTPNGNKKLDAAYREAKDEKEPCPLFLLFSVNASSQFCGVAEMVGPVDFEKSVDYWQQDKWSGQFPVKWHIIKDVPNSQFRHIILENNDNKPVTNSRDTQEVKLEQGIEKLKIFKNYDADTSILDDFGFYEEREKIIQDRKARRQPSLPSAGVVAGENEHKPASAALPTDFMKNMSKSFAQVVRLDEGSKEAVKASSSPDAITTAAVSSGQSN

SEQ ID NO: 46590 - DNA, 2624 bp, Arabidopsis thaliana
  misc_feature (1)..(2624): Ceres Seq. ID no. 14315707
  misc_feature (1)..(2624): Ortholog of  Ceres SEQ ID NO 13595900 as cited in SEQ ID NO 69289
tagtccccccccccccccccccttctcttctctctccattttgggaactttcatccataaacttctatttttctcatcgcaaacttgaaccgtcgtaaccctaaatcaccatcttcatcatcggcaaatcgaatctccgattatatatcaaatagcttaccaaatccgacatgacccaggccctcgttttcggaggactataatgatcggactcttcgtgtcccgtctcgattgcatggggtttgagctatgccggagcttcgccgtggagtccgccgtggccgtgttactgatgctgtagctcccaatcagcttccgcaaacacctacagaaaagaaaccgaagaagagtaccgttaaagctccaaaaccggttgccggcggagttacaggagttgcagagaggccgaggactagattagcggcgaggaaattaaaggaggaagataaagagatacctcaggagattccggttgttgtgccgtctaaggatagcgatatcgataaaaacaagggtaaagaggtagtcgttgaagaagagaagaaagatatggctattggtaatgatagtggtggctctaacaaggcggctgctcaggaagaagaaggaaatactgatcctttccctgagagggttcaagttggaggatcaccactatataaagttgagagaaagctggtgaagggtggttttggacaagtatttgtcggacgtcgtattagtggcggtaatgatcgtagtgcaggagctagcatcttggaggttgctctaaagtttgagcataggagcagcaagggttgcaactatggtcctccacatgagtggcaggtttacaacaccttgggtggtagccatggagtccctagagtacatttcaaaggcaggcaaggagactattatgtcatggttatggacatgcttgggcctagcttatgggatttatggaatacttcagggcaagcaatgtcctcggaaatggtagcttgcattgcggttgaatcactttccatccttgaaaagatgcatgcaaaaggttatgtgcatggggatgttaagccagaaaatttcttactcggccagccttcaacgtctcaagagaaaaaactgtttcttgttgatttgggactagctacaaagtggagagaaggtggtagcggacaacatgttgaatatgatcaacgtcctgatatgtttagagggacagttagatacgcaagtgcacatgctcatttagggagaactgctagcagaagggatgatctggaatcattagcatatacactgatctttcttcaccgaggtagattgccatggcaaggatatcagggagataacaagtcattccttgtttgcaaaaagaagatggcaacatcgccggatatgctttgttgtttttgtccccctcctttcaaacaatttcttgagatcgtggtaaatatgaaatttgatgaagaacccaactatggaaagttagtatctctgtttcaagacctcttgggcgaaaatccggcaattaggcctataaacacagagggtgctcaaaagatcatattccaagttggccagaagcgaggtaggttgagcattggggaggaagaagaagatgcccctaggaaaaaggtccgtctaggagtccctgcaacgcaatggatatcgatttacaatgccaggcaaccaatgaagcagaggtatcattataatgtggctgatataagactggcacagcatattgagagaggtattgcagatggtttgttgataagctgtgtatcatcatgttcgaatctctgggcattgataatggatgctggaactggcttcacgcaccaagtctatgaactctctcctgtattcttgcacaaggaatggattatggagcagtgggagaagaactactacattagttctattgctggtgcaagcaatggaagctccttagttgtcatgtcaaaaggtacgcagtatacacagcagtcttacaaagtaagcgattcattcccgttcaagtggataaacaagaaatggagagaaggcttccatgtaacctcaatggcaacagctggaaatcgatggggtgttgttatgtcccgcaattctggctacagtgaacaggttgtggaacttgattttctgtatccaagtgaaggcatccacaggcgttgggatggtggattcagaatcacatcaacagcagccacaaccgatcaagctgctctcatcctaagcatcccacgtcgtagacttgttgatgagacacaagagacgttacgtacctctcaattccccagcacacacgtcaaggaaaaatggggaaagaatctctaccttgcatcgttaagctatggccgaactgtatcttgagacttattagtaaaaactgttgaaggacgagagaaatatgtttctaagtctcggctcctattccttatccaaccctatggcctctcaggctctgttgtgcttcttcttttttttcagttgaattgtgaagcaaaaatgtggtgattgtgttgtttattccccccttgtgaaggggattgagccataatcaccagtttacctacacatttccctcgaaattgctatatttaatttttaaatcaagaaaagatatttttgtcacc

SEQ ID NO: 46591 - protein, 703 aa, Arabidopsis thaliana
  peptide (1)..(703): Ceres Seq. ID no. 14315708
MPELRRGVRRGRVTDAVAPNQLPQTPTEKKPKKSTVKAPKPVAGGVTGVAERPRTRLAARKLKEEDKEIPQEIPVVVPSKDSDIDKNKGKEVVVEEEKKDMAIGNDSGGSNKAAAQEEEGNTDPFPERVQVGGSPLYKVERKLVKGGFGQVFVGRRISGGNDRSAGASILEVALKFEHRSSKGCNYGPPHEWQVYNTLGGSHGVPRVHFKGRQGDYYVMVMDMLGPSLWDLWNTSGQAMSSEMVACIAVESLSILEKMHAKGYVHGDVKPENFLLGQPSTSQEKKLFLVDLGLATKWREGGSGQHVEYDQRPDMFRGTVRYASAHAHLGRTASRRDDLESLAYTLIFLHRGRLPWQGYQGDNKSFLVCKKKMATSPDMLCCFCPPPFKQFLEIVVNMKFDEEPNYGKLVSLFQDLLGENPAIRPINTEGAQKIIFQVGQKRGRLSIGEEEEDAPRKKVRLGVPATQWISIYNARQPMKQRYHYNVADIRLAQHIERGIADGLLISCVSSCSNLWALIMDAGTGFTHQVYELSPVFLHKEWIMEQWEKNYYISSIAGASNGSSLVVMSKGTQYTQQSYKVSDSFPFKWINKKWREGFHVTSMATAGNRWGVVMSRNSGYSEQVVELDFLYPSEGIHRRWDGGFRITSTAATTDQAALILSIPRRRLVDETQETLRTSQFPSTHVKEKWGKNLYLASLSYGRTVS

SEQ ID NO: 46592 - protein, 603 aa, Arabidopsis thaliana
  peptide (1)..(603): Ceres Seq. ID no. 14315709
MAIGNDSGGSNKAAAQEEEGNTDPFPERVQVGGSPLYKVERKLVKGGFGQVFVGRRISGGNDRSAGASILEVALKFEHRSSKGCNYGPPHEWQVYNTLGGSHGVPRVHFKGRQGDYYVMVMDMLGPSLWDLWNTSGQAMSSEMVACIAVESLSILEKMHAKGYVHGDVKPENFLLGQPSTSQEKKLFLVDLGLATKWREGGSGQHVEYDQRPDMFRGTVRYASAHAHLGRTASRRDDLESLAYTLIFLHRGRLPWQGYQGDNKSFLVCKKKMATSPDMLCCFCPPPFKQFLEIVVNMKFDEEPNYGKLVSLFQDLLGENPAIRPINTEGAQKIIFQVGQKRGRLSIGEEEEDAPRKKVRLGVPATQWISIYNARQPMKQRYHYNVADIRLAQHIERGIADGLLISCVSSCSNLWALIMDAGTGFTHQVYELSPVFLHKEWIMEQWEKNYYISSIAGASNGSSLVVMSKGTQYTQQSYKVSDSFPFKWINKKWREGFHVTSMATAGNRWGVVMSRNSGYSEQVVELDFLYPSEGIHRRWDGGFRITSTAATTDQAALILSIPRRRLVDETQETLRTSQFPSTHVKEKWGKNLYLASLSYGRTVS

SEQ ID NO: 46593 - protein, 485 aa, Arabidopsis thaliana; identical to SEQ ID NO: 46526
  peptide (1)..(485): Ceres Seq. ID no. 14315710

SEQ ID NO: 46594 - DNA, 1150 bp, Arabidopsis thaliana
  misc_feature (1)..(1150): Ceres Seq. ID no. 14310034
  misc_feature (1)..(1150): Ortholog of  Ceres SEQ ID NO 12633565 as cited in SEQ ID NO 1190
  misc_feature (1)..(1150): Ortholog of  Ceres SEQ ID NO 15171390 as cited in SEQ ID NO 51650
  misc_feature (1)..(1150): Ortholog of  Ceres SEQ ID NO 13594845 as cited in SEQ ID NO 51940
tagtcccccccccccccgatattaacacttcgaagcttcttcttcctttagtaaattcaagtgtgaggtgtgtttattgataaagtgctcattttctcggatctcagatcttagatccaaaccctcattatttcattgatccaagatctaatagcttgagcttgctgggattttagttatggcgagacggcaagtaggttcaacaagacgtgttggcgatggtggaagcttcccttttgcaggagctttacactcaaagtctcgatcttctccactactatctatttgccttgttcttgtgggggcttgtcttctcattggttatgcttacagtggtccaggtatatttaaaagtatcaaagaagttagcaaagttacaggtgactattcttgcacagcagaagtccaaagagccattcctgtacttaagaaggcttatggagatggcatgcgcaaagtcttgcatgtgggccctgacacatgctcagtggtttccagtctattgaaagaagaagagactgaagcatggggtgttgaaccatatgatattgaggatgcagattctcactgcaagagttttgtgagcaaaggtcttgtacgtgttgctgatatcaagtttcctctgccctaccgggcaaaatccttctctcttgtgattgtgtcagatgctctggattatctctcacccaagtacctgaacaagaccgttcctgaactcgcaagggtggcttcagacggtgtggttctttttgcaggtctccctggtcagcagagagctaaagttgctgaactctctaaattcggccgacccgctaaaatgcgtagcgcatcgtggtggaaccgctttttcgtccagacaaacttagaagaaaacgacgcaccaagcaagaagttcgaacaggctgtttccaaaggattatacaaaccagcctgccaagtcttccacctcaagccattacattaaccagccaccaccaaagcctactggttccacaccaaagcatatttacacgtagagccgcacgcgaaaaaaaaaaatagcgtaatcgatatttctccttgtattttgtaacaggtcagtttttatccttcaatgttgtatccgccaacacaatttttcctattcaattaaatcataattattatcacc

SEQ ID NO: 46595 - protein, 261 aa, Arabidopsis thaliana; identical to SEQ ID NO: 23144
  peptide (1)..(261): Ceres Seq. ID no. 14310035

SEQ ID NO: 46596 - protein, 171 aa, Arabidopsis thaliana; identical to SEQ ID NO: 23145
  peptide (1)..(171): Ceres Seq. ID no. 14310036

SEQ ID NO: 46597 - DNA, 2014 bp, Arabidopsis thaliana
  misc_feature (1)..(2014): Ceres Seq. ID no. 13592209
  misc_feature (1)..(2014): Ortholog of  Ceres SEQ ID NO 15168464 as cited in SEQ ID NO 59187
ggttatcgaaccaatggagaccccactccctcctttatcgcaactaaccccaaatcctactcccgccgccgccgtctcttccgctattccggcgccagttaagagcgtagccgttcagcaaccgatcgatggatctccacgcgccgttgctactgataccggaggtattcctgagccacttgcggctgttcccggcgctaagcttcgtcttatgtgcagttttggtggccacatcatgcctcgtccacacgacaaatcgttgacgtactccggcggcgagactcgtattgtggttgttgatcgacgtgcgtcactgtcttcgctccgatctcgtctctctagtatgcttctcaacggccggtcctttactctcaagtaccagctccctagcgaagatctcgattcactcgtcaccatcactaccgatgaagatctggagaacatgatcgaggaatacgatcgcgcggcttcgtcagcgacggcgactgctacgcaacggctccggttgttccttttcgctaacaagctcgagaccgccgctactatgggatctctgcttgacggcacgaaatctgacacatggttcgtcgatgctctgaatcaatctggtttgcttcctcgtggtttatcagattccgccgccgtgaataataccttggtgaatctcgacgaagctagcggcggagagaccgagatccaaaaccttgaaactaatgttggtggcgagaacaataagcgaggggatttggttgctaacggtgtgatttcgcatcaggagatgcatatgagctcgatgcctgattctccaatgatggaagccgctggttcttcgataggatcttcttcttcatctccttccacatccaatttgccaccgattcgcgttagagtcagtgaggaccagaggatagaggaacaattggcacagatgaccttctcaaacatgcaaactcagaggcaatttgatgatggcgttagcttgatggcaaatcggccaatgatgattccacctggtgccatgaacgatgctgcgatggcgtataacaacgcacctggtgatggtactgctcccgcaagcaatggccatgtctcacctgaagacgatcgatccgaattaggtgtatcaactggctacaggaagccacctttgccgatgcaaccagtaacgatcccacctagaactgttggaggctatggcttgacatcccctgattctgttgcaagtgatactagcatttcttctgctacttcattttcaaagccgatgtactaccaagaccaacctccagctctgccaagagctcctccagtggcacagcctgaaaccacctcggcccaaagctctcaagtcttacctcagactgaaaacacttcagcccaaaccacctcccatgtcttatctcagccaggtacgtacacaactatggatcaacaacaacaacaacctctggctcaacaacctttcttacaccaaggcgttcagtatatccctcacccatcacaatacataccaatttactctcatcagcaacaaaactaccctgtttacgtgatgtccgtcccacaatctcagcagtatatcccagcaggaactcccccgctctacccgaactcaaaacccggcacaaactcgagacctgaagctgcccagaacgtttaccgagctgctccccctcaggttattcagcttcagcaacagcatcagtacatgggttacgctggagctcctcaacatagcacaaacgcaaacgccaattacggtactggagctcctcaacatagcacaaacgcaaacgccaactacggtggaccctttgaatacacaaactctccaaacgagacagtgtattaccacacacaagctcctgctgcaaacactgccattccattagcgtctccataccaaagcatgacaccagcagcagccgcagcagctctagccgatatgtccaagcaaatggctcttgacggcggcaaacagcaacagcatatggctgcgtctcagccgctttaa

SEQ ID NO: 46598 - protein, 670 aa, Arabidopsis thaliana
  peptide (1)..(670): Ceres Seq. ID no. 13592210
VIEPMETPLPPLSQLTPNPTPAAAVSSAIPAPVKSVAVQQPIDGSPRAVATDTGGIPEPLAAVPGAKLRLMCSFGGHIMPRPHDKSLTYSGGETRIVVVDRRASLSSLRSRLSSMLLNGRSFTLKYQLPSEDLDSLVTITTDEDLENMIEEYDRAASSATATATQRLRLFLFANKLETAATMGSLLDGTKSDTWFVDALNQSGLLPRGLSDSAAVNNTLVNLDEASGGETEIQNLETNVGGENNKRGDLVANGVISHQEMHMSSMPDSPMMEAAGSSIGSSSSSPSTSNLPPIRVRVSEDQRIEEQLAQMTFSNMQTQRQFDDGVSLMANRPMMIPPGAMNDAAMAYNNAPGDGTAPASNGHVSPEDDRSELGVSTGYRKPPLPMQPVTIPPRTVGGYGLTSPDSVASDTSISSATSFSKPMYYQDQPPALPRAPPVAQPETTSAQSSQVLPQTENTSAQTTSHVLSQPGTYTTMDQQQQQPLAQQPFLHQGVQYIPHPSQYIPIYSHQQQNYPVYVMSVPQSQQYIPAGTPPLYPNSKPGTNSRPEAAQNVYRAAPPQVIQLQQQHQYMGYAGAPQHSTNANANYGTGAPQHSTNANANYGGPFEYTNSPNETVYYHTQAPAANTAIPLASPYQSMTPAAAAAALADMSKQMALDGGKQQQHMAASQPL

SEQ ID NO: 46599 - protein, 666 aa, Arabidopsis thaliana
  peptide (1)..(666): Ceres Seq. ID no. 13592211
METPLPPLSQLTPNPTPAAAVSSAIPAPVKSVAVQQPIDGSPRAVATDTGGIPEPLAAVPGAKLRLMCSFGGHIMPRPHDKSLTYSGGETRIVVVDRRASLSSLRSRLSSMLLNGRSFTLKYQLPSEDLDSLVTITTDEDLENMIEEYDRAASSATATATQRLRLFLFANKLETAATMGSLLDGTKSDTWFVDALNQSGLLPRGLSDSAAVNNTLVNLDEASGGETEIQNLETNVGGENNKRGDLVANGVISHQEMHMSSMPDSPMMEAAGSSIGSSSSSPSTSNLPPIRVRVSEDQRIEEQLAQMTFSNMQTQRQFDDGVSLMANRPMMIPPGAMNDAAMAYNNAPGDGTAPASNGHVSPEDDRSELGVSTGYRKPPLPMQPVTIPPRTVGGYGLTSPDSVASDTSISSATSFSKPMYYQDQPPALPRAPPVAQPETTSAQSSQVLPQTENTSAQTTSHVLSQPGTYTTMDQQQQQPLAQQPFLHQGVQYIPHPSQYIPIYSHQQQNYPVYVMSVPQSQQYIPAGTPPLYPNSKPGTNSRPEAAQNVYRAAPPQVIQLQQQHQYMGYAGAPQHSTNANANYGTGAPQHSTNANANYGGPFEYTNSPNETVYYHTQAPAANTAIPLASPYQSMTPAAAAAALADMSKQMALDGGKQQQHMAASQPL

SEQ ID NO: 46600 - protein, 600 aa, Arabidopsis thaliana
  peptide (1)..(600): Ceres Seq. ID no. 13592212
MCSFGGHIMPRPHDKSLTYSGGETRIVVVDRRASLSSLRSRLSSMLLNGRSFTLKYQLPSEDLDSLVTITTDEDLENMIEEYDRAASSATATATQRLRLFLFANKLETAATMGSLLDGTKSDTWFVDALNQSGLLPRGLSDSAAVNNTLVNLDEASGGETEIQNLETNVGGENNKRGDLVANGVISHQEMHMSSMPDSPMMEAAGSSIGSSSSSPSTSNLPPIRVRVSEDQRIEEQLAQMTFSNMQTQRQFDDGVSLMANRPMMIPPGAMNDAAMAYNNAPGDGTAPASNGHVSPEDDRSELGVSTGYRKPPLPMQPVTIPPRTVGGYGLTSPDSVASDTSISSATSFSKPMYYQDQPPALPRAPPVAQPETTSAQSSQVLPQTENTSAQTTSHVLSQPGTYTTMDQQQQQPLAQQPFLHQGVQYIPHPSQYIPIYSHQQQNYPVYVMSVPQSQQYIPAGTPPLYPNSKPGTNSRPEAAQNVYRAAPPQVIQLQQQHQYMGYAGAPQHSTNANANYGTGAPQHSTNANANYGGPFEYTNSPNETVYYHTQAPAANTAIPLASPYQSMTPAAAAAALADMSKQMALDGGKQQQHMAASQPL

SEQ ID NO: 46601 - DNA, 2312 bp, Arabidopsis thaliana
  misc_feature (1)..(2312): Ceres Seq. ID no. 13578902
  misc_feature (1)..(2312): Ortholog of  Ceres SEQ ID NO 15177274 as cited in SEQ ID NO 57652
cagtgtgagtaatttagtcttcttcaccttgaaagaccattaacatcattccttgcccagatccaaacaatgccatctccactctctctatttagggttctctccaacttttcaaatccctaattcttgctccctcccttcaatcaattccgatcatcatcgaggtctctctactccccgaatttaaagatcagagccgcgacttcctctgccttcttttcctcggaatttttcagctacgttttccaggtggtgtgtattgtcaatcagttgacctttgcttttgtagccagatcgttcgtgctttgagtttagggctcttttacaaggtttcgtgttggtggaatttctctacctaggtttgggggaagagttcagtaatttcgttgtagatcgtgatttgggcttttagggtttcggtttactggttgctggaatttatggtagcgttattgaattcggactctctgcatgtgtaagcgttgaagtttgaagtttcaccgggttttgtttcttctgctgaagagtcgagattattttacgcattaagaatcgattcagaaggtttttaggaattagtttctgtggattgtaactatataactactgggaggggatgtttggttctacattggatagcagccgtggaaacagcgctgcctcagggcagcttcttactccgacacgcttcgtgtggccttatggaggtagaagagtcttcctaagcggatctttcaccaggtggacagagcatgtgccaatgtcaccgctcgagggctgccctactgtttttcaagtcatttgcaacttgacgccaggatatcatcagtataagttttttgttgatggggaatggcggcacgatgagcaccaaccatttgtaagcggaaatggtggagtagtgaatacaatatttataactgggccagatatggttcctgctggttttagcccagagacactgggccggtcgaatatggatgtggatgatgtcttcctgcgaacggctgacccgtcccaggaagctgttcctaggatgtcgggggttgatttggagctttctcgtcaccgcatatcggttttattgtcaacccgcactgcatatgagctgctcccagaatcgggcaaggttattgcattggatgttaatttgccagtgaagcaagcattccatatactctatgagcagggaatccctttggctcctctttgggactttggaaaaggccaatttgttggagttcttggtccactagacttcattctaatactgagagagcttggaactcatggatcaaacttgacagaggaagagcttgagacgcacacaatagcagcctggaaagaggggaaggctcatattagccggcaatatgatggaagtgggagaccatatcctaggccacttgttcaggttggaccctatgataatctgaaagacgttgccctgaaaattttgcaaaacaaggtggcagctgttccggttatatattcttctttgcaggatggttcatatccgcagttactgcatcttgcttcgctatcaggcatattaaaatgtatatgcagatactttagacattcgtctagctctttacctatccttcagcaacccatttgttcaattcccctgggtacgtgggtccctagaatcggagaatcaagtagcaaacctctcgctacattgagacctcacgcctctttgggttctgcgctcgcattattagttcaagctgaagtcagttcaattcccgtagtggatgacaacgactcgcttattgacatatactctcgaagtgatataactgctctggctaaagacaaggcatacgcacagattcatcttgatgacatgacagttcaccaggcgctacagttggggcaagatgcgagcccgccttatggaatcttcaacgggcagagatgtcacatgtgcttgcgctcagactctcttgtgaaagtgatggagcggttggcgaatccaggtgtaaggaggctggtgatagtggaagcagggagcaaacgtgttgaaggtatcatttcactgagcgatgttttccaattcctgctcggtctttgactcccacagcaaaacaacctccccaacctctttttctcatttcccctcaatcaaaactacccaacaatttgcttctttttttttttttttttttttcttcttgcaaggaatttgtaaatttgctacgaacctctttcatcattgttttcttattatttttgttgttttagttgaacgggtttccattcttgtgaagatattggctaccggaatcttttactagtagcttccc

SEQ ID NO: 46602 - protein, 487 aa, Arabidopsis thaliana
  peptide (1)..(487): Ceres Seq. ID no. 13578903
MFGSTLDSSRGNSAASGQLLTPTRFVWPYGGRRVFLSGSFTRWTEHVPMSPLEGCPTVFQVICNLTPGYHQYKFFVDGEWRHDEHQPFVSGNGGVVNTIFITGPDMVPAGFSPETLGRSNMDVDDVFLRTADPSQEAVPRMSGVDLELSRHRISVLLSTRTAYELLPESGKVIALDVNLPVKQAFHILYEQGIPLAPLWDFGKGQFVGVLGPLDFILILRELGTHGSNLTEEELETHTIAAWKEGKAHISRQYDGSGRPYPRPLVQVGPYDNLKDVALKILQNKVAAVPVIYSSLQDGSYPQLLHLASLSGILKCICRYFRHSSSSLPILQQPICSIPLGTWVPRIGESSSKPLATLRPHASLGSALALLVQAEVSSIPVVDDNDSLIDIYSRSDITALAKDKAYAQIHLDDMTVHQALQLGQDASPPYGIFNGQRCHMCLRSDSLVKVMERLANPGVRRLVIVEAGSKRVEGIISLSDVFQFLLGL

SEQ ID NO: 46603 - protein, 439 aa, Arabidopsis thaliana
  peptide (1)..(439): Ceres Seq. ID no. 13578904
MSPLEGCPTVFQVICNLTPGYHQYKFFVDGEWRHDEHQPFVSGNGGVVNTIFITGPDMVPAGFSPETLGRSNMDVDDVFLRTADPSQEAVPRMSGVDLELSRHRISVLLSTRTAYELLPESGKVIALDVNLPVKQAFHILYEQGIPLAPLWDFGKGQFVGVLGPLDFILILRELGTHGSNLTEEELETHTIAAWKEGKAHISRQYDGSGRPYPRPLVQVGPYDNLKDVALKILQNKVAAVPVIYSSLQDGSYPQLLHLASLSGILKCICRYFRHSSSSLPILQQPICSIPLGTWVPRIGESSSKPLATLRPHASLGSALALLVQAEVSSIPVVDDNDSLIDIYSRSDITALAKDKAYAQIHLDDMTVHQALQLGQDASPPYGIFNGQRCHMCLRSDSLVKVMERLANPGVRRLVIVEAGSKRVEGIISLSDVFQFLLGL

SEQ ID NO: 46604 - protein, 382 aa, Arabidopsis thaliana
  peptide (1)..(382): Ceres Seq. ID no. 13578905
MVPAGFSPETLGRSNMDVDDVFLRTADPSQEAVPRMSGVDLELSRHRISVLLSTRTAYELLPESGKVIALDVNLPVKQAFHILYEQGIPLAPLWDFGKGQFVGVLGPLDFILILRELGTHGSNLTEEELETHTIAAWKEGKAHISRQYDGSGRPYPRPLVQVGPYDNLKDVALKILQNKVAAVPVIYSSLQDGSYPQLLHLASLSGILKCICRYFRHSSSSLPILQQPICSIPLGTWVPRIGESSSKPLATLRPHASLGSALALLVQAEVSSIPVVDDNDSLIDIYSRSDITALAKDKAYAQIHLDDMTVHQALQLGQDASPPYGIFNGQRCHMCLRSDSLVKVMERLANPGVRRLVIVEAGSKRVEGIISLSDVFQFLLGL

SEQ ID NO: 46605 - DNA, 1866 bp, Arabidopsis thaliana
  misc_feature (1)..(1866): Ceres Seq. ID no. 12575306
  misc_feature (1)..(1866): Ortholog of  Ceres SEQ ID NO 15170647 as cited in SEQ ID NO 67122
atgtcggccgtttcaatctccgccgtcaaatctgattttttcaccgtcgaagccatagccgttacacaccatcggacgccgcatccaccacatttcccttcgctccggtttccactatcgctcaagtccccgccggctacttctcttaaccttgtggctggatcaaaactcctccacttctcgcgtcgtcttccttctatcaaatgctcatatactccgtcgttagatttatcggaggaacagttcacaaaatttaaaaaagcatcggaaaagggaaacttagttcctctattccgatgtgtattctcggatcatttgactccgatacttgcttaccgatgtttggtgaaagaagatgatagagatgctcctagcttcttgttcgagtctgtggagcctggttcgcaatcgtccaacatcggtaggtatagtgtagttggagctcagcctacaatagaaatcgttgcaaagggaaatgtagttactgtgatggaccatggagctagtcttaggacagaggaggaagtggatgatccaatgatggttcctcagaaaatcatggaggaatggaatccacaaggcattgatgaattgcctgaagctttctgcggtggttgggttggatacttttcatatgacactgtacgttatgttgagaagaagaagctgcctttttctaatgctccagaggatgataggagtcttcctgatgttaatttgggtctttatgatgatgtgatcgtgtttgatcatgttgagaagaaagcatatgtgatccactgggtgcggatagataaggatcgttctgttgaagaaaatttccgtgaaggaatgaatcggttggaatctctaacctctagaattcaagaccaaaaaccccccaagatgcctactggtttcataaaactacgcactcagctcttcggtccgaaattggagaaatcaactatgacgagtgaggcatacaaggaggcagtggtggaagccaaagaacatatcttggctggggacatctttcagatagttcttagtcagagatttgaaaggcggacatttgcggacccatttgagatatatagagctcttaggattgtaaatccaagtccctacatggcctatttgcaggttagaggatgcatattagttgcatcaagtccagagatattgttacgttcaaaaaataggaaaattaccaatcgcccccttgctggaactgtcagaagagggaagacacccaaagaagatctaatgctggaaaaagagctcttaagcgatgaaaaacaatgcgcagaacatattatgcttgttgatttgggaaggaacgatgttggcaaggtttcaaagcctggttctgtggaggtcaagaagctcaaggatatagaatggttttcacatgtcatgcacattagctccacggtagtaggtgaattgctcgatcatctaacaagctgggacgctcttagagctgtacttcccgttggaaccgtgagcggagccccaaaggtaaaagccatggagctgatagatgaacttgaagtaacaaggcgtggtccttacagtggaggctttggaggcatttcgtttaatggagacatggacattgccttagctctcagaacaatggtcttcccaacaaatacccgttatgacacattgtactcatacaagcatcctcagagacgtagagaatggattgctcatattcaagctggagctgggattgttgcagacagtaaccctgatgatgaacatagagagtgtgagaacaaagcagcggctttagcccgagccatcgatcttgctgagtcctcctttcttgaggcacctgagtttactactatcacacctcacatcaacaatatctga

SEQ ID NO: 46606 - protein, 621 aa, Arabidopsis thaliana
  peptide (1)..(621): Ceres Seq. ID no. 12575307
MSAVSISAVKSDFFTVEAIAVTHHRTPHPPHFPSLRFPLSLKSPPATSLNLVAGSKLLHFSRRLPSIKCSYTPSLDLSEEQFTKFKKASEKGNLVPLFRCVFSDHLTPILAYRCLVKEDDRDAPSFLFESVEPGSQSSNIGRYSVVGAQPTIEIVAKGNVVTVMDHGASLRTEEEVDDPMMVPQKIMEEWNPQGIDELPEAFCGGWVGYFSYDTVRYVEKKKLPFSNAPEDDRSLPDVNLGLYDDVIVFDHVEKKAYVIHWVRIDKDRSVEENFREGMNRLESLTSRIQDQKPPKMPTGFIKLRTQLFGPKLEKSTMTSEAYKEAVVEAKEHILAGDIFQIVLSQRFERRTFADPFEIYRALRIVNPSPYMAYLQVRGCILVASSPEILLRSKNRKITNRPLAGTVRRGKTPKEDLMLEKELLSDEKQCAEHIMLVDLGRNDVGKVSKPGSVEVKKLKDIEWFSHVMHISSTVVGELLDHLTSWDALRAVLPVGTVSGAPKVKAMELIDELEVTRRGPYSGGFGGISFNGDMDIALALRTMVFPTNTRYDTLYSYKHPQRRREWIAHIQAGAGIVADSNPDDEHRECENKAAALARAIDLAESSFLEAPEFTTITPHINNI

SEQ ID NO: 46607 - protein, 458 aa, Arabidopsis thaliana
  peptide (1)..(458): Ceres Seq. ID no. 12575308
MDHGASLRTEEEVDDPMMVPQKIMEEWNPQGIDELPEAFCGGWVGYFSYDTVRYVEKKKLPFSNAPEDDRSLPDVNLGLYDDVIVFDHVEKKAYVIHWVRIDKDRSVEENFREGMNRLESLTSRIQDQKPPKMPTGFIKLRTQLFGPKLEKSTMTSEAYKEAVVEAKEHILAGDIFQIVLSQRFERRTFADPFEIYRALRIVNPSPYMAYLQVRGCILVASSPEILLRSKNRKITNRPLAGTVRRGKTPKEDLMLEKELLSDEKQCAEHIMLVDLGRNDVGKVSKPGSVEVKKLKDIEWFSHVMHISSTVVGELLDHLTSWDALRAVLPVGTVSGAPKVKAMELIDELEVTRRGPYSGGFGGISFNGDMDIALALRTMVFPTNTRYDTLYSYKHPQRRREWIAHIQAGAGIVADSNPDDEHRECENKAAALARAIDLAESSFLEAPEFTTITPHINNI

SEQ ID NO: 46608 - protein, 442 aa, Arabidopsis thaliana
  peptide (1)..(442): Ceres Seq. ID no. 12575309
MMVPQKIMEEWNPQGIDELPEAFCGGWVGYFSYDTVRYVEKKKLPFSNAPEDDRSLPDVNLGLYDDVIVFDHVEKKAYVIHWVRIDKDRSVEENFREGMNRLESLTSRIQDQKPPKMPTGFIKLRTQLFGPKLEKSTMTSEAYKEAVVEAKEHILAGDIFQIVLSQRFERRTFADPFEIYRALRIVNPSPYMAYLQVRGCILVASSPEILLRSKNRKITNRPLAGTVRRGKTPKEDLMLEKELLSDEKQCAEHIMLVDLGRNDVGKVSKPGSVEVKKLKDIEWFSHVMHISSTVVGELLDHLTSWDALRAVLPVGTVSGAPKVKAMELIDELEVTRRGPYSGGFGGISFNGDMDIALALRTMVFPTNTRYDTLYSYKHPQRRREWIAHIQAGAGIVADSNPDDEHRECENKAAALARAIDLAESSFLEAPEFTTITPHINNI

SEQ ID NO: 46609 - DNA, 1897 bp, Arabidopsis thaliana
  misc_feature (1)..(1897): Ceres Seq. ID no. 13578894
  misc_feature (1)..(1897): Ortholog of  Ceres SEQ ID NO 14302343 as cited in SEQ ID NO 67343
gattgaattgaaatcggtggtatgtatgtatagtccaccaacatagatctctctcttgctgtggctcctttcttcctctacacagatctttggattcagaagaaagagatctaaaatgggtgctgctgaaaacaaccttgaaatggagggtaccctggagatcggcatggagtatagaactgtttctggtgttgcgggacctctcgtcatccttgaaaaagtcaaggggcctaaataccaagaaattgtcaatatccgtcttggggatggaactacccgacgtggtcaagttctcgaagttgatggagagaaagctgttgttcaggtatttgagggaacatctggaatcgacaacaagtacacaactgtgcaatttacaggagaggttttgaaaactcctgtttctttggatatgcttggtcgcatcttcaatggttcagggaagcccattgacaacggtccacctatattgcctgaggcgtacttggatatttctggaagttctatcaatcccagtgagagaacctatcctgaagagatgattcagacgggtatatccaccattgatgtcatgaactctatcgccagaggacagaagattcccctcttttctgccgcaggtcttccccacaatgaaattgctgctcagatttgccgtcaggctggtttggttaagcgtttagagaagtcagataatcttctcgagcatcaggaggatgataacttcgccattgtgttcgcagcaatgggtgtgaacatggagactgcacaattttttaaacgtgatttcgaggagaatggatcgatggagagagtgactcttttccttaacttggcaaacgaccccactattgagcgtatcatcactcctcgtatcgcacttacaactgctgagtacttggcatatgaatgtggcaagcatgtccttgtcattctcacagacatgagttcctacgccgatgctcttcgtgaggtctctgctgcccgtgaagaagtgcctggaaggcgtggttacccaggttacatgtacaccgacttggctaccatatacgagagagcagggcgaattgaagggaggaaaggttccatcactcaaattcccattttaaccatgccaaacgatgatatcacgcatcccacaccagatctgacaggatacattacagaggggcaaatctatattgaccgacaacttcacaatagacagatctaccctccgatcaatgtcttgccatctctgtctcgtctcatgaagagtgccattggtgagggtatgactcgcagggaccactctgatgtttctaatcaattgtatgccaattacgctattggaaaggacgtgcaggccatgaaagccgtggttggagaagaagctctttcttccgaggatctgctatatcttgagttcttggataagttcgagaggaagtttgtggctcagggagcttatgatacccgaaacatcttccagtcactcgacctggcatggactctcctcagaatcttcccccgtgagttacttcaccgtatacccgcgaaaacccttgatcagttttacagtcgcgataccaccaactgaagaacatagtttctactgccttggtgtgatgatatgtccaaatgcatctttattttttacttctgcggttggatcacacctctgagtcgtccgtcccaataaatggtgtttgttcccaatcgctagaccctttattattgtcttcgaaactgagcaagccaggttgattattctttttgtaagagaaattgaaattcttgtataatttatgagattttgcatcttttttttggggtaccaaattactggttcagaacaacatacatttgtttgtcttattactgtcacgaatgtcaatgcagcttcttcttctttttt

SEQ ID NO: 46610 - protein, 487 aa, Arabidopsis thaliana
  peptide (1)..(487): Ceres Seq. ID no. 13578895
MGAAENNLEMEGTLEIGMEYRTVSGVAGPLVILEKVKGPKYQEIVNIRLGDGTTRRGQVLEVDGEKAVVQVFEGTSGIDNKYTTVQFTGEVLKTPVSLDMLGRIFNGSGKPIDNGPPILPEAYLDISGSSINPSERTYPEEMIQTGISTIDVMNSIARGQKIPLFSAAGLPHNEIAAQICRQAGLVKRLEKSDNLLEHQEDDNFAIVFAAMGVNMETAQFFKRDFEENGSMERVTLFLNLANDPTIERIITPRIALTTAEYLAYECGKHVLVILTDMSSYADALREVSAAREEVPGRRGYPGYMYTDLATIYERAGRIEGRKGSITQIPILTMPNDDITHPTPDLTGYITEGQIYIDRQLHNRQIYPPINVLPSLSRLMKSAIGEGMTRRDHSDVSNQLYANYAIGKDVQAMKAVVGEEALSSEDLLYLEFLDKFERKFVAQGAYDTRNIFQSLDLAWTLLRIFPRELLHRIPAKTLDQFYSRDTTN

SEQ ID NO: 46611 - protein, 478 aa, Arabidopsis thaliana
  peptide (1)..(478): Ceres Seq. ID no. 13578896
MEGTLEIGMEYRTVSGVAGPLVILEKVKGPKYQEIVNIRLGDGTTRRGQVLEVDGEKAVVQVFEGTSGIDNKYTTVQFTGEVLKTPVSLDMLGRIFNGSGKPIDNGPPILPEAYLDISGSSINPSERTYPEEMIQTGISTIDVMNSIARGQKIPLFSAAGLPHNEIAAQICRQAGLVKRLEKSDNLLEHQEDDNFAIVFAAMGVNMETAQFFKRDFEENGSMERVTLFLNLANDPTIERIITPRIALTTAEYLAYECGKHVLVILTDMSSYADALREVSAAREEVPGRRGYPGYMYTDLATIYERAGRIEGRKGSITQIPILTMPNDDITHPTPDLTGYITEGQIYIDRQLHNRQIYPPINVLPSLSRLMKSAIGEGMTRRDHSDVSNQLYANYAIGKDVQAMKAVVGEEALSSEDLLYLEFLDKFERKFVAQGAYDTRNIFQSLDLAWTLLRIFPRELLHRIPAKTLDQFYSRDTTN

SEQ ID NO: 46612 - protein, 470 aa, Arabidopsis thaliana
  peptide (1)..(470): Ceres Seq. ID no. 13578897
MEYRTVSGVAGPLVILEKVKGPKYQEIVNIRLGDGTTRRGQVLEVDGEKAVVQVFEGTSGIDNKYTTVQFTGEVLKTPVSLDMLGRIFNGSGKPIDNGPPILPEAYLDISGSSINPSERTYPEEMIQTGISTIDVMNSIARGQKIPLFSAAGLPHNEIAAQICRQAGLVKRLEKSDNLLEHQEDDNFAIVFAAMGVNMETAQFFKRDFEENGSMERVTLFLNLANDPTIERIITPRIALTTAEYLAYECGKHVLVILTDMSSYADALREVSAAREEVPGRRGYPGYMYTDLATIYERAGRIEGRKGSITQIPILTMPNDDITHPTPDLTGYITEGQIYIDRQLHNRQIYPPINVLPSLSRLMKSAIGEGMTRRDHSDVSNQLYANYAIGKDVQAMKAVVGEEALSSEDLLYLEFLDKFERKFVAQGAYDTRNIFQSLDLAWTLLRIFPRELLHRIPAKTLDQFYSRDTTN

SEQ ID NO: 46613 - DNA, 2662 bp, Arabidopsis thaliana
  misc_feature (1)..(2662): Ceres Seq. ID no. 12600678
  misc_feature (1)..(2662): Ortholog of  Ceres SEQ ID NO 14307827 as cited in SEQ ID NO 54367
ctctctctcgtttcagtcacaagactctcacaacaaagcgattttttggcttcacgaactcaaagctatctctctccctctatctctgaggcacgcattttcgtctgtgattctcgagctcttttggggtttctccgagatttttggtcggttcttcacgttttgtttatggcggtgattacgtgatgaaagtcaccggaaagccgtattcgacggcgacattaccggcctttgagtcggataagaatctcttctctcacggtccagatctcagagctattcaaagagctactactgtcactaaacgtcgagctaggaacccgagtttgactcgtcagcgaagatccggtccttctggtggcagacgaagccggccggagactcctttattgaaatggaaggtggaggatcggaataaagagagaagcggcgttgtagaagacgatgattacgaggatgataatcaccaggttgcgaggtcagagactactcgccgcaaggatcggaggaaaatcgcacggcctgtctctgttaggaaactcgccgctgggctatggcggttgcaagttcctgacgcgagttccagcggcggagaaagaaagggcaaagaggggttagggtttcagggaaatggtggatacatgggtgttccgtatctttatcaccatagtgacaaaccctctggtggtcagagcaataagataaggcagaaccctagtactattgctacgacaaaaaatggattcttgtgtaagctcgaaccttcaatgccatttccccactcagcaatggagggggcgacaaaatgggatcctgtctgcttggatacaatggaggaagtacaccaaatatatagcaacatgaagcgtattgatcagcaagtgaatgctgtgtcattggtttcttcccttgaagcagaactggaggaagcacatgctcgcatagaagatctcgagagcgagaagcgatctcataaaaagaagctcgagcagttcttgaggaaagttagcgaggagagggctgcttggcggagcagggagcatgagaaggtccgagcaattattgacgatatgaaaactgatatgaacagggagaagaaaacccgtcagagattagaaatcgtaaatcataaactagtcaacgagcttgcagattcaaagttagccgtgaagcgttacatgcaggactacgaaaaggaaaggaaagcaagagaattgattgaggaagtttgcgacgaacttgcaaaggaaataggagaagataaagctgagattgaagcattgaagagagaatccatgagcctcagagaagaagtggacgatgaaagaagaatgctacagatggctgaggtctggcgtgaggaacgtgtccagatgaagcttattgatgccaaagtagcactcgaggaaaggtactcacaaatgaacaagcttgtaggagatttggaatctttccttaggtcacgagatatcgtgacagatgtcaaagaggtgagagaagctgagttattaagagaaaccgcagcatcagttaatatccaagaaatcaaggaatttacgtatgtgcctgcaaacccggatgatatctacgcggtgtttgaagaaatgaatctcggtgaagcccatgatagagaaatggagaaatctgtcgcttacagtccaatcagccacgattctaaagttcacacggtaagtctagatgccaatatgatgaacaagaaagggagacactcagatgcttatactcaccagaatggagacattgaagaagatgatagcggttgggaaacagtgagccacctcgaagaacaaggatcgagttactcaccagatgggagcattccttctgtgaacaacaagaatcacaatcaccgacacagcaacgcctccagtggtggtacagagtccttaggcaaagtttgggatgatacaatgactccaaccacagagataagtgaagtgtgttccattccaagacggtcatccaaaaaggtttcatcaatagcaaagctttggagatcaacaggtgcaagcaatggagatagagatagcaactacaaggtaatatcaatggaaggtatgaatggaggaagggtttcaaatgggagaaagtcaagcgcgggaatggtttcaccagacagagtctcgagcaaaggcggatttagcccgatgatggatttggttggacaatggaactcttcaccggaatctgcaaatcatcctcatgtaaaccgaggaggaatgaaaggttgcatagaatggcctagaggtgcacagaagagtagtttgaagtcaaaactcattgaagcacgaatcgaaagccaaaaggttcagttaaagcatgtccttaaacagaggatttaggagccaaaccgtttttggtcacagctgaaccagatcttaatacccgggacactgcgtgcggttctctaatctttcaccggtttcagatgctgtatgatgtaataatgttccgggaaagcagtcgggaccagcaagcagcttagatcggggtttagatttatgtcattggtcattagcaattaagcaatgtgtactctaatatcattatctcattatggaagaaaaacctttagtagagtaagagacgctaatgttagagacttgttcatcaatttatataatatagttactagtttccg

SEQ ID NO: 46614 - protein, 725 aa, Arabidopsis thaliana
  peptide (1)..(725): Ceres Seq. ID no. 12600679
MKVTGKPYSTATLPAFESDKNLFSHGPDLRAIQRATTVTKRRARNPSLTRQRRSGPSGGRRSRPETPLLKWKVEDRNKERSGVVEDDDYEDDNHQVARSETTRRKDRRKIARPVSVRKLAAGLWRLQVPDASSSGGERKGKEGLGFQGNGGYMGVPYLYHHSDKPSGGQSNKIRQNPSTIATTKNGFLCKLEPSMPFPHSAMEGATKWDPVCLDTMEEVHQIYSNMKRIDQQVNAVSLVSSLEAELEEAHARIEDLESEKRSHKKKLEQFLRKVSEERAAWRSREHEKVRAIIDDMKTDMNREKKTRQRLEIVNHKLVNELADSKLAVKRYMQDYEKERKARELIEEVCDELAKEIGEDKAEIEALKRESMSLREEVDDERRMLQMAEVWREERVQMKLIDAKVALEERYSQMNKLVGDLESFLRSRDIVTDVKEVREAELLRETAASVNIQEIKEFTYVPANPDDIYAVFEEMNLGEAHDREMEKSVAYSPISHDSKVHTVSLDANMMNKKGRHSDAYTHQNGDIEEDDSGWETVSHLEEQGSSYSPDGSIPSVNNKNHNHRHSNASSGGTESLGKVWDDTMTPTTEISEVCSIPRRSSKKVSSIAKLWRSTGASNGDRDSNYKVISMEGMNGGRVSNGRKSSAGMVSPDRVSSKGGFSPMMDLVGQWNSSPESANHPHVNRGGMKGCIEWPRGAQKSSLKSKLIEARIESQKVQLKHVLKQRI

SEQ ID NO: 46615 - protein, 573 aa, Arabidopsis thaliana
  peptide (1)..(573): Ceres Seq. ID no. 12600680
MGVPYLYHHSDKPSGGQSNKIRQNPSTIATTKNGFLCKLEPSMPFPHSAMEGATKWDPVCLDTMEEVHQIYSNMKRIDQQVNAVSLVSSLEAELEEAHARIEDLESEKRSHKKKLEQFLRKVSEERAAWRSREHEKVRAIIDDMKTDMNREKKTRQRLEIVNHKLVNELADSKLAVKRYMQDYEKERKARELIEEVCDELAKEIGEDKAEIEALKRESMSLREEVDDERRMLQMAEVWREERVQMKLIDAKVALEERYSQMNKLVGDLESFLRSRDIVTDVKEVREAELLRETAASVNIQEIKEFTYVPANPDDIYAVFEEMNLGEAHDREMEKSVAYSPISHDSKVHTVSLDANMMNKKGRHSDAYTHQNGDIEEDDSGWETVSHLEEQGSSYSPDGSIPSVNNKNHNHRHSNASSGGTESLGKVWDDTMTPTTEISEVCSIPRRSSKKVSSIAKLWRSTGASNGDRDSNYKVISMEGMNGGRVSNGRKSSAGMVSPDRVSSKGGFSPMMDLVGQWNSSPESANHPHVNRGGMKGCIEWPRGAQKSSLKSKLIEARIESQKVQLKHVLKQRI

SEQ ID NO: 46616 - protein, 531 aa, Arabidopsis thaliana
  peptide (1)..(531): Ceres Seq. ID no. 12600681
MPFPHSAMEGATKWDPVCLDTMEEVHQIYSNMKRIDQQVNAVSLVSSLEAELEEAHARIEDLESEKRSHKKKLEQFLRKVSEERAAWRSREHEKVRAIIDDMKTDMNREKKTRQRLEIVNHKLVNELADSKLAVKRYMQDYEKERKARELIEEVCDELAKEIGEDKAEIEALKRESMSLREEVDDERRMLQMAEVWREERVQMKLIDAKVALEERYSQMNKLVGDLESFLRSRDIVTDVKEVREAELLRETAASVNIQEIKEFTYVPANPDDIYAVFEEMNLGEAHDREMEKSVAYSPISHDSKVHTVSLDANMMNKKGRHSDAYTHQNGDIEEDDSGWETVSHLEEQGSSYSPDGSIPSVNNKNHNHRHSNASSGGTESLGKVWDDTMTPTTEISEVCSIPRRSSKKVSSIAKLWRSTGASNGDRDSNYKVISMEGMNGGRVSNGRKSSAGMVSPDRVSSKGGFSPMMDLVGQWNSSPESANHPHVNRGGMKGCIEWPRGAQKSSLKSKLIEARIESQKVQLKHVLKQRI

SEQ ID NO: 46617 - DNA, 3307 bp, Arabidopsis thaliana
  misc_feature (1)..(3307): Ceres Seq. ID no. 15175961
  misc_feature (1)..(3307): Ortholog of  Ceres SEQ ID NO 15178310 as cited in SEQ ID NO 1089
  misc_feature (1)..(3307): Ortholog of  Ceres SEQ ID NO 14303173 as cited in SEQ ID NO 66550
aaaaaacttaactccattctctttttctctctctcttctatctttcaccaaaatgccataactctctcttcccctatataccaaaaattaatctgtatctctctatccatcaagagagagcatcacaatgggcaaacagagaagaaccatgatctcatttactctgtttctcacattgacaatgatgtcatcactcatcaatggcgatatcgactcaatccaactaaacgacgacgttttaggactaatcgtcttcaaatcagacctcaacgacccattttcacaccttgagtcatggaccgaagacgacaacactccttgttcatggagctacgtcaaatgcaaccccaaaacatctcgagtcatcgagctttctctcgacggtttagccttaaccggaaaaatcaaccgcggaatccaaaagcttcaacgtttaaaagtactctcactttccaacaacaacttcaccggaaacatcaacgctctctcaaacaacaaccatctccaaaagctagatcttagccacaacaatctctccggtcaaatcccatcttctctcggttcaataacctccttgcaacaccttgacttaaccggaaactccttctccggtacactctctgacgatttcttcaacaactgttcctctcttagatatctttctctctcccacaaccacctcgaaggtcaaatcccaagtactctgtttcaatgctctgttttaaacagtctcaatctttcaagaaaccgtttctccggtaaccctagtttcgtctcaggaatctggagacttgagaggttaagagctttagatctatcttctaactcactttctggttcaatacctttggggatactctctctacataacttgaaagagttgcaactacagaggaatcagttctctggagcattgccttcagatattggactctgtcctcatttaaacagagttgatctaagttccaatcatttctctggtgaacttccaagaactcttcagaagctgaaatctttaaatcacttcgatgtatcgaacaatttgctctccggtgatttcccgccatggatcggtgacatgaccggtttagtacacttggatttctccagcaatgagttaaccggaaagcttccttcttctattagtaacttgaggtctctaaatgatctaatcttgtctgagaacaaactctccggcgaggtaccggaatctttggaatcatgcaaagagcttatgattgttcagctcaaaggcaatgacttctccggtaacattcctgatggtttgtttgatcttggtcttcaagaaatggatttttcgggtaacggtttaaccggttcgatcccgagaggctcaattaggcttttcgagtcactcataaggctcgatctttcgcgtaacagtctcactggaagtatacctggtgaagtaggactcttcatccacatgagataccttaatttgtcatggaaccatttcaacacaagagttcctcctgaaattgagtttctacagaatttaacggtattggatcttaggaacagtgcactgattggttcggttcctgctgatatatgtgagtctcagagtcttcagatacttcaactggatggtaactcactaaccggttctataccggaaggaatcggaaactgctcttctcttaaattgttgagtttgtctcataacaatcttaccggtcctattcctaaatctctttcaaacttacaagagctcaagattcttaagctagaggctaataatcttagtggagaaataccgaaagagcttggggatttgcagaatctgttattggttaacgtttcgtttaaccgacttatcggaaggttaccatttggagaagtgttccaaagcttagaccagagtgctattcaaggaaacctaggtatttgttcaccgttgttgagaggtccttgcacactaaatgtcccaaagcctcttgtcatcaatccaaactcctacgggaatgggaacaatatgcacggaaacagagctagcagtggttctggaacattccaccgtagaatgttcctgagtgtttcagtgattgtagcaatatcagctgcgattctcatcttctctggagttataattataacgctgcttaacgcgtctgtgagaagacggcttgcatttgtagacaatgcgttggaaagcattttctcggggtcttcgaaatcaggaagaagcttaatgatgggtaaacttgttctgttaaactcaagaacttcacgttcctcgtcttcgtctcaagagttcgaaagaaacccggagtcacttctcaacaaagcttcaagaatcggtgaaggggtttttggaacagtctacaaggcacctttaggagaacaggggagaaacttggctgttaagaaacttgtcccgtcgccgattcttcaaaacctagaagattttgatcgcgaagttcggatattggcgaaagcgaagcaccctaatctagtatcgatcaaagggtatttctggacaccggagttgcatcttctggtgtcagaatacatccccaacggaaacttgcagtccaagttacacaaacgagaaccctcaacaccgcctctttcttgggacgtaagatacagaatcatcctcggtacagccaaaggactcgcttatctccaccacacattccgtccaacaaccatccacttcaacctgaaaccgacaaacatcctcctcgacgagaaaaacaacccgaaaatctctgatttcgggctatctcgtctcctaacaacacaagacgggaacacaatgaacaacaacaggtttcaaaacgctttaggctacgtagcgcctgaactagagtgtcagaacttaagggtcaacgagaaatgcgatgtgtacgggttcggggttttgatactcgaactggtgactggtcggagaccggtggagtatggtgaagacagctttgtgatacttagtgaccatgttcgagttatgttagaacaagggaatgtgttggagtgtattgatccagtgatggaggaacaatactctgaagatgaggttttgcctgtcttgaaacttgctctggtctgtacttctcagataccttcgaatcggccaacaatggccgagattgttcagatcttgcaggtcatcaattctcctgttccccaccgaatcatggatagtttctaaacatctttgtgttatagttaatttttcattagcttttctttttgcaaatgttactttgtctgtgtcctttgttgtggtctttgtgtagagattgcttatttcacaatgctacgctttctattccttcgt

SEQ ID NO: 46618 - protein, 1016 aa, Arabidopsis thaliana
  peptide (1)..(1016): Ceres Seq. ID no. 15175962
MGKQRRTMISFTLFLTLTMMSSLINGDIDSIQLNDDVLGLIVFKSDLNDPFSHLESWTEDDNTPCSWSYVKCNPKTSRVIELSLDGLALTGKINRGIQKLQRLKVLSLSNNNFTGNINALSNNNHLQKLDLSHNNLSGQIPSSLGSITSLQHLDLTGNSFSGTLSDDFFNNCSSLRYLSLSHNHLEGQIPSTLFQCSVLNSLNLSRNRFSGNPSFVSGIWRLERLRALDLSSNSLSGSIPLGILSLHNLKELQLQRNQFSGALPSDIGLCPHLNRVDLSSNHFSGELPRTLQKLKSLNHFDVSNNLLSGDFPPWIGDMTGLVHLDFSSNELTGKLPSSISNLRSLNDLILSENKLSGEVPESLESCKELMIVQLKGNDFSGNIPDGLFDLGLQEMDFSGNGLTGSIPRGSIRLFESLIRLDLSRNSLTGSIPGEVGLFIHMRYLNLSWNHFNTRVPPEIEFLQNLTVLDLRNSALIGSVPADICESQSLQILQLDGNSLTGSIPEGIGNCSSLKLLSLSHNNLTGPIPKSLSNLQELKILKLEANNLSGEIPKELGDLQNLLLVNVSFNRLIGRLPFGEVFQSLDQSAIQGNLGICSPLLRGPCTLNVPKPLVINPNSYGNGNNMHGNRASSGSGTFHRRMFLSVSVIVAISAAILIFSGVIIITLLNASVRRRLAFVDNALESIFSGSSKSGRSLMMGKLVLLNSRTSRSSSSSQEFERNPESLLNKASRIGEGVFGTVYKAPLGEQGRNLAVKKLVPSPILQNLEDFDREVRILAKAKHPNLVSIKGYFWTPELHLLVSEYIPNGNLQSKLHKREPSTPPLSWDVRYRIILGTAKGLAYLHHTFRPTTIHFNLKPTNILLDEKNNPKISDFGLSRLLTTQDGNTMNNNRFQNALGYVAPELECQNLRVNEKCDVYGFGVLILELVTGRRPVEYGEDSFVILSDHVRVMLEQGNVLECIDPVMEEQYSEDEVLPVLKLALVCTSQIPSNRPTMAEIVQILQVINSPVPHRIMDSF

SEQ ID NO: 46619 - protein, 1009 aa, Arabidopsis thaliana
  peptide (1)..(1009): Ceres Seq. ID no. 15175963
MISFTLFLTLTMMSSLINGDIDSIQLNDDVLGLIVFKSDLNDPFSHLESWTEDDNTPCSWSYVKCNPKTSRVIELSLDGLALTGKINRGIQKLQRLKVLSLSNNNFTGNINALSNNNHLQKLDLSHNNLSGQIPSSLGSITSLQHLDLTGNSFSGTLSDDFFNNCSSLRYLSLSHNHLEGQIPSTLFQCSVLNSLNLSRNRFSGNPSFVSGIWRLERLRALDLSSNSLSGSIPLGILSLHNLKELQLQRNQFSGALPSDIGLCPHLNRVDLSSNHFSGELPRTLQKLKSLNHFDVSNNLLSGDFPPWIGDMTGLVHLDFSSNELTGKLPSSISNLRSLNDLILSENKLSGEVPESLESCKELMIVQLKGNDFSGNIPDGLFDLGLQEMDFSGNGLTGSIPRGSIRLFESLIRLDLSRNSLTGSIPGEVGLFIHMRYLNLSWNHFNTRVPPEIEFLQNLTVLDLRNSALIGSVPADICESQSLQILQLDGNSLTGSIPEGIGNCSSLKLLSLSHNNLTGPIPKSLSNLQELKILKLEANNLSGEIPKELGDLQNLLLVNVSFNRLIGRLPFGEVFQSLDQSAIQGNLGICSPLLRGPCTLNVPKPLVINPNSYGNGNNMHGNRASSGSGTFHRRMFLSVSVIVAISAAILIFSGVIIITLLNASVRRRLAFVDNALESIFSGSSKSGRSLMMGKLVLLNSRTSRSSSSSQEFERNPESLLNKASRIGEGVFGTVYKAPLGEQGRNLAVKKLVPSPILQNLEDFDREVRILAKAKHPNLVSIKGYFWTPELHLLVSEYIPNGNLQSKLHKREPSTPPLSWDVRYRIILGTAKGLAYLHHTFRPTTIHFNLKPTNILLDEKNNPKISDFGLSRLLTTQDGNTMNNNRFQNALGYVAPELECQNLRVNEKCDVYGFGVLILELVTGRRPVEYGEDSFVILSDHVRVMLEQGNVLECIDPVMEEQYSEDEVLPVLKLALVCTSQIPSNRPTMAEIVQILQVINSPVPHRIMDSF

SEQ ID NO: 46620 - protein, 998 aa, Arabidopsis thaliana
  peptide (1)..(998): Ceres Seq. ID no. 15175964
MMSSLINGDIDSIQLNDDVLGLIVFKSDLNDPFSHLESWTEDDNTPCSWSYVKCNPKTSRVIELSLDGLALTGKINRGIQKLQRLKVLSLSNNNFTGNINALSNNNHLQKLDLSHNNLSGQIPSSLGSITSLQHLDLTGNSFSGTLSDDFFNNCSSLRYLSLSHNHLEGQIPSTLFQCSVLNSLNLSRNRFSGNPSFVSGIWRLERLRALDLSSNSLSGSIPLGILSLHNLKELQLQRNQFSGALPSDIGLCPHLNRVDLSSNHFSGELPRTLQKLKSLNHFDVSNNLLSGDFPPWIGDMTGLVHLDFSSNELTGKLPSSISNLRSLNDLILSENKLSGEVPESLESCKELMIVQLKGNDFSGNIPDGLFDLGLQEMDFSGNGLTGSIPRGSIRLFESLIRLDLSRNSLTGSIPGEVGLFIHMRYLNLSWNHFNTRVPPEIEFLQNLTVLDLRNSALIGSVPADICESQSLQILQLDGNSLTGSIPEGIGNCSSLKLLSLSHNNLTGPIPKSLSNLQELKILKLEANNLSGEIPKELGDLQNLLLVNVSFNRLIGRLPFGEVFQSLDQSAIQGNLGICSPLLRGPCTLNVPKPLVINPNSYGNGNNMHGNRASSGSGTFHRRMFLSVSVIVAISAAILIFSGVIIITLLNASVRRRLAFVDNALESIFSGSSKSGRSLMMGKLVLLNSRTSRSSSSSQEFERNPESLLNKASRIGEGVFGTVYKAPLGEQGRNLAVKKLVPSPILQNLEDFDREVRILAKAKHPNLVSIKGYFWTPELHLLVSEYIPNGNLQSKLHKREPSTPPLSWDVRYRIILGTAKGLAYLHHTFRPTTIHFNLKPTNILLDEKNNPKISDFGLSRLLTTQDGNTMNNNRFQNALGYVAPELECQNLRVNEKCDVYGFGVLILELVTGRRPVEYGEDSFVILSDHVRVMLEQGNVLECIDPVMEEQYSEDEVLPVLKLALVCTSQIPSNRPTMAEIVQILQVINSPVPHRIMDSF

SEQ ID NO: 46621 - DNA, 2847 bp, Arabidopsis thaliana
  misc_feature (1)..(2847): Ceres Seq. ID no. 12574622
  misc_feature (1)..(2847): Ortholog of  Ceres SEQ ID NO 13646569 as cited in SEQ ID NO 20745
atggcgactgaattctcgtgggatgaaatcaagaaagaaaatgtggaccttgagcggatccctgtggaagaagtgtttgagcagctgaaatgctcaaaagaaggtttgtccagcgatgaaggtgctaaaaggcttgaaatatttggggcaaacaagcttgaagagaaatcagagaacaagtttttgaaattcttggggttcatgtggaatcctctctcatgggttatggagtctgctgcaatcatggctattgttttagctaatggaggaggaaaggcgccggattggcaagattttatcggtattatggtgttgcttatcatcaactccaccataagtttcatcgaggagaacaatgctggcaatgccgctgctgctctcatggcaaatcttgcaccaaagactaaggtgttgagagatggtaaatggggggagcaagaggcttcaatcttggttccgggtgatttgataagcatcaaattgggtgacattgttcctgctgatgctcgtctcctcgaaggagatcctttaaaaattgaccaatctgctcttactggtgaatcccttccaaccaccaaacacccaggagatgaagtattctctggctcaacctgcaagcaaggtgagattgaggctgttgtcattgccacgggtgtccacaccttttttggcaaggctgctcatcttgttgacagtaccaacaatgttggccatttccaaaaggttttgacatcaattggtaacttctgtatatgctcaattggattggggatgttgattgagatattgattatgtaccctatccaacaccgcacatacagagatggtattgataatctattggtgcttttgatcggaggaatcccaatcgccatgccaacagttttgtctgtaacaatggctattggatcacatagactctctcaacaaggtgccatcaccaagaggatgactgcaattgaagaaatggctggaatggatgttctctgcagtgataagactggaactctaacccttaacaagctctctgtcgacaagtccttaattgaagtgttcccaaagaacatggatagtgactcagttgtattgatggctgcaagagcttccaggattgaaaaccaagatgccattgatgcttccatcgtcggaatgttgggtgatcctaaagaggcaagagcaggaatcacagaggtgcatttcttgccctttaaccctgtagataaacgtacagcgatcacatacatcgatgaaagcggagactggcatcggagcagtaaaggagctcctgagcagatcattgaactctgcaatctccaaggagagactaaaagaaaagcacacgaagttatcgatggttttgctgaacgtgggcttcgttctcttggtgttgctcaacagactgtgcctgagaagactaaggaaagtgatggtagtccatgggagttcgttggtctgttgccactctttgaccccccaagacatgacagtgcggaaactattagacgagcccttgagcttggtgtcaatgttaagatgattaccggtgaccaacttgccatcggtattgagactggtcgtaggcttggcatgggaaccaacatgtacccatccacttcactccttggcaattcaaaggatgaatcattagttggcatccctatcgatgagctcattgagaaagctgatggatttgctggagtcttccctgagcacaagtatgagatcgtaaagaagctacaagagaggaagcacatttgtgggatgactggagatggtgtaaacgatgctccagctttgaagaaagcggatattggaattgcagtggcagatgctactgatgcggcaagaagcgcctcagacattgttctaacagaaccaggactaagcgtgataataagtgccgtattgacaagtcgcgctatcttccagaggatgaagaactacacaatctacgctgtttccatcactatccgtattgttttgggattcatgcttgttgctttaatctggagatttgatttcgcacctttcatggtcttgattatcgcaatcctaaatgatggaaccatcatgactatctctaaggacagggttaaaccttccccggtgccagattcttggaagctcaatgagattttcgccactggcgttgttctaggaacctacatggctcttaccactgtactctttttctggctagctcatgacacagacttcttcagcaaaacatttggagttaggtccatacaagggaacgaagaagaacttatggcagctttgtatcttcaagtgagcatcataagtcaagcacttatctttgtaaccagatcaaggagctggtcatttgttgaacgacctgggtttttgctcctaatagcctttgttatagcacaattggtggctacattgatcgctgtgtatgcaaactggggattcgcaagaatcgtcggttgtggatggggatgggctggaggtatatgggtatacagtatcattacctacattcctcttgatattctcaagttcatcatccgttacgctctcactggcaaggcttgggataacatgatcaaccagaaaactgcgttcacaactaagaaagattatggaaaaggagagagggaggctcagtgggcactagctcaacgtacactccatggtctaccacctccagaagcaatgttcaacgacaataagaacgagctctctgaaatagcagagcaggccaaaaggcgtgccgaagttgcgaggctgagagagcttcacactctaaagggtcacgttgaatctgtagtgaagctcaaggggcttgacattgataccattcaacaacactacactgtttaa

SEQ ID NO: 46622 - protein, 948 aa, Arabidopsis thaliana
  peptide (1)..(948): Ceres Seq. ID no. 12574623
MATEFSWDEIKKENVDLERIPVEEVFEQLKCSKEGLSSDEGAKRLEIFGANKLEEKSENKFLKFLGFMWNPLSWVMESAAIMAIVLANGGGKAPDWQDFIGIMVLLIINSTISFIEENNAGNAAAALMANLAPKTKVLRDGKWGEQEASILVPGDLISIKLGDIVPADARLLEGDPLKIDQSALTGESLPTTKHPGDEVFSGSTCKQGEIEAVVIATGVHTFFGKAAHLVDSTNNVGHFQKVLTSIGNFCICSIGLGMLIEILIMYPIQHRTYRDGIDNLLVLLIGGIPIAMPTVLSVTMAIGSHRLSQQGAITKRMTAIEEMAGMDVLCSDKTGTLTLNKLSVDKSLIEVFPKNMDSDSVVLMAARASRIENQDAIDASIVGMLGDPKEARAGITEVHFLPFNPVDKRTAITYIDESGDWHRSSKGAPEQIIELCNLQGETKRKAHEVIDGFAERGLRSLGVAQQTVPEKTKESDGSPWEFVGLLPLFDPPRHDSAETIRRALELGVNVKMITGDQLAIGIETGRRLGMGTNMYPSTSLLGNSKDESLVGIPIDELIEKADGFAGVFPEHKYEIVKKLQERKHICGMTGDGVNDAPALKKADIGIAVADATDAARSASDIVLTEPGLSVIISAVLTSRAIFQRMKNYTIYAVSITIRIVLGFMLVALIWRFDFAPFMVLIIAILNDGTIMTISKDRVKPSPVPDSWKLNEIFATGVVLGTYMALTTVLFFWLAHDTDFFSKTFGVRSIQGNEEELMAALYLQVSIISQALIFVTRSRSWSFVERPGFLLLIAFVIAQLVATLIAVYANWGFARIVGCGWGWAGGIWVYSIITYIPLDILKFIIRYALTGKAWDNMINQKTAFTTKKDYGKGEREAQWALAQRTLHGLPPPEAMFNDNKNELSEIAEQAKRRAEVARLRELHTLKGHVESVVKLKGLDIDTIQQHYTV

SEQ ID NO: 46623 - protein, 881 aa, Arabidopsis thaliana
  peptide (1)..(881): Ceres Seq. ID no. 12574624
MWNPLSWVMESAAIMAIVLANGGGKAPDWQDFIGIMVLLIINSTISFIEENNAGNAAAALMANLAPKTKVLRDGKWGEQEASILVPGDLISIKLGDIVPADARLLEGDPLKIDQSALTGESLPTTKHPGDEVFSGSTCKQGEIEAVVIATGVHTFFGKAAHLVDSTNNVGHFQKVLTSIGNFCICSIGLGMLIEILIMYPIQHRTYRDGIDNLLVLLIGGIPIAMPTVLSVTMAIGSHRLSQQGAITKRMTAIEEMAGMDVLCSDKTGTLTLNKLSVDKSLIEVFPKNMDSDSVVLMAARASRIENQDAIDASIVGMLGDPKEARAGITEVHFLPFNPVDKRTAITYIDESGDWHRSSKGAPEQIIELCNLQGETKRKAHEVIDGFAERGLRSLGVAQQTVPEKTKESDGSPWEFVGLLPLFDPPRHDSAETIRRALELGVNVKMITGDQLAIGIETGRRLGMGTNMYPSTSLLGNSKDESLVGIPIDELIEKADGFAGVFPEHKYEIVKKLQERKHICGMTGDGVNDAPALKKADIGIAVADATDAARSASDIVLTEPGLSVIISAVLTSRAIFQRMKNYTIYAVSITIRIVLGFMLVALIWRFDFAPFMVLIIAILNDGTIMTISKDRVKPSPVPDSWKLNEIFATGVVLGTYMALTTVLFFWLAHDTDFFSKTFGVRSIQGNEEELMAALYLQVSIISQALIFVTRSRSWSFVERPGFLLLIAFVIAQLVATLIAVYANWGFARIVGCGWGWAGGIWVYSIITYIPLDILKFIIRYALTGKAWDNMINQKTAFTTKKDYGKGEREAQWALAQRTLHGLPPPEAMFNDNKNELSEIAEQAKRRAEVARLRELHTLKGHVESVVKLKGLDIDTIQQHYTV

SEQ ID NO: 46624 - protein, 873 aa, Arabidopsis thaliana
  peptide (1)..(873): Ceres Seq. ID no. 12574625
MESAAIMAIVLANGGGKAPDWQDFIGIMVLLIINSTISFIEENNAGNAAAALMANLAPKTKVLRDGKWGEQEASILVPGDLISIKLGDIVPADARLLEGDPLKIDQSALTGESLPTTKHPGDEVFSGSTCKQGEIEAVVIATGVHTFFGKAAHLVDSTNNVGHFQKVLTSIGNFCICSIGLGMLIEILIMYPIQHRTYRDGIDNLLVLLIGGIPIAMPTVLSVTMAIGSHRLSQQGAITKRMTAIEEMAGMDVLCSDKTGTLTLNKLSVDKSLIEVFPKNMDSDSVVLMAARASRIENQDAIDASIVGMLGDPKEARAGITEVHFLPFNPVDKRTAITYIDESGDWHRSSKGAPEQIIELCNLQGETKRKAHEVIDGFAERGLRSLGVAQQTVPEKTKESDGSPWEFVGLLPLFDPPRHDSAETIRRALELGVNVKMITGDQLAIGIETGRRLGMGTNMYPSTSLLGNSKDESLVGIPIDELIEKADGFAGVFPEHKYEIVKKLQERKHICGMTGDGVNDAPALKKADIGIAVADATDAARSASDIVLTEPGLSVIISAVLTSRAIFQRMKNYTIYAVSITIRIVLGFMLVALIWRFDFAPFMVLIIAILNDGTIMTISKDRVKPSPVPDSWKLNEIFATGVVLGTYMALTTVLFFWLAHDTDFFSKTFGVRSIQGNEEELMAALYLQVSIISQALIFVTRSRSWSFVERPGFLLLIAFVIAQLVATLIAVYANWGFARIVGCGWGWAGGIWVYSIITYIPLDILKFIIRYALTGKAWDNMINQKTAFTTKKDYGKGEREAQWALAQRTLHGLPPPEAMFNDNKNELSEIAEQAKRRAEVARLRELHTLKGHVESVVKLKGLDIDTIQQHYTV

SEQ ID NO: 46625 - DNA, 1207 bp, Arabidopsis thaliana
  misc_feature (1)..(1207): Ceres Seq. ID no. 13592036
  misc_feature (1)..(1207): Ortholog of  Ceres SEQ ID NO 14310419 as cited in SEQ ID NO 55050
  misc_feature (1)..(1207): Ortholog of  Ceres SEQ ID NO 13657789 as cited in SEQ ID NO 66154
ctctccaccgtcggctcagatctagacggaaatgtgccggtgaaatcgaatcatgaaaagatctcacatttcgtctcctcgttcttattcacgaccagcgatttcaatcttcggtgtcttcctcttgtttcttctggttttaacactaagctctcgaaaaccatcagattcatcctccggtttagctccaaatcgaaacttagccacaaaatcgacgattccgaggtttgcgtatttggtaacgggaacgaaaggagatgggaaacgagtgaagcggctgcttaaagcaatacatcatccgagaaattactatctgcttcatttggatctcgaagcttcagatgaagagagaatggagctggcgaagtatgtgagatcggagaagaagaagtttgagaatgttatggtaatgggtttagctgatttggttacggagaaaggtccaacgatgttagctagtacgcttcatggtgttgccattttgttgaagaaagctaaggattgggattggtttattaatcttagtgcttctgattatcctttaatgcctcaagatgatattttgcatatattctcatacttgccacgctacctgaactttatcgagcacacaagcaacatcggttggaaagagaaccaaagagcaaggcctatcattattgatcctggtttttaccatttgaagaaatctggtgtcttttgggctaaagaacggagatctttgcctgcttcattcaaacttttcatgggttcaaccagcgttgctttaacaagaccgttcctcgagttttgcatttggggatgggataatctcccaagaacgctattgatgtactataccaacttcctcttgtcatctgaaggctactttcagacagttgtgtgcaacaataaagattatcagaacacaacggttaaccacgacctgcattacacaaaatgggatccgcttcaacagcgcaccctgaatgtaacggttgagaatttccgcgatatggtccaaagcggggctccattcgcaagggagtttcgagaggatgatcttgtactcgataagattgacattgagctactaggtcaaaccgatactggattggagttgaagactccggatgttgttaaaccaacggttagttggaagaggcttgagaagctcatggttaggcttcttgatcatgagaatttcagggctaagcaatgtaaataa

SEQ ID NO: 46626 - protein, 384 aa, Arabidopsis thaliana
  peptide (1)..(384): Ceres Seq. ID no. 13592037
MKRSHISSPRSYSRPAISIFGVFLLFLLVLTLSSRKPSDSSSGLAPNRNLATKSTIPRFAYLVTGTKGDGKRVKRLLKAIHHPRNYYLLHLDLEASDEERMELAKYVRSEKKKFENVMVMGLADLVTEKGPTMLASTLHGVAILLKKAKDWDWFINLSASDYPLMPQDDILHIFSYLPRYLNFIEHTSNIGWKENQRARPIIIDPGFYHLKKSGVFWAKERRSLPASFKLFMGSTSVALTRPFLEFCIWGWDNLPRTLLMYYTNFLLSSEGYFQTVVCNNKDYQNTTVNHDLHYTKWDPLQQRTLNVTVENFRDMVQSGAPFAREFREDDLVLDKIDIELLGQTDTGLELKTPDVVKPTVSWKRLEKLMVRLLDHENFRAKQCK

SEQ ID NO: 46627 - protein, 284 aa, Arabidopsis thaliana
  peptide (1)..(284): Ceres Seq. ID no. 13592038
MELAKYVRSEKKKFENVMVMGLADLVTEKGPTMLASTLHGVAILLKKAKDWDWFINLSASDYPLMPQDDILHIFSYLPRYLNFIEHTSNIGWKENQRARPIIIDPGFYHLKKSGVFWAKERRSLPASFKLFMGSTSVALTRPFLEFCIWGWDNLPRTLLMYYTNFLLSSEGYFQTVVCNNKDYQNTTVNHDLHYTKWDPLQQRTLNVTVENFRDMVQSGAPFAREFREDDLVLDKIDIELLGQTDTGLELKTPDVVKPTVSWKRLEKLMVRLLDHENFRAKQCK

SEQ ID NO: 46628 - protein, 267 aa, Arabidopsis thaliana
  peptide (1)..(267): Ceres Seq. ID no. 13592039
MVMGLADLVTEKGPTMLASTLHGVAILLKKAKDWDWFINLSASDYPLMPQDDILHIFSYLPRYLNFIEHTSNIGWKENQRARPIIIDPGFYHLKKSGVFWAKERRSLPASFKLFMGSTSVALTRPFLEFCIWGWDNLPRTLLMYYTNFLLSSEGYFQTVVCNNKDYQNTTVNHDLHYTKWDPLQQRTLNVTVENFRDMVQSGAPFAREFREDDLVLDKIDIELLGQTDTGLELKTPDVVKPTVSWKRLEKLMVRLLDHENFRAKQCK

SEQ ID NO: 46629 - DNA, 2915 bp, Arabidopsis thaliana
  misc_feature (1)..(2915): Ceres Seq. ID no. 12601711
  misc_feature (1)..(2915): Ortholog of  Ceres SEQ ID NO 13595870 as cited in SEQ ID NO 62101
  misc_feature (1)..(2915): Ortholog of  Ceres SEQ ID NO 13590241 as cited in SEQ ID NO 63878
  misc_feature (1)..(2915): Ortholog of  Ceres SEQ ID NO 13657939 as cited in SEQ ID NO 66349
aaaccggttgaaataatccacggaacaacaacatatgttggagtctggaacgcgttgatgtcttggttcccaagcagctcaaaagtgtgacataaattgttgtcctcaacaaacaccataaaaatcacaaatttcgttctgggctctttatttttttcaatcaccacattttcacttgttaaaattttgttactttgctctatctgaaaccaaagctgccatctttctccttttgggttttgattagatctccgattttgggtttctatatattatgcgagctcacttttgttcgttctgattatctgacaatgatattctccaagcttggttcttccctcgctcgatcctcacgttctaagggatttgtgtacggcggtggtgtgagatcggcggtatttaaccaagggaggttacgagcgccgcagaatctcgaggcggccgtcaatcaggtggatggtggattagggtttttgaggcggcactttgcttcttttgctgctcgaaagggactagaagccggtgatttaagccgtgctttcgctaaccctagattgcgtcggttcttttctagtcaaaccccaaagaagaagaattatgagaactactatccaaaagacagtaagaaagcacccaagaatgagcagaaatctgaatccagagatggttcaaagaaaaatgaaaacgaaaatgctggggacgcgttctcaaatgaatatcaaaatatgttaattcctcttatggccattgctttaatcctttctactttctctcttggttcccgagaacagcaacagattagtttccaggagttcaaaaacaagctcctcgaggctggtttagtggatcacatagatgtttccaataaagaagtcgcaaaagtctatgtgaggagttcaccaaaaagccaaacaacggaagaagttgttcaaggtcctggtaatggagttcctgctaaaggacgtggtggtcagtataagtactactttaatattggtagtgttgaatcatttgaggagaaactagaagaggcccaagaagctataggcgttaattctcatgactttgttcctgtcacctacgtcagtgaaactatctggtaccaggaactattgagatttgcaccgactttacttctcgtggctacgctaatttttggggcaagacggatgcaaggtggactgggaggtttaggcggacctggtgggaaggctggccgtggaattttcaatatagggaaagctcaaataacgagagcagataaaaactccaagaataagatatattttaaagatgttgcgggatgcgaggaggctaaacaagaaattatggaatttgtgcatttccttcagaacccaaagaaatatgaagatttgggagctaaaatcccaaaaggtgcgcttttagttggcccacccgggactggaaagacccttctagcaaaagctactgcaggagaatcagctgtaccgtttctctcaatatctggttcagatttcatggagatgtttgttggtgttggaccttccagagtgagaaacttgtttcaagaggctagacagtgtgcacctagcataatatttattgatgagatcgatgcgattggccgtgcgaggggacgtggaggtttctctggtggaaatgatgagcgtgaaagcacacttaatcaactgctagttgaaatggatggatttggtactaccgctggagttgtcgtccttgctgggactaacaggccagatattcttgataaagctttattacggcctggccggtttgatcgccagataaccatagataaacctgatattaaaggccgtgatcagatattccagatatacctgaagaagatcaaacttgatcacgagccctcatattactcacaaaggcttgcagccctcactcccggatttgctggagctgacattgcgaatgtctgtaacgaggcggctcttattgctgccagacatgaaggagcaacagttacaatggcgcactttgactctgcaatcgatcgtgttattggtggtctggagaagaaaaaccgggtaataagcaagctggagcgccgtacagttgcatatcatgaatctggccatgcggttgctgggtggttcctggaacatgcggaaccgttgctaaaggtgactattgttcctcgtggcacagcagcgctcggatttgcccagtatgttccaaatgaaaacttgctcatgacaaaagaacaactctttgatatgacttgcatgactctcgggggccgggcagctgaacaggtattgattggaagaatatccactggggctcagaacgatctggaaaaggtgactaagatgacttatgcgcaagtggcagtgtacggattcagcgacaagataggattgctttcattcccacaacgggaagacgagttctccaagccgtacagcaacagaaccggtgcgatgatagatgaagaggtccgagaatgggtggggaaagcttacaagcggacggttgagctgatagaggaacacaaagagcaagtggctcagatcgctgagctcttgctagagaaggaggttttgcatcaggatgatctcactaaagtattgggcgagcgtccgtttaagtcgggtgagacaacgaattacgacaggtttaaatctggatttgaagagtcggagaaggagagccagaaggagtctgtgccggtgaagcctgtggaggatgatggaattccgcctcttgagccacaggtagttccgacgtagctgttggagacacccaaaggttactactactcattgtacatttaatccaaggcaataacaaaacacgcttctgtatctttctgttttagcacggagggattgattgttctttctggaaaagtaacaaagttttcactttatatataaaatctatctttttcc

SEQ ID NO: 46630 - protein, 813 aa, Arabidopsis thaliana
  peptide (1)..(813): Ceres Seq. ID no. 12601712
MIFSKLGSSLARSSRSKGFVYGGGVRSAVFNQGRLRAPQNLEAAVNQVDGGLGFLRRHFASFAARKGLEAGDLSRAFANPRLRRFFSSQTPKKKNYENYYPKDSKKAPKNEQKSESRDGSKKNENENAGDAFSNEYQNMLIPLMAIALILSTFSLGSREQQQISFQEFKNKLLEAGLVDHIDVSNKEVAKVYVRSSPKSQTTEEVVQGPGNGVPAKGRGGQYKYYFNIGSVESFEEKLEEAQEAIGVNSHDFVPVTYVSETIWYQELLRFAPTLLLVATLIFGARRMQGGLGGLGGPGGKAGRGIFNIGKAQITRADKNSKNKIYFKDVAGCEEAKQEIMEFVHFLQNPKKYEDLGAKIPKGALLVGPPGTGKTLLAKATAGESAVPFLSISGSDFMEMFVGVGPSRVRNLFQEARQCAPSIIFIDEIDAIGRARGRGGFSGGNDERESTLNQLLVEMDGFGTTAGVVVLAGTNRPDILDKALLRPGRFDRQITIDKPDIKGRDQIFQIYLKKIKLDHEPSYYSQRLAALTPGFAGADIANVCNEAALIAARHEGATVTMAHFDSAIDRVIGGLEKKNRVISKLERRTVAYHESGHAVAGWFLEHAEPLLKVTIVPRGTAALGFAQYVPNENLLMTKEQLFDMTCMTLGGRAAEQVLIGRISTGAQNDLEKVTKMTYAQVAVYGFSDKIGLLSFPQREDEFSKPYSNRTGAMIDEEVREWVGKAYKRTVELIEEHKEQVAQIAELLLEKEVLHQDDLTKVLGERPFKSGETTNYDRFKSGFEESEKESQKESVPVKPVEDDGIPPLEPQVVPT

SEQ ID NO: 46631 - protein, 675 aa, Arabidopsis thaliana
  peptide (1)..(675): Ceres Seq. ID no. 12601713
MLIPLMAIALILSTFSLGSREQQQISFQEFKNKLLEAGLVDHIDVSNKEVAKVYVRSSPKSQTTEEVVQGPGNGVPAKGRGGQYKYYFNIGSVESFEEKLEEAQEAIGVNSHDFVPVTYVSETIWYQELLRFAPTLLLVATLIFGARRMQGGLGGLGGPGGKAGRGIFNIGKAQITRADKNSKNKIYFKDVAGCEEAKQEIMEFVHFLQNPKKYEDLGAKIPKGALLVGPPGTGKTLLAKATAGESAVPFLSISGSDFMEMFVGVGPSRVRNLFQEARQCAPSIIFIDEIDAIGRARGRGGFSGGNDERESTLNQLLVEMDGFGTTAGVVVLAGTNRPDILDKALLRPGRFDRQITIDKPDIKGRDQIFQIYLKKIKLDHEPSYYSQRLAALTPGFAGADIANVCNEAALIAARHEGATVTMAHFDSAIDRVIGGLEKKNRVISKLERRTVAYHESGHAVAGWFLEHAEPLLKVTIVPRGTAALGFAQYVPNENLLMTKEQLFDMTCMTLGGRAAEQVLIGRISTGAQNDLEKVTKMTYAQVAVYGFSDKIGLLSFPQREDEFSKPYSNRTGAMIDEEVREWVGKAYKRTVELIEEHKEQVAQIAELLLEKEVLHQDDLTKVLGERPFKSGETTNYDRFKSGFEESEKESQKESVPVKPVEDDGIPPLEPQVVPT

SEQ ID NO: 46632 - protein, 670 aa, Arabidopsis thaliana
  peptide (1)..(670): Ceres Seq. ID no. 12601714
MAIALILSTFSLGSREQQQISFQEFKNKLLEAGLVDHIDVSNKEVAKVYVRSSPKSQTTEEVVQGPGNGVPAKGRGGQYKYYFNIGSVESFEEKLEEAQEAIGVNSHDFVPVTYVSETIWYQELLRFAPTLLLVATLIFGARRMQGGLGGLGGPGGKAGRGIFNIGKAQITRADKNSKNKIYFKDVAGCEEAKQEIMEFVHFLQNPKKYEDLGAKIPKGALLVGPPGTGKTLLAKATAGESAVPFLSISGSDFMEMFVGVGPSRVRNLFQEARQCAPSIIFIDEIDAIGRARGRGGFSGGNDERESTLNQLLVEMDGFGTTAGVVVLAGTNRPDILDKALLRPGRFDRQITIDKPDIKGRDQIFQIYLKKIKLDHEPSYYSQRLAALTPGFAGADIANVCNEAALIAARHEGATVTMAHFDSAIDRVIGGLEKKNRVISKLERRTVAYHESGHAVAGWFLEHAEPLLKVTIVPRGTAALGFAQYVPNENLLMTKEQLFDMTCMTLGGRAAEQVLIGRISTGAQNDLEKVTKMTYAQVAVYGFSDKIGLLSFPQREDEFSKPYSNRTGAMIDEEVREWVGKAYKRTVELIEEHKEQVAQIAELLLEKEVLHQDDLTKVLGERPFKSGETTNYDRFKSGFEESEKESQKESVPVKPVEDDGIPPLEPQVVPT

SEQ ID NO: 46633 - DNA, 1073 bp, Arabidopsis thaliana
  misc_feature (1)..(1073): Ceres Seq. ID no. 14310045
  misc_feature (1)..(1073): Ortholog of  Ceres SEQ ID NO 12626061 as cited in SEQ ID NO 64594
  misc_feature (1)..(1073): Ortholog of  Ceres SEQ ID NO 15174020 as cited in SEQ ID NO 0
  misc_feature (1)..(1073): Ortholog of  Ceres SEQ ID NO 15179151 as cited in SEQ ID NO 0
aaaaaaaaaaaaaaggtaggaaacgtgggccgaacattatcagaaggattcaagcgaagcaaaatcccaccctttcttctgtgacagagtgtctgtatttgttgtttcccttcaattggagagagtaagcgagtctcttacgcccagagagagagagagagaggcttgtttgttttctctcctctaagaaacaatcagtctcataaagtggcaaagatggttgcagaacgatacacagtcgatttgaataagccacttgtgtttcaggttggtcatcttggcgaagaatatcaggaatggattcatcaacctattgtatgcgttgagggtcctcgttttttcgaaagtgatttttgggagtttttgactcgcacggtttggtgggcaatcccaacaatctggcttccagttgtttgctacgttctttcaatatcggcgagtaagggacttacgtttccccagatcggtttaatagttgcttttggtgtactcacgtggacactgctcgagtacacgcttcatcgcttccttttccacatccaaaccaagagttactgggcaaacactgcacactatcttcttcatggatgccatcacaagcacccacaagacggccttcgtcttgttttccctcctacagcaacagctattctcttggttccactatggaagcttctccatctcctagctactcctgctacagcacctgctattcttggaggcatattgtttggctatgtgatgtatgatattacccattactatctacaccatggtcaacctaaagaaccaacctttaaacatcttaagaaataccacctgaatcatcactttaggattcaggacaaaggatatggaatcacttcctctctatgggacaaagtctttggaacacttcccggtattaaagccgctgcgaagaagagctaaatcggatttctgtttgccatttttcagagtgtcgaaaaactcactgatattgtgtattccaaattcatcaggtgattcaatgactgtttaactacttctgtatacgatctattcaccatatttgaacatatttttagtggttt

SEQ ID NO: 46634 - protein, 237 aa, Arabidopsis thaliana
  peptide (1)..(237): Ceres Seq. ID no. 14310046
MVAERYTVDLNKPLVFQVGHLGEEYQEWIHQPIVCVEGPRFFESDFWEFLTRTVWWAIPTIWLPVVCYVLSISASKGLTFPQIGLIVAFGVLTWTLLEYTLHRFLFHIQTKSYWANTAHYLLHGCHHKHPQDGLRLVFPPTATAILLVPLWKLLHLLATPATAPAILGGILFGYVMYDITHYYLHHGQPKEPTFKHLKKYHLNHHFRIQDKGYGITSSLWDKVFGTLPGIKAAAKKS

SEQ ID NO: 46635 - DNA, 597 bp, Arabidopsis thaliana
  misc_feature (1)..(597): Ceres Seq. ID no. 14310069
  misc_feature (1)..(597): Ortholog of  Ceres SEQ ID NO 14308991 as cited in SEQ ID NO 0
ggtgagaagagatcgagagaagaatagtttgatcatcttgtgagaaaaataatggctgcttcagtgatgctatcttcggtgacattgaaaccagctggtttcacggtggagaagacggcggctagaggattaccgtcgctcacaagagctcgtccctccttcaaaattgtcgccagtggcgtcaagaagatcaagaccgacaagcccttcggaattaacggcagcatggacttgagggacggcgtcgacgcttccggcagaaagggcaagggatacggtgtttacaagtacgtcgacaagtatggagctaacgtcgatggatacagtcctatttacaacgagaacgagtggtcagcgagtggtgacgtgtacaagggaggagtcaccggattggcaatttgggcggtaactctcgccggaattcttgccggaggtgctcttcttgtgtacaacacaagtgctttggctcagtaaatcttaaagttgttagcgcatgtgtaatcatgtttctataaatgtttctgtgttgttctctttctctctaatgttgtaaaactcagacatactttgaatttataagacttctagtgtttgtat

SEQ ID NO: 46636 - protein, 140 aa, Arabidopsis thaliana; identical to SEQ ID NO: 39807
  peptide (1)..(140): Ceres Seq. ID no. 14310070

SEQ ID NO: 46637 - protein, 135 aa, Arabidopsis thaliana; identical to SEQ ID NO: 39808
  peptide (1)..(135): Ceres Seq. ID no. 14310071

SEQ ID NO: 46638 - protein, 82 aa, Arabidopsis thaliana; identical to SEQ ID NO: 39809
  peptide (1)..(82): Ceres Seq. ID no. 14310072

SEQ ID NO: 46639 - DNA, 1670 bp, Arabidopsis thaliana
  misc_feature (1)..(1670): Ceres Seq. ID no. 12575336
  misc_feature (1)..(1670): Ortholog of  Ceres SEQ ID NO 15177298 as cited in SEQ ID NO 52711
atatagaaatagccttcgagctagaaaagcacatagaagactgattacgagagatagacgacgacgacaaggatcaaccaacacagaatccatctctctatctctctacgttatctcttcattcagagagtgcaaatagaacgacagagactttttcctcttttcttcttgggaagaggctccaatggcgagctcggttttatcagaatgtggttttagacctctccccagattctaccctaaacacacaacctcttttgcctctaaccctaaacccactttcaaattcaatccaccacttaaacctccttcttctcttctcaattcccgatatggattctactctaaaaccaggaactgggcattgaatgtggcaacacctttaacaactcttcagtctccatccgaggaagacacggagagattcgacccaggtgcgcctcctcccttcaatttggcggatataagagcagccatacctaagcattgttgggttaagaatccatggatgtctatgagttatgttgtcagagatgttgctatcgtctttggattggctgctgttgctgcttacttcaacaattggcttctctggcctctctactggttcgctcaaggaaccatgttctgggctctctttgtccttggccatgactgcggacatggtagcttctcgaatgatccgaggctgaacagtgtggctggtcatcttcttcattcctcaattctggtcccttaccatggctggaggattagccacagaactcaccaccagaaccatggtcatgtcgagaatgacgaatcatggcatcctttgcctgaaagcatctacaagaatttggaaaagacgactcaaatgtttaggtttacactgccttttccaatgctcgcataccctttctacttgtggaacagaagtccagggaaacaaggttctcattatcatccggacagtgacttgtttcttccaaaagagaagaaagatgttctgacatcaactgcctgttggactgcaatggctgctttgcttgtttgtctcaactttgtcatgggtccaatccagatgctcaaactatatggcatcccttattggatatttgtaatgtggttggacttcgtcacttacttgcaccaccatggacatgaagacaagctcccttggtatcgtggaaaggaatggagttacctgagaggagggctcacaacattagatcgtgactacggatggatcaataacatccaccacgatattggaactcatgtgatacatcatcttttcccgcagatcccacattatcatctagtagaagcaacagaagcagctaaaccagtactaggaaagtactacagagaaccgaaaaactctggacctctgccacttcacttactgggaagcctcataaagagtatgaaacaagaccatttcgtaagcgatacaggagatgtcgtgtactatgaggcagatccaaaactcaatggacaaagaacatgaggacatactgcagtgaaccaggcagacaagttacataaattcatcttggcccattcattatgttctttttgttttggtgtaaagccttttcgagattaaaaaagcattaatttgtagaaacctgtggtaaaactctcgatcaaatgaaataagatatgatcagtagaatacatttcat

SEQ ID NO: 46640 - protein, 435 aa, Arabidopsis thaliana
  peptide (1)..(435): Ceres Seq. ID no. 12575337
MASSVLSECGFRPLPRFYPKHTTSFASNPKPTFKFNPPLKPPSSLLNSRYGFYSKTRNWALNVATPLTTLQSPSEEDTERFDPGAPPPFNLADIRAAIPKHCWVKNPWMSMSYVVRDVAIVFGLAAVAAYFNNWLLWPLYWFAQGTMFWALFVLGHDCGHGSFSNDPRLNSVAGHLLHSSILVPYHGWRISHRTHHQNHGHVENDESWHPLPESIYKNLEKTTQMFRFTLPFPMLAYPFYLWNRSPGKQGSHYHPDSDLFLPKEKKDVLTSTACWTAMAALLVCLNFVMGPIQMLKLYGIPYWIFVMWLDFVTYLHHHGHEDKLPWYRGKEWSYLRGGLTTLDRDYGWINNIHHDIGTHVIHHLFPQIPHYHLVEATEAAKPVLGKYYREPKNSGPLPLHLLGSLIKSMKQDHFVSDTGDVVYYEADPKLNGQRT

SEQ ID NO: 46641 - protein, 327 aa, Arabidopsis thaliana
  peptide (1)..(327): Ceres Seq. ID no. 12575338
MSMSYVVRDVAIVFGLAAVAAYFNNWLLWPLYWFAQGTMFWALFVLGHDCGHGSFSNDPRLNSVAGHLLHSSILVPYHGWRISHRTHHQNHGHVENDESWHPLPESIYKNLEKTTQMFRFTLPFPMLAYPFYLWNRSPGKQGSHYHPDSDLFLPKEKKDVLTSTACWTAMAALLVCLNFVMGPIQMLKLYGIPYWIFVMWLDFVTYLHHHGHEDKLPWYRGKEWSYLRGGLTTLDRDYGWINNIHHDIGTHVIHHLFPQIPHYHLVEATEAAKPVLGKYYREPKNSGPLPLHLLGSLIKSMKQDHFVSDTGDVVYYEADPKLNGQRT

SEQ ID NO: 46642 - protein, 325 aa, Arabidopsis thaliana
  peptide (1)..(325): Ceres Seq. ID no. 12575339
MSYVVRDVAIVFGLAAVAAYFNNWLLWPLYWFAQGTMFWALFVLGHDCGHGSFSNDPRLNSVAGHLLHSSILVPYHGWRISHRTHHQNHGHVENDESWHPLPESIYKNLEKTTQMFRFTLPFPMLAYPFYLWNRSPGKQGSHYHPDSDLFLPKEKKDVLTSTACWTAMAALLVCLNFVMGPIQMLKLYGIPYWIFVMWLDFVTYLHHHGHEDKLPWYRGKEWSYLRGGLTTLDRDYGWINNIHHDIGTHVIHHLFPQIPHYHLVEATEAAKPVLGKYYREPKNSGPLPLHLLGSLIKSMKQDHFVSDTGDVVYYEADPKLNGQRT

SEQ ID NO: 46643 - DNA, 1970 bp, Arabidopsis thaliana
  misc_feature (1)..(1970): Ceres Seq. ID no. 14310093
  misc_feature (1)..(1970): Ortholog of  Ceres SEQ ID NO 14313666 as cited in SEQ ID NO 54618
  misc_feature (1)..(1970): Ortholog of  Ceres SEQ ID NO 13595351 as cited in SEQ ID NO 55934
gaatggaaaaaaaaaacacagatttcaaacactcgagagtcaagagtctcagacccacccagcttctggtttcgtttcgccgtcgcgcacggctgaacatatctgctatatcggagattagtgaaggttagttactattgattaaaggtttcataatttggggctaatctctctgcaaggtgacgagaaaatccattattcccttcccaaggtttgtcctctgaagatataaagtctcaatctttggataagaaagttcaaatggaaaattggaaacttttcttcagttgaatgaatgattgagctgaagaaaccaaagctagaatggggcaaagttcattgtcatggggtccctagaatattcgaatctatgatccttttggtgtaaagtattagtcaagttgagagatatttttaacattttgtggtcactatcgatgtcttggagttgattgcttctaaacccactttaacttgtgagagagtttctaagaatctggctctggatatcaaataatcttatcatgagagaagagacagtgtcttggaagtactttaaaagagatgttgttccgttcactgcgatgatcgctatagagtgtacaacggttggatccagcatactgtataaagctgctaccttgagaggatttagcttttatgtctttgtgttttacgcttatgttggtgctacacttgtccttcttctactttcacttatctttggaaggtcgagaagtttgcctacagccaagtcttctcttttcttcaagattttcttacttgcgcttctcgggctcacgtcgcgggtagctggttgtaaaggtatagaatatagttccccaactctttcctctgctatcagcaatcttacaccagctttcaccttcatccttgccatcttcttcaggttccactttctcctaaactgggtgattccactcttaaccatacaaaagatatgattttcagacagtaacagtcaatatgaaatgatatcgttgtctgtgaattatggagtagttgtataagtatgagaaatgttggatagatatgaggtttgtttgtaactcttaactttggtgacttgttctgcttcctggggtgactcgtaaaggatggaacaagtgatgttaagaagctctgcaactcaggctaaaatcattggcacaatagtttctatatctggtgctctggttattgttctgtataaaggcccaaaacttcttgttgctgcatcgtttacttcattcgagtcaagttggataattggaggccttttgctcggtctgcagtttttgcttctttcagtctggtttattcttcagactcatatcatggagatataccctgaagaaatagccgtagtcttctgctacaacttatgcgcaactctaatctcagggacagtatgtctacttgtagaaaaagacttgaattcttggcagcttaaaccgggtttctccctcgcttcagtcatatactcgggactctttgatacatcattgggctcagttatccacacatggggtctccatgtgaagggtccagtctacatatccttgttcaagccgctgtctatcgcaattgcagtcgccatggctgctatattcctcggcgacacacttcatcttgggagtgtgattggataagtgatattgagctttgggttttacactgtgatttggggcaaagcaagagaggattcaaccaaaacagtaagtgattctgagcaatcacttttattgccttcacacgacagagaagaagattgaaaccttgtcatgaaaatatgttggagacaagtgtaatcgttttcttattttattcataattatggtcccattagatgatgatgatccctatttatcttgtgaagatcttatgacttgtacaaaaaaaatctaacatgatacattgaaatgtgaaaaatgatatacttatttgttgagaaaatgataatatttctt

SEQ ID NO: 46644 - protein, 177 aa, Arabidopsis thaliana
  peptide (1)..(177): Ceres Seq. ID no. 14310094
MEQVMLRSSATQAKIIGTIVSISGALVIVLYKGPKLLVAASFTSFESSWIIGGLLLGLQFLLLSVWFILQTHIMEIYPEEIAVVFCYNLCATLISGTVCLLVEKDLNSWQLKPGFSLASVIYSGLFDTSLGSVIHTWGLHVKGPVYISLFKPLSIAIAVAMAAIFLGDTLHLGSVIG

SEQ ID NO: 46645 - protein, 173 aa, Arabidopsis thaliana
  peptide (1)..(173): Ceres Seq. ID no. 14310095
MLRSSATQAKIIGTIVSISGALVIVLYKGPKLLVAASFTSFESSWIIGGLLLGLQFLLLSVWFILQTHIMEIYPEEIAVVFCYNLCATLISGTVCLLVEKDLNSWQLKPGFSLASVIYSGLFDTSLGSVIHTWGLHVKGPVYISLFKPLSIAIAVAMAAIFLGDTLHLGSVIG

SEQ ID NO: 46646 - protein, 146 aa, Arabidopsis thaliana
  peptide (1)..(146): Ceres Seq. ID no. 14310096
MREETVSWKYFKRDVVPFTAMIAIECTTVGSSILYKAATLRGFSFYVFVFYAYVGATLVLLLLSLIFGRSRSLPTAKSSLFFKIFLLALLGLTSRVAGCKGIEYSSPTLSSAISNLTPAFTFILAIFFRFHFLLNWVIPLLTIQKI

SEQ ID NO: 46647 - DNA, 1832 bp, Arabidopsis thaliana
  misc_feature (1)..(1832): Ceres Seq. ID no. 15176031
  misc_feature (1)..(1832): Ortholog of  Ceres SEQ ID NO 15171430 as cited in SEQ ID NO 51500
  misc_feature (1)..(1832): Ortholog of  Ceres SEQ ID NO 15176106 as cited in SEQ ID NO 60324
  misc_feature (1)..(1832): Ortholog of  Ceres SEQ ID NO 13654989 as cited in SEQ ID NO 63117
  misc_feature (1)..(1832): Ortholog of  Ceres SEQ ID NO 13655640 as cited in SEQ ID NO 63844
  misc_feature (1)..(1832): Ortholog of  Ceres SEQ ID NO 13584744 as cited in SEQ ID NO 69137
ggtccaatttaaattctcagttcttcgttcttttgctgactttagctatctctctctgtaaagacttcgtttttttttttgttgccgtgtgacgacttcttcttcctcttcttcttcgacctctttctctcggaagcttagcttcttaaaatccatttctctcggaagcttaacttctcaaatcctcgatctcttttgtatcgtgattcattaaccacttcatgataattataatcttccttctcttctgacgattgaattacatcttcttctgatagatgttctgatttttttctgtatacaaagtaaattcaaagtggacaaacatcggtattttaatctcctctcgataatgaagtgtttcttgttctctggtggggataagagaggggaacagaagacccctatttcggtttcattgacctctatcttctctgaccgcgaaataaaccgaagcgggtcagagttcaactctcgtgatgtctctgggacgagcacagaatcatccatggggaggaagaactcgtaccctccggtgtctactagagcaagtaatctcagagagttcagcattactgatctcaagtctgcaacaaagaactttagccgatctgttatgattggagaaggcggtttcggttgtgtcttcaggggcacagaggaacttagaggactcgtcagttaaaatcgaagtcgcagtgaagcagctcggtaaaagagggttgcaggggcataaggaatgggttacggaagtgaacttcctcggaatagttgagcatacaaacttggtgaaattgcttggctattgtgcagaagatgatgaacgtggaatccaacggcttttggtttatgaatacatgcctaaccgaagtgttgaattccacttatcccctcggtcactcacagttcttacttgggacctcagactgagaatcgcccaagatgcagctcgcggattaacatacctgcatgaagaaatggagtttcagataatattccgcgatttcaagtcctcgaacattcttttggatgaggactggaaagcaaagctctcagatttcggtttggctcgtttaggtccatctgaaggattaacccatgtttctactgatgttgtaggtacaatgggttatgcagcacctgaatacattcaaaccggccgtctcacatcgaaaagcgatgtgtggggttatggagtcttcctctatgagcttatcactgggaggcgaccggtggacagaaacagacccaagggagagcagaagcttctagaatgggtgagaccttatttatctgacacaaggaagttcaagctcatattagatccaaggctggaagggaagtacccgatcaaatcggttcaaaagctagcagttgtggccaacagatgtttggttaggaactcaaaggcacgtcccaagatgagtgaggttttagagatggtgaacaaaattgtggaagcttcttcaggaaatggcagcccacagctagttccgctgaacagtgtaaaagcttcgagagacgcgagaggaaagaacaatggtggtggcggtgaaggaggttggtttggcaagttatggaatccaaagacaataagagcttgttgactgcttatagaattcaacctcttcttacagcaaaaaaaagagtcaagaaaggtttcatggagattccgaaggttgaagattctagcgagatcaagatgaagctcatatacatacataaagataattatatatgaagatttgtgaaagattctaaaatgatgaaatatgatttttgtatgaacttatgaatagtaaccacagcttaattagtaagatatgtatatt

SEQ ID NO: 46648 - protein, 249 aa, Arabidopsis thaliana
  peptide (1)..(249): Ceres Seq. ID no. 15176032
MPNRSVEFHLSPRSLTVLTWDLRLRIAQDAARGLTYLHEEMEFQIIFRDFKSSNILLDEDWKAKLSDFGLARLGPSEGLTHVSTDVVGTMGYAAPEYIQTGRLTSKSDVWGYGVFLYELITGRRPVDRNRPKGEQKLLEWVRPYLSDTRKFKLILDPRLEGKYPIKSVQKLAVVANRCLVRNSKARPKMSEVLEMVNKIVEASSGNGSPQLVPLNSVKASRDARGKNNGGGGEGGWFGKLWNPKTIRAC

SEQ ID NO: 46649 - protein, 209 aa, Arabidopsis thaliana
  peptide (1)..(209): Ceres Seq. ID no. 15176033
MEFQIIFRDFKSSNILLDEDWKAKLSDFGLARLGPSEGLTHVSTDVVGTMGYAAPEYIQTGRLTSKSDVWGYGVFLYELITGRRPVDRNRPKGEQKLLEWVRPYLSDTRKFKLILDPRLEGKYPIKSVQKLAVVANRCLVRNSKARPKMSEVLEMVNKIVEASSGNGSPQLVPLNSVKASRDARGKNNGGGGEGGWFGKLWNPKTIRAC

SEQ ID NO: 46650 - protein, 160 aa, Arabidopsis thaliana
  peptide (1)..(160): Ceres Seq. ID no. 15176034
MGYAAPEYIQTGRLTSKSDVWGYGVFLYELITGRRPVDRNRPKGEQKLLEWVRPYLSDTRKFKLILDPRLEGKYPIKSVQKLAVVANRCLVRNSKARPKMSEVLEMVNKIVEASSGNGSPQLVPLNSVKASRDARGKNNGGGGEGGWFGKLWNPKTIRAC

SEQ ID NO: 46651 - DNA, 2256 bp, Arabidopsis thaliana; identical to SEQ ID NO: 22038
  misc_feature (1)..(2256): Ceres Seq. ID no. 13646318
  misc_feature (1)..(2256): Ortholog of  Ceres SEQ ID NO 14303276 as cited in SEQ ID NO 1264
  misc_feature (1)..(2256): Ortholog of  Ceres SEQ ID NO 15170536 as cited in SEQ ID NO 52791
  misc_feature (1)..(2256): Ortholog of  Ceres SEQ ID NO 15171813 as cited in SEQ ID NO 57309
  misc_feature (1)..(2256): Ortholog of  Ceres SEQ ID NO 14314378 as cited in SEQ ID NO 57601
  misc_feature (1)..(2256): Ortholog of  Ceres SEQ ID NO 12465083 as cited in SEQ ID NO 68239

SEQ ID NO: 46652 - protein, 651 aa, Arabidopsis thaliana; identical to SEQ ID NO: 22039
  peptide (1)..(651): Ceres Seq. ID no. 13646319

SEQ ID NO: 46653 - protein, 588 aa, Arabidopsis thaliana; identical to SEQ ID NO: 22040
  peptide (1)..(588): Ceres Seq. ID no. 13646320

SEQ ID NO: 46654 - protein, 562 aa, Arabidopsis thaliana; identical to SEQ ID NO: 22041
  peptide (1)..(562): Ceres Seq. ID no. 13646321

SEQ ID NO: 46655 - DNA, 1664 bp, Arabidopsis thaliana
  misc_feature (1)..(1664): Ceres Seq. ID no. 15168927
  misc_feature (1)..(1664): Ortholog of  Ceres SEQ ID NO 12618197 as cited in SEQ ID NO 64478
tctcgaatttttccgaaacctgtgttttcccatcaccaagctttctctgaatcgccgccgtgtttacatttactgttgttaaggccgagagatagatagaaaaaaacatctgtgcgattttgccgcctctccctaaaatctttggagctccttcgtagttagccggaggtgaagtacaataaaagaaagaagaaagtccaagtgtctcttctcatctcttttctccagtagtttactagtgatagcagataatggaggggagattggctaatatgtggaggttgactgttaacgaaagtaaattcgtggaaactgcgttgcaatctgagctcagagtagatggtcgtggcctttatgattatcgcaagcttactattaagtttggcaaagaatatggtagctcggaagttcaacttggtcagactcatgtaatgggtttcgtgactgctcagttggtacaaccttacaaagacagacctaatgaagggtctctctcgatcttcacggaattttctccaatggctgatccgtcttttgagcctggtcgtcctggcgaatctgcagtggagttgggacgcattatcgatcgtggtctaagagaaagccgtgcagtagatacagagtcactctgcgttctagctggaaagatggtttggtctgttcgcattgaccttcatatcttggacaatggagggaacttagttgatgctgcaaatattgctgctttagcagctctcaaggaggagagaatggtcaagaagtgatcatacatccactagaggaaagggaaccacttccattgataatacatcatctcccaatagccttcacgtttggattttttaataaaggcaacattgtggtgatggacccaacttatgttgaagaagcagttatgtgtgggagaatgactgtgacagttaatgccaatggcgatatatgcgcaatccaaaaaccgggggaagaaggcgtgaaccagagtgtaatccttcattgcctgcgtcttgcttcttcaagagctgctgcaacaacaaagatcattagagaagaagttgaagcatataactgtgagagaagcttacagaaggtgaagcgacatcccactttggctaaatctgaagtttctggacctactgtagctgtgaaggaggaacataggaagtcctcagatcaggaaagagctgcagagatatctcgagaacatgttgaaagactaaagctctctacggaggaagtaagaagcagtaaggaagaagaagctgccaatttcaaaggcggtccctcaaattgggacccttactcagaagctatggatgttgattcactgaaagtttctcttgcttcaagaggggatcccgttactaagtcatcgagcacgaagaaaatgaacggctctggaaatgcgcagaaggttggtgttgagatttcagttgaggaagtaaccggagaattagggaagaaggatacaaaacacaaggatggagaaatgacacttaaagatgctgtcaaacctaaaaagaagcggaaaaacaaaagctgagttaaagcattttcccgatcactcgtacttttcttcttcccttgaaactcaagactatagacggtttatggtcaattgtatctgaaaaaagtcaaaagttttgttaaattttgtttcataaaag

SEQ ID NO: 46656 - protein, 224 aa, Arabidopsis thaliana
  peptide (1)..(224): Ceres Seq. ID no. 15168928
MDPTYVEEAVMCGRMTVTVNANGDICAIQKPGEEGVNQSVILHCLRLASSRAAATTKIIREEVEAYNCERSLQKVKRHPTLAKSEVSGPTVAVKEEHRKSSDQERAAEISREHVERLKLSTEEVRSSKEEEAANFKGGPSNWDPYSEAMDVDSLKVSLASRGDPVTKSSSTKKMNGSGNAQKVGVEISVEEVTGELGKKDTKHKDGEMTLKDAVKPKKKRKNKS

SEQ ID NO: 46657 - protein, 214 aa, Arabidopsis thaliana
  peptide (1)..(214): Ceres Seq. ID no. 15168929
MCGRMTVTVNANGDICAIQKPGEEGVNQSVILHCLRLASSRAAATTKIIREEVEAYNCERSLQKVKRHPTLAKSEVSGPTVAVKEEHRKSSDQERAAEISREHVERLKLSTEEVRSSKEEEAANFKGGPSNWDPYSEAMDVDSLKVSLASRGDPVTKSSSTKKMNGSGNAQKVGVEISVEEVTGELGKKDTKHKDGEMTLKDAVKPKKKRKNKS

SEQ ID NO: 46658 - protein, 210 aa, Arabidopsis thaliana
  peptide (1)..(210): Ceres Seq. ID no. 15168930
MTVTVNANGDICAIQKPGEEGVNQSVILHCLRLASSRAAATTKIIREEVEAYNCERSLQKVKRHPTLAKSEVSGPTVAVKEEHRKSSDQERAAEISREHVERLKLSTEEVRSSKEEEAANFKGGPSNWDPYSEAMDVDSLKVSLASRGDPVTKSSSTKKMNGSGNAQKVGVEISVEEVTGELGKKDTKHKDGEMTLKDAVKPKKKRKNKS

SEQ ID NO: 46659 - DNA, 1833 bp, Arabidopsis thaliana
  misc_feature (1)..(1833): Ceres Seq. ID no. 12575340
  misc_feature (1)..(1833): Ortholog of  Ceres SEQ ID NO 15176329 as cited in SEQ ID NO 52687
agagagattctaaaaatctttcaatcccacagattcggatttgtactccatactcatggaagcttcgatttcgtttctggggtcaacaaaacccaatatttccttgtttaacccttcttcaaacgtccttcctcgtagagatttccctcttcctgctttgaaattgaagaaagtttcagtgctgcctcgaatcttgcaccagaaacgactcatcagagctcagtgctctgatggattcaaaccagaggaagacgatgggtttgtcctagaagacgttcctcacttgaccaaatttctccctgatttaccgtcatatccaaatccattgaaagaaagccaagcatatgccattgttaagcgaacttttgtcagttccgaagatgtggttgcgcaaaatattgtagtccagaagggaagtaagcgaggagtacactttaggcgagcagggcctcgagaaagagtgtacttcagatcagatgaagtaaaagcttgcatagtgacttgtgggggcttgtgccctggaatcaatactgttatacgggaaattgtatgtggattgaacaatatgtatggtgttaataacattctcggcattcagggaggatatagaggcttttactccaaaaacactatgaacctgacacctaaagtagttaacgatattcataaacgcggtggcacttttcttcaaacctcaagaggaggacatgatacagcgaagattgttgataatattcaagatagaggaataaatcaggtatatattattggaggtggtgggacgcaaaagggtgcagagaagatatacgaggaagttgagaggcgtggtcttcaagtggcggtttctggcattcctaagacaattgataatgatattgctgtgattgacaaatcatttggctttgatacggcggttgaggaagcacaacgagctattaatgctgcacatgtagaggtcgagagcgtggaaaatggagttggtatcgttaaactcatgggcagatacagtggttttattgccatgattgcaactttagcgaatcgtgatgtggattgttgcttgattccagagtctccattttttcttgaaggaaagggtgggctctttgagtttattgaagaacgactcaaagagaataggcacatggttattgtgatagctgaaggagctggacaggattatgttgctcaaagcatgcgtgcatctgaaactaaagacgcctcaggaaatagactcttgcttgatgttggtctatggttgactcaacagataaaggatcactttacaaatgttcggaaaatgatgataaatatgaagtacatagacccaacgtatatgataagagcaataccgagtaacgcatcagacaatgtctattgcactcttcttgcccaaagtgcagttcatggagcaatggctgggtactcaggtttcactgtaggaccagttaacagtagacatgcttacatcccaatttctcaggtgacggaagtgacaaatacggtgaagttaactgataggatgtgggctagactccttgcatcgacaaatcaaccgagtttcttgactggtgaaggagcattgcagaatgtgatcgacatggaaactcaagaaaagatcgataacatgaagatctcttctatctaagaaacaggtcagttgatattcatcaactgttccaaatgtatactagatatatatgcataggagatatctttatcaaaaaaccatgaagtaatttcattgttataacttataagaattctttggttttagttattcctaataataataatcaacatccatctcaacgatgaggttgagatgttaat

SEQ ID NO: 46660 - protein, 530 aa, Arabidopsis thaliana
  peptide (1)..(530): Ceres Seq. ID no. 12575341
MEASISFLGSTKPNISLFNPSSNVLPRRDFPLPALKLKKVSVLPRILHQKRLIRAQCSDGFKPEEDDGFVLEDVPHLTKFLPDLPSYPNPLKESQAYAIVKRTFVSSEDVVAQNIVVQKGSKRGVHFRRAGPRERVYFRSDEVKACIVTCGGLCPGINTVIREIVCGLNNMYGVNNILGIQGGYRGFYSKNTMNLTPKVVNDIHKRGGTFLQTSRGGHDTAKIVDNIQDRGINQVYIIGGGGTQKGAEKIYEEVERRGLQVAVSGIPKTIDNDIAVIDKSFGFDTAVEEAQRAINAAHVEVESVENGVGIVKLMGRYSGFIAMIATLANRDVDCCLIPESPFFLEGKGGLFEFIEERLKENRHMVIVIAEGAGQDYVAQSMRASETKDASGNRLLLDVGLWLTQQIKDHFTNVRKMMINMKYIDPTYMIRAIPSNASDNVYCTLLAQSAVHGAMAGYSGFTVGPVNSRHAYIPISQVTEVTNTVKLTDRMWARLLASTNQPSFLTGEGALQNVIDMETQEKIDNMKISSI

SEQ ID NO: 46661 - protein, 360 aa, Arabidopsis thaliana
  peptide (1)..(360): Ceres Seq. ID no. 12575342
MYGVNNILGIQGGYRGFYSKNTMNLTPKVVNDIHKRGGTFLQTSRGGHDTAKIVDNIQDRGINQVYIIGGGGTQKGAEKIYEEVERRGLQVAVSGIPKTIDNDIAVIDKSFGFDTAVEEAQRAINAAHVEVESVENGVGIVKLMGRYSGFIAMIATLANRDVDCCLIPESPFFLEGKGGLFEFIEERLKENRHMVIVIAEGAGQDYVAQSMRASETKDASGNRLLLDVGLWLTQQIKDHFTNVRKMMINMKYIDPTYMIRAIPSNASDNVYCTLLAQSAVHGAMAGYSGFTVGPVNSRHAYIPISQVTEVTNTVKLTDRMWARLLASTNQPSFLTGEGALQNVIDMETQEKIDNMKISSI

SEQ ID NO: 46662 - protein, 338 aa, Arabidopsis thaliana
  peptide (1)..(338): Ceres Seq. ID no. 12575343
MNLTPKVVNDIHKRGGTFLQTSRGGHDTAKIVDNIQDRGINQVYIIGGGGTQKGAEKIYEEVERRGLQVAVSGIPKTIDNDIAVIDKSFGFDTAVEEAQRAINAAHVEVESVENGVGIVKLMGRYSGFIAMIATLANRDVDCCLIPESPFFLEGKGGLFEFIEERLKENRHMVIVIAEGAGQDYVAQSMRASETKDASGNRLLLDVGLWLTQQIKDHFTNVRKMMINMKYIDPTYMIRAIPSNASDNVYCTLLAQSAVHGAMAGYSGFTVGPVNSRHAYIPISQVTEVTNTVKLTDRMWARLLASTNQPSFLTGEGALQNVIDMETQEKIDNMKISSI

SEQ ID NO: 46663 - DNA, 2851 bp, Arabidopsis thaliana
  misc_feature (1)..(2851): Ceres Seq. ID no. 12639101
  misc_feature (1)..(2851): Ortholog of  Ceres SEQ ID NO 14306908 as cited in SEQ ID NO 53320
tcgtttccgacgagtttcacggtgaagaactccaattcggggagcacctcgtctttcagctcagatggaagataagggaaagggtgtggtggaaggagatgaggggaacttgatttctgagttagaagaaggtccaagcaatatggaatgtgacaagcaagtacttggtggtgatactaattatgatgataaagacttaaacagtgatgaagaaggtctggtagatgatgatgatgatgatagtgatgatgatgatgagggagatgagtcagaagaagaagatgactttgaagctggaagtgtcccaaacacgtttgaacgacctgagtatgaagctctggctgagaggaaacgcaaagcacttgctgattctcaacgtaatcctagtaacatctcgaatagcacctcgggcgtggagggattcatggaatttatgtcttctggtcgccgacggaaatccaggaagtataagaaaaagggtagaagacctgggtcaaagaaagaagttgcacctgacattctaaagaggtttagggaggctctttttcttcatgcacatggccgtgacattgaggctttacctattttagtagaagttattaagcaagcaccagctttcgatatagcatactattacctttcacgtgtttctgagcaacttggtaagaccgaatcatcctctacggaagcattaaagattgctgcaaatatcaaaggttcaaaatcacctttttggaagttgctttatgagaggttcaaggaacaagagaacatttcggtagcaaggagttatgcgtcgaaagcaattcaagctgatccagatgatatccctttgaaatatgaatatgcagacatctgcctaaatactggaaaatatagagaagctgctgaaacctttgagcaaatatttcgtcggtgtcctgagagaattgaagcactcaagtggggggtacagtatttccttaaatccggtgagggtgaacgagcagcgagcatcttagaggatcatatcaaatcccattcatctgaagtggggcacgatgtcttggatttactggcttctgttttcatgaaaattaatgcgcatgatagagctcttaagtatattcacgatgtgcgccagatttacaatgttggaaaagaattgtcttccagcttgaaaatcagacaagccatctgtcatgttcaccttgaagaaatggagcaggcagagagcgtgttaagcattctaccacaggaggctgtatctgaacatccagagctcatcaccaatttggctgatgagctaacaaacattgggaatttccactctgctctcaaatactatatagaagcaatcagtgaacctgtgaatggcaatttgtttgtaaaaattgctcgctgttatatgtcattggaagaaagaaaacaggccattgttttctattataaagctctgaatgaactcagtgatacggttgatgttcgcataactctggcttcactcctcctggaagatggcaaacgagatgaagctgtattagtgctttctcctccggaaaatccagtgtagatcctgatacggctaaactgaaggcatggtggaaaaacagaaagatcaggatgaatctttgtcagatctatcattcagagggaatgctggaggacttcgccaatacagcactgcagttggtacttaagtgggtttggcggcggacggtcaaggggaaaagaaaacgactggttctttcagagcatcaaagaaacaaaaaacgccgacgtcctagagatgctcaagcttcccagttgagagggggaccaaaaaagtggcgcaaaatcagggcaacgttaaatgaaacaagaagaattagagaacgagctgctattaaagctcataacgaagatgtctgcagtgaatctgaggaagaagttatcaaggatgaagagtatcaccgtctctttgtggatttgtgcaaggcattggcatccctacagagatattgggaagctctggagatagttaatttggctcggagattggatgctaaaatgctgcctgttgagacaaaaaaggagcttcagtcacttggagctaaaatatcttgcgatactatggatccaaagcagtggtttgactgtgtaagatctgtcattcagcaacatccatatcgtttgaatgcctggaactgctattacagtgtcatttcgagactagggaaaagagcatcgactgaagctaagttcatgcatcacttaaggagcaagtaccgagattgcgtaccccccattcttattgctggtcatcacttcaccgtgacaagccgacatcaagatgctgcaagagaataccttgaagcatataaattaatgcctgagagtcctttaattaacctgtgtgtgggagctgcgttaatcaacttagccctcggttttcgactcaaaaacagacacgagtgtcttgctcaaggctttgcatttctgtacaacaatctcagaatttgcagtaacagtcaggaggcgttatacaacgttgctcgagcgtatcagcatgtaggactagtgactcttgcagcttcatactacgagaaggtgttagcgatttacgagaaagattacacgatgccgaaacttcctaacgaggatccgattgttgcggaagagcggaagcctgtgaactgtgacctacgcaaagaagctgcacacaatctgcatttgatctataagcacagtggagcgtttgatctcgcgaggcaagtattaaaggatcactgcactttctgagtctcgtaatcattgtccttgttttttcaaacgaagataaaacactagggaactgttccagtttatttaaagggaacaaagtttgtttttc

SEQ ID NO: 46664 - protein, 495 aa, Arabidopsis thaliana
  peptide (1)..(495): Ceres Seq. ID no. 12639102
MEDKGKGVVEGDEGNLISELEEGPSNMECDKQVLGGDTNYDDKDLNSDEEGLVDDDDDDSDDDDEGDESEEEDDFEAGSVPNTFERPEYEALAERKRKALADSQRNPSNISNSTSGVEGFMEFMSSGRRRKSRKYKKKGRRPGSKKEVAPDILKRFREALFLHAHGRDIEALPILVEVIKQAPAFDIAYYYLSRVSEQLGKTESSSTEALKIAANIKGSKSPFWKLLYERFKEQENISVARSYASKAIQADPDDIPLKYEYADICLNTGKYREAAETFEQIFRRCPERIEALKWGVQYFLKSGEGERAASILEDHIKSHSSEVGHDVLDLLASVFMKINAHDRALKYIHDVRQIYNVGKELSSSLKIRQAICHVHLEEMEQAESVLSILPQEAVSEHPELITNLADELTNIGNFHSALKYYIEAISEPVNGNLFVKIARCYMSLEERKQAIVFYYKALNELSDTVDVRITLASLLLEDGKRDEAVLVLSPPENPV

SEQ ID NO: 46665 - protein, 469 aa, Arabidopsis thaliana
  peptide (1)..(469): Ceres Seq. ID no. 12639103
MECDKQVLGGDTNYDDKDLNSDEEGLVDDDDDDSDDDDEGDESEEEDDFEAGSVPNTFERPEYEALAERKRKALADSQRNPSNISNSTSGVEGFMEFMSSGRRRKSRKYKKKGRRPGSKKEVAPDILKRFREALFLHAHGRDIEALPILVEVIKQAPAFDIAYYYLSRVSEQLGKTESSSTEALKIAANIKGSKSPFWKLLYERFKEQENISVARSYASKAIQADPDDIPLKYEYADICLNTGKYREAAETFEQIFRRCPERIEALKWGVQYFLKSGEGERAASILEDHIKSHSSEVGHDVLDLLASVFMKINAHDRALKYIHDVRQIYNVGKELSSSLKIRQAICHVHLEEMEQAESVLSILPQEAVSEHPELITNLADELTNIGNFHSALKYYIEAISEPVNGNLFVKIARCYMSLEERKQAIVFYYKALNELSDTVDVRITLASLLLEDGKRDEAVLVLSPPENPV

SEQ ID NO: 46666 - protein, 385 aa, Arabidopsis thaliana
  peptide (1)..(385): Ceres Seq. ID no. 12639104
MNLCQIYHSEGMLEDFANTALQLVLKWVWRRTVKGKRKRLVLSEHQRNKKRRRPRDAQASQLRGGPKKWRKIRATLNETRRIRERAAIKAHNEDVCSESEEEVIKDEEYHRLFVDLCKALASLQRYWEALEIVNLARRLDAKMLPVETKKELQSLGAKISCDTMDPKQWFDCVRSVIQQHPYRLNAWNCYYSVISRLGKRASTEAKFMHHLRSKYRDCVPPILIAGHHFTVTSRHQDAAREYLEAYKLMPESPLINLCVGAALINLALGFRLKNRHECLAQGFAFLYNNLRICSNSQEALYNVARAYQHVGLVTLAASYYEKVLAIYEKDYTMPKLPNEDPIVAEERKPVNCDLRKEAAHNLHLIYKHSGAFDLARQVLKDHCTF

SEQ ID NO: 46667 - DNA, 1181 bp, Arabidopsis thaliana
  misc_feature (1)..(1181): Ceres Seq. ID no. 12575352
  misc_feature (1)..(1181): Ortholog of  Ceres SEQ ID NO 13594301 as cited in SEQ ID NO 60110
agaccgcaaaaactcaaatgcttctagagggaagattctccgtcgtccagatgaacacgaatagacggctcaaatttaaccaaccgagtcgattacccaactcgggtaagtcaggtatagagaatgagcgagtcctggttcttgtcttcgagtccattagctgggacatccacacgctatgcacaatcgcctccctcagccgcagattctgcgcaatcgccagacgaattctgtggcggcggctctgtgtgaaccgtgcgccagggatggtggcggcattgtccggcgaagatcccagcggtcgaatcgacggcggctggcacgcgttagcgaaactcatgttcttctgcggcgggggtgagtcgactcggtatttcaatctgagtcaaccgacgtcgggtcacttcgcctgcgagtccagattctccaagacatccgggagattcttcctgccaaagaattgccgccgtgatctcctatacatgagcgatccgtgcgagcatcaggcggtgggtggagatgagcatttaggggttttcagaggggtatttcgggaatttatgaggtcaaagacgagggagtgtctcgtgagaagacaagcggcgctggaggagaaggttaggtgtccgtattgcggagggcgcgtgtggagcatgacggcggcgcgtctcgtcccgaagagtgcggcgcggcggctgggatcacgtgaaggtgggttagagttcttcgtgtgcgtgaacggtcacttgcacggcacttgctggctgattccgctttcatcggaggaagaagacaatggagaagacgacgacaacagtgacggaagtgtgatctaatccaatggtggtggcgatgtccacgtggaattaggtctcttgggccatatgcaaaccacaagaggaaaatctcagttagatttctcctatgagatgtggagctcactagtagtagttgcaggctgattgtggatcgtgagaagatctttctatctatcaccgatttgtctagtttgggtttagataattttggtacactacacactcatagataattttggtacactacacactcatagtcatagatcattagaattttattgtatctggtttgttttattgcgaaatgttggccattaatttggtgaagtataaaaagaaattgaaacaataacatttggtttt

SEQ ID NO: 46668 - protein, 277 aa, Arabidopsis thaliana
  peptide (1)..(277): Ceres Seq. ID no. 12575353
TAKTQMLLEGRFSVVQMNTNRRLKFNQPSRLPNSGKSGIENERVLVLVFESISWDIHTLCTIASLSRRFCAIARRILWRRLCVNRAPGMVAALSGEDPSGRIDGGWHALAKLMFFCGGGESTRYFNLSQPTSGHFACESRFSKTSGRFFLPKNCRRDLLYMSDPCEHQAVGGDEHLGVFRGVFREFMRSKTRECLVRRQAALEEKVRCPYCGGRVWSMTAARLVPKSAARRLGSREGGLEFFVCVNGHLHGTCWLIPLSSEEEDNGEDDDNSDGSVI

SEQ ID NO: 46669 - protein, 272 aa, Arabidopsis thaliana
  peptide (1)..(272): Ceres Seq. ID no. 12575354
MLLEGRFSVVQMNTNRRLKFNQPSRLPNSGKSGIENERVLVLVFESISWDIHTLCTIASLSRRFCAIARRILWRRLCVNRAPGMVAALSGEDPSGRIDGGWHALAKLMFFCGGGESTRYFNLSQPTSGHFACESRFSKTSGRFFLPKNCRRDLLYMSDPCEHQAVGGDEHLGVFRGVFREFMRSKTRECLVRRQAALEEKVRCPYCGGRVWSMTAARLVPKSAARRLGSREGGLEFFVCVNGHLHGTCWLIPLSSEEEDNGEDDDNSDGSVI

SEQ ID NO: 46670 - protein, 261 aa, Arabidopsis thaliana
  peptide (1)..(261): Ceres Seq. ID no. 12575355
MNTNRRLKFNQPSRLPNSGKSGIENERVLVLVFESISWDIHTLCTIASLSRRFCAIARRILWRRLCVNRAPGMVAALSGEDPSGRIDGGWHALAKLMFFCGGGESTRYFNLSQPTSGHFACESRFSKTSGRFFLPKNCRRDLLYMSDPCEHQAVGGDEHLGVFRGVFREFMRSKTRECLVRRQAALEEKVRCPYCGGRVWSMTAARLVPKSAARRLGSREGGLEFFVCVNGHLHGTCWLIPLSSEEEDNGEDDDNSDGSVI

SEQ ID NO: 46671 - protein, 189 aa, Arabidopsis thaliana
  peptide (1)..(189): Ceres Seq. ID no. 12575356
MVAALSGEDPSGRIDGGWHALAKLMFFCGGGESTRYFNLSQPTSGHFACESRFSKTSGRFFLPKNCRRDLLYMSDPCEHQAVGGDEHLGVFRGVFREFMRSKTRECLVRRQAALEEKVRCPYCGGRVWSMTAARLVPKSAARRLGSREGGLEFFVCVNGHLHGTCWLIPLSSEEEDNGEDDDNSDGSVI

SEQ ID NO: 46672 - DNA, 1950 bp, Arabidopsis thaliana; identical to SEQ ID NO: 44220
  misc_feature (1)..(1950): Ceres Seq. ID no. 12489291
  misc_feature (1)..(1950): Ortholog of  Ceres SEQ ID NO 13594037 as cited in SEQ ID NO 55666
  misc_feature (1)..(1950): Ortholog of  Ceres SEQ ID NO 13657707 as cited in SEQ ID NO 66407

SEQ ID NO: 46673 - protein, 595 aa, Arabidopsis thaliana; identical to SEQ ID NO: 44221
  peptide (1)..(595): Ceres Seq. ID no. 12489292

SEQ ID NO: 46674 - protein, 558 aa, Arabidopsis thaliana; identical to SEQ ID NO: 44222
  peptide (1)..(558): Ceres Seq. ID no. 12489293

SEQ ID NO: 46675 - protein, 522 aa, Arabidopsis thaliana; identical to SEQ ID NO: 44223
  peptide (1)..(522): Ceres Seq. ID no. 12489294

SEQ ID NO: 46676 - DNA, 2070 bp, Arabidopsis thaliana
  misc_feature (1)..(2070): Ceres Seq. ID no. 12601019
  misc_feature (1)..(2070): Ortholog of  Ceres SEQ ID NO 14313167 as cited in SEQ ID NO 54354
gggggccaagtctatgaactccactcgtctctccctcgacgcacttaaatttacataactaagtgtatgtctattcatatcactcactctctctcttcctcacacttacattctccctctatttttttttctctctctccacaagaaacgccgtcgttcattaaaaatgatggcggtgggcagatccggaggcaccatcctattgttctgcctatcattcttcgccgcggtaaccgcggagagtccataccgattctttgactggaatgtaacatacggcgacatttacccactcggtgttcgtcagcagggaatattgattaatgggcaatttccgggaccagacattcacagtgtgacaaacgacaatctcatcattaacgtacacaacagcttagacgagcctttcttaatctcatggaacggagtacaaaacagaagaaattcttatgttgatggaatgtacggaaccacgtgtccaattccaccgagaagcaactacacatacattttgcaagtgaaagaccaaattggaagtttctattacttcccatctcttgcctttcacaaggcagctggtggattcggaggtatcagaatccttagccgtcctggaattccagttccatttgctgaccctgcaggagattacactgtcctcattggagattggtacaaatttaatcacacggatttgaagtctcgtcttgatagaggaaggaagttaccttcgcctgatggtattcttatcaatggccgaagtaacggtgctaccttaaacgttgaacaaggaaaaacataccgattgaggatatcaaacgttggattacaagattctctgaacttccgaatccaaaaccacagaatgaagcttgtggaagtcgaagggacgcacacacttcaaaccatgttttcctctcttgacgttcacgttggccagtcttactccgttctaattactgctgaccaatctcctcgtgactactacgtggttgtttcgtctcgattcacggataaaatcataaccaccaccggggttcttcgctacagtggctcgtctacccctgcttctggtcctattcctggcggtcccactattcaggttgattggtccttgaaccaagcacgtgccatcagaaccaatttgacagctagtggaccaagaccaaacccgcaaggctcataccattatggtcttataccgctcattaggacaattgtgttcggtagttcagccggacagataaacgggaaacaaagatatggtgtcaatagtgtgtcatttgtgccagctgatacccctctaaaactggctgacttcttcaagattagcggtgtctataagatcaacagcatctcagacaaacccacatatggaggtttataccttgacacctcagttttgcaagtcgactatcgaacctttatcgagattgtattcgagaaccaagaagatatcgtccaaagttatcatctcaatggttactccttttgggtggtcgggatggatggtggacagtggaagacaggaagcagaaatggttataatttacgcgatgcagtttcacgttccacagtccaagtgtacccaaaatcatggacagccatatacattgcattagacaacgttggaatgtggaacttaagatcagaattttgggcaagacagtacttgggacaacaactttacttacgtgtcttcacgtcatctacgtctttgagagatgagtaccctatcccgaagaattcgcgtttgtgcggccgggcaagaggacgacatactaggcctttgtaaggaagatatacgagcttacgtgaaattcgtcatatccatacacgtttaagtatttcttgggaagacttgcaaggttacaaacaatgagagaggatatatgtagtaacaatctagtttgacgtgatctcagctcgaggtctaaatttttatgtaattcgaatttgaagttccagtttttctttatatgcttttgtcattcatgttcttttaattttctttcctttttctacgaagttataaacttataatattaattgaattttactcatttggat

SEQ ID NO: 46677 - protein, 542 aa, Arabidopsis thaliana
  peptide (1)..(542): Ceres Seq. ID no. 12601020
MMAVGRSGGTILLFCLSFFAAVTAESPYRFFDWNVTYGDIYPLGVRQQGILINGQFPGPDIHSVTNDNLIINVHNSLDEPFLISWNGVQNRRNSYVDGMYGTTCPIPPRSNYTYILQVKDQIGSFYYFPSLAFHKAAGGFGGIRILSRPGIPVPFADPAGDYTVLIGDWYKFNHTDLKSRLDRGRKLPSPDGILINGRSNGATLNVEQGKTYRLRISNVGLQDSLNFRIQNHRMKLVEVEGTHTLQTMFSSLDVHVGQSYSVLITADQSPRDYYVVVSSRFTDKIITTTGVLRYSGSSTPASGPIPGGPTIQVDWSLNQARAIRTNLTASGPRPNPQGSYHYGLIPLIRTIVFGSSAGQINGKQRYGVNSVSFVPADTPLKLADFFKISGVYKINSISDKPTYGGLYLDTSVLQVDYRTFIEIVFENQEDIVQSYHLNGYSFWVVGMDGGQWKTGSRNGYNLRDAVSRSTVQVYPKSWTAIYIALDNVGMWNLRSEFWARQYLGQQLYLRVFTSSTSLRDEYPIPKNSRLCGRARGRHTRPL

SEQ ID NO: 46678 - protein, 541 aa, Arabidopsis thaliana
  peptide (1)..(541): Ceres Seq. ID no. 12601021
MAVGRSGGTILLFCLSFFAAVTAESPYRFFDWNVTYGDIYPLGVRQQGILINGQFPGPDIHSVTNDNLIINVHNSLDEPFLISWNGVQNRRNSYVDGMYGTTCPIPPRSNYTYILQVKDQIGSFYYFPSLAFHKAAGGFGGIRILSRPGIPVPFADPAGDYTVLIGDWYKFNHTDLKSRLDRGRKLPSPDGILINGRSNGATLNVEQGKTYRLRISNVGLQDSLNFRIQNHRMKLVEVEGTHTLQTMFSSLDVHVGQSYSVLITADQSPRDYYVVVSSRFTDKIITTTGVLRYSGSSTPASGPIPGGPTIQVDWSLNQARAIRTNLTASGPRPNPQGSYHYGLIPLIRTIVFGSSAGQINGKQRYGVNSVSFVPADTPLKLADFFKISGVYKINSISDKPTYGGLYLDTSVLQVDYRTFIEIVFENQEDIVQSYHLNGYSFWVVGMDGGQWKTGSRNGYNLRDAVSRSTVQVYPKSWTAIYIALDNVGMWNLRSEFWARQYLGQQLYLRVFTSSTSLRDEYPIPKNSRLCGRARGRHTRPL

SEQ ID NO: 46679 - protein, 444 aa, Arabidopsis thaliana
  peptide (1)..(444): Ceres Seq. ID no. 12601022
MYGTTCPIPPRSNYTYILQVKDQIGSFYYFPSLAFHKAAGGFGGIRILSRPGIPVPFADPAGDYTVLIGDWYKFNHTDLKSRLDRGRKLPSPDGILINGRSNGATLNVEQGKTYRLRISNVGLQDSLNFRIQNHRMKLVEVEGTHTLQTMFSSLDVHVGQSYSVLITADQSPRDYYVVVSSRFTDKIITTTGVLRYSGSSTPASGPIPGGPTIQVDWSLNQARAIRTNLTASGPRPNPQGSYHYGLIPLIRTIVFGSSAGQINGKQRYGVNSVSFVPADTPLKLADFFKISGVYKINSISDKPTYGGLYLDTSVLQVDYRTFIEIVFENQEDIVQSYHLNGYSFWVVGMDGGQWKTGSRNGYNLRDAVSRSTVQVYPKSWTAIYIALDNVGMWNLRSEFWARQYLGQQLYLRVFTSSTSLRDEYPIPKNSRLCGRARGRHTRPL

SEQ ID NO: 46680 - DNA, 1634 bp, Arabidopsis thaliana
  misc_feature (1)..(1634): Ceres Seq. ID no. 12575357
  misc_feature (1)..(1634): Ortholog of  Ceres SEQ ID NO 13532807 as cited in SEQ ID NO 53012
  misc_feature (1)..(1634): Ortholog of  Ceres SEQ ID NO 15170532 as cited in SEQ ID NO 55671
  misc_feature (1)..(1634): Ortholog of  Ceres SEQ ID NO 13663060 as cited in SEQ ID NO 60964
  misc_feature (1)..(1634): Ortholog of  Ceres SEQ ID NO 13598532 as cited in SEQ ID NO 65204
  misc_feature (1)..(1634): Ortholog of  Ceres SEQ ID NO 13656849 as cited in SEQ ID NO 65764
  misc_feature (1)..(1634): Ortholog of  Ceres SEQ ID NO 13655298 as cited in SEQ ID NO 68914
  misc_feature (1)..(1634): Ortholog of  Ceres SEQ ID NO 13656501 as cited in SEQ ID NO 69206
gcgtctgcaaacgcgccaacggctactttttctccggagccggagctctcaaagctgaaaccctaaattttcccggtatcttcctcatcgtcgattttactcaatttagaataaaaatcggaaagcaatcgaattctagcgacgtgaattaagaagaaagagagaggcgcgattattgagtgggttctgaaaaacccgaaaatgccggagcagccaaagaaagttgctgataggtatctcaagcaagaggttcttgggcaaggtacctatggagtcgtcttcaaagccactgatactaagacggaacaaactgtagcaattaagaagataaggcttggtaaacaaagagaaggtgtaaatattacagctctcagagaaatcaaaatgctcaaagagctaaagcatcctcatattattctgctcattgatgcatttcctcacaaggaaaacttgcatcttgtctttgagttcatggagactgacctcgaagcagttattcgcgattctaacattttcctctcacccgccgacattaaatcctacctcctaatgacatttaaaggacttgcttattgccacgataaatgggttttgcacagggatatgaagccaaataacttgttaataggagttgatggacagcttaagcttgcagattttggcttagcacgtatatttggtagtccaaatcgtaagtttacccaccaggtgtttgctagatggtacagagcaccagaacttttgtttggtgcaaaacaatatggtgctgcagttgatgtttgggccgttgcctgcatattcgccgaacttctactacgcagaccatttcttcagggaaacagtgatattgatcaattaagcaaaatatttgctgcttttgggacaccaaaagcagatcagtggccggatttaacaaagcttccagattatgtagagtatcaatttgtccctgcaccgtctctacgttctttattcccagcagttagtgatgatgctctcgacttgttgtccaaaatgtttacctatgacccaaaggctagaatttccattaagcaggctctagaacacaggtacttcacttctgcacctgctcctactgacccggctaagctcccaaagcccgttcctaagcaggatggtaaatcatcttacggtaaacatgaggccattacagtgcaatcaccaccacgtaagcttagaagagtgatgcctgagcgtgggagggttgatagtttgaagtctcatgttgacaaggatcaacaagcacccatgtcattagattttaccatcctcgctgagcgacctccaaacaggccaacaatcaccagtgctgatagatctcatctgaagaggaaactcgatcttgagttccagtaagactgttggttatgcactcttctcttagcttctccattttcatgttctggtgaaaccacaccattgttaagttgtcaatttactgctgcttgtgtaatctggcgatttattcttttccatatttagcttgattacaaaccagagggaccttagattcacaatgataatattttgttgtcccataggctttttattcattgtaaactgatcatactgtactatgaagtctatgattataaagctttctactttttgct

SEQ ID NO: 46681 - protein, 391 aa, Arabidopsis thaliana
  peptide (1)..(391): Ceres Seq. ID no. 12575358
MPEQPKKVADRYLKQEVLGQGTYGVVFKATDTKTEQTVAIKKIRLGKQREGVNITALREIKMLKELKHPHIILLIDAFPHKENLHLVFEFMETDLEAVIRDSNIFLSPADIKSYLLMTFKGLAYCHDKWVLHRDMKPNNLLIGVDGQLKLADFGLARIFGSPNRKFTHQVFARWYRAPELLFGAKQYGAAVDVWAVACIFAELLLRRPFLQGNSDIDQLSKIFAAFGTPKADQWPDLTKLPDYVEYQFVPAPSLRSLFPAVSDDALDLLSKMFTYDPKARISIKQALEHRYFTSAPAPTDPAKLPKPVPKQDGKSSYGKHEAITVQSPPRKLRRVMPERGRVDSLKSHVDKDQQAPMSLDFTILAERPPNRPTITSADRSHLKRKLDLEFQ

SEQ ID NO: 46682 - protein, 330 aa, Arabidopsis thaliana
  peptide (1)..(330): Ceres Seq. ID no. 12575359
MLKELKHPHIILLIDAFPHKENLHLVFEFMETDLEAVIRDSNIFLSPADIKSYLLMTFKGLAYCHDKWVLHRDMKPNNLLIGVDGQLKLADFGLARIFGSPNRKFTHQVFARWYRAPELLFGAKQYGAAVDVWAVACIFAELLLRRPFLQGNSDIDQLSKIFAAFGTPKADQWPDLTKLPDYVEYQFVPAPSLRSLFPAVSDDALDLLSKMFTYDPKARISIKQALEHRYFTSAPAPTDPAKLPKPVPKQDGKSSYGKHEAITVQSPPRKLRRVMPERGRVDSLKSHVDKDQQAPMSLDFTILAERPPNRPTITSADRSHLKRKLDLEFQ

SEQ ID NO: 46683 - protein, 301 aa, Arabidopsis thaliana
  peptide (1)..(301): Ceres Seq. ID no. 12575360
METDLEAVIRDSNIFLSPADIKSYLLMTFKGLAYCHDKWVLHRDMKPNNLLIGVDGQLKLADFGLARIFGSPNRKFTHQVFARWYRAPELLFGAKQYGAAVDVWAVACIFAELLLRRPFLQGNSDIDQLSKIFAAFGTPKADQWPDLTKLPDYVEYQFVPAPSLRSLFPAVSDDALDLLSKMFTYDPKARISIKQALEHRYFTSAPAPTDPAKLPKPVPKQDGKSSYGKHEAITVQSPPRKLRRVMPERGRVDSLKSHVDKDQQAPMSLDFTILAERPPNRPTITSADRSHLKRKLDLEFQ

SEQ ID NO: 46684 - DNA, 2529 bp, Arabidopsis thaliana
  misc_feature (1)..(2529): Ceres Seq. ID no. 12575369
  misc_feature (1)..(2529): Ortholog of  Ceres SEQ ID NO 13661594 as cited in SEQ ID NO 61098
aaagagagagagagaagaagaaggtatcttttaagaagtcgtgaaggctctcttcgagcgatgcgttgaagaaaggcgagtgaccaacaacaatggcgaaaatatctttcctctcttcttattcttcttcttcttatcacgatcctcattataaaccctaaatttttccaacagtttttctctttctctctaacttctccgatctccgatttttctcttctccgagatgatgacggaggcgacgaaggtgttgtatatagtggtgcgtgaagaaggtgatgatgatgataataatggagatgattcgtttaggtatacgcgtcctgttttgcagagtactcttcagcttatgggttgcaaagctcgtcacgccttcaagatcagccgtagggtttttgagttaataagaagtgagggatcttgtaatacttcaccagagaatgggaaggaacctgaatttgctaaggaagttggtggttcaacttgtgtagagaaacttaactgtttggttgttgctggtgatgttgacaagaataagagtaagccatttgagatgtacaaaagacggacaactgttgttgtttcacgagagatattcgttgatgttgtgtgtgatgcactggctgaatataagtatgttggtcgcgaccaaagggcagatttgattctggcatgcagaatccgagaaaggaaagaatctgtaactgttttgctctgtggcaccagcggctgtggtaaatctacgttgtctgcattgctgggtagcaggttgggtattacgactgtggtatcaactgactctataaggcacatgatgaggagctttgctgatgagaagcagaatcctttgctgtgggcttcaacataccatgctggagagtaccttgaccctgtggcagttgccgagtcaaaagccaaaagaaaagccaaaaaactgaaaggctctcgaggtgtaaactccaatgcccaaaagacggatgctggatcaaactctagcaccactgagttgctaagtcataagcagatggctatagaagggtataaggcacaaagtgagatggtgattgacagtcttgataggctcattaccacttgggaagagaggaatgagtcagtagtcgttgaaggagtccacttaagcctcaactttgtgatgggactgatgaaaaagcacccttcgattgttcccttcatggtatacatcgctaacgaggagaaacacttggaacggtttgctgtccgagccaagtacatgacattggacccagcaaagaataagtatgtaaaatatatacgtaacatcagaacaatacaggattatctatgcaaacgagctgacaaacatctcgttcctaagataaacaacacaaatgtcgacaagagcgtggctacaatccacgcgacggtctttggttgcctgcgtagacgtgaaactggagagaagctctatgatacaaccacaaacaccgtttctgttattgacgacgagcataggaaccaatgtgcagccaattcattaacttccaagggaatgtttcaggtgatccaaagacaaggctcctctaggcgatttatggctctttgcaatactgatggtacggtagcaaaaacttggcctgttgcttccgttggtaagatcaggaagcccgtcgtgaatactgagatggatgatggaacagagcatcaactacataaagctgaaccagtgaatcttcaatttggtcactttgggatcagcgcttggcctagtgatggcgcaactagccacgccgggagtgtggatgacttaagagcagatattattgaaaccggaagcaggcattactcttcttgctgcagttcgcctcggacatctgatgggccttcaaaagagctgatggaggagcagtctgtgaatgggagcgatgaagatgatgaagaaggcgacgatgattttcatgagcctgattctgatgaagatctcagcgataacaatgacgagcgcaaccgcgacgagattggatcggtggatgaggaatcgacaaagtcagatgaagagtacgatgatctggcaatggaagacaagagttactggacagacaacgaagaagaagagtctcgagacacaatctccatggtatcgcaaaacaaccacaacgaggcttcaaagaccaacaaagatgacaaatactcccaaaacctcgatcttttcctcaagacaacgaaccagccattgactgaatcccttgagctcacgagtgaatacagaaacagaatgggagtagccgcctcggataaagccaagatgaggaaacgttcacttagtattccgcctgtcgggaaacatggttcaatcatagatgaccagattttggctaaccagactgattcagtactctaaagtgccccgtgacctctttgcctgtggttttctggtttttttttctttccgttttttttttttttgtgttttaacctatcaggtagcttaggtttccaaaactcattgaagtgtaaaacaaaatttgctaatttcatacatctctgtgc

SEQ ID NO: 46685 - protein, 717 aa, Arabidopsis thaliana
  peptide (1)..(717): Ceres Seq. ID no. 12575370
MMTEATKVLYIVVREEGDDDDNNGDDSFRYTRPVLQSTLQLMGCKARHAFKISRRVFELIRSEGSCNTSPENGKEPEFAKEVGGSTCVEKLNCLVVAGDVDKNKSKPFEMYKRRTTVVVSREIFVDVVCDALAEYKYVGRDQRADLILACRIRERKESVTVLLCGTSGCGKSTLSALLGSRLGITTVVSTDSIRHMMRSFADEKQNPLLWASTYHAGEYLDPVAVAESKAKRKAKKLKGSRGVNSNAQKTDAGSNSSTTELLSHKQMAIEGYKAQSEMVIDSLDRLITTWEERNESVVVEGVHLSLNFVMGLMKKHPSIVPFMVYIANEEKHLERFAVRAKYMTLDPAKNKYVKYIRNIRTIQDYLCKRADKHLVPKINNTNVDKSVATIHATVFGCLRRRETGEKLYDTTTNTVSVIDDEHRNQCAANSLTSKGMFQVIQRQGSSRRFMALCNTDGTVAKTWPVASVGKIRKPVVNTEMDDGTEHQLHKAEPVNLQFGHFGISAWPSDGATSHAGSVDDLRADIIETGSRHYSSCCSSPRTSDGPSKELMEEQSVNGSDEDDEEGDDDFHEPDSDEDLSDNNDERNRDEIGSVDEESTKSDEEYDDLAMEDKSYWTDNEEEESRDTISMVSQNNHNEASKTNKDDKYSQNLDLFLKTTNQPLTESLELTSEYRNRMGVAASDKAKMRKRSLSIPPVGKHGSIIDDQILANQTDSVL

SEQ ID NO: 46686 - protein, 716 aa, Arabidopsis thaliana
  peptide (1)..(716): Ceres Seq. ID no. 12575371
MTEATKVLYIVVREEGDDDDNNGDDSFRYTRPVLQSTLQLMGCKARHAFKISRRVFELIRSEGSCNTSPENGKEPEFAKEVGGSTCVEKLNCLVVAGDVDKNKSKPFEMYKRRTTVVVSREIFVDVVCDALAEYKYVGRDQRADLILACRIRERKESVTVLLCGTSGCGKSTLSALLGSRLGITTVVSTDSIRHMMRSFADEKQNPLLWASTYHAGEYLDPVAVAESKAKRKAKKLKGSRGVNSNAQKTDAGSNSSTTELLSHKQMAIEGYKAQSEMVIDSLDRLITTWEERNESVVVEGVHLSLNFVMGLMKKHPSIVPFMVYIANEEKHLERFAVRAKYMTLDPAKNKYVKYIRNIRTIQDYLCKRADKHLVPKINNTNVDKSVATIHATVFGCLRRRETGEKLYDTTTNTVSVIDDEHRNQCAANSLTSKGMFQVIQRQGSSRRFMALCNTDGTVAKTWPVASVGKIRKPVVNTEMDDGTEHQLHKAEPVNLQFGHFGISAWPSDGATSHAGSVDDLRADIIETGSRHYSSCCSSPRTSDGPSKELMEEQSVNGSDEDDEEGDDDFHEPDSDEDLSDNNDERNRDEIGSVDEESTKSDEEYDDLAMEDKSYWTDNEEEESRDTISMVSQNNHNEASKTNKDDKYSQNLDLFLKTTNQPLTESLELTSEYRNRMGVAASDKAKMRKRSLSIPPVGKHGSIIDDQILANQTDSVL

SEQ ID NO: 46687 - protein, 676 aa, Arabidopsis thaliana
  peptide (1)..(676): Ceres Seq. ID no. 12575372
MGCKARHAFKISRRVFELIRSEGSCNTSPENGKEPEFAKEVGGSTCVEKLNCLVVAGDVDKNKSKPFEMYKRRTTVVVSREIFVDVVCDALAEYKYVGRDQRADLILACRIRERKESVTVLLCGTSGCGKSTLSALLGSRLGITTVVSTDSIRHMMRSFADEKQNPLLWASTYHAGEYLDPVAVAESKAKRKAKKLKGSRGVNSNAQKTDAGSNSSTTELLSHKQMAIEGYKAQSEMVIDSLDRLITTWEERNESVVVEGVHLSLNFVMGLMKKHPSIVPFMVYIANEEKHLERFAVRAKYMTLDPAKNKYVKYIRNIRTIQDYLCKRADKHLVPKINNTNVDKSVATIHATVFGCLRRRETGEKLYDTTTNTVSVIDDEHRNQCAANSLTSKGMFQVIQRQGSSRRFMALCNTDGTVAKTWPVASVGKIRKPVVNTEMDDGTEHQLHKAEPVNLQFGHFGISAWPSDGATSHAGSVDDLRADIIETGSRHYSSCCSSPRTSDGPSKELMEEQSVNGSDEDDEEGDDDFHEPDSDEDLSDNNDERNRDEIGSVDEESTKSDEEYDDLAMEDKSYWTDNEEEESRDTISMVSQNNHNEASKTNKDDKYSQNLDLFLKTTNQPLTESLELTSEYRNRMGVAASDKAKMRKRSLSIPPVGKHGSIIDDQILANQTDSVL

SEQ ID NO: 46688 - DNA, 2591 bp, Arabidopsis thaliana
  misc_feature (1)..(2591): Ceres Seq. ID no. 12575373
  misc_feature (1)..(2591): Ortholog of  Ceres SEQ ID NO 15176095 as cited in SEQ ID NO 59699
accatcattcacacacactcatggcttcttcttcttcttcttcttcctccatcacaatcatcaccaccttcctcttccttctcctccacacaaccgccaaaaaaacctacatcatccgcgtcaatcactccgataaaccggaatcattcctcactcaccacgattggtacacatctcaactcaattcagaatcatctcttctctacacttacacaacctccttccatggcttctccgcttacctcgactccaccgaagccgattctctcctctcctcctcaaactcaatcctcgatatcttcgaagatcctctctacacacttcacactacgcgtactcctgagtttctcggtctcaattccgaattcggtgttcacgatctcggttcttcttctaacggcgttatcatcggagttttagatactggcgtttggcctgaatctagaagcttcgatgatactgatatgcctgagattccttctaaatggaaaggagaatgtgaatctggttccgatttcgattccaagttgtgtaacaagaagcttatcggagctagaagcttctccaaaggatttcaaatggcttctggtggtggtttttcgagtaagcgtgaatctgtttctcctcgtgatgttgacggacatggaacacatacttcaactaccgccgcgggatccgccgttagaaacgctagcttcctcggttacgccgccggtacggccagaggtatggccactcgtgctcgtgttgctacttataaagtttgttggagtactggttgttttggatctgatatactagctgctatggatcgagctatacttgatggtgttgatgtgctttcgttatctcttggtggtggttctgctccgtattatcgcgatacgattgcgattggagcgttttcggctatggagagaggtgtttttgtgtcttgttctgctggtaatagtggtcctactagagcttctgttgccaatgttgctccttgggttatgactgttggtgctggtactttagatagagattttccggcttttgcgaatctcggtaacgggaaacgacttaccggtgtttcgctgtatagcggtgtaggaatggggacgaagccgcttgaattggtttataataaagggaatagtagttcgagtaatctttgtttacctggttcgcttgattcgagtattgttcgtgggaagattgttgtttgtgatagaggtgttaatgctagagttgagaaaggagctgtggttagagatgctggtggtttagggatgataatggcgaatactgctgcgagtggagaggagcttgtggcggatagtcatttgcttcccgcgatcgctgtagggaagaagactggtgatttacttagggagtatgttaagtcagattctaaaccaaccgctcttcttgtttttaaaggaacggttcttgacgttaagccgtctcctgtggttgctgcttttagctcgagaggtcctaatactgttactcctgaaatcttgaagcctgatgttattggtcctggagttaatattttggctggttggtctgacgctattggtcctactggtcttgacaaggactctaggaggactcagttcaacatcatgtcaggtacgtcaatgtcatgcccacacatcagtggtttagcgggtcttttgaaagcagctcaccctgagtggagtccgagtgctatcaaatcagctctcatgactacagcttacgttcttgacaacaccaacgctcctctccatgatgctgcagacaacagcctatctaacccatatgctcacggctcgggccatgtagatccccaaaaggctctctcaccaggtcttgtctacgacatctcaaccgaggaatacatcaggtttttgtgctctctagactacacagtcgatcacattgttgcgattgtgaagcgacctagcgttaactgctcgaagaagttctcagatcctggtcagctcaactacccaagtttctcggttttgtttgggggtaaaagagttgtgcggtacactcgggaagtaacaaatgttggtgcagcaagctcggtttacaaagtgacggttaatggagctcctagtgtcggaatctctgttaaaccatcgaaactttcgtttaaaagcgtgggagagaagaagaggtacacagtcacgtttgttagcaagaaaggagtgagtatgacgaacaaggctgagtttggttccatcacttggagcaatccgcagcacgaagtgagaagtcccgttgcattctcttggaaccggttttgataaaaaaactaacatccctagtgatgatgttttctatttaagttatcttgattgggtttaggctaaaccaaagcccatcatgagccataagtagtgggaagtgttcttgtgtggtttggtttgagtcattgagtgtgtaggtgaaagcatcccaaaaaaagttagggatgataaaagaaaatgttgtcaggaaaagaacgttgatgtcgtcatatgtagtgcttcaagtttcttcattttaaccatcatactgatgtaatagtatctttcaaataagcaacaaaagtaatgtgacataatgtcatc

SEQ ID NO: 46689 - protein, 760 aa, Arabidopsis thaliana
  peptide (1)..(760): Ceres Seq. ID no. 12575374
HHSHTLMASSSSSSSSITIITTFLFLLLHTTAKKTYIIRVNHSDKPESFLTHHDWYTSQLNSESSLLYTYTTSFHGFSAYLDSTEADSLLSSSNSILDIFEDPLYTLHTTRTPEFLGLNSEFGVHDLGSSSNGVIIGVLDTGVWPESRSFDDTDMPEIPSKWKGECESGSDFDSKLCNKKLIGARSFSKGFQMASGGGFSSKRESVSPRDVDGHGTHTSTTAAGSAVRNASFLGYAAGTARGMATRARVATYKVCWSTGCFGSDILAAMDRAILDGVDVLSLSLGGGSAPYYRDTIAIGAFSAMERGVFVSCSAGNSGPTRASVANVAPWVMTVGAGTLDRDFPAFANLGNGKRLTGVSLYSGVGMGTKPLELVYNKGNSSSSNLCLPGSLDSSIVRGKIVVCDRGVNARVEKGAVVRDAGGLGMIMANTAASGEELVADSHLLPAIAVGKKTGDLLREYVKSDSKPTALLVFKGTVLDVKPSPVVAAFSSRGPNTVTPEILKPDVIGPGVNILAGWSDAIGPTGLDKDSRRTQFNIMSGTSMSCPHISGLAGLLKAAHPEWSPSAIKSALMTTAYVLDNTNAPLHDAADNSLSNPYAHGSGHVDPQKALSPGLVYDISTEEYIRFLCSLDYTVDHIVAIVKRPSVNCSKKFSDPGQLNYPSFSVLFGGKRVVRYTREVTNVGAASSVYKVTVNGAPSVGISVKPSKLSFKSVGEKKRYTVTFVSKKGVSMTNKAEFGSITWSNPQHEVRSPVAFSWNRF

SEQ ID NO: 46690 - protein, 754 aa, Arabidopsis thaliana
  peptide (1)..(754): Ceres Seq. ID no. 12575375
MASSSSSSSSITIITTFLFLLLHTTAKKTYIIRVNHSDKPESFLTHHDWYTSQLNSESSLLYTYTTSFHGFSAYLDSTEADSLLSSSNSILDIFEDPLYTLHTTRTPEFLGLNSEFGVHDLGSSSNGVIIGVLDTGVWPESRSFDDTDMPEIPSKWKGECESGSDFDSKLCNKKLIGARSFSKGFQMASGGGFSSKRESVSPRDVDGHGTHTSTTAAGSAVRNASFLGYAAGTARGMATRARVATYKVCWSTGCFGSDILAAMDRAILDGVDVLSLSLGGGSAPYYRDTIAIGAFSAMERGVFVSCSAGNSGPTRASVANVAPWVMTVGAGTLDRDFPAFANLGNGKRLTGVSLYSGVGMGTKPLELVYNKGNSSSSNLCLPGSLDSSIVRGKIVVCDRGVNARVEKGAVVRDAGGLGMIMANTAASGEELVADSHLLPAIAVGKKTGDLLREYVKSDSKPTALLVFKGTVLDVKPSPVVAAFSSRGPNTVTPEILKPDVIGPGVNILAGWSDAIGPTGLDKDSRRTQFNIMSGTSMSCPHISGLAGLLKAAHPEWSPSAIKSALMTTAYVLDNTNAPLHDAADNSLSNPYAHGSGHVDPQKALSPGLVYDISTEEYIRFLCSLDYTVDHIVAIVKRPSVNCSKKFSDPGQLNYPSFSVLFGGKRVVRYTREVTNVGAASSVYKVTVNGAPSVGISVKPSKLSFKSVGEKKRYTVTFVSKKGVSMTNKAEFGSITWSNPQHEVRSPVAFSWNRF

SEQ ID NO: 46691 - protein, 606 aa, Arabidopsis thaliana
  peptide (1)..(606): Ceres Seq. ID no. 12575376
MPEIPSKWKGECESGSDFDSKLCNKKLIGARSFSKGFQMASGGGFSSKRESVSPRDVDGHGTHTSTTAAGSAVRNASFLGYAAGTARGMATRARVATYKVCWSTGCFGSDILAAMDRAILDGVDVLSLSLGGGSAPYYRDTIAIGAFSAMERGVFVSCSAGNSGPTRASVANVAPWVMTVGAGTLDRDFPAFANLGNGKRLTGVSLYSGVGMGTKPLELVYNKGNSSSSNLCLPGSLDSSIVRGKIVVCDRGVNARVEKGAVVRDAGGLGMIMANTAASGEELVADSHLLPAIAVGKKTGDLLREYVKSDSKPTALLVFKGTVLDVKPSPVVAAFSSRGPNTVTPEILKPDVIGPGVNILAGWSDAIGPTGLDKDSRRTQFNIMSGTSMSCPHISGLAGLLKAAHPEWSPSAIKSALMTTAYVLDNTNAPLHDAADNSLSNPYAHGSGHVDPQKALSPGLVYDISTEEYIRFLCSLDYTVDHIVAIVKRPSVNCSKKFSDPGQLNYPSFSVLFGGKRVVRYTREVTNVGAASSVYKVTVNGAPSVGISVKPSKLSFKSVGEKKRYTVTFVSKKGVSMTNKAEFGSITWSNPQHEVRSPVAFSWNRF

SEQ ID NO: 46692 - DNA, 2263 bp, Arabidopsis thaliana
  misc_feature (1)..(2263): Ceres Seq. ID no. 15174481
  misc_feature (1)..(2263): Ortholog of  Ceres SEQ ID NO 15169092 as cited in SEQ ID NO 60430
  misc_feature (1)..(2263): Ortholog of  Ceres SEQ ID NO 14303680 as cited in SEQ ID NO 66019
  misc_feature (1)..(2263): Ortholog of  Ceres SEQ ID NO 15224940 as cited in SEQ ID NO 0
gctctctcttttcttgcaaacttttgctcggaattctatgctttgctgatctattgttttctctctgcaaaagtaatgagaagctttttgctatgttaagctttagatctgctattatttgttcctttcaagattctaactttggagcaagtaagcaagtcagagagaggacaaattagctgaaatgctggagattgaaagccctacgagtctctgtttccgtacaaacactacttgtaatgctctgcttcgagagcttcagaaaatatgggttgatattggtgagagtgatgctgagaaagaccggatgctaatggaattggagaaggaatgtcttgaaatctacagaagaaaagtggacgaggctgctaattccaaggcacagcttcatcagtcattggtatcaattgaagctgaaattgcttctttactggctgctcttggagtgttcaacagccactcaccgatgaaagcaaaggaaggttcaaaatcattgaaagaaaaacttgctgctgtgaggccaatgcttgaggacttaagattgcaaaaagatgaaagaatgaagcaatttgtggatataaaagcacaaattgagaagatgagtggtgaaatatctggatacagtgaccaactcaacaaaacgatggtcggttctttggctcttgatgaacaagaccagactcttcggaagcttaacgagtatcaaacacatctccgctcgctccagaaagagaagtcggatcgtctgaacaaggttttggactatgtgaatgaggtgcacactctaggtggtgttcttggagtcgactttggtcaaactgttagtgaggttcatccgagcttacataggactgaccatgagcagtctacaaacatttctgatgatacattggatggtctacaccacatgattcataagctgaaaaccgaaaggagcgttcggtttcaaaagttaaaggatgtagcgggttcactttttgagctatggaatctaatggacacatctcaagaagaaagaacgaaatttgcaagtgtcagttatgttgtaagatcatcagaatctgatatcactgagccaaatatcctctctagtgaaacaattgaacaggtgtctgcagaagtagactgttttaataagctgaaagctagcagaatgaaggagcttgtgatgaaaagaaggactgagttagagaatctttgcagattggctcacattgaggctgacacaagcacatcgcttgagaaatcaactgctttgattgattctggattagtggacccttcagagcttcttacaaatattgaattgcatataaacaaaatcaaagaagaagcacatagccggaaagaaataatcgataggattgaccgctggttatctgcgtgcgaagaggaaaactggctagaagaatacaatcaggatgaaacccggtatagtgccggaagaggtggacatgtaaacctcaagcatgcagaacgcgcccggatcacagtaaacaagatcccatgtatcaatggttgacaatctcatcaggaaaacacttctatgggaggacgaaacacggaaatcatttctatatgatggtgttcgattggtatccatacttgaagattataaattgacaaggaaacaacaggaagaggaaaagagacgataccgggatcaaaagaagatgcaggatctgttaataaagcggagggaatcaatttatggatcaaaaccgagtccaagaagaagcaacagtgtaagaaagaccaacggatacaatggggatgcatctgtgcctcctacgccccgcagaaactcagctggagcaacaaataacgacataatgaccaccccaagatcatactcaagccatcgccaaaacggatatttcaaggaagtaagaagactgtcaacagctcctttgaactttgtggcaataccaaaggaagactctgtctctacatacacttcggtttgcggctctgaaccagattcaccgttatataactaagtctcattaggcagcagttggttcaaccacaagaacttgagatggagtaggagttgggagttagatgaatgtaatcaaaaggaggagttactgatacagatcaagtaaccgtagacaattagtggtcgtatgtgtgtgactttgagttgacttgtgacggatacttcagggtaatagaagagtagaaaatggatgttatgttgagttgttaatttgttatagtagcttcaaaatatttcttttaatttcatcttttctttggt

SEQ ID NO: 46693 - protein, 445 aa, Arabidopsis thaliana
  peptide (1)..(445): Ceres Seq. ID no. 15174482
MLEIESPTSLCFRTNTTCNALLRELQKIWVDIGESDAEKDRMLMELEKECLEIYRRKVDEAANSKAQLHQSLVSIEAEIASLLAALGVFNSHSPMKAKEGSKSLKEKLAAVRPMLEDLRLQKDERMKQFVDIKAQIEKMSGEISGYSDQLNKTMVGSLALDEQDQTLRKLNEYQTHLRSLQKEKSDRLNKVLDYVNEVHTLGGVLGVDFGQTVSEVHPSLHRTDHEQSTNISDDTLDGLHHMIHKLKTERSVRFQKLKDVAGSLFELWNLMDTSQEERTKFASVSYVVRSSESDITEPNILSSETIEQVSAEVDCFNKLKASRMKELVMKRRTELENLCRLAHIEADTSTSLEKSTALIDSGLVDPSELLTNIELHINKIKEEAHSRKEIIDRIDRWLSACEEENWLEEYNQDETRYSAGRGGHVNLKHAERARITVNKIPCING

SEQ ID NO: 46694 - protein, 404 aa, Arabidopsis thaliana
  peptide (1)..(404): Ceres Seq. ID no. 15174483
MLMELEKECLEIYRRKVDEAANSKAQLHQSLVSIEAEIASLLAALGVFNSHSPMKAKEGSKSLKEKLAAVRPMLEDLRLQKDERMKQFVDIKAQIEKMSGEISGYSDQLNKTMVGSLALDEQDQTLRKLNEYQTHLRSLQKEKSDRLNKVLDYVNEVHTLGGVLGVDFGQTVSEVHPSLHRTDHEQSTNISDDTLDGLHHMIHKLKTERSVRFQKLKDVAGSLFELWNLMDTSQEERTKFASVSYVVRSSESDITEPNILSSETIEQVSAEVDCFNKLKASRMKELVMKRRTELENLCRLAHIEADTSTSLEKSTALIDSGLVDPSELLTNIELHINKIKEEAHSRKEIIDRIDRWLSACEEENWLEEYNQDETRYSAGRGGHVNLKHAERARITVNKIPCING

SEQ ID NO: 46695 - protein, 402 aa, Arabidopsis thaliana
  peptide (1)..(402): Ceres Seq. ID no. 15174484
MELEKECLEIYRRKVDEAANSKAQLHQSLVSIEAEIASLLAALGVFNSHSPMKAKEGSKSLKEKLAAVRPMLEDLRLQKDERMKQFVDIKAQIEKMSGEISGYSDQLNKTMVGSLALDEQDQTLRKLNEYQTHLRSLQKEKSDRLNKVLDYVNEVHTLGGVLGVDFGQTVSEVHPSLHRTDHEQSTNISDDTLDGLHHMIHKLKTERSVRFQKLKDVAGSLFELWNLMDTSQEERTKFASVSYVVRSSESDITEPNILSSETIEQVSAEVDCFNKLKASRMKELVMKRRTELENLCRLAHIEADTSTSLEKSTALIDSGLVDPSELLTNIELHINKIKEEAHSRKEIIDRIDRWLSACEEENWLEEYNQDETRYSAGRGGHVNLKHAERARITVNKIPCING

SEQ ID NO: 46696 - DNA, 951 bp, Arabidopsis thaliana
  misc_feature (1)..(951): Ceres Seq. ID no. 14310146
  misc_feature (1)..(951): Ortholog of  Ceres SEQ ID NO 12616895 as cited in SEQ ID NO 63909
  misc_feature (1)..(951): Ortholog of  Ceres SEQ ID NO 13598574 as cited in SEQ ID NO 69083
gacaaccccacttttgtacttctcttccctctccccctcccaaataaccgccgataaacaatgctccggctaagcaacgccgccgtaataacaaccaatgcaattctcgcattgatcggcctcgccgctctatctttttccgtctacgtctacgttcaaggcccatcacagtgtcaacgtttcgttcaaaaccctctcattgtaactgcggctctcctcttcttcatctcgtccttaggccttatcgctgctctctacggtagccacatcatcatcacactctatctcttcttccttttcctctccattcttctgcttcttgtcctctctgtctttatcttcctcgtcacgaatcccaccgccggaaaagcgttatccggtagaggaataggcaatgtcaagaccggagattatcagaactggatcgggaaccatttccttcgtgggaagaattgggaagggatcaccaaatgtttgtctgattctagggtttgtaaaaggtttggtccacgtgacattgactttgactccaaacatctctctaatgtacagtttggttgttgtcgacctcccgtagaatgtgggttcgaatcaaagaatgccacgtggtggacagttcctgccacagcgactacggcgattataggggattgtaaggcatggagtaacacgcagagccagttatgttacgcgtgcgagtcgtgtaagattggagttttaaaagggataagaaaaagatggaggatacttattgtcgtcaatctccttcttatccttctcgtcgtttttctttactcgtgtggctgttgcgtgagaaagaacaatcgtgttccatggaagcgccggtttttctaacaactctttccatttgttttccaaattattaattaattctttatatatttttctgtttttgaaatatttagttgatgtttgatgtttcttttagtg

SEQ ID NO: 46697 - protein, 264 aa, Arabidopsis thaliana
  peptide (1)..(264): Ceres Seq. ID no. 14310147
MLRLSNAAVITTNAILALIGLAALSFSVYVYVQGPSQCQRFVQNPLIVTAALLFFISSLGLIAALYGSHIIITLYLFFLFLSILLLLVLSVFIFLVTNPTAGKALSGRGIGNVKTGDYQNWIGNHFLRGKNWEGITKCLSDSRVCKRFGPRDIDFDSKHLSNVQFGCCRPPVECGFESKNATWWTVPATATTAIIGDCKAWSNTQSQLCYACESCKIGVLKGIRKRWRILIVVNLLLILLVVFLYSCGCCVRKNNRVPWKRRFF

SEQ ID NO: 46698 - DNA, 1086 bp, Arabidopsis thaliana
  misc_feature (1)..(1086): Ceres Seq. ID no. 14310136
  misc_feature (1)..(1086): Ortholog of  Ceres SEQ ID NO 13594464 as cited in SEQ ID NO 51203
  misc_feature (1)..(1086): Ortholog of  Ceres SEQ ID NO 15224956 as cited in SEQ ID NO 59487
agattataacccagggccggcgcaacccttcttcttaacaaaaaccttttgattccaattgttcttctctcttcttcttcttcttcttcttcttcttcttcgccgcttcttctctctcgaattcaccccatctcaagtgtacgttagcctcctccctctaatggcgactcgtcttaagtttgagaacaactgcgaagttggtgtcttttccaaactcactaatgcctattgcttagtcgctataggaggctctgagaacttttacagtgcttttgagtcggagttagcagatgttatccctattgttaagacctctattggaggaacacgaattattgggcgtctttgtgctggaaacaagaatgggcttcttgtacctcatacaacaactgaccaagagcttcaacacttaaggaacagtctacctgatcaagttgaggtccagcgaattgatgaacgtctgtctgctcttggaaattgcattgcctgcaatgactatgtagctcttgcccacaccgaccttgataaggaaaccgaggaaataatagcggatgtacttggcgttgaagttttccgtcagacaattgcaggcaacattctcgtgggcagttactgtgccctatccaacaaaggtggaatggtccatcctcacacctcagtggaagacttggaagaactctcaacacttcttcaagtccctctcgttgcaggaaccgtgaaccgtggtagtgaagttatcgctgcgggtatgaccgttaatgattggacctctttctgcggttcagacacaactgcgactgagctctctgtcatagacagcatcttcaagctaagggaagcccaacccagctctatcgtcgatgagatgaggaagtcattgatcgatacctatgtttaaattttgtttgtttggatgacacacacatcccaacatcgccaatgtgtcaatgtcagaaaattttcatactctactgttagcaagaattagctgttttattttatttttgtgtggtttttaacagtttaaaagtaatctgttgatgtctctttgaatctttctgagtaagtgataagaaaattctcctt

SEQ ID NO: 46699 - protein, 245 aa, Arabidopsis thaliana
  peptide (1)..(245): Ceres Seq. ID no. 14310137
MATRLKFENNCEVGVFSKLTNAYCLVAIGGSENFYSAFESELADVIPIVKTSIGGTRIIGRLCAGNKNGLLVPHTTTDQELQHLRNSLPDQVEVQRIDERLSALGNCIACNDYVALAHTDLDKETEEIIADVLGVEVFRQTIAGNILVGSYCALSNKGGMVHPHTSVEDLEELSTLLQVPLVAGTVNRGSEVIAAGMTVNDWTSFCGSDTTATELSVIDSIFKLREAQPSSIVDEMRKSLIDTYV

SEQ ID NO: 46700 - DNA, 2051 bp, Arabidopsis thaliana
  misc_feature (1)..(2051): Ceres Seq. ID no. 12575552
  misc_feature (1)..(2051): Ortholog of  Ceres SEQ ID NO 13597407 as cited in SEQ ID NO 64106
ggactggaactgtgatctaaaaaaaaatgcctgaagcagtctaaataattcttcttctctccagcaattaaacactacattacagccgtatagacccaaatcctttttcgttttttttttttttaataagacggcatttctctctcaatccgttcttatccaagcaaagctccgtcatcaaattcattagatcttccaaattgagntacaaagtccaaagtcggctcttttttggcattttccggcttanaataggcattttacctccaggggggctaaatagtgaagcttttttgtttgttcttgaagatataaagaaagatttgtagattangatttgagaaactgtagaagatagaatcaaaagatgagtttcagggatgataatgaggaggctaggaatgatttgcgtcggccgtttattcacaccggaagctggtaccggatgggttcgagacaatcgagtatgatgggttcctctcaagttattcgagacagctctatctctgttcttgcatgtgttttgatcgttgctcttggccctattcaattcggattcacttgtggttattcatctccaactcaagctgcaatcaccaaggatctcggtttaacagtatctgagtactctgtgtttggttctctttccaatgtgggtgctatggttggtgcaattgccagtggtcagattgcagaatacattggacgaaaagggtctcttatgattgctgcaattcccaatatcattggatggctttgcatatcatttgcaaaagatacttcttttctttacatgggaagacttttagaaggctttggcgttgggatcatctcttacactgtacctgtatatatcgctgagatagctccacaaaatatgagaggaggattgggttcggttaaccagctttctgtgacaattggaataatgttggcgtatttacttggcctctttgttccatggagaattcttgcagttctggggatattgccgtgtacataattgataccaggtctctttttcatccccgaatcccctcgctggctggcaaaaatgggtatgacagatgaatttgaaacttcattacaagttcttcgaggatttgagactgatattaccgttgaagttaatgaaatcaagagatctgtggcatcatctacaaagcgaaatacagttcggtttgtagatctcaaacgcaggagatactatttcccacttatggttggtatagggttgcttgtacttcaacaacttggtggaattaatggtgtcctattctattccagtacaatatttgaatctgcaggagttacatcgagtaacgcagcaacatttggggtcggggctattcaggtagtagcgactgcaatatccacttggttggtggacaaagcaggtcgtcggcttctgcttactatctcttcggttgggatgacgattagccttgtaattgttgcagctgctttctatcttaaggaatttgtgtctcctgattcagacatgtacagttggctgagcatattgtcagtagttggagttgtggcaatggttgtctttttctcattgggaatgggaccaataccgtggctcattatgtctgagatccttcctgtgaacataaagggtttagctggaagtattgcaactctagccaattggttcttttcttggttgatcaccatgacagcaaatttgctgttagcctggagcagtggaggaactttcactctgtatggattggtttgtgcattcacagtggtgttcgtgactctatgggttcctgagaccaaaggcaaaactcttgaagaacttcaatccttgttcagatgaacaaattgaaacaacttcattctttgtcaccctctctctccctctctgttttggccaagaacaagaagaaacaagagattttccagctttgttaattgggctgagaacgttactaagatttgtttgtttgttcgttgtgtgtcaataatcgcattatcttctatcacatgtatatcaacatactacattcaagtatttgtaattttattgaactctttac

SEQ ID NO: 46701 - protein, 258 aa, Arabidopsis thaliana
  peptide (1)..(258): Ceres Seq. ID no. 12575553
MGMTDEFETSLQVLRGFETDITVEVNEIKRSVASSTKRNTVRFVDLKRRRYYFPLMVGIGLLVLQQLGGINGVLFYSSTIFESAGVTSSNAATFGVGAIQVVATAISTWLVDKAGRRLLLTISSVGMTISLVIVAAAFYLKEFVSPDSDMYSWLSILSVVGVVAMVVFFSLGMGPIPWLIMSEILPVNIKGLAGSIATLANWFFSWLITMTANLLLAWSSGGTFTLYGLVCAFTVVFVTLWVPETKGKTLEELQSLFR

SEQ ID NO: 46702 - protein, 256 aa, Arabidopsis thaliana
  peptide (1)..(256): Ceres Seq. ID no. 12575554
MTDEFETSLQVLRGFETDITVEVNEIKRSVASSTKRNTVRFVDLKRRRYYFPLMVGIGLLVLQQLGGINGVLFYSSTIFESAGVTSSNAATFGVGAIQVVATAISTWLVDKAGRRLLLTISSVGMTISLVIVAAAFYLKEFVSPDSDMYSWLSILSVVGVVAMVVFFSLGMGPIPWLIMSEILPVNIKGLAGSIATLANWFFSWLITMTANLLLAWSSGGTFTLYGLVCAFTVVFVTLWVPETKGKTLEELQSLFR

SEQ ID NO: 46703 - protein, 211 aa, Arabidopsis thaliana
  peptide (1)..(211): Ceres Seq. ID no. 12575555
MSFRDDNEEARNDLRRPFIHTGSWYRMGSRQSSMMGSSQVIRDSSISVLACVLIVALGPIQFGFTCGYSSPTQAAITKDLGLTVSEYSVFGSLSNVGAMVGAIASGQIAEYIGRKGSLMIAAIPNIIGWLCISFAKDTSFLYMGRLLEGFGVGIISYTVPVYIAEIAPQNMRGGLGSVNQLSVTIGIMLAYLLGLFVPWRILAVLGILPCT

SEQ ID NO: 46704 - DNA, 2007 bp, Arabidopsis thaliana
  misc_feature (1)..(2007): Ceres Seq. ID no. 14310164
  misc_feature (1)..(2007): Ortholog of  Ceres SEQ ID NO 13595900 as cited in SEQ ID NO 69289
tgcccaattctcgggtcaaatccatctaaaagtttgtgcttttcgtattgggattagttcgattcctaaatctgatttagggttttaatcaatttggcaatcgggtctcttgcgatgaagttttcggagatttattgatttcatggtgggtttttgttttcgaagctcgttgatgaagaattgacttctggaatctcaatctctgaagggctttttcgatgttaaattcgtgaatctgggttttaaatgctgaattggaaaacagatccaggggctaattaaggaaaaaaggaggtttcttttgatattgatttttgggaattttgaggtttgagagagatcggagaagatggatctcgtgatcggtgggaaatttaagcttgggaagaaaattggtagtggatcatttggagagctttatctaggtgtaaatgtccaaacaggagaagaagttgctgtcaagctggaaaatgtgaagaccaagcatccacaacttcattatgagtcaaagttgtatatgctgcttcaaggaggatctggtattccgaacatcaagtggtttggagttgaaggtgactacagcgtaatggttattgaccttctaggtcctagtcttgaagacttgtttaactactgcaacagaaagttaacattgaaaactgttctcatgcttgccgaccaattacttaacagggttgaatttatgcatactcgaggtttccttcaccgtgatataaaacctgacaactttttaatgggccttggacgcaaagcaaatcaggtgtatatcattgattttggactagggaagaaatacagagaccttcagactcacaagcacattccttacagagaaaacaaaaatcttactgggacagctcggtatgcaagtgttaacactcaccttggagtcgaacaaagtcgaagggatgatttagaatcacttggttatgttcttatgtattttctcaaaggaagcttaccttggcagggattaaagacagaagtatgacagaatcagtgagaagaaagtgtcaactcctatagaggtgttgtgtaaaaaccaaccgtctgaattcgtttcatactttcattactgccgatctttacggtttgatgacaaacctgattactcttacctcaagaggcttttccgtgacttgtttatccgagaaggttatcaattcgattatgtatttgactggacagtgctaaagtatcctcaagtcggatccagctctggttctagttcacgaacaaggcatcatacaacagcgaaacccggattcaatgcagatcctatcgaaagacaagagaggatcctaggaaaggaaacaacccgatataaaatcccaggtgcagtggaggcattctccagaagacacccgactacaacttcttcgcctcgagatcgttctagatcaagaaactcagacgacggacctttctctaagcagacacatggagactccgaaagagcaaacagttcctcaagatacagagcatcttcttctaggaaagccgttgctgcttcaagctcccggccaagttctgcaggtggaccaagcgaaagccgaacttcaagtcgtctggtttcctcaagcggtggtggtggcagcggcagtggaaatggccgtccctcaactagccagagagtgcaagctggatatgaatccaagactctgtctttctctcgtgcaacagcggcaagaaacactcgggaagatcaattaagaagcttcgagcttctctctcttcggaaataaaggaaaatgatggagagagagacagcaaactccatgaaaacccaaagaaattacctctgaagaaagatgagaatcttggtttgagggaattcatatatttgaacctgatgaaatcctcagatctttttacatgtaatttcagcttcagcttgcagagatctttttcactcgttttgtttatgtaatcgtgatatgtgttagacaaaaataacaatcaaaaatgtagagagagtttccatgt

SEQ ID NO: 46705 - protein, 220 aa, Arabidopsis thaliana
  peptide (1)..(220): Ceres Seq. ID no. 14310165
MDLVIGGKFKLGKKIGSGSFGELYLGVNVQTGEEVAVKLENVKTKHPQLHYESKLYMLLQGGSGIPNIKWFGVEGDYSVMVIDLLGPSLEDLFNYCNRKLTLKTVLMLADQLLNRVEFMHTRGFLHRDIKPDNFLMGLGRKANQVYIIDFGLGKKYRDLQTHKHIPYRENKNLTGTARYASVNTHLGVEQSRRDDLESLGYVLMYFLKGSLPWQGLKTEV

SEQ ID NO: 46706 - protein, 164 aa, Arabidopsis thaliana
  peptide (1)..(164): Ceres Seq. ID no. 14310166
MLLQGGSGIPNIKWFGVEGDYSVMVIDLLGPSLEDLFNYCNRKLTLKTVLMLADQLLNRVEFMHTRGFLHRDIKPDNFLMGLGRKANQVYIIDFGLGKKYRDLQTHKHIPYRENKNLTGTARYASVNTHLGVEQSRRDDLESLGYVLMYFLKGSLPWQGLKTEV

SEQ ID NO: 46707 - protein, 141 aa, Arabidopsis thaliana
  peptide (1)..(141): Ceres Seq. ID no. 14310167
MVIDLLGPSLEDLFNYCNRKLTLKTVLMLADQLLNRVEFMHTRGFLHRDIKPDNFLMGLGRKANQVYIIDFGLGKKYRDLQTHKHIPYRENKNLTGTARYASVNTHLGVEQSRRDDLESLGYVLMYFLKGSLPWQGLKTEV

SEQ ID NO: 46708 - DNA, 2059 bp, Arabidopsis thaliana; identical to SEQ ID NO: 45907
  misc_feature (1)..(2059): Ceres Seq. ID no. 13591609
  misc_feature (1)..(2059): Ortholog of  Ceres SEQ ID NO 12778278 as cited in SEQ ID NO 63035

SEQ ID NO: 46709 - protein, 611 aa, Arabidopsis thaliana; identical to SEQ ID NO: 45908
  peptide (1)..(611): Ceres Seq. ID no. 13591610

SEQ ID NO: 46710 - protein, 585 aa, Arabidopsis thaliana; identical to SEQ ID NO: 45909
  peptide (1)..(585): Ceres Seq. ID no. 13591611

SEQ ID NO: 46711 - protein, 522 aa, Arabidopsis thaliana; identical to SEQ ID NO: 45910
  peptide (1)..(522): Ceres Seq. ID no. 13591612

SEQ ID NO: 46712 - DNA, 2578 bp, Arabidopsis thaliana
  misc_feature (1)..(2578): Ceres Seq. ID no. 13578913
  misc_feature (1)..(2578): Ortholog of  Ceres SEQ ID NO 12778278 as cited in SEQ ID NO 63035
gaatggagcgtgaaaatggagagagagagagtccaaacaccaagaccagctcctttttcacctatctctcttcttcatctgaatcagattttgtatcagaaagagagcacctgagctcataaattctggataagatcaaagtcagagtctttcttgtttttcatcacttacttgtatgacagaagaagatagctcagctaaaatgtcagaggatgttgagaaatatctcaacttaaatccaccttgctcctcctcctcctcttcttcctccgccgctacattcacgaacaagtctcgaaatttcaaatcttctcccccgccgtgtccagatcatgtccttgagaacgttttagagaacgtgcttcagttcctcacttccagatgcgatcgcaacgcagtctcattggtctgcagatcgtggtatcgcgtcgaggctcagactcgattagaggtttttattggaaactgttactcgctctctcctgctcggcttattcaccggttcaagcgtgttaggtctcttgtgcttaaagggaaacctaggtttgctgattttaatctcatgcctcctaattggggagctcaattctctccttgggttgctgctacagctaaggcttatccttggctcgagaaggttcatttgaagcgtatgtttgttacggatgatgatttggctcttcttgctgagtcgtttcctgggttcaaagagcttactttggtctgctgtgaaggttttgggactagtggtattgctattgttgctaacaaatgcaggcagctaaaggtccttgatttgatggagtcagaagtcacagatgatgagttggattggatttcttgttttcctgagggtgaaactcatctggagtctttgtcttttgactgtgttgaatcccctatcaatttcaaggcattggaggagctcgtggttaggtcaccattcttgaagaaacttagaacgaacaggtttgtttcccttgaagagctgcatcgactaatggttcgagcgccgcagttaacgagtcttgggacggggtcatttagtccagacaatgtgcctcagggagaacaacaaccggattatgcagctgcttttcgtgcttgtaaatccatagtttgtctctcaggattcagggaatttagaccggaatacctcctagccatctcttcagtttgtgctaatctcacctctcttaacttcagttatgctaacatttctcctcacatgctcaagcccatcataagcaactgtcacaatatccgagtcttctgggctcttgactcgatacgtgatgaaggactacaggcagtggctgccacatgcaaggagctccgtgagcttcggattttcccttttgatcctcgtgaagacagtgaaggtcctgtctcgggagtaggcctccaagcaatttcagagggctgtaggaaactggaatctatcctgtacttttgccagaatatgaccaatggagctgtgacagccatgtcggagaactgcccgcagcttactgtgtttagactttgcataatgggtcgccataggcctgaccacgtgacaggaaagccaatggacgatggatttggtgccattgttaaaaactgcaagaagctaacccgacttgcagtatcagggttactaacagatgaagcttttagctatataggagaatatgggaaattgatccgtacgctatctgtagcgtttgctgggaacagtgacaaggctctgagatacgttcttgagggttgtcctaaactacaaaagcttgagatcagggacagtccctttggagatgttggattgcgctctggtatgcatcggtattccaatatgaggtttgtttggttgtcgtcatgtctcatatcccgtggaggctgcaggggtgtttctcatgctctgcctaatgtagtcgtggaagtatttggagccgatggtgatgatgacgaagacactgtcactggggattatgttgagacattgtacttgtatcgatcccttgatggcccaaggaaggatgctccaaagtttgtaacaattttatgagaaaaactttggtgcaaatgaggccatgattggggaaaagcaaaactagcaagcagaagataatgtgtttgtaaactatgctctaaggtatcgataaatgcggtaactttctccaagcttttctcatcaagccttgggacagtatggcctttgggatgatggacaaccaccggattcttgtacgattctatcagctgagttccgtaaggtttcagaaaatcagtctctcctgcaacaaacaagccatttatcagattctcgatcatcaatgaacaaggttttgaagaattttcaaatcagcttttgcagaatgtacctaaaaagtggagggagagagtttccaaggaagacgaatatgcattctcggccaatttggcggatttgagcttagctcctccaatgattataacaaacttaatctttggtactttctgaaatgcaattccctgcaaaagttgtaaatgaatcagaaacagaatttgtaaataaatatgatcatgaatactatagtgtcattagtattgacgtacc

SEQ ID NO: 46713 - protein, 623 aa, Arabidopsis thaliana
  peptide (1)..(623): Ceres Seq. ID no. 13578914
MTEEDSSAKMSEDVEKYLNLNPPCSSSSSSSSAATFTNKSRNFKSSPPPCPDHVLENVLENVLQFLTSRCDRNAVSLVCRSWYRVEAQTRLEVFIGNCYSLSPARLIHRFKRVRSLVLKGKPRFADFNLMPPNWGAQFSPWVAATAKAYPWLEKVHLKRMFVTDDDLALLAESFPGFKELTLVCCEGFGTSGIAIVANKCRQLKVLDLMESEVTDDELDWISCFPEGETHLESLSFDCVESPINFKALEELVVRSPFLKKLRTNRFVSLEELHRLMVRAPQLTSLGTGSFSPDNVPQGEQQPDYAAAFRACKSIVCLSGFREFRPEYLLAISSVCANLTSLNFSYANISPHMLKPIISNCHNIRVFWALDSIRDEGLQAVAATCKELRELRIFPFDPREDSEGPVSGVGLQAISEGCRKLESILYFCQNMTNGAVTAMSENCPQLTVFRLCIMGRHRPDHVTGKPMDDGFGAIVKNCKKLTRLAVSGLLTDEAFSYIGEYGKLIRTLSVAFAGNSDKALRYVLEGCPKLQKLEIRDSPFGDVGLRSGMHRYSNMRFVWLSSCLISRGGCRGVSHALPNVVVEVFGADGDDDEDTVTGDYVETLYLYRSLDGPRKDAPKFVTIL

SEQ ID NO: 46714 - protein, 614 aa, Arabidopsis thaliana
  peptide (1)..(614): Ceres Seq. ID no. 13578915
MSEDVEKYLNLNPPCSSSSSSSSAATFTNKSRNFKSSPPPCPDHVLENVLENVLQFLTSRCDRNAVSLVCRSWYRVEAQTRLEVFIGNCYSLSPARLIHRFKRVRSLVLKGKPRFADFNLMPPNWGAQFSPWVAATAKAYPWLEKVHLKRMFVTDDDLALLAESFPGFKELTLVCCEGFGTSGIAIVANKCRQLKVLDLMESEVTDDELDWISCFPEGETHLESLSFDCVESPINFKALEELVVRSPFLKKLRTNRFVSLEELHRLMVRAPQLTSLGTGSFSPDNVPQGEQQPDYAAAFRACKSIVCLSGFREFRPEYLLAISSVCANLTSLNFSYANISPHMLKPIISNCHNIRVFWALDSIRDEGLQAVAATCKELRELRIFPFDPREDSEGPVSGVGLQAISEGCRKLESILYFCQNMTNGAVTAMSENCPQLTVFRLCIMGRHRPDHVTGKPMDDGFGAIVKNCKKLTRLAVSGLLTDEAFSYIGEYGKLIRTLSVAFAGNSDKALRYVLEGCPKLQKLEIRDSPFGDVGLRSGMHRYSNMRFVWLSSCLISRGGCRGVSHALPNVVVEVFGADGDDDEDTVTGDYVETLYLYRSLDGPRKDAPKFVTIL

SEQ ID NO: 46715 - protein, 494 aa, Arabidopsis thaliana
  peptide (1)..(494): Ceres Seq. ID no. 13578916
MPPNWGAQFSPWVAATAKAYPWLEKVHLKRMFVTDDDLALLAESFPGFKELTLVCCEGFGTSGIAIVANKCRQLKVLDLMESEVTDDELDWISCFPEGETHLESLSFDCVESPINFKALEELVVRSPFLKKLRTNRFVSLEELHRLMVRAPQLTSLGTGSFSPDNVPQGEQQPDYAAAFRACKSIVCLSGFREFRPEYLLAISSVCANLTSLNFSYANISPHMLKPIISNCHNIRVFWALDSIRDEGLQAVAATCKELRELRIFPFDPREDSEGPVSGVGLQAISEGCRKLESILYFCQNMTNGAVTAMSENCPQLTVFRLCIMGRHRPDHVTGKPMDDGFGAIVKNCKKLTRLAVSGLLTDEAFSYIGEYGKLIRTLSVAFAGNSDKALRYVLEGCPKLQKLEIRDSPFGDVGLRSGMHRYSNMRFVWLSSCLISRGGCRGVSHALPNVVVEVFGADGDDDEDTVTGDYVETLYLYRSLDGPRKDAPKFVTIL

SEQ ID NO: 46716 - DNA, 2402 bp, Arabidopsis thaliana
  misc_feature (1)..(2402): Ceres Seq. ID no. 14310194
  misc_feature (1)..(2402): Ortholog of  Ceres SEQ ID NO 15173102 as cited in SEQ ID NO 61106
tttcctctgtttatctaatctttctctgtttcttcctctactttttaaatttctcaaacgctcaatcatcgccggttttcgcctgcgacgtagctgcaaacccttctctcgccgcctatggtttctgcaacaccgttttgaagatcgaataccgagtcgctgatctggtcgcgaggctcacgttgcaagaaaagatcgggtttttagtgagtaaagctaacggcgtgactcgtcttgggattccaacgtatgaatggtggtctgaagcacttcacggcgtttcttacatcggacccggcacgcatttttctagccaagttcccggagctacgagtttcccgcaggttatactcaccgccgcttctttcaacgtatctctgtttcaagccattggcaaggtcgtctcaacggaagcgagggcaatgtacaacgtgggattagccggactaacgtattggtcaccgaacgtgaacatattccgagatccaagatggggaagagggcaagagactccaggagaagatccattgctcgctagtaagtatgcttcagggtacgttaagggtcttcaagagactgacggtggcgattctaaccgtctcaaagtcgccgcctgctgcaaacactataccgcttacgatgtcgataattggaaaggcgtagaacgttacagtttcaacgccgtggtgactcaacaagatatggatgatacgtatcaaccaccgttcaagagttgtgtggttgatgggaatgtggcgagtgttatgtgttcttacaatcaagttaacggcaaaccgacatgcgctgatccagatctgctctctggtgttatccgcggtgaatggaaattaaatgggtacattgtttcagattgtgattcagtagatgtcttgtataagaaccaacactatacaaagactccagctgaagctgcagccatatctatattggaggtttggatttaaactgtggttcattcttgggtcaacatacagaggaagcagttaagtcgggtttggtaaacgaggcagctatcgataaagcgatttcgaacaactttttgacccttatgcgtttaggattctttgatggaaacccaaagaaccaaatctatggcgggttaggtcctaccgacgtttgcacgtctgcgaatcaagagctagcagcagatgcagcaagacaaggcattgttctactcaagaacactggatgcttaccgctttctcctaaatcgatcaaaacactagccgtgattggaccaaacgcgaatgtcaccaaaacaatgattggaaactacgaaggcacgccgtgtaaatacacaacaccactacaaggactagccgggacggtatctacaacatatctaccaggctgctccaatgtagcttgtgctgtagcggatgtagccggcgccacgaaactagcagccactgcagatgtgtctgtgcttgtgatcggtgccgatcaatcaatcgaggcagagagccgagacagagtcgacctgcatcttcctggacagcaacaagagctggtgatccaagtggctaaagcagcaaaaggaccggtcttgctcgtcattatgtccggtggaggtttcgatattacattcgctaagaatgacccaaagatcgccggaattttgtgggttggttatcccggagaagccggtggtatcgccattgctgatatcatctttggccgttataatccaagtgggaaattaccgatgacgtggtatccacagtcgtatgtagagaaagttccgatgacaataatgaacatgagacccgataaagcaagcgggtatccgggtcggacttaccgattctacaccggagaaacagtatacgcattcggagatggactcagctacaccaaattcagtcacactttagtcaaagctccaagtctcgtttctctcggtctcgaagagaatcacgtttgccgatcatcggaatgtcaatcgctagacgcgatcggaccgcactgcgaaaacgctgtctccggcggtggatcggcgtttgaagttcatatcaaggtacgaaacggaggagatagagaagggattcacacggtgtttctattcacgacgccgccggcgattcacggatcgccgaggaagcatttggtaggattcgagaagattcgattggggaagagggaagaagcggtggttaggtttaaggtagagatatgtaaagatctgagtgtggttgatgagattgggaagaggaagattggtttgggaaagcatcttcttcatgtcggagatttaaaacattccttaagcattagaatctgattctatatttttatttgaggaagaaaaaaagaatatttaatatgcttaagcttttgcaagttggaaaagaaaagtaataaaaaaagaaattgtgaatctc

SEQ ID NO: 46717 - protein, 410 aa, Arabidopsis thaliana
  peptide (1)..(410): Ceres Seq. ID no. 14310195
MRLGFFDGNPKNQIYGGLGPTDVCTSANQELAADAARQGIVLLKNTGCLPLSPKSIKTLAVIGPNANVTKTMIGNYEGTPCKYTTPLQGLAGTVSTTYLPGCSNVACAVADVAGATKLAATADVSVLVIGADQSIEAESRDRVDLHLPGQQQELVIQVAKAAKGPVLLVIMSGGGFDITFAKNDPKIAGILWVGYPGEAGGIAIADIIFGRYNPSGKLPMTWYPQSYVEKVPMTIMNMRPDKASGYPGRTYRFYTGETVYAFGDGLSYTKFSHTLVKAPSLVSLGLEENHVCRSSECQSLDAIGPHCENAVSGGGSAFEVHIKVRNGGDREGIHTVFLFTTPPAIHGSPRKHLVGFEKIRLGKREEAVVRFKVEICKDLSVVDEIGKRKIGLGKHLLHVGDLKHSLSIRI

SEQ ID NO: 46718 - protein, 339 aa, Arabidopsis thaliana
  peptide (1)..(339): Ceres Seq. ID no. 14310196
MIGNYEGTPCKYTTPLQGLAGTVSTTYLPGCSNVACAVADVAGATKLAATADVSVLVIGADQSIEAESRDRVDLHLPGQQQELVIQVAKAAKGPVLLVIMSGGGFDITFAKNDPKIAGILWVGYPGEAGGIAIADIIFGRYNPSGKLPMTWYPQSYVEKVPMTIMNMRPDKASGYPGRTYRFYTGETVYAFGDGLSYTKFSHTLVKAPSLVSLGLEENHVCRSSECQSLDAIGPHCENAVSGGGSAFEVHIKVRNGGDREGIHTVFLFTTPPAIHGSPRKHLVGFEKIRLGKREEAVVRFKVEICKDLSVVDEIGKRKIGLGKHLLHVGDLKHSLSIRI

SEQ ID NO: 46719 - protein, 320 aa, Arabidopsis thaliana
  peptide (1)..(320): Ceres Seq. ID no. 14310197
SSVYLIFLCFFLYFLNFSNAQSSPVFACDVAANPSLAAYGFCNTVLKIEYRVADLVARLTLQEKIGFLVSKANGVTRLGIPTYEWWSEALHGVSYIGPGTHFSSQVPGATSFPQVILTAASFNVSLFQAIGKVVSTEARAMYNVGLAGLTYWSPNVNIFRDPRWGRGQETPGEDPLLASKYASGYVKGLQETDGGDSNRLKVAACCKHYTAYDVDNWKGVERYSFNAVVTQQDMDDTYQPPFKSCVVDGNVASVMCSYNQVNGKPTCADPDLLSGVIRGEWKLNGYIVSDCDSVDVLYKNQHYTKTPAEAAAISILEVWI

SEQ ID NO: 46720 - DNA, 2477 bp, Arabidopsis thaliana
  misc_feature (1)..(2477): Ceres Seq. ID no. 12574674
  misc_feature (1)..(2477): Ortholog of  Ceres SEQ ID NO 15173842 as cited in SEQ ID NO 61922
aataaaacacgatttcatgagagaaaatcgacaaaacccctctcaaccaaataatacaccttcttcttcttcttcttcttcttcttcttcacagctgggtttcttctaatggcggaaccgattccctcatcgtctctgtcaccgaaatctctacaatctcctaatcctatggaaccttctcctgcatcttctactcctttaccttcatcatcatctcaacaacaacaactcatgacagctccgatttccaattctgttaattccgctgcgtctccggcgatgactgtaactaccaccgaaggtattgtaattcagaacaattcgcaacctaacatctcctctcccaaccctacttcttctaacccaccaatcggagctcagatcccgtcgccttctcctctctctcacccttcttcatctttagatcagcaaacacagactcagcaactcgttcaacaaactcagcaattgcctcaacaacaacaacagattatgcagcaaatctcttcatctccgattccacaattatcgccgcaacagcaacagattctgcagcaacaacacatgacttcacagcaaatcccaatgtcgagttaccaaattgctcaatctcttcagcgatccccttctctttctcgcctgagccaaattcagcaacaacagcagcagcagcatcaaggtcaatacggcaacgtgttgagacagcaagctggtttgtacggaaccatgaactttggtggctcaggttcagttcaacagagccagcagaatcagcagatggttaaccctaatatgtccagagcaggtttagttggccaaagcggtcacttgcctatgcttaacggtgctgctggagctgctcagatgaatattcaaccccaattattggctgcttcgccgaggcagaaatctggcatggttcaaggttcgcagtttcatccgggaagttctggacaacagttacaagggatgcaagctatgggaatgatgggatcactgaatttgacctcgcaaatgagaggtaaccctgctctctatgcgcagcagagaatcaacccggggcagatgagacagcaattgtcacagcaaaacgctcttacttcacctcaggtccagaacctccagagaacatcttctctcgcatttatgaatcctcagctatcgggtttggcccagaatggacaagctggcatgatgcaaaactctttgtcacagcagcaatggctgaagcaaatgtcgggaataacgagccccaattcattccgactccaaccgagtcaaagacaggctcttctcttacagcagcagcagcagcaacaacaacaactgtcctctcctcagttacatcaatcttctatgtccttgaatcagcagcagatatcacagataatacaacagcagcagcaacaatcacaattaggccagtcgcagatgaaccaatcccattcccaacaacaactacaacagatgcagcagcaactacagcagcaaccacaacagcagatgcagcagcagcagcaacaacaacagcaaatgcagattaatcaacaacagccatctccaaggatgttgagtcatgcaggacaaaaatctgtcagtttaacgggttcacaaccagaggctacacaatcgggtacaacaacaccaggtggtagctcaagccagggaacagaagcaacaaaccaactccttggtaaaaggaagatacaggatctggtttcgcaggtggatgtacatgcgaaactggatcctgatgttgaagacctccttttggaggtggcagatgacttcattgattcggtcacatcttttgcatgtagcttggctaagcatcgtaaatcatctgtattggagcccaaggatatattactccacctagagaaaaacttgcacttgacaattcctggattctcaagtgaggataaacgtcaaacaaaaactgtaccaactgatctccacaagaagcgacttgcaatggtgcgtgcattactagaatcctcaaaaccagagacgaatgcaagcaattccaaggaaactatgagacaagcgatggtgaacccaaatggtccgaatcatctcttaagaccctcccaaagttcagaacaattggtttcgcagacatccggtcctcacatattacaacacatgacacgatactaaaggacttgaatatagaagcctgagccagctctcactgctatgttcatcttcttggttgcaggagtttacacatctatggagagttgaaggcacaagtagtgaaactgtatgtattatatataaaattcatgagtcttataggcaatcaaataatacagttatttttttcgtagttgtgggactttctaactatttcgtcttcttttttagtgggtttttgttttttccttttgtaattttagttgtcctctccattttaagcttgaaagttttagctctttgatgactcagcagttgatgatatgttaaatgatgtc

SEQ ID NO: 46721 - protein, 683 aa, Arabidopsis thaliana [sequence omitted]

SEQ ID NO: 46722 - protein, 663 aa, Arabidopsis thaliana
  peptide (1)..(663): Ceres Seq. ID no. 12574676
MEPSPASSTPLPSSSSQQQQLMTAPISNSVNSAASPAMTVTTTEGIVIQNNSQPNISSPNPTSSNPPIGAQIPSPSPLSHPSSSLDQQTQTQQLVQQTQQLPQQQQQIMQQISSSPIPQLSPQQQQILQQQHMTSQQIPMSSYQIAQSLQRSPSLSRLSQIQQQQQQQHQGQYGNVLRQQAGLYGTMNFGGSGSVQQSQQNQQMVNPNMSRAGLVGQSGHLPMLNGAAGAAQMNIQPQLLAASPRQKSGMVQGSQFHPGSSGQQLQGMQAMGMMGSLNLTSQMRGNPALYAQQRINPGQMRQQLSQQNALTSPQVQNLQRTSSLAFMNPQLSGLAQNGQAGMMQNSLSQQQWLKQMSGITSPNSFRLQPSQRQALLLQQQQQQQQQLSSPQLHQSSMSLNQQQISQIIQQQQQQSQLGQSQMNQSHSQQQLQQMQQQLQQQPQQQMQQQQQQQQQMQINQQQPSPRMLSHAGQKSVSLTGSQPEATQSGTTTPGGSSSQGTEATNQLLGKRKIQDLVSQVDVHAKLDPDVEDLLLEVADDFIDSVTSFACSLAKHRKSSVLEPKDILLHLEKNLHLTIPGFSSEDKRQTKTVPTDLHKKRLAMVRALLESSKPETNASNSKETMRQAMVNPNGPNHLLRPSQSSEQLVSQTSGPHILQHMTRY

SEQ ID NO: 46723 - protein, 642 aa, Arabidopsis thaliana
  peptide (1)..(642): Ceres Seq. ID no. 12574677
MTAPISNSVNSAASPAMTVTTTEGIVIQNNSQPNISSPNPTSSNPPIGAQIPSPSPLSHPSSSLDQQTQTQQLVQQTQQLPQQQQQIMQQISSSPIPQLSPQQQQILQQQHMTSQQIPMSSYQIAQSLQRSPSLSRLSQIQQQQQQQHQGQYGNVLRQQAGLYGTMNFGGSGSVQQSQQNQQMVNPNMSRAGLVGQSGHLPMLNGAAGAAQMNIQPQLLAASPRQKSGMVQGSQFHPGSSGQQLQGMQAMGMMGSLNLTSQMRGNPALYAQQRINPGQMRQQLSQQNALTSPQVQNLQRTSSLAFMNPQLSGLAQNGQAGMMQNSLSQQQWLKQMSGITSPNSFRLQPSQRQALLLQQQQQQQQQLSSPQLHQSSMSLNQQQISQIIQQQQQQSQLGQSQMNQSHSQQQLQQMQQQLQQQPQQQMQQQQQQQQQMQINQQQPSPRMLSHAGQKSVSLTGSQPEATQSGTTTPGGSSSQGTEATNQLLGKRKIQDLVSQVDVHAKLDPDVEDLLLEVADDFIDSVTSFACSLAKHRKSSVLEPKDILLHLEKNLHLTIPGFSSEDKRQTKTVPTDLHKKRLAMVRALLESSKPETNASNSKETMRQAMVNPNGPNHLLRPSQSSEQLVSQTSGPHILQHMTRY

SEQ ID NO: 46724 - DNA, 2009 bp, Arabidopsis thaliana
  misc_feature (1)..(2009): Ceres Seq. ID no. 13591952
  misc_feature (1)..(2009): Ortholog of  Ceres SEQ ID NO 14313670 as cited in SEQ ID NO 54491
atttctctgaagccgttgtgttctcttattgccgccaccaccaccatgtgtgggattctcgctgtgttaggctgcgtcgataactctcaagctaaacgttcccgtatcatcgaactctctcgcagattgaggcatagaggtcctgactggagtggtctacattgttatgaggattgttatttggctcatgagcgtttggctatcgttgaccccacttctggagatcaaccactctataacgaagataagaccattgctgtcacggtcaatggagagatttacaaccacaaggctttgcgtgaaaatttgaagtctcaccaattccgtactgggagtgattgtgaagtgattgcccatctttacgaagaacatggagaggaatttgtcgacatgttggatggcatgtttgcatttgtgcttcttgatacccgagacaaaagctttattgctgcaagggatgccattggtatcactccactctacatcgggtggggtctcgatggttctgtttggtttgcttccgagatgaaagcacttagtgatgattgtgagcagtttatgtgcttccccccaggccacatctattcaagtaaacaaggtgggcttaggaggtggtacaaccccccgtggttctctgaggttgttccttcaaccccatatgatcccctagtggtgcgcaatacttttgagaaggctgttataaaacgactaatgactgatgtgccttttggtgtcctcctatctggtggattagattcatcccttgttgcttcagtagcattacgccatctggaaaaatcagaagctgcttgtcagtggggttcaaagttgcacacattttgtatcggtttgaagggatccccggatcttaaagctggcagagaagtcgctgactatttaggaactcgccaccacgagttacactttacagttcaggacggaatagatgccatagaagaagtcatctaccatgttgagacctatgatgtgactactattagagccagcactccaatgtttcttatgtcgcgaaaaatcaaatcgcttggtgtaaagatggttctttctggggaaggctctgatgaaatttttggaggatatttgtacttccataaagctcccaacaagaaggaatttcatgaggaaacatgtcgaaagatcaaagctcttcatcaatatgactgcttgagggctaacaaatcaacttctgcatggggtgttgaggctcgtgtacctttcctcgataaagaatttataaatgtcgcaatgagcatcgatccagagtggaagatgattaggcctgatttgggaaggatcgagaaatgggtgttacgcaatgcctttgatgatgagaaaaatccttacctaccaaagcacattctatataggcagaaagaacagttcagtgatggagttggatacagctggattgatggtctaaaagatcatgcaaacaaacatgtctctgagacaatgctgatgaacgcaagctttgtcttccctgataacacacctttgacaaaagaagcttactactacagaaccatctttgaaaagttcttccctaagagtgctgctagagcaactgtaccaggaggtccaagtgtggcatgtagcacagcaaaagctgtggaatgggacgcagcttggtcacagaatcttgacccatcaggtcgtgcggctcttggagttcatgtttcagcttatggggaagataaaaccgaagattctcgtcccgagaagctacagaaactagcagagaagactccagccattgtttgaggataaacaaacaaggtttcagctaatgttgaatcgtgcaatactcttattgtctcaaagacaatagatatcctcttctataggttctaaaaaggctttctttttttcttgttttctggggttctttggatgtgtacctaataagttcctggtgaatttctgtgtttagtgttattagacaatccatgaaagcttgatacttcagattatgaacgttatttttcatg

SEQ ID NO: 46725 - protein, 593 aa, Arabidopsis thaliana
  peptide (1)..(593): Ceres Seq. ID no. 13591953
ISLKPLCSLIAATTTMCGILAVLGCVDNSQAKRSRIIELSRRLRHRGPDWSGLHCYEDCYLAHERLAIVDPTSGDQPLYNEDKTIAVTVNGEIYNHKALRENLKSHQFRTGSDCEVIAHLYEEHGEEFVDMLDGMFAFVLLDTRDKSFIAARDAIGITPLYIGWGLDGSVWFASEMKALSDDCEQFMCFPPGHIYSSKQGGLRRWYNPPWFSEVVPSTPYDPLVVRNTFEKAVIKRLMTDVPFGVLLSGGLDSSLVASVALRHLEKSEAACQWGSKLHTFCIGLKGSPDLKAGREVADYLGTRHHELHFTVQDGIDAIEEVIYHVETYDVTTIRASTPMFLMSRKIKSLGVKMVLSGEGSDEIFGGYLYFHKAPNKKEFHEETCRKIKALHQYDCLRANKSTSAWGVEARVPFLDKEFINVAMSIDPEWKMIRPDLGRIEKWVLRNAFDDEKNPYLPKHILYRQKEQFSDGVGYSWIDGLKDHANKHVSETMLMNASFVFPDNTPLTKEAYYYRTIFEKFFPKSAARATVPGGPSVACSTAKAVEWDAAWSQNLDPSGRAALGVHVSAYGEDKTEDSRPEKLQKLAEKTPAIV

SEQ ID NO: 46726 - protein, 578 aa, Arabidopsis thaliana
  peptide (1)..(578): Ceres Seq. ID no. 13591954
MCGILAVLGCVDNSQAKRSRIIELSRRLRHRGPDWSGLHCYEDCYLAHERLAIVDPTSGDQPLYNEDKTIAVTVNGEIYNHKALRENLKSHQFRTGSDCEVIAHLYEEHGEEFVDMLDGMFAFVLLDTRDKSFIAARDAIGITPLYIGWGLDGSVWFASEMKALSDDCEQFMCFPPGHIYSSKQGGLRRWYNPPWFSEVVPSTPYDPLVVRNTFEKAVIKRLMTDVPFGVLLSGGLDSSLVASVALRHLEKSEAACQWGSKLHTFCIGLKGSPDLKAGREVADYLGTRHHELHFTVQDGIDAIEEVIYHVETYDVTTIRASTPMFLMSRKIKSLGVKMVLSGEGSDEIFGGYLYFHKAPNKKEFHEETCRKIKALHQYDCLRANKSTSAWGVEARVPFLDKEFINVAMSIDPEWKMIRPDLGRIEKWVLRNAFDDEKNPYLPKHILYRQKEQFSDGVGYSWIDGLKDHANKHVSETMLMNASFVFPDNTPLTKEAYYYRTIFEKFFPKSAARATVPGGPSVACSTAKAVEWDAAWSQNLDPSGRAALGVHVSAYGEDKTEDSRPEKLQKLAEKTPAIV

SEQ ID NO: 46727 - protein, 463 aa, Arabidopsis thaliana
  peptide (1)..(463): Ceres Seq. ID no. 13591955
MLDGMFAFVLLDTRDKSFIAARDAIGITPLYIGWGLDGSVWFASEMKALSDDCEQFMCFPPGHIYSSKQGGLRRWYNPPWFSEVVPSTPYDPLVVRNTFEKAVIKRLMTDVPFGVLLSGGLDSSLVASVALRHLEKSEAACQWGSKLHTFCIGLKGSPDLKAGREVADYLGTRHHELHFTVQDGIDAIEEVIYHVETYDVTTIRASTPMFLMSRKIKSLGVKMVLSGEGSDEIFGGYLYFHKAPNKKEFHEETCRKIKALHQYDCLRANKSTSAWGVEARVPFLDKEFINVAMSIDPEWKMIRPDLGRIEKWVLRNAFDDEKNPYLPKHILYRQKEQFSDGVGYSWIDGLKDHANKHVSETMLMNASFVFPDNTPLTKEAYYYRTIFEKFFPKSAARATVPGGPSVACSTAKAVEWDAAWSQNLDPSGRAALGVHVSAYGEDKTEDSRPEKLQKLAEKTPAIV

SEQ ID NO: 46728 - DNA, 1094 bp, Arabidopsis thaliana
  misc_feature (1)..(1094): Ceres Seq. ID no. 13578657
  misc_feature (1)..(1094): Ortholog of  Ceres SEQ ID NO 14312324 as cited in SEQ ID NO 60453
  misc_feature (1)..(1094): Ortholog of  Ceres SEQ ID NO 12624791 as cited in SEQ ID NO 63574
  misc_feature (1)..(1094): Ortholog of  Ceres SEQ ID NO 12780574 as cited in SEQ ID NO 65624
gggatatcgtcgtcatttctctatcttgaataaagtaccgataatgacctcaaccaatccggtggtcgccgaagtaataccggcggaaacttctacagatgctacagagacgacgattgcaacgacggaagctggtgaagcaccggagaagaaggtgaggaaagcttacacaatcaccaagtctagagagagttggactgaaggagaacacgacaagtttctggaagctcttcaattgtttgatcgtgactggaaaaagatagaagattttgttggttcaaagacagttattcagatcaggagccatgcccaaaaatactttctaaaggtccaaaaaaatgggactttagcacatgttccaccccctaggcctaagcgcaaagctgctcatccatatcctcaaaaggcatcgaaaaatgctcaaatgtcgcttcacgtttccatgtcctttcctactcaaataaataacctgcctggatatactccatgggatgatgatacatctgcattgttaaacattgctgtaagtggggttattccaccagaagatgaacttgatactctttgtggagcagaagttgatgttggatcaaatgacatgataagtgaaactagtccttcagcatctggtatcggaagctcaagcagaacactatcagattctaagggtttgagactggcgaaacaagctccctcaatgcatggtcttcctgattttgctgaggtttataacttcattgggagtgtgttcgatcctgacagcaaaggccgcatgaaaaagctcaaggaaatggatcctataaatttcgaaactgttttgctgttgatgagaaacctcacagtgaacttgtcaaaccctgactttgaacctacttctgaatatgttgatgctgcagaggaaggtcatgaacacttaagctcttagctgtttgtgcactcaacaagttatatatcttcttgacgacttcttgctcgcaacaactctctaccagctatcaaatgcattctacggttgttgtctgaggagaacataactgagtcgtcgtcacaaacaagaggaacatatgcagtttcggtcagaaccagtcgtgtga

SEQ ID NO: 46729 - protein, 307 aa, Arabidopsis thaliana
  peptide (1)..(307): Ceres Seq. ID no. 13578658
GYRRHFSILNKVPIMTSTNPVVAEVIPAETSTDATETTIATTEAGEAPEKKVRKAYTITKSRESWTEGEHDKFLEALQLFDRDWKKIEDFVGSKTVIQIRSHAQKYFLKVQKNGTLAHVPPPRPKRKAAHPYPQKASKNAQMSLHVSMSFPTQINNLPGYTPWDDDTSALLNIAVSGVIPPEDELDTLCGAEVDVGSNDMISETSPSASGIGSSSRTLSDSKGLRLAKQAPSMHGLPDFAEVYNFIGSVFDPDSKGRMKKLKEMDPINFETVLLLMRNLTVNLSNPDFEPTSEYVDAAEEGHEHLSS

SEQ ID NO: 46730 - protein, 293 aa, Arabidopsis thaliana
  peptide (1)..(293): Ceres Seq. ID no. 13578659
MTSTNPVVAEVIPAETSTDATETTIATTEAGEAPEKKVRKAYTITKSRESWTEGEHDKFLEALQLFDRDWKKIEDFVGSKTVIQIRSHAQKYFLKVQKNGTLAHVPPPRPKRKAAHPYPQKASKNAQMSLHVSMSFPTQINNLPGYTPWDDDTSALLNIAVSGVIPPEDELDTLCGAEVDVGSNDMISETSPSASGIGSSSRTLSDSKGLRLAKQAPSMHGLPDFAEVYNFIGSVFDPDSKGRMKKLKEMDPINFETVLLLMRNLTVNLSNPDFEPTSEYVDAAEEGHEHLSS

SEQ ID NO: 46731 - protein, 166 aa, Arabidopsis thaliana; identical to SEQ ID NO: 22744
  peptide (1)..(166): Ceres Seq. ID no. 13578660

SEQ ID NO: 46732 - DNA, 2299 bp, Arabidopsis thaliana
  misc_feature (1)..(2299): Ceres Seq. ID no. 15168693
  misc_feature (1)..(2299): Ortholog of  Ceres SEQ ID NO 15170885 as cited in SEQ ID NO 54326
gtttctctctcccttcctttaagaacgcgtttgcagactttgatcagacttcgcgttcccgccgcccatctccctctctctctctttttctctctcacacgtttcttttttgtctctctccctgattcatcgccgtagctgtgtgaccgaacattgctgcgagttcctcaaaacccaaatctttcttcctcaaagactctgttttttctttcttcctttcttcaatggcgttatcgaaaaacagtaacagtaacagctttaacaagaagaaagtttcgtatatctcagtcccttctcagatcataaactctttatcatcttcctcattacaatctcttcttgtttctcccaagaaatcatcaagaagcaccaacagattcagcttctcttataggaaccctagaatctggttctttactctcttcctcgtctcactctttggaatgttgaaactcggattcaacgttgacccaatctctctccctttctcacgttacccttgttcaacgacccaacaaccactaagcttcgacggagaacaaaacgctgcatcccatcttggtttggctcaagagccgattttgtctactgggtcatcgaattcgaatgcgattatacaattaaacggtggaaagaacgagactttgttaacggaaggtgatttctggaagcaacctgatgggttagggtttaagccctgtttgggatttacaagtcaatatagaaaagatagcaattcgattttgaagaacagatggaagtatttgcttgttgttgtctctggtgggatgaatcagcaaaggaatcagattgttgatgctgttgtgatcgctaggatccttggagcttctttagttgttcctgttttgcaggttaatgtcatttggggagacgaaagtgaatttgcggatatattcgatttggagcatttcaaggatgttttagcagatgatgttcatatagtttcgtctttaccttctacacatgtaatgacgagacctgtcgaagagaagaggactccacttcatgcttctcctcaatggattcgtgctcattatcttaagcgaataaacagagaaagagttttacttctccgtggactcgattcaagactctccaaggaccttccctctgatcttcagaaactccgatgcaaggttgctttccaagcgctgagattttctccgaggattcttgaactcggtaataaactagcttcaagaatgcgtaaccaaggacagtatctctcacttcatctaagaatggagaaagatgtttgggttagaactggttgtctccctggtttaactcccgagtatgatgaaatagtcaacagcgaaagagaacgacaccctgagcttcttaccggtagatcaaacatgacttatcacgagagaaaacttgccggtttatgccctttaactgctctagaagtcacaaggctgcttaaagcattagaagctccaaaggatgcgagaatctattgggcaggaggagagcctctaggaggaaaagaggttttggagccactaactaaagaattccctcagttctacaacaagcatgatcttgcattaccgggagaactcgaaccatttgccaacaaagcttcggttatggctgctatagactacattgtctgcgaaaagagcgatgttttcataccgtctcatggaggaaatatgggacacgcgttaagggcaaagagcttacgctggtcacaagaaatacatcactcctaataagagacagatgcttccttatttcatgaacacgtcgcttcctgaatcggattttaacagaattgtgaaagatcttcatcgagaatcgctaggacagccggagttgagaatgagcaaagctggtaaagatgttacaaaacatcctgttccagagtgtatgtgctcggatagacaacaacaagaacaacagtccgatgcttaagccttgaaggacattttggacattatttggtgcgcggaaaatgaagaagacgccgattttttcccgatcacccggaagattgattgaggaagacgattcatggtggttcgtgcgatattcttttagttcgggttttaatctgatcattttttcaaaatcttttggagtaaatatatattcgtttcaactgaggttatttttttcttacatgtttttacgatatacgtgagaagtagaatagtgaggttataagatatgattctttgattcgatttatttgggctgtaattatatattacagagtttgtatacggttctagttgtacttgtactataaataaagcaacagttaatc

SEQ ID NO: 46733 - protein, 505 aa, Arabidopsis thaliana
  peptide (1)..(505): Ceres Seq. ID no. 15168694
MALSKNSNSNSFNKKKVSYISVPSQIINSLSSSSLQSLLVSPKKSSRSTNRFSFSYRNPRIWFFTLFLVSLFGMLKLGFNVDPISLPFSRYPCSTTQQPLSFDGEQNAASHLGLAQEPILSTGSSNSNAIIQLNGGKNETLLTEGDFWKQPDGLGFKPCLGFTSQYRKDSNSILKNRWKYLLVVVSGGMNQQRNQIVDAVVIARILGASLVVPVLQVNVIWGDESEFADIFDLEHFKDVLADDVHIVSSLPSTHVMTRPVEEKRTPLHASPQWIRAHYLKRINRERVLLLRGLDSRLSKDLPSDLQKLRCKVAFQALRFSPRILELGNKLASRMRNQGQYLSLHLRMEKDVWVRTGCLPGLTPEYDEIVNSERERHPELLTGRSNMTYHERKLAGLCPLTALEVTRLLKALEAPKDARIYWAGGEPLGGKEVLEPLTKEFPQFYNKHDLALPGELEPFANKASVMAAIDYIVCEKSDVFIPSHGGNMGHALRAKSLRWSQEIHHS

SEQ ID NO: 46734 - protein, 432 aa, Arabidopsis thaliana
  peptide (1)..(432): Ceres Seq. ID no. 15168695
MLKLGFNVDPISLPFSRYPCSTTQQPLSFDGEQNAASHLGLAQEPILSTGSSNSNAIIQLNGGKNETLLTEGDFWKQPDGLGFKPCLGFTSQYRKDSNSILKNRWKYLLVVVSGGMNQQRNQIVDAVVIARILGASLVVPVLQVNVIWGDESEFADIFDLEHFKDVLADDVHIVSSLPSTHVMTRPVEEKRTPLHASPQWIRAHYLKRINRERVLLLRGLDSRLSKDLPSDLQKLRCKVAFQALRFSPRILELGNKLASRMRNQGQYLSLHLRMEKDVWVRTGCLPGLTPEYDEIVNSERERHPELLTGRSNMTYHERKLAGLCPLTALEVTRLLKALEAPKDARIYWAGGEPLGGKEVLEPLTKEFPQFYNKHDLALPGELEPFANKASVMAAIDYIVCEKSDVFIPSHGGNMGHALRAKSLRWSQEIHHS

SEQ ID NO: 46735 - protein, 317 aa, Arabidopsis thaliana
  peptide (1)..(317): Ceres Seq. ID no. 15168696
MNQQRNQIVDAVVIARILGASLVVPVLQVNVIWGDESEFADIFDLEHFKDVLADDVHIVSSLPSTHVMTRPVEEKRTPLHASPQWIRAHYLKRINRERVLLLRGLDSRLSKDLPSDLQKLRCKVAFQALRFSPRILELGNKLASRMRNQGQYLSLHLRMEKDVWVRTGCLPGLTPEYDEIVNSERERHPELLTGRSNMTYHERKLAGLCPLTALEVTRLLKALEAPKDARIYWAGGEPLGGKEVLEPLTKEFPQFYNKHDLALPGELEPFANKASVMAAIDYIVCEKSDVFIPSHGGNMGHALRAKSLRWSQEIHHS

SEQ ID NO: 46736 - DNA, 1736 bp, Arabidopsis thaliana; identical to SEQ ID NO: 24002
  misc_feature (1)..(1736): Ceres Seq. ID no. 12601746
  misc_feature (1)..(1736): Ortholog of  Ceres SEQ ID NO 15174547 as cited in SEQ ID NO 59586
  misc_feature (1)..(1736): Ortholog of  Ceres SEQ ID NO 15169470 as cited in SEQ ID NO 66036

SEQ ID NO: 46737 - protein, 523 aa, Arabidopsis thaliana; identical to SEQ ID NO: 24003
  peptide (1)..(523): Ceres Seq. ID no. 12601747

SEQ ID NO: 46738 - protein, 507 aa, Arabidopsis thaliana; identical to SEQ ID NO: 24004
  peptide (1)..(507): Ceres Seq. ID no. 12601748

SEQ ID NO: 46739 - protein, 403 aa, Arabidopsis thaliana; identical to SEQ ID NO: 24005
  peptide (1)..(403): Ceres Seq. ID no. 12601749

SEQ ID NO: 46740 - DNA, 2354 bp, Arabidopsis thaliana
  misc_feature (1)..(2354): Ceres Seq. ID no. 12600824
  misc_feature (1)..(2354): Ortholog of  Ceres SEQ ID NO 13590780 as cited in SEQ ID NO 68149
  misc_feature (1)..(2354): Ortholog of  Ceres SEQ ID NO 13599756 as cited in SEQ ID NO 0
aaaaaaaaaccctagtcacactcagataacataaacctttgacaacaaattttgatgctccttcgtcttacggctcgctctattcgtcgtttcacaacttcttcttcgtctctaccattgctctcatcgtcttcgttttgtactgttccaacaatggcagctaatcatcctaaggatgaagcgtatctctccgccgtcatccccaaacgtatcaagcttttcgagcagatccaagcgaatcaactcgagaatcttaagtctcttccacacgatccgatcaaggttacgttaccagatggaaatgtgaaagaaggaaagaagtgggagacaactccgatggatatcgctgctcagatttctaagggtttggctaattctgcgttgatttcggctgttgatgatgttctttgggatatgaataggccattggaaggtgattgtaagcttgagcttttcaaatttgatagcgataaaggtcgtgatactctttggcattctagtgcgcacattcttggtcaggctctcgagcaggagtatgggtgtcagctgtgcattggaccatgcacaacgagaggagagggtttctactatgatggattttatggtgaattgggcctgagtgacaaccactttcctagcatcgaagcaggtgctgcaaaagctgctaaggaagcacaaccatttgaaaggattgaagtgacgaaggatcaggcactcgagatgttttctgagaataattttaaggttgaactcatcaatggtttgcctgcagacatgaccattactgtctacagatgtggccctttggtggatttgtgtcgtggaccgcacataccaaatacttcctttgtgaaagcgttcaagtgtttgagggcctcatcagcttactggaagggtgacaaagaccgtgagagcttgcagagagtttatgggatatcttatcctgatcagaagcagctgaagaaatatctccaatttctagaagaagccaaaaagtatgaccacagactattgggccaaaagcaggaactcttctttagtcatcaactcagccctgggagttatttcttccttccactcggcactcgtgtatataacaggttgatggacttcattaagaaccaatactggcacaggggttacacagaggttattacaccaaatatgtacaacatggagttgtggcaaacatccggacatgctgacaattacaaggataatatgtttacgtttaatattgagaagcaagagttcgggctcaaacctatgaattgtcctggtcactgcttgatattccagcatagggttcgctcatatagagagttacctatgagactggccgactttggagtgttacaccgcaatgaggcaagtggagcacttagtggattgactcgtgtccgacggttccagcaggatgatgcacacatattctgtacaacggaacaggttaagggagaagtgcagggtgtgttggagttcattgactacgtgtacaaagttttcgggtttacctatgagctaaaactttcaacgaggccagagaagtaccttggagatttggaaacatgggataaagctgaagcggatctcaaagaagctatagaagcttttggaaagccattagtgttgaacgaaggagatggtgcattttatggtccaaagatagacatcacagtttctgatgcaatgaataggaaattccagtgtgctactttacagcttgattttcaacttccgattcgcttcaacttggaatacgcagctgaggatgaagcgaaaaagagtagacctgtaatgatacatagagccgtgttgggatctgtggaacgtatgtttgccatattgttggagcattacaaaggaaaatggcccttctggattagtccgcgacaggccatagtttgtcctatatcagagaaatctcagcaatatgcagaaaaggttcaaaagcaaattaaagatgctgggttctatgttgatgctgacttaacagacagaaagatagataaaaaggtgcgagaagctcagcttgctcagtacaactacattctggtcgtgggtgaaacagaagctgctacaggacaggtgagtgttcgtgtgagagacaatgcagcccactccgtgaagagcattgaggatttgctggaagaattcaaggccaagactgccgaatttgtatgagatccgactcatgaaattcaagttctgatatgatgttttttttttttttttcaaattagggtcgacccagatttaagtgttcatctgtttcattaaaccatattaggcctcaactatattaaagtttcgattacattctgcgaaaactctatgtttggtccccttttagt

SEQ ID NO: 46741 - protein, 709 aa, Arabidopsis thaliana
  peptide (1)..(709): Ceres Seq. ID no. 12600825
MLLRLTARSIRRFTTSSSSLPLLSSSSFCTVPTMAANHPKDEAYLSAVIPKRIKLFEQIQANQLENLKSLPHDPIKVTLPDGNVKEGKKWETTPMDIAAQISKGLANSALISAVDDVLWDMNRPLEGDCKLELFKFDSDKGRDTLWHSSAHILGQALEQEYGCQLCIGPCTTRGEGFYYDGFYGELGLSDNHFPSIEAGAAKAAKEAQPFERIEVTKDQALEMFSENNFKVELINGLPADMTITVYRCGPLVDLCRGPHIPNTSFVKAFKCLRASSAYWKGDKDRESLQRVYGISYPDQKQLKKYLQFLEEAKKYDHRLLGQKQELFFSHQLSPGSYFFLPLGTRVYNRLMDFIKNQYWHRGYTEVITPNMYNMELWQTSGHADNYKDNMFTFNIEKQEFGLKPMNCPGHCLIFQHRVRSYRELPMRLADFGVLHRNEASGALSGLTRVRRFQQDDAHIFCTTEQVKGEVQGVLEFIDYVYKVFGFTYELKLSTRPEKYLGDLETWDKAEADLKEAIEAFGKPLVLNEGDGAFYGPKIDITVSDAMNRKFQCATLQLDFQLPIRFNLEYAAEDEAKKSRPVMIHRAVLGSVERMFAILLEHYKGKWPFWISPRQAIVCPISEKSQQYAEKVQKQIKDAGFYVDADLTDRKIDKKVREAQLAQYNYILVVGETEAATGQVSVRVRDNAAHSVKSIEDLLEEFKAKTAEFV

SEQ ID NO: 46742 - protein, 676 aa, Arabidopsis thaliana
  peptide (1)..(676): Ceres Seq. ID no. 12600826
MAANHPKDEAYLSAVIPKRIKLFEQIQANQLENLKSLPHDPIKVTLPDGNVKEGKKWETTPMDIAAQISKGLANSALISAVDDVLWDMNRPLEGDCKLELFKFDSDKGRDTLWHSSAHILGQALEQEYGCQLCIGPCTTRGEGFYYDGFYGELGLSDNHFPSIEAGAAKAAKEAQPFERIEVTKDQALEMFSENNFKVELINGLPADMTITVYRCGPLVDLCRGPHIPNTSFVKAFKCLRASSAYWKGDKDRESLQRVYGISYPDQKQLKKYLQFLEEAKKYDHRLLGQKQELFFSHQLSPGSYFFLPLGTRVYNRLMDFIKNQYWHRGYTEVITPNMYNMELWQTSGHADNYKDNMFTFNIEKQEFGLKPMNCPGHCLIFQHRVRSYRELPMRLADFGVLHRNEASGALSGLTRVRRFQQDDAHIFCTTEQVKGEVQGVLEFIDYVYKVFGFTYELKLSTRPEKYLGDLETWDKAEADLKEAIEAFGKPLVLNEGDGAFYGPKIDITVSDAMNRKFQCATLQLDFQLPIRFNLEYAAEDEAKKSRPVMIHRAVLGSVERMFAILLEHYKGKWPFWISPRQAIVCPISEKSQQYAEKVQKQIKDAGFYVDADLTDRKIDKKVREAQLAQYNYILVVGETEAATGQVSVRVRDNAAHSVKSIEDLLEEFKAKTAEFV

SEQ ID NO: 46743 - protein, 615 aa, Arabidopsis thaliana
  peptide (1)..(615): Ceres Seq. ID no. 12600827
MDIAAQISKGLANSALISAVDDVLWDMNRPLEGDCKLELFKFDSDKGRDTLWHSSAHILGQALEQEYGCQLCIGPCTTRGEGFYYDGFYGELGLSDNHFPSIEAGAAKAAKEAQPFERIEVTKDQALEMFSENNFKVELINGLPADMTITVYRCGPLVDLCRGPHIPNTSFVKAFKCLRASSAYWKGDKDRESLQRVYGISYPDQKQLKKYLQFLEEAKKYDHRLLGQKQELFFSHQLSPGSYFFLPLGTRVYNRLMDFIKNQYWHRGYTEVITPNMYNMELWQTSGHADNYKDNMFTFNIEKQEFGLKPMNCPGHCLIFQHRVRSYRELPMRLADFGVLHRNEASGALSGLTRVRRFQQDDAHIFCTTEQVKGEVQGVLEFIDYVYKVFGFTYELKLSTRPEKYLGDLETWDKAEADLKEAIEAFGKPLVLNEGDGAFYGPKIDITVSDAMNRKFQCATLQLDFQLPIRFNLEYAAEDEAKKSRPVMIHRAVLGSVERMFAILLEHYKGKWPFWISPRQAIVCPISEKSQQYAEKVQKQIKDAGFYVDADLTDRKIDKKVREAQLAQYNYILVVGETEAATGQVSVRVRDNAAHSVKSIEDLLEEFKAKTAEFV

SEQ ID NO: 46744 - DNA, 860 bp, Arabidopsis thaliana; identical to SEQ ID NO: 31045
  misc_feature (1)..(860): Ceres Seq. ID no. 13591956
  misc_feature (1)..(860): Ortholog of  Ceres SEQ ID NO 13638595 as cited in SEQ ID NO 52050
  misc_feature (1)..(860): Ortholog of  Ceres SEQ ID NO 14301870 as cited in SEQ ID NO 61501
  misc_feature (1)..(860): Ortholog of  Ceres SEQ ID NO 12583993 as cited in SEQ ID NO 68098

SEQ ID NO: 46745 - protein, 208 aa, Arabidopsis thaliana; identical to SEQ ID NO: 23207
  peptide (1)..(208): Ceres Seq. ID no. 13591957

SEQ ID NO: 46746 - protein, 110 aa, Arabidopsis thaliana; identical to SEQ ID NO: 31047
  peptide (1)..(110): Ceres Seq. ID no. 13591958

SEQ ID NO: 46747 - DNA, 2131 bp, Arabidopsis thaliana; identical to SEQ ID NO: 45958
  misc_feature (1)..(2131): Ceres Seq. ID no. 12600445
  misc_feature (1)..(2131): Ortholog of  Ceres SEQ ID NO 13654290 as cited in SEQ ID NO 62197
  misc_feature (1)..(2131): Ortholog of  Ceres SEQ ID NO 14301924 as cited in SEQ ID NO 67731

SEQ ID NO: 46748 - protein, 646 aa, Arabidopsis thaliana; identical to SEQ ID NO: 45959
  peptide (1)..(646): Ceres Seq. ID no. 12600446

SEQ ID NO: 46749 - protein, 552 aa, Arabidopsis thaliana; identical to SEQ ID NO: 45960
  peptide (1)..(552): Ceres Seq. ID no. 12600447

SEQ ID NO: 46750 - protein, 496 aa, Arabidopsis thaliana; identical to SEQ ID NO: 45961
  peptide (1)..(496): Ceres Seq. ID no. 12600448

SEQ ID NO: 46751 - DNA, 1689 bp, Arabidopsis thaliana; identical to SEQ ID NO: 38295
  misc_feature (1)..(1689): Ceres Seq. ID no. 12669827
  misc_feature (1)..(1689): Ortholog of  Ceres SEQ ID NO 14308813 as cited in SEQ ID NO 55485
  misc_feature (1)..(1689): Ortholog of  Ceres SEQ ID NO 13655744 as cited in SEQ ID NO 64032
  misc_feature (1)..(1689): Ortholog of  Ceres SEQ ID NO 13590394 as cited in SEQ ID NO 66581

SEQ ID NO: 46752 - protein, 504 aa, Arabidopsis thaliana; identical to SEQ ID NO: 38296
  peptide (1)..(504): Ceres Seq. ID no. 12669828

SEQ ID NO: 46753 - protein, 476 aa, Arabidopsis thaliana; identical to SEQ ID NO: 38297
  peptide (1)..(476): Ceres Seq. ID no. 12669829

SEQ ID NO: 46754 - protein, 376 aa, Arabidopsis thaliana; identical to SEQ ID NO: 38298
  peptide (1)..(376): Ceres Seq. ID no. 12669830

SEQ ID NO: 46755 - DNA, 2378 bp, Arabidopsis thaliana
  misc_feature (1)..(2378): Ceres Seq. ID no. 12600828
  misc_feature (1)..(2378): Ortholog of  Ceres SEQ ID NO 12778278 as cited in SEQ ID NO 63035
agaagaaagagaatagagagagagagagagttttgttcttcttctttctggttcctttgctttgctttggttgcgtgatctcctctctcatcaatcttcttcatcatcattctcatcatcattagcttcttgatttttttttccttctttttttcgtttcaagaaactaaacaaagtttctatttatggttttctgattcttcttctacagatctattatttgattctccttcgatcattgtcaacgttttcttcttttgtaatcatcacagttttttttgagaatttgttcatttttttttctcatatattgattcgagttctttcttcttgaatcttgttcttcatagatctagtttttgttttttactctctagatctatagatctgttgaattcacttctttaatccatctctgtgttcttgagttcctatggtctaagtcaaactcaagttcaagatctgttgaatttggaatcttgctggtgaagttagagatgaattatttcccagatgaagtaatagagcatgtattcgactttgtaacatctcacaaagacaggaatgctatatctcttgtatgcaaatcatggtacaagattgaaagatacagtaggcaaaaggttttcattggaaactgttatgccattaatccagagaggttgcttcggagattcccatgtctaaagtctttgactttgaaaggaaaacctcattttgcggatttcaatttggttcctcatgaatggggaggttttgtgctaccttggattgaggctttggctagaagccgtgtaggacttgaagagcttaggttgaagaggatggttgttactgatgagagtcttgagctgctttctcgttcttttgtcaattttaagtctttggtccttgttagctgtgaaggttttaccactgatggtcttgcctctattgccgctaattgcaggcatcttcgggatcttgatttgcaagagaatgaaatcgatgatcatagaggtcaatggttaagttgtttcccagacacttgcacgactcttgtcacgctaaactttgcgtgcctcgaaggagaaactaatctggttgctctagagaggcttgttgctaggtctccaaacctaaagagtctgaagctaaatcgtgcagtaccgttagatgcactcgcaaggttaatggcgtgtgcgccgcagatagttgacttaggagtagggtcttatgagaatgacccagattccgagtcttacttgaaactcatggctgtcataaagaaatgcacctcgttgaggagtttgtcgggttttctagaggctgctcctcactgtctctcagctttccacccaatatgtcataacctcacctccttgaatcttagttacgcagctgagattcatggtagccaccttattaagcttattcagcattgcaagaaacttcagcggttatggattttggatagtataggtgacaaagggcttgaagttgtagcttctacatgtaaagagttacaagagcttagggtttttccatctgatttactcggtggaggcaacacagctgtgaccgaagaaggtctagttgccatctcggcaggctgccctaagctccactctatactctacttctgccaacaaatgacaaacgcagctctcgtaaccgttgccaagaactgtccaaatttcatccgtttccgactctgcatcctcgagccaaacaaacccgatcacgtcacatctcaacctctagacgaaggctttggagcaatcgtcaaagcctgcaagagcctgagaaggctttctctctcaggtctccttacagaccaagtcttcctctacatcggaatgtacgcgaatcagctcgagatgctctccatagcctttgcaggagatacagacaaaggcatgctatatgtgttgaatggttgcaaaaagatgaagaaactagagataagggatagtccgtttggggacacggcgcttcttgctgatgtgagcaagtatgaaacaatgcgatccctttggatgtcttcatgtgaagtcacactcagtggatgcaaaaggctcgcagagaaagcgccatggctcaatgtagagatcataaacgagaatgataataaccggatggaagaaaacggacacgaggggaggcagaaagtggataagttgtatctgtaccggactgtggttgggacaagaatggatgcgccgccatttgtgtggattctctaagtccttttcagaccaaactggttctgattggtcgtcttccgttagtgtgtctttcccgaattaggtgtactttttgttttctttaaattaagacaagaactgattcttctgtgaaagccattctgtttttgtttttgactttcctccgttgat

SEQ ID NO: 46756 - protein, 575 aa, Arabidopsis thaliana
  peptide (1)..(575): Ceres Seq. ID no. 12600829
MNYFPDEVIEHVFDFVTSHKDRNAISLVCKSWYKIERYSRQKVFIGNCYAINPERLLRRFPCLKSLTLKGKPHFADFNLVPHEWGGFVLPWIEALARSRVGLEELRLKRMVVTDESLELLSRSFVNFKSLVLVSCEGFTTDGLASIAANCRHLRDLDLQENEIDDHRGQWLSCFPDTCTTLVTLNFACLEGETNLVALERLVARSPNLKSLKLNRAVPLDALARLMACAPQIVDLGVGSYENDPDSESYLKLMAVIKKCTSLRSLSGFLEAAPHCLSAFHPICHNLTSLNLSYAAEIHGSHLIKLIQHCKKLQRLWILDSIGDKGLEVVASTCKELQELRVFPSDLLGGGNTAVTEEGLVAISAGCPKLHSILYFCQQMTNAALVTVAKNCPNFIRFRLCILEPNKPDHVTSQPLDEGFGAIVKACKSLRRLSLSGLLTDQVFLYIGMYANQLEMLSIAFAGDTDKGMLYVLNGCKKMKKLEIRDSPFGDTALLADVSKYETMRSLWMSSCEVTLSGCKRLAEKAPWLNVEIINENDNNRMEENGHEGRQKVDKLYLYRTVVGTRMDAPPFVWIL

SEQ ID NO: 46757 - protein, 466 aa, Arabidopsis thaliana
  peptide (1)..(466): Ceres Seq. ID no. 12600830
MVVTDESLELLSRSFVNFKSLVLVSCEGFTTDGLASIAANCRHLRDLDLQENEIDDHRGQWLSCFPDTCTTLVTLNFACLEGETNLVALERLVARSPNLKSLKLNRAVPLDALARLMACAPQIVDLGVGSYENDPDSESYLKLMAVIKKCTSLRSLSGFLEAAPHCLSAFHPICHNLTSLNLSYAAEIHGSHLIKLIQHCKKLQRLWILDSIGDKGLEVVASTCKELQELRVFPSDLLGGGNTAVTEEGLVAISAGCPKLHSILYFCQQMTNAALVTVAKNCPNFIRFRLCILEPNKPDHVTSQPLDEGFGAIVKACKSLRRLSLSGLLTDQVFLYIGMYANQLEMLSIAFAGDTDKGMLYVLNGCKKMKKLEIRDSPFGDTALLADVSKYETMRSLWMSSCEVTLSGCKRLAEKAPWLNVEIINENDNNRMEENGHEGRQKVDKLYLYRTVVGTRMDAPPFVWIL

SEQ ID NO: 46758 - protein, 350 aa, Arabidopsis thaliana
  peptide (1)..(350): Ceres Seq. ID no. 12600831
MACAPQIVDLGVGSYENDPDSESYLKLMAVIKKCTSLRSLSGFLEAAPHCLSAFHPICHNLTSLNLSYAAEIHGSHLIKLIQHCKKLQRLWILDSIGDKGLEVVASTCKELQELRVFPSDLLGGGNTAVTEEGLVAISAGCPKLHSILYFCQQMTNAALVTVAKNCPNFIRFRLCILEPNKPDHVTSQPLDEGFGAIVKACKSLRRLSLSGLLTDQVFLYIGMYANQLEMLSIAFAGDTDKGMLYVLNGCKKMKKLEIRDSPFGDTALLADVSKYETMRSLWMSSCEVTLSGCKRLAEKAPWLNVEIINENDNNRMEENGHEGRQKVDKLYLYRTVVGTRMDAPPFVWIL

SEQ ID NO: 46759 - DNA, 2412 bp, Arabidopsis thaliana
  misc_feature (1)..(2412): Ceres Seq. ID no. 12574885
  misc_feature (1)..(2412): Ortholog of  Ceres SEQ ID NO 14313284 as cited in SEQ ID NO 67146
  misc_feature (1)..(2412): Ortholog of  Ceres SEQ ID NO 14308925 as cited in SEQ ID NO 0
atgatcaggctctctaagcgctccgtctctaccctcctacgctccggtaaccaaagcttccgtatcgccgccgcagcttccacctcccgttcttccccatctgccacggatgtcaagagaagtgacactgaatcgagatggtactcatctttaaccaatggacaatctaagaatagtgggtcatttgctcaattgaacatgaaaaccaattggtttatgggataccggaacgaatccagtgcagcagcatcagattcttcctcacaagctcctccaccggctgagaaattcgagtatcaagctgaagttagtcgcctcatggaccttattgtcaacagcttatacagcaataaggaggtgtttcttcgggagcttattagtaatgcaagtgatgcattggataagcttcgttatttgagcgttaccaaccctgagctctcaaaagatgctcctgatcttgatatacgtatctatgcagacaaggagaatggaatcataactctcactgattctggtattggtatgacacggcaagaattagttgactgtcttgggactattgctcaaagtggaaccgccaagttcatgaaagctctaaaggatagcaaggatgcaggtggtgacaacaatttaattggtcaatttggtgtagggttctattcagcatttttggttgcagatcgggtaattgtgtcaaccaagagccctaagtctgataaacaatatgtatgggaaggagaagcaaattcaagcagttttaccattcaggaagatactgacccacaatctctcattcctagaggaactcgtattactttgcatcttaagcaagaagccaaaaactttgcagatcctgagcggattcagaagctcgtgaaaaactattcccagtttgtttctttccctatttacacttggcaggaaaaaggatacacaaaagaggttgaggttgaagatgatccaactgaaacaaaaaaagatgaccaagatgaccaaactgagaaaaagaagaagaccaagaaggttgttgagagatactgggattgggagcttacaaatgagacacaaccgatttggctgcgtaaccctaaggaggtgacaacagcagaatacaatgagttttacagaaaagctttcaatgagtatttggacccattggcttcatcccatttcacgacagagggcgaagtcgagtttaggtctatcctatatgtgccacctgtttcaccatcggggaaggatgacatagtcaatcaaaagacaaagaacataaggctctatgttaaacgagttttcatttcagatgactttgatggggagctgtttcctcggtacttgagctttgttaaaggtgttgtggactcgcatgatctcccacttaatgtatcacgtgagattcttcaagaaagtcgcatagtgcggatcatgaagaaacgtctagtgaggaaggcttttgatatgattttgggtatatccttgagtgaaaacagagaagactatgagaagttttgggataattttggcaaacacttgaaattagggtgcatcgaagaccgtgaaaaccacaagcgtatagctccactgcttcgatttttctcctcccagagtgagaatgacatgatcagcttggatgagtatgttgagaacatgaaacctgaacagaaagccatatacttcattgcttctgacagcattacaagtgctaagaatgcacctttcctcgaaaagatgctggagaaaggacttgaagtactatatttggtagagcctattgatgaagttgccgtacagagtttaaaagcttataaggagaaggattttgtagatatcagcaaggaagacttggatctaggcaacatgtcaggagacaagaacgaggagaaagaggcagcagtgaaaaaagagtttggacagacttgtgactggataaagaaacgattgggtgacaaggttgccagtgttcaaatttccaaccgtcttagttcttccccctgtgttcttgtatctggtaaatttggttggtcagccaatatggagaggctaatgaaggcacaatcaactggtgacacaataagcctcgactacatgaaagggagaagagtgtttgagatcaatcccgaccactcaattatcaagaacataaatgctgcttacaatagtaacccaaatgacgaagatgcaatgagagccatagatcttatgtatgacgcagcactagtttctagtgggttcacgcccgataatccagcagagctgggtgggaagatatatgagatgatggatgtagctctttccgggaaatggtcaagccctgaggtgcagccgcagcaacagcagatggcacattctcacgatgcagagacgtttgaagctgaagtggttgaaccagtcgaagtggatgggaagaaatga

SEQ ID NO: 46760 - protein, 803 aa, Arabidopsis thaliana
  peptide (1)..(803): Ceres Seq. ID no. 12574886
MIRLSKRSVSTLLRSGNQSFRIAAAASTSRSSPSATDVKRSDTESRWYSSLTNGQSKNSGSFAQLNMKTNWFMGYRNESSAAASDSSSQAPPPAEKFEYQAEVSRLMDLIVNSLYSNKEVFLRELISNASDALDKLRYLSVTNPELSKDAPDLDIRIYADKENGIITLTDSGIGMTRQELVDCLGTIAQSGTAKFMKALKDSKDAGGDNNLIGQFGVGFYSAFLVADRVIVSTKSPKSDKQYVWEGEANSSSFTIQEDTDPQSLIPRGTRITLHLKQEAKNFADPERIQKLVKNYSQFVSFPIYTWQEKGYTKEVEVEDDPTETKKDDQDDQTEKKKKTKKVVERYWDWELTNETQPIWLRNPKEVTTAEYNEFYRKAFNEYLDPLASSHFTTEGEVEFRSILYVPPVSPSGKDDIVNQKTKNIRLYVKRVFISDDFDGELFPRYLSFVKGVVDSHDLPLNVSREILQESRIVRIMKKRLVRKAFDMILGISLSENREDYEKFWDNFGKHLKLGCIEDRENHKRIAPLLRFFSSQSENDMISLDEYVENMKPEQKAIYFIASDSITSAKNAPFLEKMLEKGLEVLYLVEPIDEVAVQSLKAYKEKDFVDISKEDLDLGNMSGDKNEEKEAAVKKEFGQTCDWIKKRLGDKVASVQISNRLSSSPCVLVSGKFGWSANMERLMKAQSTGDTISLDYMKGRRVFEINPDHSIIKNINAAYNSNPNDEDAMRAIDLMYDAALVSSGFTPDNPAELGGKIYEMMDVALSGKWSSPEVQPQQQQMAHSHDAETFEAEVVEPVEVDGKK

SEQ ID NO: 46761 - protein, 737 aa, Arabidopsis thaliana
  peptide (1)..(737): Ceres Seq. ID no. 12574887
MKTNWFMGYRNESSAAASDSSSQAPPPAEKFEYQAEVSRLMDLIVNSLYSNKEVFLRELISNASDALDKLRYLSVTNPELSKDAPDLDIRIYADKENGIITLTDSGIGMTRQELVDCLGTIAQSGTAKFMKALKDSKDAGGDNNLIGQFGVGFYSAFLVADRVIVSTKSPKSDKQYVWEGEANSSSFTIQEDTDPQSLIPRGTRITLHLKQEAKNFADPERIQKLVKNYSQFVSFPIYTWQEKGYTKEVEVEDDPTETKKDDQDDQTEKKKKTKKVVERYWDWELTNETQPIWLRNPKEVTTAEYNEFYRKAFNEYLDPLASSHFTTEGEVEFRSILYVPPVSPSGKDDIVNQKTKNIRLYVKRVFISDDFDGELFPRYLSFVKGVVDSHDLPLNVSREILQESRIVRIMKKRLVRKAFDMILGISLSENREDYEKFWDNFGKHLKLGCIEDRENHKRIAPLLRFFSSQSENDMISLDEYVENMKPEQKAIYFIASDSITSAKNAPFLEKMLEKGLEVLYLVEPIDEVAVQSLKAYKEKDFVDISKEDLDLGNMSGDKNEEKEAAVKKEFGQTCDWIKKRLGDKVASVQISNRLSSSPCVLVSGKFGWSANMERLMKAQSTGDTISLDYMKGRRVFEINPDHSIIKNINAAYNSNPNDEDAMRAIDLMYDAALVSSGFTPDNPAELGGKIYEMMDVALSGKWSSPEVQPQQQQMAHSHDAETFEAEVVEPVEVDGKK

SEQ ID NO: 46762 - protein, 731 aa, Arabidopsis thaliana
  peptide (1)..(731): Ceres Seq. ID no. 12574888
MGYRNESSAAASDSSSQAPPPAEKFEYQAEVSRLMDLIVNSLYSNKEVFLRELISNASDALDKLRYLSVTNPELSKDAPDLDIRIYADKENGIITLTDSGIGMTRQELVDCLGTIAQSGTAKFMKALKDSKDAGGDNNLIGQFGVGFYSAFLVADRVIVSTKSPKSDKQYVWEGEANSSSFTIQEDTDPQSLIPRGTRITLHLKQEAKNFADPERIQKLVKNYSQFVSFPIYTWQEKGYTKEVEVEDDPTETKKDDQDDQTEKKKKTKKVVERYWDWELTNETQPIWLRNPKEVTTAEYNEFYRKAFNEYLDPLASSHFTTEGEVEFRSILYVPPVSPSGKDDIVNQKTKNIRLYVKRVFISDDFDGELFPRYLSFVKGVVDSHDLPLNVSREILQESRIVRIMKKRLVRKAFDMILGISLSENREDYEKFWDNFGKHLKLGCIEDRENHKRIAPLLRFFSSQSENDMISLDEYVENMKPEQKAIYFIASDSITSAKNAPFLEKMLEKGLEVLYLVEPIDEVAVQSLKAYKEKDFVDISKEDLDLGNMSGDKNEEKEAAVKKEFGQTCDWIKKRLGDKVASVQISNRLSSSPCVLVSGKFGWSANMERLMKAQSTGDTISLDYMKGRRVFEINPDHSIIKNINAAYNSNPNDEDAMRAIDLMYDAALVSSGFTPDNPAELGGKIYEMMDVALSGKWSSPEVQPQQQQMAHSHDAETFEAEVVEPVEVDGKK

SEQ ID NO: 46763 - DNA, 1267 bp, Arabidopsis thaliana; identical to SEQ ID NO: 26325
  misc_feature (1)..(1267): Ceres Seq. ID no. 12488498
  misc_feature (1)..(1267): Ortholog of  Ceres SEQ ID NO 14303417 as cited in SEQ ID NO 54923
  misc_feature (1)..(1267): Ortholog of  Ceres SEQ ID NO 15169084 as cited in SEQ ID NO 59115
  misc_feature (1)..(1267): Ortholog of  Ceres SEQ ID NO 12635513 as cited in SEQ ID NO 0
  misc_feature (1)..(1267): Ortholog of  Ceres SEQ ID NO 15179044 as cited in SEQ ID NO 0

SEQ ID NO: 46764 - protein, 251 aa, Arabidopsis thaliana; identical to SEQ ID NO: 26326
  peptide (1)..(251): Ceres Seq. ID no. 12488499

SEQ ID NO: 46765 - protein, 148 aa, Arabidopsis thaliana; identical to SEQ ID NO: 26327
  peptide (1)..(148): Ceres Seq. ID no. 12488500

SEQ ID NO: 46766 - protein, 142 aa, Arabidopsis thaliana; identical to SEQ ID NO: 26328
  peptide (1)..(142): Ceres Seq. ID no. 12488501

SEQ ID NO: 46767 - DNA, 1854 bp, Arabidopsis thaliana
  misc_feature (1)..(1854): Ceres Seq. ID no. 15174489
  misc_feature (1)..(1854): Ortholog of  Ceres SEQ ID NO 12607856 as cited in SEQ ID NO 55419
aactcatcttcacagatgtctcaagcagctctctctctttctctctctctctctcttctttctctgatcacaagggttatttgtctgaatctcattctattgagtcattattgacctctgcagagatccggacaaagttttgaaaccgaccacaagtccaagaatcatcgatcatacaacaatgtctggagactctctgctcacatctaaacaaggaggaggttctttgtccatatactcacagccaaagaatgttactaaagagttcaacggtcgtgattcccccaagaacagcaaattccaccattacagatttgagctcgagcacgatgtgaagcgattgaaaaatcaattgcagaaagagactgcaatgcgcgctcttttgctgaaagcttctgatcaaagccataagattgagctgtctcacgcatcttctcttccgcgcagtgttcaagaacttctcaccaatatagcagctatggaagctacggtctctaagctcgaacaagagatcatgtctctgcatttcttgctgattcaagaacgaaacgagagaaaacttgccgagtacaacctcacccattctctatctccacctaatgctttagatttggttagactttccgaaaagaatgaaagtctacgccctaaagaccacaaagcacaacctagaagcaaagtggcaaagtccttgcagagttttgacaatgctaatgaactatccaaggagatgatcagatgcatgagaaacatatttgtgtctctaggagagacatctgcaggatccaaatcctcacaagagactgccagtgtttcttctcgtgagaatcctccatcatcatcaacgtcatggtggtctccttcagaacactcacggatctccaggtgggcacagagtccacggatcgatattcagaagaactcagatgttttagccacagagagcgatgtgtttgatctttatacagtccaaggaaagctgagctgggctgacatcgggagttacagatctgcaactgaagtggcttcaatgtctgttgaggagaaaaggctcggatatgcttcagatgagttatggagattcaggaacctcgttgaaagacttgccagagtaaatccagcagaactaagccacaacgagaagcttgccttctggatcaacatatacaatgccatgatcatgcatgcatacttggcttacggcgtaccaaaaactgacttaaagctcttctccttgatgcaaaaggctgcttatacagttggtggccattcatacaacgcagcaacgatcgaatacatgactttaaagatgagccctcctctgcatcgtcctcaaattgctctgcttctctccattctcaagctgaaagtatcagacgaacagagacaagcggggataagtacaccggaacctctagtgtcatttgctctcagctgcgggatgcactcatctcctgcggtgagaatatactcagccgagaacgtaggagaagaacttgaagaagctcagaaagattatatccaggcgtcagtgggagtgagcccaaggggaaagttgattgtgccccaaatgcttcactgtttcgccaagaaatctgtcgatgactgcaaggttgctctgtggatttctcgtcatttgcctcctcgccaagctgcatttgttgagcagtgtattcacaggcgacaacggtggggttttctgggttcatctagtagcaaatgcggcatagttccttttgattcacggttccgatatttgtttcttccgtagcaaggcattgattcacaatgatgtgattaaagcaaatactgttccgatcctagggtttagatctatgattatttaggtgattc

SEQ ID NO: 46768 - protein, 529 aa, Arabidopsis thaliana
  peptide (1)..(529): Ceres Seq. ID no. 15174490
MSGDSLLTSKQGGGSLSIYSQPKNVTKEFNGRDSPKNSKFHHYRFELEHDVKRLKNQLQKETAMRALLLKASDQSHKIELSHASSLPRSVQELLTNIAAMEATVSKLEQEIMSLHFLLIQERNERKLAEYNLTHSLSPPNALDLVRLSEKNESLRPKDHKAQPRSKVAKSLQSFDNANELSKEMIRCMRNIFVSLGETSAGSKSSQETASVSSRENPPSSSTSWWSPSEHSRISRWAQSPRIDIQKNSDVLATESDVFDLYTVQGKLSWADIGSYRSATEVASMSVEEKRLGYASDELWRFRNLVERLARVNPAELSHNEKLAFWINIYNAMIMHAYLAYGVPKTDLKLFSLMQKAAYTVGGHSYNAATIEYMTLKMSPPLHRPQIALLLSILKLKVSDEQRQAGISTPEPLVSFALSCGMHSSPAVRIYSAENVGEELEEAQKDYIQASVGVSPRGKLIVPQMLHCFAKKSVDDCKVALWISRHLPPRQAAFVEQCIHRRQRWGFLGSSSSKCGIVPFDSRFRYLFLP

SEQ ID NO: 46769 - protein, 466 aa, Arabidopsis thaliana
  peptide (1)..(466): Ceres Seq. ID no. 15174491
MRALLLKASDQSHKIELSHASSLPRSVQELLTNIAAMEATVSKLEQEIMSLHFLLIQERNERKLAEYNLTHSLSPPNALDLVRLSEKNESLRPKDHKAQPRSKVAKSLQSFDNANELSKEMIRCMRNIFVSLGETSAGSKSSQETASVSSRENPPSSSTSWWSPSEHSRISRWAQSPRIDIQKNSDVLATESDVFDLYTVQGKLSWADIGSYRSATEVASMSVEEKRLGYASDELWRFRNLVERLARVNPAELSHNEKLAFWINIYNAMIMHAYLAYGVPKTDLKLFSLMQKAAYTVGGHSYNAATIEYMTLKMSPPLHRPQIALLLSILKLKVSDEQRQAGISTPEPLVSFALSCGMHSSPAVRIYSAENVGEELEEAQKDYIQASVGVSPRGKLIVPQMLHCFAKKSVDDCKVALWISRHLPPRQAAFVEQCIHRRQRWGFLGSSSSKCGIVPFDSRFRYLFLP

SEQ ID NO: 46770 - protein, 430 aa, Arabidopsis thaliana
  peptide (1)..(430): Ceres Seq. ID no. 15174492
MEATVSKLEQEIMSLHFLLIQERNERKLAEYNLTHSLSPPNALDLVRLSEKNESLRPKDHKAQPRSKVAKSLQSFDNANELSKEMIRCMRNIFVSLGETSAGSKSSQETASVSSRENPPSSSTSWWSPSEHSRISRWAQSPRIDIQKNSDVLATESDVFDLYTVQGKLSWADIGSYRSATEVASMSVEEKRLGYASDELWRFRNLVERLARVNPAELSHNEKLAFWINIYNAMIMHAYLAYGVPKTDLKLFSLMQKAAYTVGGHSYNAATIEYMTLKMSPPLHRPQIALLLSILKLKVSDEQRQAGISTPEPLVSFALSCGMHSSPAVRIYSAENVGEELEEAQKDYIQASVGVSPRGKLIVPQMLHCFAKKSVDDCKVALWISRHLPPRQAAFVEQCIHRRQRWGFLGSSSSKCGIVPFDSRFRYLFLP

SEQ ID NO: 46771 - DNA, 1206 bp, Arabidopsis thaliana; identical to SEQ ID NO: 29329
  misc_feature (1)..(1206): Ceres Seq. ID no. 12601145
  misc_feature (1)..(1206): Ortholog of  Ceres SEQ ID NO 15179153 as cited in SEQ ID NO 1066
  misc_feature (1)..(1206): Ortholog of  Ceres SEQ ID NO 15176047 as cited in SEQ ID NO 55988
  misc_feature (1)..(1206): Ortholog of  Ceres SEQ ID NO 13582167 as cited in SEQ ID NO 56203
  misc_feature (1)..(1206): Ortholog of  Ceres SEQ ID NO 13658295 as cited in SEQ ID NO 66515

SEQ ID NO: 46772 - protein, 325 aa, Arabidopsis thaliana; identical to SEQ ID NO: 29330
  peptide (1)..(325): Ceres Seq. ID no. 12601146

SEQ ID NO: 46773 - protein, 323 aa, Arabidopsis thaliana; identical to SEQ ID NO: 29331
  peptide (1)..(323): Ceres Seq. ID no. 12601147

SEQ ID NO: 46774 - protein, 322 aa, Arabidopsis thaliana; identical to SEQ ID NO: 29332
  peptide (1)..(322): Ceres Seq. ID no. 12601148

SEQ ID NO: 46775 - DNA, 1884 bp, Arabidopsis thaliana
  misc_feature (1)..(1884): Ceres Seq. ID no. 13647243
  misc_feature (1)..(1884): Ortholog of  Ceres SEQ ID NO 15171476 as cited in SEQ ID NO 55569
gctcactagtcccccccccccccaaaatcaagaaactctcaaaacccatttcaaaagagaaacacttctttaaaaagtttttagtaataaataatgggaaagctcttggtgttaatgttagttggggtgttcttggcttttgaaagcttggaagctcttgaatatggagatgcacttaacaagtcaatcttgttctttgaaggccaacgatccggtaaactcccgactaaccaacgagttaaatggcgagccgattctgcaatctctgatggttcactagctaatgtgaatttaattggaggatattacgatgctggtgacaatgtaaaatttgtgtggccaatgtcatttaccacaaccttgttaagttgggctgcaattgaataccaaaatgagatttcttccgttaaccagctcggttatctccggtctactatcaaatggggaaccgatttcatcctacgcgctcatacatctcccaacatgttatatacccaggtgggagatggtaattcagatcatagttgttgggagaggccagaagatatggacacatcaagaactctctacagtatctcttcctcttcccctggttccgaagccgcgggtgaagccgcagccgctcttgcagcggcctcacttgttttcaaatcggtcgattctacttattcatccacactactaaaccacgcaaaaaccctatttgaatttgctgataagtatagaggttcttatcaagcatcttgccccttctacagctcctactctggctacaaggatgaattattatgggctgcggcttggctatacaaagcaacaggagataaaagttacataaattatgttataagcaataaagattggagccaagccgttaatgaattcagttgggacaacaaattcgtcggcgctcaagctttactcgtatcggagttttacaacggggcaaatgacttggcaaaatttaagaccgatgttgaatccttcgtctgtgcaatgatgtcaggaagtagctctcaacaaattaaacaaactcctggtggccttttgtttattagagacagtagcaacttacaatatgtaacaacggctacaactgttttgttccattactcaaaaactcttaccaaagtcggggttggttcaatccagtgcggttcgaccaagttcaccgtatctcaaattcgaaatttcgctaaatcacaggttgattatatccttggaaataatccaatgaaaatgtcttacatggtcggatttgggacaaagtatccaacacaacctcatcatagaggctcatctttaccatcgatccaatctaaaccggagaaaattgactgtaatggaggatattcatactacaattctgatacaccaaacccgaatgtgcatattggtgcaattgtgggcggaccgaattcatccgatcagtatagcgacaaaaaatcagattactctcatgctgagcccacaacttacatcaacgccgcctttattggacctgttgcagctctaatcagttcttccggataaactcacgtttagattggttgtggggaaacaaatattagcaaagaagaatcattactcatcaacaaactattatgactacaaacttaaataattagtcaggggatgtatcgtttgctttaaacatatatctctatatagatgtatatacctacacacatacacacactcacatatatatcattgaatcgtatatcttagctaaaatgaaaactatttaattacagatgtctatataggttttcttatatcattatattgtatagattttttatgatacattatatatagttcattcttatttactacaaaaaaaaaaaaaaaaaaactcgagggggggcccggtacccaatt

SEQ ID NO: 46776 - protein, 479 aa, Arabidopsis thaliana
  peptide (1)..(479): Ceres Seq. ID no. 15218826
MGKLLVLMLVGVFLAFESLEALEYGDALNKSILFFEGQRSGKLPTNQRVKWRADSAISDGSLANVNLIGGYYDAGDNVKFVWPMSFTTTLLSWAAIEYQNEISSVNQLGYLRSTIKWGTDFILRAHTSPNMLYTQVGDGNSDHSCWERPEDMDTSRTLYSISSSSPGSEAAGEAAAALAAASLVFKSVDSTYSSTLLNHAKTLFEFADKYRGSYQASCPFYSSYSGYKDELLWAAAWLYKATGDKSYINYVISNKDWSQAVNEFSWDNKFVGAQALLVSEFYNGANDLAKFKTDVESFVCAMMSGSSSQQIKQTPGGLLFIRDSSNLQYVTTATTVLFHYSKTLTKVGVGSIQCGSTKFTVSQIRNFAKSQVDYILGNNPMKMSYMVGFGTKYPTQPHHRGSSLPSIQSKPEKIDCNGGYSYYNSDTPNPNVHIGAIVGGPNSSDQYSDKKSDYSHAEPTTYINAAFIGPVAALISSSG

SEQ ID NO: 46777 - protein, 472 aa, Arabidopsis thaliana
  peptide (1)..(472): Ceres Seq. ID no. 15218827
MLVGVFLAFESLEALEYGDALNKSILFFEGQRSGKLPTNQRVKWRADSAISDGSLANVNLIGGYYDAGDNVKFVWPMSFTTTLLSWAAIEYQNEISSVNQLGYLRSTIKWGTDFILRAHTSPNMLYTQVGDGNSDHSCWERPEDMDTSRTLYSISSSSPGSEAAGEAAAALAAASLVFKSVDSTYSSTLLNHAKTLFEFADKYRGSYQASCPFYSSYSGYKDELLWAAAWLYKATGDKSYINYVISNKDWSQAVNEFSWDNKFVGAQALLVSEFYNGANDLAKFKTDVESFVCAMMSGSSSQQIKQTPGGLLFIRDSSNLQYVTTATTVLFHYSKTLTKVGVGSIQCGSTKFTVSQIRNFAKSQVDYILGNNPMKMSYMVGFGTKYPTQPHHRGSSLPSIQSKPEKIDCNGGYSYYNSDTPNPNVHIGAIVGGPNSSDQYSDKKSDYSHAEPTTYINAAFIGPVAALISSSG

SEQ ID NO: 46778 - protein, 396 aa, Arabidopsis thaliana
  peptide (1)..(396): Ceres Seq. ID no. 15218828
MSFTTTLLSWAAIEYQNEISSVNQLGYLRSTIKWGTDFILRAHTSPNMLYTQVGDGNSDHSCWERPEDMDTSRTLYSISSSSPGSEAAGEAAAALAAASLVFKSVDSTYSSTLLNHAKTLFEFADKYRGSYQASCPFYSSYSGYKDELLWAAAWLYKATGDKSYINYVISNKDWSQAVNEFSWDNKFVGAQALLVSEFYNGANDLAKFKTDVESFVCAMMSGSSSQQIKQTPGGLLFIRDSSNLQYVTTATTVLFHYSKTLTKVGVGSIQCGSTKFTVSQIRNFAKSQVDYILGNNPMKMSYMVGFGTKYPTQPHHRGSSLPSIQSKPEKIDCNGGYSYYNSDTPNPNVHIGAIVGGPNSSDQYSDKKSDYSHAEPTTYINAAFIGPVAALISSSG

SEQ ID NO: 46779 - DNA, 2894 bp, Arabidopsis thaliana
  misc_feature (1)..(2894): Ceres Seq. ID no. 14309751
  misc_feature (1)..(2894): Ortholog of  Ceres SEQ ID NO 14307253 as cited in SEQ ID NO 54783
  misc_feature (1)..(2894): Ortholog of  Ceres SEQ ID NO 14313336 as cited in SEQ ID NO 55501
  misc_feature (1)..(2894): Ortholog of  Ceres SEQ ID NO 13654989 as cited in SEQ ID NO 63117
  misc_feature (1)..(2894): Ortholog of  Ceres SEQ ID NO 13657138 as cited in SEQ ID NO 65923
  misc_feature (1)..(2894): Ortholog of  Ceres SEQ ID NO 14303173 as cited in SEQ ID NO 66550
  misc_feature (1)..(2894): Ortholog of  Ceres SEQ ID NO 13584744 as cited in SEQ ID NO 69137
gaatgaaggaagaagattcaaaaaaaataagaggataggaatctatttggtcgcttttgcttcctcctattctggggagaatttgggatcttggagttgaatccgttgtgagaagaaggatctttttgagcttgtgtactgtgtcctctcagttgattcatcgcagagagaagaggtcctgtcatgtctatgagttttgtattcatctgaaaggtcttactggaatgacttatcaaaggggagagtctttggttcctgtcttgatttccaacttggtgggggcataggccaaataatgcaaacctaaaatccttgtttcttccagaatcttgtgagctttttaatctctccaacaaagtacaatttctctgaggattgtgttattacacagagaaaacaaaaagagggtccaagaaaatctcttgcattctcttctcctctctctggtattggtatcttcaaatgagtcgactacagaagcgagggaaacaggaaaagcctgttgtatctgatggagctcaaaaggttattgttgccgttaaagcatctagggagattccaaagactgccttgatttgggctttgactcatgttgttcagcctggggattgcattacccttattgttgttgtcccttctcacaactccggacgaaaactttggggtttcaataagagtttccctatgtttgctggggattgtgcaagtggtcatcggaaatcacattctgaagcactaccggagattaaaagtgatctcactgacacttgttcccaaatgattctccagcttcatgatgtctatgacccgaataagataaatgtcaagattaagattgtttctggatcaccctgtggagcagttgctgctgagtcgaagaaagcgcaagcgaactgggtagtaatggacaaacacctcaagcaggaagagaaacggtgtatggatgaattgcaatgcaacattgtggtgatgaagcgttcgcaggcaaaagttctacgcttaaaccttgttggatctcctaagaaagatgctggaaaagagtgtcccttaccatctggaccagaagcagcatctgagaaacactcaaagaacactaaaggattgttagatgctgaaagaggactacctgtcactcctactagcagccctgagctggggacaccgttcacaagtacagaagccgggacttcatctgtgtcgagctccgacctgggaacttcacctttcttcacattgggaatgaacggatacatgaagaaggatggagcattggtgatcaaggagaatgatggtcttgatgattctggctctgaaacagagagtgaaaaccaatcattagcgtcaacgagtatgagattccagccatggatatcagaatatattggcacccatcgccactcatcccaggaggccgaagaaagcttattatggaaaaatgatgacagggcacaaatatccactacaaaggctttgcttgaaaagttctctaaacttgatgttgaagttgggttgtcgtctagtcgaaggatggatttagagtttagtggaaacgtaagagatgcaatatcactctctcgaagtgctcctcctggtccacctcctctctgttcaatttgccagcacaaggcgccaatatttgggaaacccccaaggctgtttacatacgctgaattagagcttgcaacgggtgggttttcacaggctaacttcttggctgagggtggttatggatctgttcatcggggtgtgctaccagaaggccaggtagttgcagtaaagcaacacaaattggccagttctcaaggagatgtagagttttgctccgaagtggaagttctcagctgtgctcagcacagaaacgtcgttatgctaattggtttctgcattgaagacagcagacggctcttggtctatgaatacatttgcaatggttcacttgactctcatctatacggtcgtcaaaaggaaactctggaatggccagcacggcaaaagattgctgttggagctgcaagaggtcttcggtatcttcacgaagagtgcagagttggctgtattgtccacagagacatgcgtcctaacaacatcctcatcactcatgataatgagccactggttggagattttggtctagcaagatggcagcctgatggggaaatgggtgtagatacacgagtgataggaaccttcggctatctagctcccgaatatgctcaaagcgggcaaatcacagaaaaagctgatgtctactcgttcggggttgttctagttgagctagtcactggccgcaaagccattgatatcaccaggccgaaaggccagcaatgcctgactgaatgggcacgtcctctactggaagaatatgcgatagatgaacttatcgatccgaggcttgggaaccgttttgtagaaagtgaggtcatttgtatgcttcatgcagcttcgttgtgcatacgtagagatccacatttgaggccacgcatgtctcaggtgttgcgtatactggaaggagatatgataatggatggaaactacgcatcaactccaggttcagaggcaggcaaccgaagcgggaggttctgggcggatcattacagcggtcagctaacgaatgatggctcggataggttcagtgaaaggctgtctgttgaaacgccaagactagctttgagggagagggaaagaagccagaggtttgaactaaaccataacaagcaatactaatcacactactttgctttatgataagtttagttgatagggtatttagtaaattcctctgttttaagtgatgtggtcaagctggcaacacagctttttttgtttgtatagtggggtaagatgcaaaaacagttgctaaatatgttatcaaggaatttaaaattgtttttggt

SEQ ID NO: 46780 - protein, 753 aa, Arabidopsis thaliana
  peptide (1)..(753): Ceres Seq. ID no. 14309752
MSRLQKRGKQEKPVVSDGAQKVIVAVKASREIPKTALIWALTHVVQPGDCITLIVVVPSHNSGRKLWGFNKSFPMFAGDCASGHRKSHSEALPEIKSDLTDTCSQMILQLHDVYDPNKINVKIKIVSGSPCGAVAAESKKAQANWVVMDKHLKQEEKRCMDELQCNIVVMKRSQAKVLRLNLVGSPKKDAGKECPLPSGPEAASEKHSKNTKGLLDAERGLPVTPTSSPELGTPFTSTEAGTSSVSSSDLGTSPFFTLGMNGYMKKDGALVIKENDGLDDSGSETESENQSLASTSMRFQPWISEYIGTHRHSSQEAEESLLWKNDDRAQISTTKALLEKFSKLDVEVGLSSSRRMDLEFSGNVRDAISLSRSAPPGPPPLCSICQHKAPIFGKPPRLFTYAELELATGGFSQANFLAEGGYGSVHRGVLPEGQVVAVKQHKLASSQGDVEFCSEVEVLSCAQHRNVVMLIGFCIEDSRRLLVYEYICNGSLDSHLYGRQKETLEWPARQKIAVGAARGLRYLHEECRVGCIVHRDMRPNNILITHDNEPLVGDFGLARWQPDGEMGVDTRVIGTFGYLAPEYAQSGQITEKADVYSFGVVLVELVTGRKAIDITRPKGQQCLTEWARPLLEEYAIDELIDPRLGNRFVESEVICMLHAASLCIRRDPHLRPRMSQVLRILEGDMIMDGNYASTPGSEAGNRSGRFWADHYSGQLTNDGSDRFSERLSVETPRLALRERERSQRFELNHNKQY

SEQ ID NO: 46781 - protein, 679 aa, Arabidopsis thaliana
  peptide (1)..(679): Ceres Seq. ID no. 14309753
MFAGDCASGHRKSHSEALPEIKSDLTDTCSQMILQLHDVYDPNKINVKIKIVSGSPCGAVAAESKKAQANWVVMDKHLKQEEKRCMDELQCNIVVMKRSQAKVLRLNLVGSPKKDAGKECPLPSGPEAASEKHSKNTKGLLDAERGLPVTPTSSPELGTPFTSTEAGTSSVSSSDLGTSPFFTLGMNGYMKKDGALVIKENDGLDDSGSETESENQSLASTSMRFQPWISEYIGTHRHSSQEAEESLLWKNDDRAQISTTKALLEKFSKLDVEVGLSSSRRMDLEFSGNVRDAISLSRSAPPGPPPLCSICQHKAPIFGKPPRLFTYAELELATGGFSQANFLAEGGYGSVHRGVLPEGQVVAVKQHKLASSQGDVEFCSEVEVLSCAQHRNVVMLIGFCIEDSRRLLVYEYICNGSLDSHLYGRQKETLEWPARQKIAVGAARGLRYLHEECRVGCIVHRDMRPNNILITHDNEPLVGDFGLARWQPDGEMGVDTRVIGTFGYLAPEYAQSGQITEKADVYSFGVVLVELVTGRKAIDITRPKGQQCLTEWARPLLEEYAIDELIDPRLGNRFVESEVICMLHAASLCIRRDPHLRPRMSQVLRILEGDMIMDGNYASTPGSEAGNRSGRFWADHYSGQLTNDGSDRFSERLSVETPRLALRERERSQRFELNHNKQY

SEQ ID NO: 46782 - protein, 648 aa, Arabidopsis thaliana
  peptide (1)..(648): Ceres Seq. ID no. 14309754
MILQLHDVYDPNKINVKIKIVSGSPCGAVAAESKKAQANWVVMDKHLKQEEKRCMDELQCNIVVMKRSQAKVLRLNLVGSPKKDAGKECPLPSGPEAASEKHSKNTKGLLDAERGLPVTPTSSPELGTPFTSTEAGTSSVSSSDLGTSPFFTLGMNGYMKKDGALVIKENDGLDDSGSETESENQSLASTSMRFQPWISEYIGTHRHSSQEAEESLLWKNDDRAQISTTKALLEKFSKLDVEVGLSSSRRMDLEFSGNVRDAISLSRSAPPGPPPLCSICQHKAPIFGKPPRLFTYAELELATGGFSQANFLAEGGYGSVHRGVLPEGQVVAVKQHKLASSQGDVEFCSEVEVLSCAQHRNVVMLIGFCIEDSRRLLVYEYICNGSLDSHLYGRQKETLEWPARQKIAVGAARGLRYLHEECRVGCIVHRDMRPNNILITHDNEPLVGDFGLARWQPDGEMGVDTRVIGTFGYLAPEYAQSGQITEKADVYSFGVVLVELVTGRKAIDITRPKGQQCLTEWARPLLEEYAIDELIDPRLGNRFVESEVICMLHAASLCIRRDPHLRPRMSQVLRILEGDMIMDGNYASTPGSEAGNRSGRFWADHYSGQLTNDGSDRFSERLSVETPRLALRERERSQRFELNHNKQY

SEQ ID NO: 46783 - DNA, 1592 bp, Arabidopsis thaliana
  misc_feature (1)..(1592): Ceres Seq. ID no. 12574698
  misc_feature (1)..(1592): Ortholog of  Ceres SEQ ID NO 13656177 as cited in SEQ ID NO 64997
gaaaagatagggcagaagcagagaagcaaaatcgtggaaggttacaaagcctttcaaaaacctcactctctcaactctcaaaccttatctccttccttctcttctcctctcctctccgtcgagcttactatctccacaaaatggcgtcgacggtaggagttccatcactataccaagttcctcaccttgaaatctccaaacccaattccaaaaagaggtctaattgtttatctttatctctcgataagcctttcttcactcccttatctcttgttcgtagaactcgtcgtatccattcctcttctcttcttgttccttctgctgttgctactcctaattctgttctcagtgaagaagctttcaaaagtcttggtctttctgaccatgacgaatatgaccttgacggcgacaacaacaacgttgaagctgatgatggtgaagaactcgctatctctaaacttagtttgcctcaacgtcttgaagagtctcttgagaaacgtggtatcactcatctcttccccattcagagagctgtgttggtacctgcactgcaaggaagagatattatagctcgtgcaaagacaggaactggaaagactttggcttttggtattcctatcattaaacgtctcactgaagaagctggagactacactgctttcaggaggtctggtcgtcttcctaagttccttgtccttgcgccgacccgagagctggctaagcaagtggagaaggagattaaggagtctgcaccttatttgagcactgtttgtgtgtatgggggagtttcttataccattcagcagagtgctttaactcgtggtgttgatgttgttgttggaactcctggaagaatcattgatttgattgaaggaaggagtcttaaattgggagaagttgagtatttggtacttgatgaagctgatcagatgcttgctgttgggtttgaggaggccgtggaatcgattcttgagaatcttccaactaagcgacaaagtatgcttttctcagcaactatgcctacttgggttaagaagttggcgaggaagtaccttgacaatcccttgaatattgatctggttggagaccaagatgagaagctcgcagagggtatcaaactttatgcaatcgcaaccacatcgacatcaaaacgcactattctaagcgaccttattacagtgtatgcgaagggtggcaagaccattgtttttacccaaactaaaagagatgcagacgaagtttctcttgcattgtcaaacagtatagctaccgaagcacttcatggagatatatctcagcatcaaagagagagaacactcaatgctttccgtcaagggaaattcaccgtattagttgccactgatgttgcatctcgtggacttgacatcccgaacgtagatctagttatccactatgaacttcctaatgacccagaaacttttgtgcaccgttctggtcgtactgggcgtgcagggaaagaaggctctgccattctcatgcacaccagcagccaaaagagaacagtgaggtctctggagcgtgacgtaggctgccattttgaattcgaattcaacaagaggatgatgttttaa

SEQ ID NO: 46784 - protein, 529 aa, Arabidopsis thaliana
  peptide (1)..(529): Ceres Seq. ID no. 12574699
KDRAEAEKQNRGRLQSLSKTSLSQLSNLISFLLFSSPLRRAYYLHKMASTVGVPSLYQVPHLEISKPNSKKRSNCLSLSLDKPFFTPLSLVRRTRRIHSSSLLVPSAVATPNSVLSEEAFKSLGLSDHDEYDLDGDNNNVEADDGEELAISKLSLPQRLEESLEKRGITHLFPIQRAVLVPALQGRDIIARAKTGTGKTLAFGIPIIKRLTEEAGDYTAFRRSGRLPKFLVLAPTRELAKQVEKEIKESAPYLSTVCVYGGVSYTIQQSALTRGVDVVVGTPGRIIDLIEGRSLKLGEVEYLVLDEADQMLAVGFEEAVESILENLPTKRQSMLFSATMPTWVKKLARKYLDNPLNIDLVGDQDEKLAEGIKLYAIATTSTSKRTILSDLITVYAKGGKTIVFTQTKRDADEVSLALSNSIATEALHGDISQHQRERTLNAFRQGKFTVLVATDVASRGLDIPNVDLVIHYELPNDPETFVHRSGRTGRAGKEGSAILMHTSSQKRTVRSLERDVGCHFEFEFNKRMMF

SEQ ID NO: 46785 - protein, 483 aa, Arabidopsis thaliana
  peptide (1)..(483): Ceres Seq. ID no. 12574700
MASTVGVPSLYQVPHLEISKPNSKKRSNCLSLSLDKPFFTPLSLVRRTRRIHSSSLLVPSAVATPNSVLSEEAFKSLGLSDHDEYDLDGDNNNVEADDGEELAISKLSLPQRLEESLEKRGITHLFPIQRAVLVPALQGRDIIARAKTGTGKTLAFGIPIIKRLTEEAGDYTAFRRSGRLPKFLVLAPTRELAKQVEKEIKESAPYLSTVCVYGGVSYTIQQSALTRGVDVVVGTPGRIIDLIEGRSLKLGEVEYLVLDEADQMLAVGFEEAVESILENLPTKRQSMLFSATMPTWVKKLARKYLDNPLNIDLVGDQDEKLAEGIKLYAIATTSTSKRTILSDLITVYAKGGKTIVFTQTKRDADEVSLALSNSIATEALHGDISQHQRERTLNAFRQGKFTVLVATDVASRGLDIPNVDLVIHYELPNDPETFVHRSGRTGRAGKEGSAILMHTSSQKRTVRSLERDVGCHFEFEFNKRMMF

SEQ ID NO: 46786 - DNA, 2440 bp, Arabidopsis thaliana
  misc_feature (1)..(2440): Ceres Seq. ID no. 12574237
  misc_feature (1)..(2440): Ortholog of  Ceres SEQ ID NO 13663839 as cited in SEQ ID NO 60834
  misc_feature (1)..(2440): Ortholog of  Ceres SEQ ID NO 14313284 as cited in SEQ ID NO 67146
  misc_feature (1)..(2440): Ortholog of  Ceres SEQ ID NO 14308925 as cited in SEQ ID NO 0
ataaatcaacaaaacaatcacaaatctctcgaaacgctctcgaagttccaaattttctcttagcattctctttcgtttctcgtttgcgttgaatcaaagttcgttgcgatggcggatgttcagatggctgatgcagagacttttgctttccaagctgagattaaccagcttcttagcttgatcatcaacacgttctacagcaacaaagaaatcttcctccgtgagctcatcagtaactcttctgatgctcttgacaagatccgatttgagagcttaacggataagagcaagctcgatggacagcctgaactcttcattagattggttcctgacaagtctaataagacgctctcaattattgacagtggtattggcatgaccaaagcagatttggtgaacaacttgggaaccattgcgaggtctggaacaaaagagtttatggaggcgcttcaagctggagctgatgtaagcatgataggacaatttggtgttggtttctactctgcttatcttgttgcagagaaggttgttgtcactacaaagcacaatgatgatgaacaatacgtttgggagtctcaagctggtggttccttcactgtcactagggatgtggatggggaaccacttggtagaggaactaagatcaccctcttccttaaggacgatcagcttgaatacttggaggagaggagactcaaagacttggtgaagaagcactctgagttcatcagttaccctatctacctttggaccgagaaaaccaccgagaaggagatcagtgacgatgaggatgaagatgaaccaaagaaagaaaacgaaggtgaggttgaagaagttgatgaggagaaggagaaagatggtaaaaagaagaagaaaatcaaggaagtctctcacgagtgggaactcatcaacaagcagaaaccgatctggttgaggaagccagaagagatcactaaggaagagtatgctgctttctacaagagcttgaccaatgactgggaagatcacttagccgtgaaacacttctcagtggagggtcagctagaattcaaggccattctctttgtaccaaagagagctccgtttgatctctttgacacgaggaagaagttgaacaacatcaagctttatgtcaggagggtgttcattatggacaactgtgaagagctaatcccagagtacctcagctttgtgaaaggtgttgttgactctgatgacttgccactcaacatctctcgtgagacgcttcaacagaacaagatccttaaggtgatcaggaagaatctagtgaagaagtgcattgagatgttcaacgagattgctgagaacaaagaggactacaccaaattctatgaggctttctccaagaatctcaaattgggtatccatgaagacagtcagaacaggggaaagattgctgatcttctacggtaccactccacaaagagtggtgatgaaatgacgagcttcaaagattacgtcacaaggatgaaggaaggtcaaaaggacattttctacatcactggtgaaagcaaaaaggcggtggagaattctcccttcttggagaggctgaagaagagaggatacgaggtactttacatggtggatgcgattgacgaatacgctgttggacaattgaaggagtatgacggtaagaaacttgtttctgcgactaaagaaggcctcaaacttgaagatgagaccgaagaagagaagaaaaagagggaagagaagaagaagtccttcgagaatctgtgcaagacgattaaggaaattctcggggacaaggttgagaaggttgtggtctcagacaggattgtggactctccctgctgtctagtaactggtgaatatggatggactgcaaatatggagaggattatgaaggcacaggcgttgagagatagcagcatgagtggttacatgtcgagcaagaaaacaatggagatcaaccccgacaacggtataatggaggagctcaggaagagagctgaagcagacaagaatgacaagtctgttaaagatcttgtcatgttgctgtatgagacagctttgttgacgtctggattcagtcttgatgaaccgaacacttttgctgctaggattcacaggatgttgaagttgggtctgagtattgatgaggatgagaacgttgaggaagatggtgatatgcctgagttggaggaggacgctgctgaagagagcaagatggaggaagtcgactaagagatgaagaaattgctcttatggttctgaaaacttctaatatgtcgagttgttctgagttttaagattttccaaaatgtctttgtctttttttttatatctttagagttacttgaacattgtgactacttctagggttgggtttgtgtcaggtctgttatatcgtgtggtgggtctgtctaatactgattcaagtttttgttattcagctaag

SEQ ID NO: 46787 - protein, 705 aa, Arabidopsis thaliana
  peptide (1)..(705): Ceres Seq. ID no. 12574238
MADVQMADAETFAFQAEINQLLSLIINTFYSNKEIFLRELISNSSDALDKIRFESLTDKSKLDGQPELFIRLVPDKSNKTLSIIDSGIGMTKADLVNNLGTIARSGTKEFMEALQAGADVSMIGQFGVGFYSAYLVAEKVVVTTKHNDDEQYVWESQAGGSFTVTRDVDGEPLGRGTKITLFLKDDQLEYLEERRLKDLVKKHSEFISYPIYLWTEKTTEKEISDDEDEDEPKKENEGEVEEVDEEKEKDGKKKKKIKEVSHEWELINKQKPIWLRKPEEITKEEYAAFYKSLTNDWEDHLAVKHFSVEGQLEFKAILFVPKRAPFDLFDTRKKLNNIKLYVRRVFIMDNCEELIPEYLSFVKGVVDSDDLPLNISRETLQQNKILKVIRKNLVKKCIEMFNEIAENKEDYTKFYEAFSKNLKLGIHEDSQNRGKIADLLRYHSTKSGDEMTSFKDYVTRMKEGQKDIFYITGESKKAVENSPFLERLKKRGYEVLYMVDAIDEYAVGQLKEYDGKKLVSATKEGLKLEDETEEEKKKREEKKKSFENLCKTIKEILGDKVEKVVVSDRIVDSPCCLVTGEYGWTANMERIMKAQALRDSSMSGYMSSKKTMEINPDNGIMEELRKRAEADKNDKSVKDLVMLLYETALLTSGFSLDEPNTFAARIHRMLKLGLSIDEDENVEEDGDMPELEEDAAEESKMEEVD

SEQ ID NO: 46788 - protein, 700 aa, Arabidopsis thaliana
  peptide (1)..(700): Ceres Seq. ID no. 12574239
MADAETFAFQAEINQLLSLIINTFYSNKEIFLRELISNSSDALDKIRFESLTDKSKLDGQPELFIRLVPDKSNKTLSIIDSGIGMTKADLVNNLGTIARSGTKEFMEALQAGADVSMIGQFGVGFYSAYLVAEKVVVTTKHNDDEQYVWESQAGGSFTVTRDVDGEPLGRGTKITLFLKDDQLEYLEERRLKDLVKKHSEFISYPIYLWTEKTTEKEISDDEDEDEPKKENEGEVEEVDEEKEKDGKKKKKIKEVSHEWELINKQKPIWLRKPEEITKEEYAAFYKSLTNDWEDHLAVKHFSVEGQLEFKAILFVPKRAPFDLFDTRKKLNNIKLYVRRVFIMDNCEELIPEYLSFVKGVVDSDDLPLNISRETLQQNKILKVIRKNLVKKCIEMFNEIAENKEDYTKFYEAFSKNLKLGIHEDSQNRGKIADLLRYHSTKSGDEMTSFKDYVTRMKEGQKDIFYITGESKKAVENSPFLERLKKRGYEVLYMVDAIDEYAVGQLKEYDGKKLVSATKEGLKLEDETEEEKKKREEKKKSFENLCKTIKEILGDKVEKVVVSDRIVDSPCCLVTGEYGWTANMERIMKAQALRDSSMSGYMSSKKTMEINPDNGIMEELRKRAEADKNDKSVKDLVMLLYETALLTSGFSLDEPNTFAARIHRMLKLGLSIDEDENVEEDGDMPELEEDAAEESKMEEVD

SEQ ID NO: 46789 - protein, 616 aa, Arabidopsis thaliana
  peptide (1)..(616): Ceres Seq. ID no. 12574240
MTKADLVNNLGTIARSGTKEFMEALQAGADVSMIGQFGVGFYSAYLVAEKVVVTTKHNDDEQYVWESQAGGSFTVTRDVDGEPLGRGTKITLFLKDDQLEYLEERRLKDLVKKHSEFISYPIYLWTEKTTEKEISDDEDEDEPKKENEGEVEEVDEEKEKDGKKKKKIKEVSHEWELINKQKPIWLRKPEEITKEEYAAFYKSLTNDWEDHLAVKHFSVEGQLEFKAILFVPKRAPFDLFDTRKKLNNIKLYVRRVFIMDNCEELIPEYLSFVKGVVDSDDLPLNISRETLQQNKILKVIRKNLVKKCIEMFNEIAENKEDYTKFYEAFSKNLKLGIHEDSQNRGKIADLLRYHSTKSGDEMTSFKDYVTRMKEGQKDIFYITGESKKAVENSPFLERLKKRGYEVLYMVDAIDEYAVGQLKEYDGKKLVSATKEGLKLEDETEEEKKKREEKKKSFENLCKTIKEILGDKVEKVVVSDRIVDSPCCLVTGEYGWTANMERIMKAQALRDSSMSGYMSSKKTMEINPDNGIMEELRKRAEADKNDKSVKDLVMLLYETALLTSGFSLDEPNTFAARIHRMLKLGLSIDEDENVEEDGDMPELEEDAAEESKMEEVD

SEQ ID NO: 46790 - DNA, 2730 bp, Arabidopsis thaliana
  misc_feature (1)..(2730): Ceres Seq. ID no. 13646956
  misc_feature (1)..(2730): Ortholog of  Ceres SEQ ID NO 15175681 as cited in SEQ ID NO 55458
  misc_feature (1)..(2730): Ortholog of  Ceres SEQ ID NO 15180188 as cited in SEQ ID NO 0
gagattcaaaaccaaaaagaaaaaaaaaaatcaaaacagaagcgagcgaagaggacggagggagaggatcttcttccctctttctcttatctactttctcttctaaatctctaatcttttgaaaccctaaatcaaagttttgtttttttttatcaactggggaagaagaaaggtgtaacctttatataaccatggattccggtgacgcgacatctttgcttttgacgaaaattcgaagcttggagccagattatgctcctaagattattgggtatttgcttttacatgattttggtgatagagacttgatgcatctgggctcgtggacctgaatcgattttgcagtcgactatttcgaaagtgaagagtctcttggggattttctccaacaactcgccttcttctactccgacgtctccttctccgttgaatcctatctgtcgtcctcctcttaacggaagaggaagctctcactccaatgggtttatggatttccgtagaaactctccgtcttctccttcttctacctctccttggtcattcaacaactgtatcaacggtaataatgggaataacccccacatttcccctaaacacactccgatctcgaaaccctttagctctcaccaaagcaatggactttctgctacacattctggtagtgctgacgctgctggtggtgctgatttacttgatgatcagcagcttaatgattgcctttcgtttctcgacgattcttgttctaaaaccgaggatcttgtggatcctagcattcctttggattactctgtagatggtgatggtgaaacccatctgcacaggaggagtttctcttgtgatgcgtcttttgtgtccggagatgatggatttggtggtggatgcaaaccatgtgtgtattttagtagaggtttgtgcaagaatggagaaagctgcaagtttatccacggtggatatccggataatatggatggtaatggcattgtcgctgactcgcctaggaaaatggagaactttgttaggcagcacgaggagatgatgaggctgaaattggcttaccagcagcagaggttggcttctcaaatcctgggtcgggctccccagttgccatacgagaaaagaatggactttctcttgcagcagcatgctcaaagagatggtggactgccttttggtgatgaaagattttggagcagcagcccaggacggcttgagaggatggagctggcaatgcatttaggtgatcagtcaaattcggcatctagacagatttacttgacattcccagctgacagcacgtttaaggatgaggatgttgctacatatttcagcctctttggaacagtccaagatgtgcggatcccataccaacagaagcgtatgtttggctttgtttcatttgctcatcccgagacagtgaaagttgtactagctagagggaatccccatttcatttgcgactcacgggttcttgtcaaaccttacaaagaaaaaggcaaagtcttggacaagaagcaacagcaactgctacaacagcagattgagcgaggaaattactccccgtgctccagtccatctgggattgatcctagagaacagtctgatttccaccttggttcaaagatgttgtatgagagacgtgagatgatgagaaggaaaatagagcaggctgatctcctgagggctattgaactcgaaagaagacgtttcattaatttacagcttcctgagttcaagaatagtgtaacgctgaatcatcaccgtagcttttctgtggggtctcctggttatttttcatctgccggcaatcaaagccctgattttcaatctgaacttaacggtgcagatgctttaaaagtaactgatgataccttggagctgcatccttacccagtagtcaacccaatgagtgttaacaatagctactcaaacggtgcaaaagaagagactaacaagagtgaattgcttgatcccgattctggaagcaccattgagcttgttcttcctagtaacctcttcccttctgcatcatctaccgatgatcacaaaaccgatgattctgctgaaactaatgcaaaagttggagtctcctctactaatgaaaatgaccatgaaccaccagtcactaccaataatctgatgcagtaggctatttcacctcataaatgccaagggttttttcttatggataagatgaggctaccgaagtgtatgtaataaagacaaagtaaacaagcatacacaaggaagtaggatgatgtatatgtatagctaagttatatatatctatatatatatggagaacagaaagaacgtaggagatatgataatatggtatgaagatcgcaagtttcctcaggtgatactatactactaacaaacggatgcgtaagacatactttaaagacgatctattttgaaactttcatttcttctgcttctatctgtttgcttctaatatcggttgctcatgtgattgttccggtttatgtgggtaacaaaccacaagagtctctgatgtaacaaaagaatagagggttctgtaactttatcatattaagccgtttcttaagtaaaaaaaaaaaaaaaaaaaaaaaagttctcgtaattgggttcttgatcggaggtggcggatctacacacacattcttcctgttttttgctttttatttgttttctcattttgaactgtttaaaatttctgttatatgaatgaatgttttccctgcggtt

SEQ ID NO: 46791 - protein, 552 aa, Arabidopsis thaliana
  peptide (1)..(552): Ceres Seq. ID no. 13646957
MDFRRNSPSSPSSTSPWSFNNCINGNNGNNPHISPKHTPISKPFSSHQSNGLSATHSGSADAAGGADLLDDQQLNDCLSFLDDSCSKTEDLVDPSIPLDYSVDGDGETHLHRRSFSCDASFVSGDDGFGGGCKPCVYFSRGLCKNGESCKFIHGGYPDNMDGNGIVADSPRKMENFVRQHEEMMRLKLAYQQQRLASQILGRAPQLPYEKRMDFLLQQHAQRDGGLPFGDERFWSSSPGRLERMELAMHLGDQSNSASRQIYLTFPADSTFKDEDVATYFSLFGTVQDVRIPYQQKRMFGFVSFAHPETVKVVLARGNPHFICDSRVLVKPYKEKGKVLDKKQQQLLQQQIERGNYSPCSSPSGIDPREQSDFHLGSKMLYERREMMRRKIEQADLLRAIELERRRFINLQLPEFKNSVTLNHHRSFSVGSPGYFSSAGNQSPDFQSELNGADALKVTDDTLELHPYPVVNPMSVNNSYSNGAKEETNKSELLDPDSGSTIELVLPSNLFPSASSTDDHKTDDSAETNAKVGVSSTNENDHEPPVTTNNLMQ

SEQ ID NO: 46792 - protein, 393 aa, Arabidopsis thaliana
  peptide (1)..(393): Ceres Seq. ID no. 13646958
MDGNGIVADSPRKMENFVRQHEEMMRLKLAYQQQRLASQILGRAPQLPYEKRMDFLLQQHAQRDGGLPFGDERFWSSSPGRLERMELAMHLGDQSNSASRQIYLTFPADSTFKDEDVATYFSLFGTVQDVRIPYQQKRMFGFVSFAHPETVKVVLARGNPHFICDSRVLVKPYKEKGKVLDKKQQQLLQQQIERGNYSPCSSPSGIDPREQSDFHLGSKMLYERREMMRRKIEQADLLRAIELERRRFINLQLPEFKNSVTLNHHRSFSVGSPGYFSSAGNQSPDFQSELNGADALKVTDDTLELHPYPVVNPMSVNNSYSNGAKEETNKSELLDPDSGSTIELVLPSNLFPSASSTDDHKTDDSAETNAKVGVSSTNENDHEPPVTTNNLMQ

SEQ ID NO: 46793 - protein, 380 aa, Arabidopsis thaliana
  peptide (1)..(380): Ceres Seq. ID no. 13646959
MENFVRQHEEMMRLKLAYQQQRLASQILGRAPQLPYEKRMDFLLQQHAQRDGGLPFGDERFWSSSPGRLERMELAMHLGDQSNSASRQIYLTFPADSTFKDEDVATYFSLFGTVQDVRIPYQQKRMFGFVSFAHPETVKVVLARGNPHFICDSRVLVKPYKEKGKVLDKKQQQLLQQQIERGNYSPCSSPSGIDPREQSDFHLGSKMLYERREMMRRKIEQADLLRAIELERRRFINLQLPEFKNSVTLNHHRSFSVGSPGYFSSAGNQSPDFQSELNGADALKVTDDTLELHPYPVVNPMSVNNSYSNGAKEETNKSELLDPDSGSTIELVLPSNLFPSASSTDDHKTDDSAETNAKVGVSSTNENDHEPPVTTNNLMQ

SEQ ID NO: 46794 - DNA, 1381 bp, Arabidopsis thaliana
  misc_feature (1)..(1381): Ceres Seq. ID no. 13579012
  misc_feature (1)..(1381): Ortholog of  Ceres SEQ ID NO 14306059 as cited in SEQ ID NO 52249
  misc_feature (1)..(1381): Ortholog of  Ceres SEQ ID NO 15170479 as cited in SEQ ID NO 52835
  misc_feature (1)..(1381): Ortholog of  Ceres SEQ ID NO 13596087 as cited in SEQ ID NO 68336
gacaagactacaaagcaaagacacaaatcaaggagaaaacttccacaaattgtctctctttctttcctacacaccaatttgttttgtgattctttcgattgcattcttctttttcgaattcccgatcactggattttcccgtttaaccggaaaatccagtggattagattttacccagtgttatctttttggattggattcgatgactgttacggaggacgaaaaaccggttcttgagctgctggtgagagttgaagacgacgatgagaaagggccttatgtgaaattgagtgaggttttagagaaaggtcaagaatcagagcaggagaaggaagaagaaaagactgattcgtcgcggttttggttttgggtcaagctttctcttttattcgcctttcttgctgcattggctgttgtgggttacatttggatcggtccattgatcatggataaggagcttataccgcttatacaatgggagatacgaacttttacacatcctgtgtgtggtcttcttgtttttgcatcagtggcgatatttccaactatacttcttccatctacaccatcaatgtggattgctgggatgacttttggttatggctatggctttctacttattatctcagctgcagctgttggtgtttcgctaccttactttattggacaactcttctgccacaaaattcaaggatggctagaaagatatcctgatcaagcagccgtattaagagctgctggtgaagggaattggcttcaccaatttctattagtaaccttaatccggatttctccattcccttacattctttataactactgttctgtagcaactcgtgttaagtatggtccttacatcacgggctctctcttaggcatggtgcctgaggtttttgtcgcaatctacacagggatacttgtaaggacattagcagaagcatcttctgcagaagaacagggtctctcggtaacacaggtgattctcaacattctcggctttttagcaacagtggctacaacgattctcatcacaaagtatgcgaaaagacagctggagacgatgaagaaagaggacgaagcattgttgcagtaaaactgtaaaaccacgtgacaaactctgagctgcttttgtctctctgctactttatctgaaacaccccttgtcttcttacacagtacaggtctcaggtctgttcctagatgtgaaagagctctggtttttttgtccttgcttcttttaatctcatttattaacagccttaaaatttgagaagagaaaaatggttaacaaggaaaaatctaacacattactttttttttgtaattattgtagtcaagttttatgtttggcatgaatgagagaactgagaagaatattcgt

SEQ ID NO: 46795 - protein, 363 aa, Arabidopsis thaliana
  peptide (1)..(363): Ceres Seq. ID no. 13579013
TRLQSKDTNQGENFHKLSLFLSYTPICFVILSIAFFFFEFPITGFSRLTGKSSGLDFTQCYLFGLDSMTVTEDEKPVLELLVRVEDDDEKGPYVKLSEVLEKGQESEQEKEEEKTDSSRFWFWVKLSLLFAFLAALAVVGYIWIGPLIMDKELIPLIQWEIRTFTHPVCGLLVFASVAIFPTILLPSTPSMWIAGMTFGYGYGFLLIISAAAVGVSLPYFIGQLFCHKIQGWLERYPDQAAVLRAAGEGNWLHQFLLVTLIRISPFPYILYNYCSVATRVKYGPYITGSLLGMVPEVFVAIYTGILVRTLAEASSAEEQGLSVTQVILNILGFLATVATTILITKYAKRQLETMKKEDEALLQ

SEQ ID NO: 46796 - protein, 296 aa, Arabidopsis thaliana
  peptide (1)..(296): Ceres Seq. ID no. 13579014
MTVTEDEKPVLELLVRVEDDDEKGPYVKLSEVLEKGQESEQEKEEEKTDSSRFWFWVKLSLLFAFLAALAVVGYIWIGPLIMDKELIPLIQWEIRTFTHPVCGLLVFASVAIFPTILLPSTPSMWIAGMTFGYGYGFLLIISAAAVGVSLPYFIGQLFCHKIQGWLERYPDQAAVLRAAGEGNWLHQFLLVTLIRISPFPYILYNYCSVATRVKYGPYITGSLLGMVPEVFVAIYTGILVRTLAEASSAEEQGLSVTQVILNILGFLATVATTILITKYAKRQLETMKKEDEALLQ

SEQ ID NO: 46797 - protein, 215 aa, Arabidopsis thaliana
  peptide (1)..(215): Ceres Seq. ID no. 13579015
MDKELIPLIQWEIRTFTHPVCGLLVFASVAIFPTILLPSTPSMWIAGMTFGYGYGFLLIISAAAVGVSLPYFIGQLFCHKIQGWLERYPDQAAVLRAAGEGNWLHQFLLVTLIRISPFPYILYNYCSVATRVKYGPYITGSLLGMVPEVFVAIYTGILVRTLAEASSAEEQGLSVTQVILNILGFLATVATTILITKYAKRQLETMKKEDEALLQ

SEQ ID NO: 46798 - DNA, 2071 bp, Arabidopsis thaliana
  misc_feature (1)..(2071): Ceres Seq. ID no. 14302791
  misc_feature (1)..(2071): Ortholog of  Ceres SEQ ID NO 14314220 as cited in SEQ ID NO 57321
gatcatttcctgaaaactagaaaacacagtttaaagggaacataaaaagcaactctttgagagatcagagaaaccctaatttgctaagaaccctaatctcaatttccatcttccaaagttcagattctgtatgtaaatgcatctgaagaattctactgtagcagaacggcggtacatcggaaaagaaaccgccggttatttaacttcttcctccgatttggatccgaaacctaagattaaacatcatcgtcctcttcaggtacctgagattctgactccagacattggtgctggtgctggattcagtgtgtataacaatcaagttcaagctcagagtcgtcatcatctgacggttgaaatcccagattcatcgtctcacaatcttacatctaagagacctgtggtggttcaatcttctaatccgttcaacgttgacgatttccgaagacagcaacgcacaagcttgggttcgatttcatcttattgtccgtcgtatctcttatcgtttttttcttcttctcttccatcgatcccatcggcgactaatcagaagcttcttcgtcatgttcttagagtccgtttgatatgtttccatcttcgtttcttacttcttctctctgttcctcctctctatatctttttcctggtgattagtttcagattcttccttctctttgtcttctcgattatcgctttctctttcgtcctttcgatctctctcaaattcgctcttcctcacttaccatcgattcgtttgattatcgctcggttactttctctcaagcttacccctaccagatcatcctcttcatctcaggagaacactaaacatgttatttggtcaattgggtctaagcctgtgactgagaagaagaccaactctggctcatgggttcagaagtacagctctggtgatgtatacgagggagagtttcatagggggaagtgttcaggaagtggagtttattactattctatgaagggtaaatacgaaggggattggattgatgggaagtatgatggatatggagttgaaacttgggctaaagggagtaggtaccgaggtcaatacaggcaagggatgagacatggaactggtatctacagattttatacaggggatgtatatgctggtgagtggtcgaatggacagagccatggctgtggtgtgtatacctctgaggatggtagtcgttttgttggagagtttaaatggggtgtcaaacatggccttggtcattatcatttcagaaatggtgatacatatgctggggagtattttgcagacaggatgcatggttttggagtgtatcaatttggaaacgggcatcggtatgaaggagcctggcatgaggggagaaggcaaggacttggtatgtacacgttcaggaatggtgagacacaggcaggccattgggaagacggagttcttaactgtcctaccgagcagaccactcgccctgattcatcgttttccatcagtcattccaaggttgtcgacactgtccagcaagcaaggaaagcagccaagaaagcacgcgaagttgtgaaagttgaagagagagtgaacagagcagtgatggtcgcaaaccgagcagcaaatgctgctagagttgctgctacaaaggctgtccaaacccaaacatttcattgtagtagtggtgacgatcccttgtgaattcctgcggcaaagattttgacataatcgcagtcatgaccttacctcaaacttctacgaagacagaagagtgaaagagagatgtttagagaacagagtcagaattcgcaatctccgttgagattttcttgaaggtgaaccacttggaaccaatatcgagatctcataagtaataagtaagagatctggctatggagcaagtattactggtttactttttcttttctcccacttgttttatgagcaggctggtttaaaactgtacataggttgttgaagagtaagcaatgtgtgttaacaaaagatctttgtaacaagcgtaatccatgtaagagaagtaacaaaacattgttttacttttacaacgtgttgaaaataacacctttttttacc

SEQ ID NO: 46799 - protein, 513 aa, Arabidopsis thaliana
  peptide (1)..(513): Ceres Seq. ID no. 14302792
MHLKNSTVAERRYIGKETAGYLTSSSDLDPKPKIKHHRPLQVPEILTPDIGAGAGFSVYNNQVQAQSRHHLTVEIPDSSSHNLTSKRPVVVQSSNPFNVDDFRRQQRTSLGSISSYCPSYLLSFFSSSLPSIPSATNQKLLRHVLRVRLICFHLRFLLLLSVPPLYIFFLVISFRFFLLFVFSIIAFSFVLSISLKFALPHLPSIRLIIARLLSLKLTPTRSSSSSQENTKHVIWSIGSKPVTEKKTNSGSWVQKYSSGDVYEGEFHRGKCSGSGVYYYSMKGKYEGDWIDGKYDGYGVETWAKGSRYRGQYRQGMRHGTGIYRFYTGDVYAGEWSNGQSHGCGVYTSEDGSRFVGEFKWGVKHGLGHYHFRNGDTYAGEYFADRMHGFGVYQFGNGHRYEGAWHEGRRQGLGMYTFRNGETQAGHWEDGVLNCPTEQTTRPDSSFSISHSKVVDTVQQARKAAKKAREVVKVEERVNRAVMVANRAANAARVAATKAVQTQTFHCSSGDDPL

SEQ ID NO: 46800 - DNA, 1281 bp, Arabidopsis thaliana
  misc_feature (1)..(1281): Ceres Seq. ID no. 14302801
  misc_feature (1)..(1281): Ortholog of  Ceres SEQ ID NO 15178027 as cited in SEQ ID NO 55634
  misc_feature (1)..(1281): Ortholog of  Ceres SEQ ID NO 13597537 as cited in SEQ ID NO 64962
gcaaaacaccaggaggaaaccaaaaagctagaggctttgtggagtgagaagaagagtctcagtgaaaacagaaagcagcatttgagattccactgttaatctttgaatcaaaaatgagtgcagcagctacaatgcctatgccccgagaagcgtctaattacgatgagatctctatgcaacagagcatgctcttctctgatagtctcaaggatctgaagaatctgagaacacagttgtattcagcagctgagtatttcgaactatcctacacaaacgatgaacaaaaacagatagtcgtggagacactgaaagattatgcaataaaggctctggtgaatacagttgaccatttggggtctgttacatataaagtaaatgactttgtagatgaaaaagtcgatgaagtagcaggaaccgaactgcgagtatcttgcattgaacagaggctacggatgtgccaagagtacatggatcatgaaggtcgttcccagcaatcacttgtgatcgacactccaaagttccacaagcggtacttcttgccttctggtgaaatcaaaagaggtggcaacctcgcaaagcttaagaatgttgaaggtagttttgatggagaagatgactggaaccaattcagaaatgctgttcgcgctacaattcgtgaaacgcctccaccacctgttagaaaaccgatacttcagtctccctctcaacggaaacctcaacgttcagcaaccttttcgttctcctctatcgccaccgcaccaaagaaagaacaagataagcgagcagtatcaccacatcggtttccgctgctaagatctggttcggttgctatccgaccgtcatcaatcagccggccaacaaccccgagcaagagtagagcggtaactccaactcctaaacggtatccgtcagaaccaagaagatcggcttcggttcgggttgcgttcgagaaagaagctcagaaagaaccagagcatcaacaacaaccgagcaagagcaaacggctgctaaaggcgctacttagccgacgcaaaacaaagaaggacgatacgctctacacttatttggacgaatattaaaccgaaagctggttttgtatgttgactggtaaaccggaaattacattccagttttaattgcatttacgtaatgtcaaattgtcaatatatgtgttacaaaatatgtccatgattctatgattttgtgtataccttatgactgtcagagtgtgaatgcagttttgtttacaagcgtagtaaaatttgctgtgaattattttag

SEQ ID NO: 46801 - protein, 321 aa, Arabidopsis thaliana
  peptide (1)..(321): Ceres Seq. ID no. 14302802
MSAAATMPMPREASNYDEISMQQSMLFSDSLKDLKNLRTQLYSAAEYFELSYTNDEQKQIVVETLKDYAIKALVNTVDHLGSVTYKVNDFVDEKVDEVAGTELRVSCIEQRLRMCQEYMDHEGRSQQSLVIDTPKFHKRYFLPSGEIKRGGNLAKLKNVEGSFDGEDDWNQFRNAVRATIRETPPPPVRKPILQSPSQRKPQRSATFSFSSIATAPKKEQDKRAVSPHRFPLLRSGSVAIRPSSISRPTTPSKSRAVTPTPKRYPSEPRRSASVRVAFEKEAQKEPEHQQQPSKSKRLLKALLSRRKTKKDDTLYTYLDEY

SEQ ID NO: 46802 - protein, 315 aa, Arabidopsis thaliana
  peptide (1)..(315): Ceres Seq. ID no. 14302803
MPMPREASNYDEISMQQSMLFSDSLKDLKNLRTQLYSAAEYFELSYTNDEQKQIVVETLKDYAIKALVNTVDHLGSVTYKVNDFVDEKVDEVAGTELRVSCIEQRLRMCQEYMDHEGRSQQSLVIDTPKFHKRYFLPSGEIKRGGNLAKLKNVEGSFDGEDDWNQFRNAVRATIRETPPPPVRKPILQSPSQRKPQRSATFSFSSIATAPKKEQDKRAVSPHRFPLLRSGSVAIRPSSISRPTTPSKSRAVTPTPKRYPSEPRRSASVRVAFEKEAQKEPEHQQQPSKSKRLLKALLSRRKTKKDDTLYTYLDEY

SEQ ID NO: 46803 - protein, 313 aa, Arabidopsis thaliana
  peptide (1)..(313): Ceres Seq. ID no. 14302804
MPREASNYDEISMQQSMLFSDSLKDLKNLRTQLYSAAEYFELSYTNDEQKQIVVETLKDYAIKALVNTVDHLGSVTYKVNDFVDEKVDEVAGTELRVSCIEQRLRMCQEYMDHEGRSQQSLVIDTPKFHKRYFLPSGEIKRGGNLAKLKNVEGSFDGEDDWNQFRNAVRATIRETPPPPVRKPILQSPSQRKPQRSATFSFSSIATAPKKEQDKRAVSPHRFPLLRSGSVAIRPSSISRPTTPSKSRAVTPTPKRYPSEPRRSASVRVAFEKEAQKEPEHQQQPSKSKRLLKALLSRRKTKKDDTLYTYLDEY

SEQ ID NO: 46804 - DNA, 1353 bp, Arabidopsis thaliana; identical to SEQ ID NO: 37049
  misc_feature (1)..(1353): Ceres Seq. ID no. 13600835
  misc_feature (1)..(1353): Ortholog of  Ceres SEQ ID NO 12778345 as cited in SEQ ID NO 62792
  misc_feature (1)..(1353): Ortholog of  Ceres SEQ ID NO 13662513 as cited in SEQ ID NO 63303

SEQ ID NO: 46805 - protein, 439 aa, Arabidopsis thaliana; identical to SEQ ID NO: 37050
  peptide (1)..(439): Ceres Seq. ID no. 13600836

SEQ ID NO: 46806 - protein, 419 aa, Arabidopsis thaliana; identical to SEQ ID NO: 37051
  peptide (1)..(419): Ceres Seq. ID no. 13600837

SEQ ID NO: 46807 - protein, 417 aa, Arabidopsis thaliana; identical to SEQ ID NO: 37052
  peptide (1)..(417): Ceres Seq. ID no. 13600838

SEQ ID NO: 46808 - DNA, 1731 bp, Arabidopsis thaliana
  misc_feature (1)..(1731): Ceres Seq. ID no. 12604559
  misc_feature (1)..(1731): Ortholog of  Ceres SEQ ID NO 14308221 as cited in SEQ ID NO 60363
ctcttttatcttcccctctcttcaaacccttcaagagacaatctttcctgcgaaaatggtggtctctgctgactgcagaatctccctctctgcccctagctgcatacgtagtagctccacgggattgactaggcacattaagcttggcagcttctgcaatggtgagctcatggggaagaagctcaacttgtctcagcttccaaacattcgtcttcgatcttctactaacttctctcagaagagaattttaatgtctctaaatagtgtagctggggagagtaaggtacaagaacttgagactgagaaaagggatccaaggacagttgcttccattattcttggaggtggagcaggaactcgactctttcctctcacaaaacgccgcgccaagcctgccgttcctatcgggggagcctataggttgatagatgtaccaatgagcaattgtattaacagcggaatcaacaaagtctacatactcacacaatataactcagcatcattgaacaggcatttagcccgtgcttacaactccaatggacttggctttggagatggctatgttgaggttcttgcggccactcaaacgccaggagaatctggtaaaaggtggttccaaggtacagcagatgcggttcggcaattccattggcttttcgaggatgcaagaagcaaggacatagaggatgtattgatcctttctggagatcacctctacaggatggattacatggattttatacaggatcatcggcagagtggcgcggatataagcatttcctgcataccaatagatgacagacgtgcctcagattttgggcttatgaagatagatgacaaaggaagagttatctcattcagtgaaaaacctaaaggagacgacctgaaagcaatggcagtagacacaactattttaggactttccaaggaggaagctgaaaagaaaccatacatagcttcaatgggagtttatgttttcaaaaaagaaatactgttaaatctcttgagatggcgtttccccacagcaaacgactttggttcagagattatacccttctcagctaaagaattctatgtgaatgcttatctctttaatgactactgggaagatataggaacaataagatctttcttcgaggcgaatcttgcactcactgagcatcctggggcatttagtttctacgacgcggcaaaaccaatatatacatcaaggagaaacctgccaccatcaaaaatagacaactctaagctcatcgattcaatcatttctcatggaagcttcttaaccaactgcttgattgagcatagcattgtgggaattagatcaagagtaggcagtaatgttcagttgaaggacactgtgatgcttggggcagattactacgaaactgaagcagaagttgcagcactacttgctgagggaaacgttcccattggaataggagagaacacaaaaattcaagaatgcataatagacaagaatgctagagttggaaagaatgtaatcatcgcaaactcggagggaatacaagaagcagataggtcatccgatggattttacatcagatctggcattactgtaatcttgaagaactcagtaattaaagatggagttgtgatatgatacttttaagatctaattgtaagaactgagaactaaaaaatgcagagcataaaagtcaacaataaattacaaagaaatttatttgatagtgatgacacttcacatat

SEQ ID NO: 46809 - protein, 540 aa, Arabidopsis thaliana
  peptide (1)..(540): Ceres Seq. ID no. 12604560
SFIFPSLQTLQETIFPAKMVVSADCRISLSAPSCIRSSSTGLTRHIKLGSFCNGELMGKKLNLSQLPNIRLRSSTNFSQKRILMSLNSVAGESKVQELETEKRDPRTVASIILGGGAGTRLFPLTKRRAKPAVPIGGAYRLIDVPMSNCINSGINKVYILTQYNSASLNRHLARAYNSNGLGFGDGYVEVLAATQTPGESGKRWFQGTADAVRQFHWLFEDARSKDIEDVLILSGDHLYRMDYMDFIQDHRQSGADISISCIPIDDRRASDFGLMKIDDKGRVISFSEKPKGDDLKAMAVDTTILGLSKEEAEKKPYIASMGVYVFKKEILLNLLRWRFPTANDFGSEIIPFSAKEFYVNAYLFNDYWEDIGTIRSFFEANLALTEHPGAFSFYDAAKPIYTSRRNLPPSKIDNSKLIDSIISHGSFLTNCLIEHSIVGIRSRVGSNVQLKDTVMLGADYYETEAEVAALLAEGNVPIGIGENTKIQECIIDKNARVGKNVIIANSEGIQEADRSSDGFYIRSGITVILKNSVIKDGVVI

SEQ ID NO: 46810 - protein, 522 aa, Arabidopsis thaliana
  peptide (1)..(522): Ceres Seq. ID no. 12604561
MVVSADCRISLSAPSCIRSSSTGLTRHIKLGSFCNGELMGKKLNLSQLPNIRLRSSTNFSQKRILMSLNSVAGESKVQELETEKRDPRTVASIILGGGAGTRLFPLTKRRAKPAVPIGGAYRLIDVPMSNCINSGINKVYILTQYNSASLNRHLARAYNSNGLGFGDGYVEVLAATQTPGESGKRWFQGTADAVRQFHWLFEDARSKDIEDVLILSGDHLYRMDYMDFIQDHRQSGADISISCIPIDDRRASDFGLMKIDDKGRVISFSEKPKGDDLKAMAVDTTILGLSKEEAEKKPYIASMGVYVFKKEILLNLLRWRFPTANDFGSEIIPFSAKEFYVNAYLFNDYWEDIGTIRSFFEANLALTEHPGAFSFYDAAKPIYTSRRNLPPSKIDNSKLIDSIISHGSFLTNCLIEHSIVGIRSRVGSNVQLKDTVMLGADYYETEAEVAALLAEGNVPIGIGENTKIQECIIDKNARVGKNVIIANSEGIQEADRSSDGFYIRSGITVILKNSVIKDGVVI

SEQ ID NO: 46811 - protein, 484 aa, Arabidopsis thaliana
  peptide (1)..(484): Ceres Seq. ID no. 12604562
MGKKLNLSQLPNIRLRSSTNFSQKRILMSLNSVAGESKVQELETEKRDPRTVASIILGGGAGTRLFPLTKRRAKPAVPIGGAYRLIDVPMSNCINSGINKVYILTQYNSASLNRHLARAYNSNGLGFGDGYVEVLAATQTPGESGKRWFQGTADAVRQFHWLFEDARSKDIEDVLILSGDHLYRMDYMDFIQDHRQSGADISISCIPIDDRRASDFGLMKIDDKGRVISFSEKPKGDDLKAMAVDTTILGLSKEEAEKKPYIASMGVYVFKKEILLNLLRWRFPTANDFGSEIIPFSAKEFYVNAYLFNDYWEDIGTIRSFFEANLALTEHPGAFSFYDAAKPIYTSRRNLPPSKIDNSKLIDSIISHGSFLTNCLIEHSIVGIRSRVGSNVQLKDTVMLGADYYETEAEVAALLAEGNVPIGIGENTKIQECIIDKNARVGKNVIIANSEGIQEADRSSDGFYIRSGITVILKNSVIKDGVVI

SEQ ID NO: 46812 - DNA, 924 bp, Arabidopsis thaliana
  misc_feature (1)..(924): Ceres Seq. ID no. 13646862
  misc_feature (1)..(924): Ortholog of  Ceres SEQ ID NO 14310483 as cited in SEQ ID NO 58376
  misc_feature (1)..(924): Ortholog of  Ceres SEQ ID NO 13654451 as cited in SEQ ID NO 67881
tcccatttcctccgactctgtctctacccacttccttccttctcccactactctctcactaaccgattcatcatgggcgagaagaagaacgaaggagataacaagaagaaaggaggagataacaagaagaagaacgaaacgccttccatcaccgtcgttttgaaggtcgacatgcattgtgaaggttgtgcttctcgaatcgtcaaatgtgttcgatctttccaaggtgttgagactgtgaaatcggagtcggctacagggaaacttacggtgaccggagcattagatccggtgaagttaagggagaaacttgaagagaagacaaagaagaaagtcgatttggtttctcctcaaccaaaaaaggaaaaagagaaagagaacaaaaacaaaaacgatgaagacaaaaaaaaatcagaggagaagaagaaaccagacaacaatgacaaaaaacccaaagagactccggtaacaacggcggtgttgaagctgaacttccattgtcaaggttgtatcgggaaaatccaaaagactgtcacaaaaaccaaaggtgttaatggtttaacaatggacaaagagaagaatttgctgacggttaaaggaacaatggatgttaaaaagctcgttgagattttgagtgagaagctcaaacgtgcggtggagattgtgccgccgaagaaagagaaagataaagagaatggtaacgaaaatggcgagaagaagaaaggtggcggcggagacggtggtgggaaagagaaaaccggtaacaaaggcggtggtgagggagtgaatatgatggagtacatggcggctcagccagcttacggttatgggtattacccgggtgggccttatggatatccgattcaggcccacgcgccgcagatttttagcgatgagaatccgaatgcttgtgttgttatgtga

SEQ ID NO: 46813 - protein, 307 aa, Arabidopsis thaliana
  peptide (1)..(307): Ceres Seq. ID no. 13646863
SHFLRLCLYPLPSFSHYSLTNRFIMGEKKNEGDNKKKGGDNKKKNETPSITVVLKVDMHCEGCASRIVKCVRSFQGVETVKSESATGKLTVTGALDPVKLREKLEEKTKKKVDLVSPQPKKEKEKENKNKNDEDKKKSEEKKKPDNNDKKPKETPVTTAVLKLNFHCQGCIGKIQKTVTKTKGVNGLTMDKEKNLLTVKGTMDVKKLVEILSEKLKRAVEIVPPKKEKDKENGNENGEKKKGGGGDGGGKEKTGNKGGGEGVNMMEYMAAQPAYGYGYYPGGPYGYPIQAHAPQIFSDENPNACVVM

SEQ ID NO: 46814 - protein, 283 aa, Arabidopsis thaliana
  peptide (1)..(283): Ceres Seq. ID no. 13646864
MGEKKNEGDNKKKGGDNKKKNETPSITVVLKVDMHCEGCASRIVKCVRSFQGVETVKSESATGKLTVTGALDPVKLREKLEEKTKKKVDLVSPQPKKEKEKENKNKNDEDKKKSEEKKKPDNNDKKPKETPVTTAVLKLNFHCQGCIGKIQKTVTKTKGVNGLTMDKEKNLLTVKGTMDVKKLVEILSEKLKRAVEIVPPKKEKDKENGNENGEKKKGGGGDGGGKEKTGNKGGGEGVNMMEYMAAQPAYGYGYYPGGPYGYPIQAHAPQIFSDENPNACVVM

SEQ ID NO: 46815 - protein, 250 aa, Arabidopsis thaliana
  peptide (1)..(250): Ceres Seq. ID no. 13646865
MHCEGCASRIVKCVRSFQGVETVKSESATGKLTVTGALDPVKLREKLEEKTKKKVDLVSPQPKKEKEKENKNKNDEDKKKSEEKKKPDNNDKKPKETPVTTAVLKLNFHCQGCIGKIQKTVTKTKGVNGLTMDKEKNLLTVKGTMDVKKLVEILSEKLKRAVEIVPPKKEKDKENGNENGEKKKGGGGDGGGKEKTGNKGGGEGVNMMEYMAAQPAYGYGYYPGGPYGYPIQAHAPQIFSDENPNACVVM

SEQ ID NO: 46816 - DNA, 1117 bp, Arabidopsis thaliana
  misc_feature (1)..(1117): Ceres Seq. ID no. 12601085
  misc_feature (1)..(1117): Ortholog of  Ceres SEQ ID NO 13595414 as cited in SEQ ID NO 56539
  misc_feature (1)..(1117): Ortholog of  Ceres SEQ ID NO 14314396 as cited in SEQ ID NO 60048
gtttgtagtataaatatccttctcttcgtccctctcatcgcctgtctctcctcttcctcttcccgttccatttatccgcaaacggagcttgttttcggtgcacctgcttcagccacttcaaacttgaactgagaaggatgggaaacgaatcatatgaagacgccatcgaagctctcaagaagcttctcattgagaaggatgatctgaaggatgtagctgcggccaaggtgaagaagatcacggcggagcttcaggcagcctcgtcatcggacagcaaatcttttgatcccgtcgaacgaattaaggaaggcttcgtcaccttcaagaaggagaaatacgagaccaatcctgctttgtatggtgagctcgccaaaggtcaaagcccaaagtacatggtgtttgcttgttcggactcacgagtgtgcccatcacacgtactagacttccatcctggagatgccttcgtggttcgtaatatcgccaatatggttcctccttttgacaaggtcaaatatgcaggagttggagccgccattgaatacgctgtcttgcaccttaaggtggaaaacattgtggtgatagggcacagtgcatgtggtggcatcaaggggcttatgtcatttcctcttgacggaaacaactctactgacttcatagaggattgggtcaaaatctgtttaccagcaaagtcaaaagttttggcagaaagtgaaagttcagcatttgaagaccaatgtggccgatgcgaaagggaggcagtgaatgtgtcactagcaaacctattgacatatccatttgtgagagaaggagttgtgaaaggaacacttgctttgaagggaggctactatgactttgttaatggctcctttgagctttgggagctccagtttggaatttcccccgttcattctatatgaactaacacatcaccatcaccatcgctaccaccaccatcacaaacatcatcatcgtcgtcatcatcatgatcagcatcttcatatataaatgttttactcttatttaattgctacttgtaatggtatacatttacttgcgatgagcttcttttccttcattatccagttataaaataaataaataaatcatgtttactttc

SEQ ID NO: 46817 - protein, 259 aa, Arabidopsis thaliana
  peptide (1)..(259): Ceres Seq. ID no. 12601086
MGNESYEDAIEALKKLLIEKDDLKDVAAAKVKKITAELQAASSSDSKSFDPVERIKEGFVTFKKEKYETNPALYGELAKGQSPKYMVFACSDSRVCPSHVLDFHPGDAFVVRNIANMVPPFDKVKYAGVGAAIEYAVLHLKVENIVVIGHSACGGIKGLMSFPLDGNNSTDFIEDWVKICLPAKSKVLAESESSAFEDQCGRCEREAVNVSLANLLTYPFVREGVVKGTLALKGGYYDFVNGSFELWELQFGISPVHSI

SEQ ID NO: 46818 - protein, 174 aa, Arabidopsis thaliana
  peptide (1)..(174): Ceres Seq. ID no. 12601087
MVFACSDSRVCPSHVLDFHPGDAFVVRNIANMVPPFDKVKYAGVGAAIEYAVLHLKVENIVVIGHSACGGIKGLMSFPLDGNNSTDFIEDWVKICLPAKSKVLAESESSAFEDQCGRCEREAVNVSLANLLTYPFVREGVVKGTLALKGGYYDFVNGSFELWELQFGISPVHSI

SEQ ID NO: 46819 - protein, 143 aa, Arabidopsis thaliana
  peptide (1)..(143): Ceres Seq. ID no. 12601088
MVPPFDKVKYAGVGAAIEYAVLHLKVENIVVIGHSACGGIKGLMSFPLDGNNSTDFIEDWVKICLPAKSKVLAESESSAFEDQCGRCEREAVNVSLANLLTYPFVREGVVKGTLALKGGYYDFVNGSFELWELQFGISPVHSI

SEQ ID NO: 46820 - DNA, 1586 bp, Arabidopsis thaliana; identical to SEQ ID NO: 45427
  misc_feature (1)..(1586): Ceres Seq. ID no. 13646588
  misc_feature (1)..(1586): Ortholog of  Ceres SEQ ID NO 14313413 as cited in SEQ ID NO 58766
  misc_feature (1)..(1586): Ortholog of  Ceres SEQ ID NO 15171109 as cited in SEQ ID NO 59576

SEQ ID NO: 46821 - protein, 433 aa, Arabidopsis thaliana; identical to SEQ ID NO: 45428
  peptide (1)..(433): Ceres Seq. ID no. 13646589

SEQ ID NO: 46822 - protein, 252 aa, Arabidopsis thaliana; identical to SEQ ID NO: 45429
  peptide (1)..(252): Ceres Seq. ID no. 13646590

SEQ ID NO: 46823 - DNA, 2700 bp, Arabidopsis thaliana
  misc_feature (1)..(2700): Ceres Seq. ID no. 12580744
  misc_feature (1)..(2700): Ortholog of  Ceres SEQ ID NO 13662063 as cited in SEQ ID NO 61450
gttgatgaatctctgaggagcagagcgagatagaggagagtgaaggaacatcatgggaagcagcacgggcgatcttgtgacacgtatccaatcagctcaccgtttcgatcacgatgccttgtttcgttttgccgccgacaacgtctctggctttccgaccaacccttcccaattcaaagtctcacagttcggacatgggcagtcgaatccaacgtttctgatagaggttggctcagggagttccttgaaacgatacgttttgaggaagaagcctcctggcaagcttcttcaatctgctcatgctgttgatcgagagtttcaggtgcttcgggctttaggtgaacatacacaggttcctgttcctaaagtcttctgcttatgcactgaccctgctgtcattgggactgctttttacattatggagtttatggaaggacgtattttcattgatccaaagttgccgaatgtagcacctgaaaggagaaatgcgatctatcgtgcaaccgccaaagccttggcatctcttcactctgctgatgtggatgccattggtcttgagaaatatggtcggcgaggcaattactgcaaaagacagatagataggtggttcaaacaatatttggcttcaacaagtgaaggtaaacctgaaaggaatccaaagatgtttgagcttgttgattggttacgcaaaaacatccccgcggaagattcaactggagcaacatcaggccttgtccatggagactttcgcattgacaatctcgtttttcatccttctgaggatcgagttattggaataattgactgggaattgtccacgcttgggaaccaaatgtgtgatgttgcatacagctgcatgcattacattgtgaatgttcagctcgataaggagcatgttagtgaaggttttgaaactactgggcttccagaaggaatgctttcgatgccagaatttctcttagaatactgttctgcatcgggaaaaccatggcctgctgcaaactggaagttctacgtagcgttctccttatttcgggctgcttcaatctacacaggggtgtacagtagatggttaatggggaatgcttctgccggtgaaagagcgcgaaatacaggggttcaagctaatgagcttgtagagtctgccttgggttatattgcacgtgaaaatgttcttccagaacaccctccatctgttcaaagagacgtgtctccgtcgtatgaaagccttgtggatggaagcgggagattcatccccaacagaaaagtattggagttaaggcagaagttgatcaagtttatggaaactcatatctacccaatggaaaacgagttctccaaacttgctcaatcagatatgcgatggaccgttcaccctcaggaggaaaagttaaaggaaatggcaaagagagaaggcctatggaacttatttgttcctgtagatagtgctgctagagctagaagagaactggcggctaccgagaataaacataacctctcgggcaagtcttttgatcaattgtttggtgagggcctcacgaacctggagtatggttacctttgtgagatcatgggtcgttctgtttgggctccacaggtgtttaactgtggtgcaccagatactggaaacatggaggtgatactgcggtatggtaacaaagaacaaatttctgaatggcttattccgttgctcgagggaagaattcgttctggatttgctatgactgagccacaagttgcatcgtctgatgcaaccaatattgaatgctctatccgaagacaaggtgattcatacgtcattaatggcacaaaatggtggacaagtggagctatggatcccaggtgcagagtccttattctcatgggaaaaactgatttcaacgccccaaaacataagcagcagtctatgatattagtggacatgcggactccaggtataagtgtgaagaggcctctcacagtgtttggttttgatgacgcacctcatggacatgctgaaatttcttttgaaaatgtggttgtcccggcgaagaacattctccttggagaaggccgaggattcgagattgctcagggtaggttaggccctggaagactgcaccattgcatgagactaataggtgcagcagagcgtggaatggagctaatggctcaaagagctctgagtagaaaaacttttgggaagttcattgcgcagcacggttctttcgtctctgatcttgcaaagttacgggtagagctagaaggaacccgattgttggttctagaagctgctgatcatcttgataaatttggaaacaaaaaagctcgaggaattctcgcaatggccaaggttgcagctccaaacatggcattgaaggtactagacacggcaatacaagttcatggagcagccggtgtatcctcggacacagttttagcgcatttgtgggctacagctagaacactgaggattgctgatggacctgatgaggttcatcttgggaccattggcaagttagaactgcaaagagcttcaaagctttaaagcgttttgggatatgcgaattcgattctcagaataagatatcagttttttttttttacatcattaataaagttgttcttgggtcttttagtacaaacagtaaatctgaataaatttactactagatcttatctgtttcataatgttaatactttataatattaaatcttact

SEQ ID NO: 46824 - protein, 824 aa, Arabidopsis thaliana
  peptide (1)..(824): Ceres Seq. ID no. 12580745
MGSSTGDLVTRIQSAHRFDHDALFRFAADNVSGFPTNPSQFKVSQFGHGQSNPTFLIEVGSGSSLKRYVLRKKPPGKLLQSAHAVDREFQVLRALGEHTQVPVPKVFCLCTDPAVIGTAFYIMEFMEGRIFIDPKLPNVAPERRNAIYRATAKALASLHSADVDAIGLEKYGRRGNYCKRQIDRWFKQYLASTSEGKPERNPKMFELVDWLRKNIPAEDSTGATSGLVHGDFRIDNLVFHPSEDRVIGIIDWELSTLGNQMCDVAYSCMHYIVNVQLDKEHVSEGFETTGLPEGMLSMPEFLLEYCSASGKPWPAANWKFYVAFSLFRAASIYTGVYSRWLMGNASAGERARNTGVQANELVESALGYIARENVLPEHPPSVQRDVSPSYESLVDGSGRFIPNRKVLELRQKLIKFMETHIYPMENEFSKLAQSDMRWTVHPQEEKLKEMAKREGLWNLFVPVDSAARARRELAATENKHNLSGKSFDQLFGEGLTNLEYGYLCEIMGRSVWAPQVFNCGAPDTGNMEVILRYGNKEQISEWLIPLLEGRIRSGFAMTEPQVASSDATNIECSIRRQGDSYVINGTKWWTSGAMDPRCRVLILMGKTDFNAPKHKQQSMILVDMRTPGISVKRPLTVFGFDDAPHGHAEISFENVVVPAKNILLGEGRGFEIAQGRLGPGRLHHCMRLIGAAERGMELMAQRALSRKTFGKFIAQHGSFVSDLAKLRVELEGTRLLVLEAADHLDKFGNKKARGILAMAKVAAPNMALKVLDTAIQVHGAAGVSSDTVLAHLWATARTLRIADGPDEVHLGTIGKLELQRASKL

SEQ ID NO: 46825 - protein, 702 aa, Arabidopsis thaliana
  peptide (1)..(702): Ceres Seq. ID no. 12580746
MEFMEGRIFIDPKLPNVAPERRNAIYRATAKALASLHSADVDAIGLEKYGRRGNYCKRQIDRWFKQYLASTSEGKPERNPKMFELVDWLRKNIPAEDSTGATSGLVHGDFRIDNLVFHPSEDRVIGIIDWELSTLGNQMCDVAYSCMHYIVNVQLDKEHVSEGFETTGLPEGMLSMPEFLLEYCSASGKPWPAANWKFYVAFSLFRAASIYTGVYSRWLMGNASAGERARNTGVQANELVESALGYIARENVLPEHPPSVQRDVSPSYESLVDGSGRFIPNRKVLELRQKLIKFMETHIYPMENEFSKLAQSDMRWTVHPQEEKLKEMAKREGLWNLFVPVDSAARARRELAATENKHNLSGKSFDQLFGEGLTNLEYGYLCEIMGRSVWAPQVFNCGAPDTGNMEVILRYGNKEQISEWLIPLLEGRIRSGFAMTEPQVASSDATNIECSIRRQGDSYVINGTKWWTSGAMDPRCRVLILMGKTDFNAPKHKQQSMILVDMRTPGISVKRPLTVFGFDDAPHGHAEISFENVVVPAKNILLGEGRGFEIAQGRLGPGRLHHCMRLIGAAERGMELMAQRALSRKTFGKFIAQHGSFVSDLAKLRVELEGTRLLVLEAADHLDKFGNKKARGILAMAKVAAPNMALKVLDTAIQVHGAAGVSSDTVLAHLWATARTLRIADGPDEVHLGTIGKLELQRASKL

SEQ ID NO: 46826 - protein, 699 aa, Arabidopsis thaliana
  peptide (1)..(699): Ceres Seq. ID no. 12580747
MEGRIFIDPKLPNVAPERRNAIYRATAKALASLHSADVDAIGLEKYGRRGNYCKRQIDRWFKQYLASTSEGKPERNPKMFELVDWLRKNIPAEDSTGATSGLVHGDFRIDNLVFHPSEDRVIGIIDWELSTLGNQMCDVAYSCMHYIVNVQLDKEHVSEGFETTGLPEGMLSMPEFLLEYCSASGKPWPAANWKFYVAFSLFRAASIYTGVYSRWLMGNASAGERARNTGVQANELVESALGYIARENVLPEHPPSVQRDVSPSYESLVDGSGRFIPNRKVLELRQKLIKFMETHIYPMENEFSKLAQSDMRWTVHPQEEKLKEMAKREGLWNLFVPVDSAARARRELAATENKHNLSGKSFDQLFGEGLTNLEYGYLCEIMGRSVWAPQVFNCGAPDTGNMEVILRYGNKEQISEWLIPLLEGRIRSGFAMTEPQVASSDATNIECSIRRQGDSYVINGTKWWTSGAMDPRCRVLILMGKTDFNAPKHKQQSMILVDMRTPGISVKRPLTVFGFDDAPHGHAEISFENVVVPAKNILLGEGRGFEIAQGRLGPGRLHHCMRLIGAAERGMELMAQRALSRKTFGKFIAQHGSFVSDLAKLRVELEGTRLLVLEAADHLDKFGNKKARGILAMAKVAAPNMALKVLDTAIQVHGAAGVSSDTVLAHLWATARTLRIADGPDEVHLGTIGKLELQRASKL

SEQ ID NO: 46827 - DNA, 1174 bp, Arabidopsis thaliana
  misc_feature (1)..(1174): Ceres Seq. ID no. 12604593
  misc_feature (1)..(1174): Ortholog of  Ceres SEQ ID NO 14304120 as cited in SEQ ID NO 58862
  misc_feature (1)..(1174): Ortholog of  Ceres SEQ ID NO 13595658 as cited in SEQ ID NO 59888
  misc_feature (1)..(1174): Ortholog of  Ceres SEQ ID NO 13661330 as cited in SEQ ID NO 61614
  misc_feature (1)..(1174): Ortholog of  Ceres SEQ ID NO 13596025 as cited in SEQ ID NO 62024
  misc_feature (1)..(1174): Ortholog of  Ceres SEQ ID NO 13662324 as cited in SEQ ID NO 62162
  misc_feature (1)..(1174): Ortholog of  Ceres SEQ ID NO 12625713 as cited in SEQ ID NO 64160
  misc_feature (1)..(1174): Ortholog of  Ceres SEQ ID NO 14303564 as cited in SEQ ID NO 65360
  misc_feature (1)..(1174): Ortholog of  Ceres SEQ ID NO 15170103 as cited in SEQ ID NO 66345
  misc_feature (1)..(1174): Ortholog of  Ceres SEQ ID NO 14313495 as cited in SEQ ID NO 0
  misc_feature (1)..(1174): Ortholog of  Ceres SEQ ID NO 15174373 as cited in SEQ ID NO 0
cagaggctcatttgtcagtaaccatttgatcaacggctaaatcctatatccactaaaattcaaccacgtcatcagacataccaatatacagcaacacttgatagcggcagataaaaagatcgtcaacagaattaactctttaaatcacttctctgttatacctctctgntttgctccctgaagaagaagaaacagagcgttcacatttctctgcaacaaaatcatggcattgaccttcttcttcttgttatcgaatttgttcttctccggagttatgtcaaggagcttcacattttcaaacaaatgcgattacacagtgtggccgggaattctatctaacgccggagtttctccattaccaaccaccggcttcgtcctcctgaaaggcgagacgcgtacaatcaacgcaccgtcatcatgggggggtcgtttctggggaagaacactctgctcaaccgattccgatggaaaattctcgtgtgccaccggagattgcggctccggaaaaatcgaatgctccggcgctggagctgctcctcctgcgactttagctgaattcactctcgatggctccggaggactcgatttctacgatgtcagtctcgtcgacggctacaatgtccagatgctggtggttcctcaaggcggctccggtcagaattgcagcagcaccggctgcgtcgtcgatttaaacggatcttgcccgtcggagctaagggtgaatagcgtcgacgggaaggaggcggtggcgatggcgtgtaaaagtgcgtgcgaggcgtttcggcagccggagtattgctgcagcggcgcgtttggatcgcctgacacgtgtaagccgtctacgtactcgcggatcttcaagagcgcgtgtccacgcgcctatagctacgcgtatgacgataagtctagtacatttacgtgcgcgaaatctcccaactacgtcatcactttctgtccttctcccaacaccagcctaaaatcagctgaggaacacagcacagagacaatgacgacgacaagtccaagttccggcagtacgacgtcgtcgcagatggtctacgaaggtgctctggacgaaagcagtggttcaccatctacgtatcacggcgtatcacgagcaatcacagtcgttcttctctcgcttgctttttgtcgtatgtggtggttcttctga

SEQ ID NO: 46828 - protein, 316 aa, Arabidopsis thaliana
  peptide (1)..(316): Ceres Seq. ID no. 12604594
MALTFFFLLSNLFFSGVMSRSFTFSNKCDYTVWPGILSNAGVSPLPTTGFVLLKGETRTINAPSSWGGRFWGRTLCSTDSDGKFSCATGDCGSGKIECSGAGAAPPATLAEFTLDGSGGLDFYDVSLVDGYNVQMLVVPQGGSGQNCSSTGCVVDLNGSCPSELRVNSVDGKEAVAMACKSACEAFRQPEYCCSGAFGSPDTCKPSTYSRIFKSACPRAYSYAYDDKSSTFTCAKSPNYVITFCPSPNTSLKSAEEHSTETMTTTSPSSGSTTSSQMVYEGALDESSGSPSTYHGVSRAITVVLLSLAFCRMWWFF

SEQ ID NO: 46829 - protein, 299 aa, Arabidopsis thaliana
  peptide (1)..(299): Ceres Seq. ID no. 12604595
MSRSFTFSNKCDYTVWPGILSNAGVSPLPTTGFVLLKGETRTINAPSSWGGRFWGRTLCSTDSDGKFSCATGDCGSGKIECSGAGAAPPATLAEFTLDGSGGLDFYDVSLVDGYNVQMLVVPQGGSGQNCSSTGCVVDLNGSCPSELRVNSVDGKEAVAMACKSACEAFRQPEYCCSGAFGSPDTCKPSTYSRIFKSACPRAYSYAYDDKSSTFTCAKSPNYVITFCPSPNTSLKSAEEHSTETMTTTSPSSGSTTSSQMVYEGALDESSGSPSTYHGVSRAITVVLLSLAFCRMWWFF

SEQ ID NO: 46830 - protein, 182 aa, Arabidopsis thaliana
  peptide (1)..(182): Ceres Seq. ID no. 12604596
MLVVPQGGSGQNCSSTGCVVDLNGSCPSELRVNSVDGKEAVAMACKSACEAFRQPEYCCSGAFGSPDTCKPSTYSRIFKSACPRAYSYAYDDKSSTFTCAKSPNYVITFCPSPNTSLKSAEEHSTETMTTTSPSSGSTTSSQMVYEGALDESSGSPSTYHGVSRAITVVLLSLAFCRMWWFF

SEQ ID NO: 46831 - DNA, 2829 bp, Arabidopsis thaliana
  misc_feature (1)..(2829): Ceres Seq. ID no. 13646866
  misc_feature (1)..(2829): Ortholog of  Ceres SEQ ID NO 13584744 as cited in SEQ ID NO 69137
aagccgctcgttcttcgagacaaaacacactacactctttctctctcactcactcttcatctcttttcttctttctctctctcctaaaaatccgacgaaattatgattcactttaccttttaatcaggaatatccctgtttcacccttcttcttcttcttcttcttcttcttcctcgtgttttttttccataacattccctctgaatcttcgttttttattggaaagaaacaatctaatccaagttcaagggttttctcatcttcagtggctgaagttatgagctttacaagatgggaagtgttctttggtctctctgttttagccttgacaatgcctttctcagctggagttactaatctacgagatgtttcggcgattaataacttgtatatcactttgggagcaccatctctacatcattggcttgcttttggaggagacccttgtggagaaaagtggcaaggtgtggtgtgtgactcctcaaacatcacagaaataaggatacctggcatgaaggtaggtggaggcttaagtgatactctggctgatttttcatctatccaagtcatggacttcagtagcaatcatatttcagggacaattccgcaggctttgccttcttccatccgaaacctatctctctcaagcaatcgcttcactgggaacattccctttacattgtcctttctatccgatttgtctgaactgtcattgggaagcaatcttctatcaggagagataccagattactttcagcagctatcaaaactgacaaaactggacttatcgtctaacatactggaggggcatttaccttcttccatgggagacttagcttctcttaagatattgtatttgcaggacaacaagctcacaggaacacttgatgttatagaggatcttttcttaaccgatttgaatgtagaaaacaacttattctcgggacctataccgccaaatctattgaaaattccaaacttcaaaaaagatggaactccgttcaatacatcgattataacaccaccgcctccgcctgtggttgatcctcctcccgctactcaccgtgctcctcctgttccccgtatccctcctgtttctggtgttcccccagcaccttttgctccttttgctccactgcaaccacaacaacatccaccaccatcaccacctctggtctggtcaccaccttcttctgataatggaggaggagatccctggaactctgtgtcagggcaacctaccttgcaaatatcacctccttcaggttcaggatcaggaaaattctggtccactcaaagaatcattctagtagtttcttcagtggccataattgttcttgtatccggtttgtgtgttacactttggagatgttgcagaagtaaaatatataaccgatattacagtggagctcgtaaagatttacaacgaccatacttcaataagcctccatctcaaccaacccccactatgggaaaagtttctcgggagcctatggttaagcctttcgatggatatggagctggagacaggaaatatgggtatccaatgccacagcgggctgaagagagccggagagcaatgcctcctacttcatattataataaggatgttaatacacctcaaaagccgctgcaacaaccaccgaggcagttccagtccaatgatactgcttcaaagagagcggctcatttccccccgggcttgaattcctcatcttctgctactgttttcaccattgcttcacttcagcaatacacaaataatttctcagaagagaatataatcggggaagggtcgattggtaatgtctacagagctgagcttcgtcatggaaagtttcttgcggtgaagaagctgagcaataccatcaacagaacacagagtgacggcgaattcctcaatctagtctccaatgtgttgaagcttaaacgcggtcatatattggagcttcttggttactgtaacgagtttggtcaaaggttacttgtgtatgagtactgtcctaatggatcacttcaagatgcactacatttggatcgcaagttgcacaagaagctcacttggaatgtacgtataaatattgcattaggagcttcaaaggcattgcagtttcttcatgaggtatgtcaaccgccggttgttcaccagaatttcaagtcttccaaggttcttcttgatggaaagctctcagtacgtgttgcagacagcggtttggcttatatgttaccaccacgcccaacgagtcagatggcgggttatgccgctcctgaggttgagtatggaagctacacttgtcagagcgacgtatttagccttggggttgtaatgttagaactgctcactggacgcagaccatttgacaggacaaggccgaggggacatcaaacactagctcagtgggcgattcctcggcttcatgacatcgatgcgttgacaagaatggttgatccgtcattacacggagcgtatccaatgaaatcattgtcacgttttgcagatatcatatcacgttcactgcagatggaaccaggatttagaccgccgatatcagaaatagtccaagatcttcaacatatgatctaagatacacaaccttggactaagacgcagaagcaatagtttattgtcagattcttgttctttgtcctttgatgaatgaaagtatttcttttgtattataataacactttatgtatgttgttggctgtatgaaatgagctatgggatcatcattatgtaaccccaatcccattaccggctcaaacattattcaccaacctgatcatgtatttagattctattttctgaaaaggataaacatttttcg

SEQ ID NO: 46832 - protein, 860 aa, Arabidopsis thaliana
  peptide (1)..(860): Ceres Seq. ID no. 13646867
AARSSRQNTLHSFSLTHSSSLFFFLSLLKIRRNYDSLYLLIRNIPVSPFFFFFFFFFLVFFFHNIPSESSFFIGKKQSNPSSRVFSSSVAEVMSFTRWEVFFGLSVLALTMPFSAGVTNLRDVSAINNLYITLGAPSLHHWLAFGGDPCGEKWQGVVCDSSNITEIRIPGMKVGGGLSDTLADFSSIQVMDFSSNHISGTIPQALPSSIRNLSLSSNRFTGNIPFTLSFLSDLSELSLGSNLLSGEIPDYFQQLSKLTKLDLSSNILEGHLPSSMGDLASLKILYLQDNKLTGTLDVIEDLFLTDLNVENNLFSGPIPPNLLKIPNFKKDGTPFNTSIITPPPPPVVDPPPATHRAPPVPRIPPVSGVPPAPFAPFAPLQPQQHPPPSPPLVWSPPSSDNGGGDPWNSVSGQPTLQISPPSGSGSGKFWSTQRIILVVSSVAIIVLVSGLCVTLWRCCRSKIYNRYYSGARKDLQRPYFNKPPSQPTPTMGKVSREPMVKPFDGYGAGDRKYGYPMPQRAEESRRAMPPTSYYNKDVNTPQKPLQQPPRQFQSNDTASKRAAHFPPGLNSSSSATVFTIASLQQYTNNFSEENIIGEGSIGNVYRAELRHGKFLAVKKLSNTINRTQSDGEFLNLVSNVLKLKRGHILELLGYCNEFGQRLLVYEYCPNGSLQDALHLDRKLHKKLTWNVRINIALGASKALQFLHEVCQPPVVHQNFKSSKVLLDGKLSVRVADSGLAYMLPPRPTSQMAGYAAPEVEYGSYTCQSDVFSLGVVMLELLTGRRPFDRTRPRGHQTLAQWAIPRLHDIDALTRMVDPSLHGAYPMKSLSRFADIISRSLQMEPGFRPPISEIVQDLQHMI

SEQ ID NO: 46833 - protein, 768 aa, Arabidopsis thaliana
  peptide (1)..(768): Ceres Seq. ID no. 13646868
MSFTRWEVFFGLSVLALTMPFSAGVTNLRDVSAINNLYITLGAPSLHHWLAFGGDPCGEKWQGVVCDSSNITEIRIPGMKVGGGLSDTLADFSSIQVMDFSSNHISGTIPQALPSSIRNLSLSSNRFTGNIPFTLSFLSDLSELSLGSNLLSGEIPDYFQQLSKLTKLDLSSNILEGHLPSSMGDLASLKILYLQDNKLTGTLDVIEDLFLTDLNVENNLFSGPIPPNLLKIPNFKKDGTPFNTSIITPPPPPVVDPPPATHRAPPVPRIPPVSGVPPAPFAPFAPLQPQQHPPPSPPLVWSPPSSDNGGGDPWNSVSGQPTLQISPPSGSGSGKFWSTQRIILVVSSVAIIVLVSGLCVTLWRCCRSKIYNRYYSGARKDLQRPYFNKPPSQPTPTMGKVSREPMVKPFDGYGAGDRKYGYPMPQRAEESRRAMPPTSYYNKDVNTPQKPLQQPPRQFQSNDTASKRAAHFPPGLNSSSSATVFTIASLQQYTNNFSEENIIGEGSIGNVYRAELRHGKFLAVKKLSNTINRTQSDGEFLNLVSNVLKLKRGHILELLGYCNEFGQRLLVYEYCPNGSLQDALHLDRKLHKKLTWNVRINIALGASKALQFLHEVCQPPVVHQNFKSSKVLLDGKLSVRVADSGLAYMLPPRPTSQMAGYAAPEVEYGSYTCQSDVFSLGVVMLELLTGRRPFDRTRPRGHQTLAQWAIPRLHDIDALTRMVDPSLHGAYPMKSLSRFADIISRSLQMEPGFRPPISEIVQDLQHMI

SEQ ID NO: 46834 - protein, 750 aa, Arabidopsis thaliana
  peptide (1)..(750): Ceres Seq. ID no. 13646869
MPFSAGVTNLRDVSAINNLYITLGAPSLHHWLAFGGDPCGEKWQGVVCDSSNITEIRIPGMKVGGGLSDTLADFSSIQVMDFSSNHISGTIPQALPSSIRNLSLSSNRFTGNIPFTLSFLSDLSELSLGSNLLSGEIPDYFQQLSKLTKLDLSSNILEGHLPSSMGDLASLKILYLQDNKLTGTLDVIEDLFLTDLNVENNLFSGPIPPNLLKIPNFKKDGTPFNTSIITPPPPPVVDPPPATHRAPPVPRIPPVSGVPPAPFAPFAPLQPQQHPPPSPPLVWSPPSSDNGGGDPWNSVSGQPTLQISPPSGSGSGKFWSTQRIILVVSSVAIIVLVSGLCVTLWRCCRSKIYNRYYSGARKDLQRPYFNKPPSQPTPTMGKVSREPMVKPFDGYGAGDRKYGYPMPQRAEESRRAMPPTSYYNKDVNTPQKPLQQPPRQFQSNDTASKRAAHFPPGLNSSSSATVFTIASLQQYTNNFSEENIIGEGSIGNVYRAELRHGKFLAVKKLSNTINRTQSDGEFLNLVSNVLKLKRGHILELLGYCNEFGQRLLVYEYCPNGSLQDALHLDRKLHKKLTWNVRINIALGASKALQFLHEVCQPPVVHQNFKSSKVLLDGKLSVRVADSGLAYMLPPRPTSQMAGYAAPEVEYGSYTCQSDVFSLGVVMLELLTGRRPFDRTRPRGHQTLAQWAIPRLHDIDALTRMVDPSLHGAYPMKSLSRFADIISRSLQMEPGFRPPISEIVQDLQHMI

SEQ ID NO: 46835 - DNA, 2045 bp, Arabidopsis thaliana; identical to SEQ ID NO: 44129
  misc_feature (1)..(2045): Ceres Seq. ID no. 13504748
  misc_feature (1)..(2045): Ortholog of  Ceres SEQ ID NO 15171040 as cited in SEQ ID NO 55332

SEQ ID NO: 46836 - protein, 578 aa, Arabidopsis thaliana; identical to SEQ ID NO: 44130
  peptide (1)..(578): Ceres Seq. ID no. 13504749

SEQ ID NO: 46837 - protein, 565 aa, Arabidopsis thaliana; identical to SEQ ID NO: 44131
  peptide (1)..(565): Ceres Seq. ID no. 13504750

SEQ ID NO: 46838 - DNA, 2298 bp, Arabidopsis thaliana
  misc_feature (1)..(2298): Ceres Seq. ID no. 13646870
  misc_feature (1)..(2298): Ortholog of  Ceres SEQ ID NO 13597798 as cited in SEQ ID NO 64311
gggataagaaaatcaaaaaaaggattctctttttctctctttcttctcacttctctctgtagttagtgtgtctctctcgccggccgatatggccgcctccgtagcaaactgctgcttctccgtcctcaatgcctccgttaaaattcaatcttcgtccatctcctcaccgtggtgtttcgtgtccgcatcgtcgttgactccccgagcttcctccaatattaagaggaaatcgtcgaggtctgattcaccatctcctatattaaacccagagaagaattacccaggtagagttcgagatgaaagttccaatcctcctcaaaaaatggctttcaaggcttttgggtcacccaaaaaggagaaaaaagagtctctttctgattttagtcgagaccaacagactgatcctgccaagattcacgatgcatcctttctcaacgctgttgtcaaggtttattgcactcatactgctcctgattactccctcccatggcagaagcaaaggcaatttactagtactggaagtgcttttatgattggagatggcaagctcttgaccaatgcccattgtgtcgaacacgatacacaggttaaagttaagagaaggggagatgatcgaaagtatgtggctaaggttttagttaggggtgtggactgtgacattgctttgctttccgtagaaagcgaggatttctggaaaggagctgaaccactacggctgggccatttaccccgccttcaggattcagttactgtcgtgggatatcctcttggaggagatacaatctctgttacaaaaggggttgtatcacgtatagaggtaacatcttacgctcatggatcatccgacttgcttggaattcaaatcgacgctgctataaatccagggaatagtggtggccctgcattcaacgaccagggggaatgtattggagtagcattccaggtttacagatccgaagaaactgaaaatattggatatgtgattccaacaaccgttgtttctcactttttgactgattatgagaggaacggaaagtacactggttacccttgccttggagtattgctgcagaaattagaaaatccagctctgcgggagtgcctcaaagttcctacaaatgagggggttctggtgcgaagagttgaacctacatctgatgcaagtaaagtcctgaaagagggagatgtgattgtaagttttgatgatctacatgtgggatgtgaaggaactgtacccttccgatctagtgaacgcattgcattccgttatctcatcagtcaaaaatttgcaggtgatatcgctgagattggtatcattagagcaggagaacataagaaagttcaagtagttctaaggccacgagtgcacctggtaccgtaccatattgatggaggtcagccatcatacattatagttgctggtttggtgtttactccgctctcagaacccctgatagaggaggagtgtgaggataccataggcttgaaattgttaacaaaggcacgctactctgtggcaaggttcagaggagaacaaatcgtcatcctatcacaggtattggcaaatgaagtaaacatcggctatgaggacatgaataaccagcaggtcctgaagttcaatggaattccaataagaaacatccatcacttggcacatctcattgatatgtgcaaagataagtatctagtttttgagttcgaagacaactatgttgctgtgttggagagagaagcttcaaattctgcttccttgtgcatcctcaaagattatggaattccctcggaaagatccgctgatctgctcgagccatatgttgatccaatagatgacacccaagcgcttgaccaaggtattggagacagccctgtgtcaaatctggaaatcggctttgatggactggtgtgggcataaaatattcgaaaaggcgtccgcagatggaaaccactgaaagctcatacagcttccccgaacatatgggaaagctttcagcttcatcctcattcataaggtcttgtgctgctcaaactcaaagtttagtgaattctttcttctttattcaaacctctatggattgagtttaatagaaagttggccatgagaatgctcggccattgtgttcagatgaatgtatactgctaaaagcattgccagaatctcgacaaaagtcaacaaattattcagtgtctgattttctatgagaaaatgaaatgcagcaatgtcttctgtgactgtaatatatatatatatatatatatatatatatatatatatcagtgaatcggtgcttcctttttacc

SEQ ID NO: 46839 - protein, 607 aa, Arabidopsis thaliana
  peptide (1)..(607): Ceres Seq. ID no. 13646871
MAASVANCCFSVLNASVKIQSSSISSPWCFVSASSLTPRASSNIKRKSSRSDSPSPILNPEKNYPGRVRDESSNPPQKMAFKAFGSPKKEKKESLSDFSRDQQTDPAKIHDASFLNAVVKVYCTHTAPDYSLPWQKQRQFTSTGSAFMIGDGKLLTNAHCVEHDTQVKVKRRGDDRKYVAKVLVRGVDCDIALLSVESEDFWKGAEPLRLGHLPRLQDSVTVVGYPLGGDTISVTKGVVSRIEVTSYAHGSSDLLGIQIDAAINPGNSGGPAFNDQGECIGVAFQVYRSEETENIGYVIPTTVVSHFLTDYERNGKYTGYPCLGVLLQKLENPALRECLKVPTNEGVLVRRVEPTSDASKVLKEGDVIVSFDDLHVGCEGTVPFRSSERIAFRYLISQKFAGDIAEIGIIRAGEHKKVQVVLRPRVHLVPYHIDGGQPSYIIVAGLVFTPLSEPLIEEECEDTIGLKLLTKARYSVARFRGEQIVILSQVLANEVNIGYEDMNNQQVLKFNGIPIRNIHHLAHLIDMCKDKYLVFEFEDNYVAVLEREASNSASLCILKDYGIPSERSADLLEPYVDPIDDTQALDQGIGDSPVSNLEIGFDGLVWA

SEQ ID NO: 46840 - protein, 529 aa, Arabidopsis thaliana
  peptide (1)..(529): Ceres Seq. ID no. 13646872
MAFKAFGSPKKEKKESLSDFSRDQQTDPAKIHDASFLNAVVKVYCTHTAPDYSLPWQKQRQFTSTGSAFMIGDGKLLTNAHCVEHDTQVKVKRRGDDRKYVAKVLVRGVDCDIALLSVESEDFWKGAEPLRLGHLPRLQDSVTVVGYPLGGDTISVTKGVVSRIEVTSYAHGSSDLLGIQIDAAINPGNSGGPAFNDQGECIGVAFQVYRSEETENIGYVIPTTVVSHFLTDYERNGKYTGYPCLGVLLQKLENPALRECLKVPTNEGVLVRRVEPTSDASKVLKEGDVIVSFDDLHVGCEGTVPFRSSERIAFRYLISQKFAGDIAEIGIIRAGEHKKVQVVLRPRVHLVPYHIDGGQPSYIIVAGLVFTPLSEPLIEEECEDTIGLKLLTKARYSVARFRGEQIVILSQVLANEVNIGYEDMNNQQVLKFNGIPIRNIHHLAHLIDMCKDKYLVFEFEDNYVAVLEREASNSASLCILKDYGIPSERSADLLEPYVDPIDDTQALDQGIGDSPVSNLEIGFDGLVWA

SEQ ID NO: 46841 - protein, 460 aa, Arabidopsis thaliana
  peptide (1)..(460): Ceres Seq. ID no. 13646873
MIGDGKLLTNAHCVEHDTQVKVKRRGDDRKYVAKVLVRGVDCDIALLSVESEDFWKGAEPLRLGHLPRLQDSVTVVGYPLGGDTISVTKGVVSRIEVTSYAHGSSDLLGIQIDAAINPGNSGGPAFNDQGECIGVAFQVYRSEETENIGYVIPTTVVSHFLTDYERNGKYTGYPCLGVLLQKLENPALRECLKVPTNEGVLVRRVEPTSDASKVLKEGDVIVSFDDLHVGCEGTVPFRSSERIAFRYLISQKFAGDIAEIGIIRAGEHKKVQVVLRPRVHLVPYHIDGGQPSYIIVAGLVFTPLSEPLIEEECEDTIGLKLLTKARYSVARFRGEQIVILSQVLANEVNIGYEDMNNQQVLKFNGIPIRNIHHLAHLIDMCKDKYLVFEFEDNYVAVLEREASNSASLCILKDYGIPSERSADLLEPYVDPIDDTQALDQGIGDSPVSNLEIGFDGLVWA

SEQ ID NO: 46842 - DNA, 1300 bp, Arabidopsis thaliana
  misc_feature (1)..(1300): Ceres Seq. ID no. 12574604
  misc_feature (1)..(1300): Ortholog of  Ceres SEQ ID NO 14303427 as cited in SEQ ID NO 54799
gatacttgtgtcttgttgtacttgttaaacttgaatcccgtgttcgcgactttgcgatagattctctcaaatccaattccaatggcggatccatcttctcaaaaccctaacctcgccactccccctcctccttcttctccttcaccaacccatcaaattcaatctggaacctcggaattatcgccaccgtctcgaccgccttgctctaccttgtcctttctcaagactgctaaccgaccaaaactccgtgtgacatctgaattcgacagcgatagtctccttttcttaaacaaagtgtcttgtaagctcttcgataaccttgccaagcttaaactctcgtttcagaacaattcccagcgcgagatttcacagcctcaggtctcttttacttccaaacacgtttctgttctctatgatgtcgaagagaagaatactttcattaagagcactctcgatgttcacccgcgtcttcagctccgagctcttcataatgttaaggcacaacaaggagaagttgctatggaggcaaatctgactgaacctggctactctctggagctttcatcacctgtgcctattggttacccaagagcaactcttaaattcccacttggcgaaatttcgttacaagaaaaagatgaggaggaggaggagaagcagaaaagaactttatctgttaatgggatcctcaaacgtcaagttatgaatggtgtttgtaccgctctatacacagatgaagagttgaggctgagatatgcttataaggatgatgcattgtctttcatcccaagtatttcccttccttccaatgctgcatcatttgcattcaaacggcggtttagcccttcagataagttgagctattggtacaactttgattcaaacatgtggagtgctgtgtacaaacgcacatatggtaaagactacaaattaaaagctggctatgattctgatgttcgccttggctgggcatctctctgggttggtgatgaagctggaaaagtgaaaacgacaccaatgaagatgaaagtccagttcatgcttcaagttccacaagatgacatcaaatcatcagtcttgatgttccgagtcaagaaaagatgggacatttgatgaaatctttgaataaatcatctcttagtttcactttctttaatctctctataaaacccataaaagttgtttgtttctccttatatatcaaatcttttgcaaagtagatacaaaagcttagagtgaataattgcaattgtatttctgtagcttttttttaaatgatctttttcacacgtgtgagact

SEQ ID NO: 46843 - protein, 343 aa, Arabidopsis thaliana
  peptide (1)..(343): Ceres Seq. ID no. 12574605
MADPSSQNPNLATPPPPSSPSPTHQIQSGTSELSPPSRPPCSTLSFLKTANRPKLRVTSEFDSDSLLFLNKVSCKLFDNLAKLKLSFQNNSQREISQPQVSFTSKHVSVLYDVEEKNTFIKSTLDVHPRLQLRALHNVKAQQGEVAMEANLTEPGYSLELSSPVPIGYPRATLKFPLGEISLQEKDEEEEEKQKRTLSVNGILKRQVMNGVCTALYTDEELRLRYAYKDDALSFIPSISLPSNAASFAFKRRFSPSDKLSYWYNFDSNMWSAVYKRTYGKDYKLKAGYDSDVRLGWASLWVGDEAGKVKTTPMKMKVQFMLQVPQDDIKSSVLMFRVKKRWDI

SEQ ID NO: 46844 - protein, 197 aa, Arabidopsis thaliana
  peptide (1)..(197): Ceres Seq. ID no. 12574606
MEANLTEPGYSLELSSPVPIGYPRATLKFPLGEISLQEKDEEEEEKQKRTLSVNGILKRQVMNGVCTALYTDEELRLRYAYKDDALSFIPSISLPSNAASFAFKRRFSPSDKLSYWYNFDSNMWSAVYKRTYGKDYKLKAGYDSDVRLGWASLWVGDEAGKVKTTPMKMKVQFMLQVPQDDIKSSVLMFRVKKRWDI

SEQ ID NO: 46845 - DNA, 1041 bp, Arabidopsis thaliana; identical to SEQ ID NO: 21211
  misc_feature (1)..(1041): Ceres Seq. ID no. 12600744
  misc_feature (1)..(1041): Ortholog of  Ceres SEQ ID NO 13595072 as cited in SEQ ID NO 55971

SEQ ID NO: 46846 - protein, 267 aa, Arabidopsis thaliana; identical to SEQ ID NO: 21212
  peptide (1)..(267): Ceres Seq. ID no. 12600745

SEQ ID NO: 46847 - protein, 262 aa, Arabidopsis thaliana; identical to SEQ ID NO: 21213
  peptide (1)..(262): Ceres Seq. ID no. 12600746

SEQ ID NO: 46848 - protein, 233 aa, Arabidopsis thaliana; identical to SEQ ID NO: 21214
  peptide (1)..(233): Ceres Seq. ID no. 12600747

SEQ ID NO: 46849 - DNA, 3301 bp, Arabidopsis thaliana; identical to SEQ ID NO: 45683
  misc_feature (1)..(3301): Ceres Seq. ID no. 12600421
  misc_feature (1)..(3301): Ortholog of  Ceres SEQ ID NO 15172108 as cited in SEQ ID NO 54876

SEQ ID NO: 46850 - protein, 1050 aa, Arabidopsis thaliana; identical to SEQ ID NO: 45684
  peptide (1)..(1050): Ceres Seq. ID no. 12600422

SEQ ID NO: 46851 - protein, 1016 aa, Arabidopsis thaliana; identical to SEQ ID NO: 45685
  peptide (1)..(1016): Ceres Seq. ID no. 12600423

SEQ ID NO: 46852 - protein, 930 aa, Arabidopsis thaliana; identical to SEQ ID NO: 45686
  peptide (1)..(930): Ceres Seq. ID no. 12600424

SEQ ID NO: 46853 - DNA, 1509 bp, Arabidopsis thaliana
  misc_feature (1)..(1509): Ceres Seq. ID no. 12574785
  misc_feature (1)..(1509): Ortholog of  Ceres SEQ ID NO 13596816 as cited in SEQ ID NO 62287
atgcagtctgtttataaaaataaagctgtaacctttaaaaagttgctatctttgcacccgagagagagctcagtgaaaaagatgggaagcggtgtaggtgtagctctctttgccctctcccttcttctcgtctcccatgaggtggaatctgcaatcggcgtgaactggggaacgttgtcatttcacaagatgagaccttccacagtggtggatctcctcaaagcaaacaagatcaccaaggtgaagcttttcgatgcgaatccagatgcgcttcgagcgttaatgggtactggaatccaagtaatgatcggcattcctaacgagatgctctcaactttcaattctgatttgtttgtccagcaaaatctctctcgcttcataggcaaaaacggtgctgatattaggtatgttgcagtagggaatgagccgtttctgactggttacggtggtcagtttcagaactatgtagtcccaactatggttaacctgcaacaatctttggttagagcaaatctagctagctatgtgaagttggtggttccttgcaacgcagatgcgtatcagtctaatgttccctctcaggggatgttccggcctgagcttacacagattatgactcaattggtttcgtttctcaactccaatggctctccttttgtggttaatatctatcctttccttagtctctatgggaactcggattttccacaagactatgccttttttgaggggagtagtcatccggttccggatgggcctaacacttactataatgcatttgatgggaactttgacactcttgttgctgctctcaccaagcttggatatggtcaaatgcctatagttattggtgagattggttggcctacagatggagcagttggtgctaatctcacagcagcccgggtttttaatcaagggctcattagccatgtgttgagcaacaaaggaacaccgctcaggcctggatctcctcctgcggatgtatatcttttcggtttgcttgacgaaggagcgaaaagcacactgcctggtaactttgagaggcattggggaatcttctctttcgatggacaggccaagtatcgtctcaacttaggactaggcaacagaggactcaagaatgcaaaaaatgtgcagtaccttccttcaaggtggtgtgtggctcacccatcaagagacatgacccaagttggtgaccacctcaggcttgcttgcagtgaagcagattgcacaacgctcaacgacgggggctcgtgcagccagcttggtgaaaaagataatatctcatacgctttcaacagttactatcagatgcagatgcaacatgaaaagagctgtgactttgatggacttggcatggtcaccttcctagatccttcagttggtgactgtcgatttcttgtgggtgttactgatataggcttatcgtcaagtactgagccaatggcaaggtggtctatctaccacatttgcattggactattgatctggactctcacaatgtag

SEQ ID NO: 46854 - protein, 502 aa, Arabidopsis thaliana
  peptide (1)..(502): Ceres Seq. ID no. 12574786
MQSVYKNKAVTFKKLLSLHPRESSVKKMGSGVGVALFALSLLLVSHEVESAIGVNWGTLSFHKMRPSTVVDLLKANKITKVKLFDANPDALRALMGTGIQVMIGIPNEMLSTFNSDLFVQQNLSRFIGKNGADIRYVAVGNEPFLTGYGGQFQNYVVPTMVNLQQSLVRANLASYVKLVVPCNADAYQSNVPSQGMFRPELTQIMTQLVSFLNSNGSPFVVNIYPFLSLYGNSDFPQDYAFFEGSSHPVPDGPNTYYNAFDGNFDTLVAALTKLGYGQMPIVIGEIGWPTDGAVGANLTAARVFNQGLISHVLSNKGTPLRPGSPPADVYLFGLLDEGAKSTLPGNFERHWGIFSFDGQAKYRLNLGLGNRGLKNAKNVQYLPSRWCVAHPSRDMTQVGDHLRLACSEADCTTLNDGGSCSQLGEKDNISYAFNSYYQMQMQHEKSCDFDGLGMVTFLDPSVGDCRFLVGVTDIGLSSSTEPMARWSIYHICIGLLIWTLTM

SEQ ID NO: 46855 - protein, 475 aa, Arabidopsis thaliana
  peptide (1)..(475): Ceres Seq. ID no. 12574787
MGSGVGVALFALSLLLVSHEVESAIGVNWGTLSFHKMRPSTVVDLLKANKITKVKLFDANPDALRALMGTGIQVMIGIPNEMLSTFNSDLFVQQNLSRFIGKNGADIRYVAVGNEPFLTGYGGQFQNYVVPTMVNLQQSLVRANLASYVKLVVPCNADAYQSNVPSQGMFRPELTQIMTQLVSFLNSNGSPFVVNIYPFLSLYGNSDFPQDYAFFEGSSHPVPDGPNTYYNAFDGNFDTLVAALTKLGYGQMPIVIGEIGWPTDGAVGANLTAARVFNQGLISHVLSNKGTPLRPGSPPADVYLFGLLDEGAKSTLPGNFERHWGIFSFDGQAKYRLNLGLGNRGLKNAKNVQYLPSRWCVAHPSRDMTQVGDHLRLACSEADCTTLNDGGSCSQLGEKDNISYAFNSYYQMQMQHEKSCDFDGLGMVTFLDPSVGDCRFLVGVTDIGLSSSTEPMARWSIYHICIGLLIWTLTM

SEQ ID NO: 46856 - protein, 439 aa, Arabidopsis thaliana
  peptide (1)..(439): Ceres Seq. ID no. 12574788
MRPSTVVDLLKANKITKVKLFDANPDALRALMGTGIQVMIGIPNEMLSTFNSDLFVQQNLSRFIGKNGADIRYVAVGNEPFLTGYGGQFQNYVVPTMVNLQQSLVRANLASYVKLVVPCNADAYQSNVPSQGMFRPELTQIMTQLVSFLNSNGSPFVVNIYPFLSLYGNSDFPQDYAFFEGSSHPVPDGPNTYYNAFDGNFDTLVAALTKLGYGQMPIVIGEIGWPTDGAVGANLTAARVFNQGLISHVLSNKGTPLRPGSPPADVYLFGLLDEGAKSTLPGNFERHWGIFSFDGQAKYRLNLGLGNRGLKNAKNVQYLPSRWCVAHPSRDMTQVGDHLRLACSEADCTTLNDGGSCSQLGEKDNISYAFNSYYQMQMQHEKSCDFDGLGMVTFLDPSVGDCRFLVGVTDIGLSSSTEPMARWSIYHICIGLLIWTLTM

SEQ ID NO: 46857 - DNA, 1483 bp, Arabidopsis thaliana
  misc_feature (1)..(1483): Ceres Seq. ID no. 13646901
  misc_feature (1)..(1483): Ortholog of  Ceres SEQ ID NO 14311731 as cited in SEQ ID NO 51632
  misc_feature (1)..(1483): Ortholog of  Ceres SEQ ID NO 14315189 as cited in SEQ ID NO 57702
ggttgttttttttattattattgaaatcaagagaattaaaacagaggctctgcaaaagaagatgatcaaaacaatcacatctctacgcaaaactctggttctacctcttcatttacatattcgtacgctacaaactttcgccaagtacaacgcacaagctgcatcggctttgcgagaagagcgtaagaaacctctttatcaaaatggagatgatgtatatgcggatttggattgggataatctcgggtttggtctaaatccagctgattacatgtatgtcatgaaatgctcaaaagacggcgaattcactcaaggagaacttagtccctatgggaatattcagctaagtccttctgctggagtcttaaactatggacaggcgatatacgaaggtacaaaagcatacaggaaagaaaatgggaagcttcttttgtttcgtccggatcacaacgctatccggatgaagcttggcgctgaacggatgctcatgccttctccttcggttgatcagtttgttaatgcagttaaacaaaccgctcttgcaaacaaacgttgggttcctcctgcagggaaagggactttgtacattaggcctttgttgatgggaagtggtccaatacttggtttaggtcctgcacctgaatatacattcattgtctatgcatctccagttggtaactacttcaaggaagggatggctgctcttaacctctatgttgaggaagaatatgtccgagcggctcctggtggagctggaggcgtcaagagcatcacaaattatgcgccagttttgaaagcactgagcagagccaagagtcgggggttttcagacgttctttatctcgactctgtcaagaagaagtacttagaggaggcttcttcttgcaacgtctttgttgtcaagggtcggacaatctcaactcctgcaactaatggaacaattcttgaagggattacgcggaaaagtgtgatggagatcgcaagtgatcaaggttatcaggtagtagagaaggcagttcatgtggatgaagtaatggatgcagatgaagttttttgcaccggaactgctgtagtagttgctcccgtgggcactatcacatatcaggacaaaagagtagagtataaaaccggggatgaatctgtctgccagaaactgcgttcagtcctcgtaggtatccagacaggattgattgaagataacaagggatgggtcacagatatcaactgaagaataacaatcttcaatattttgccacaaaggagattactctgcattttaagctgtgtatacacgacaatgaagaacactataaacatatatatgagatagaaacagaaagctcttttgctcatttctatatcgtaaagtcaatgtctttcacaaaactatgacaaagaaaagaatcgtctattgtacttgtagacaagtgtttccaaggatagtttmawttccwcmwtaaagttggaackggaggggggaaag

SEQ ID NO: 46858 - protein, 408 aa, Arabidopsis thaliana
  peptide (1)..(408): Ceres Seq. ID no. 15219116
VVFFIIIEIKRIKTEALQKKMIKTITSLRKTLVLPLHLHIRTLQTFAKYNAQAASALREERKKPLYQNGDDVYADLDWDNLGFGLNPADYMYVMKCSKDGEFTQGELSPYGNIQLSPSAGVLNYGQAIYEGTKAYRKENGKLLLFRPDHNAIRMKLGAERMLMPSPSVDQFVNAVKQTALANKRWVPPAGKGTLYIRPLLMGSGPILGLGPAPEYTFIVYASPVGNYFKEGMAALNLYVEEEYVRAAPGGAGGVKSITNYAPVLKALSRAKSRGFSDVLYLDSVKKKYLEEASSCNVFVVKGRTISTPATNGTILEGITRKSVMEIASDQGYQVVEKAVHVDEVMDADEVFCTGTAVVVAPVGTITYQDKRVEYKTGDESVCQKLRSVLVGIQTGLIEDNKGWVTDIN

SEQ ID NO: 46859 - protein, 388 aa, Arabidopsis thaliana
  peptide (1)..(388): Ceres Seq. ID no. 15219117
MIKTITSLRKTLVLPLHLHIRTLQTFAKYNAQAASALREERKKPLYQNGDDVYADLDWDNLGFGLNPADYMYVMKCSKDGEFTQGELSPYGNIQLSPSAGVLNYGQAIYEGTKAYRKENGKLLLFRPDHNAIRMKLGAERMLMPSPSVDQFVNAVKQTALANKRWVPPAGKGTLYIRPLLMGSGPILGLGPAPEYTFIVYASPVGNYFKEGMAALNLYVEEEYVRAAPGGAGGVKSITNYAPVLKALSRAKSRGFSDVLYLDSVKKKYLEEASSCNVFVVKGRTISTPATNGTILEGITRKSVMEIASDQGYQVVEKAVHVDEVMDADEVFCTGTAVVVAPVGTITYQDKRVEYKTGDESVCQKLRSVLVGIQTGLIEDNKGWVTDIN

SEQ ID NO: 46860 - protein, 318 aa, Arabidopsis thaliana
  peptide (1)..(318): Ceres Seq. ID no. 15219118
MYVMKCSKDGEFTQGELSPYGNIQLSPSAGVLNYGQAIYEGTKAYRKENGKLLLFRPDHNAIRMKLGAERMLMPSPSVDQFVNAVKQTALANKRWVPPAGKGTLYIRPLLMGSGPILGLGPAPEYTFIVYASPVGNYFKEGMAALNLYVEEEYVRAAPGGAGGVKSITNYAPVLKALSRAKSRGFSDVLYLDSVKKKYLEEASSCNVFVVKGRTISTPATNGTILEGITRKSVMEIASDQGYQVVEKAVHVDEVMDADEVFCTGTAVVVAPVGTITYQDKRVEYKTGDESVCQKLRSVLVGIQTGLIEDNKGWVTDIN

SEQ ID NO: 46861 - DNA, 1563 bp, Arabidopsis thaliana
  misc_feature (1)..(1563): Ceres Seq. ID no. 14309767
  misc_feature (1)..(1563): Ortholog of  Ceres SEQ ID NO 13596090 as cited in SEQ ID NO 68377
  misc_feature (1)..(1563): Ortholog of  Ceres SEQ ID NO 14303557 as cited in SEQ ID NO 68595
gacacacactcttctctctcttcttcttcctcctctgtactctctctttctcacataaccagagcctctctctctctctctgtttctcttcagtctctgtgtatacccctttctctcctcctctgtccctctctctagcggcggactgatgcacatacctttgtattctccgccgtaactaacttacataatggggtgcatgttctctcacctcgccgccaaattcgccttcttcccaccctctcctcccacttaccacctcaccaaaacccccgacggcaaactctccgccgtatcctccgcttcctcctcctcctccacttttccctccgccggagacccatctctcgacgtcaaagtagtaaagacaagacgcggcaacaaagtcacagctttttaccttagaaaccctaacgcaagactcacacttctctactctcatggaaatgctgcagatttgggacaactcttcgatctctttgttcaactcaaagtcaatctccgagtcaatctcatggggtatgattattcaggctatggagcttctactggtaagccgagtgagtacgatacatatgcagatatagaggcggcgtatgagtgtttgcagacggattatggggtagggcaagaagatttgatcttgtatggtcaatctgttggcagcggtccaacgctgcaccttgcctctaagcttccacggcttagaggtgtcgttcttcatagcggcattctctctggtcttcgtgttctatgtcatgtcaagttcaagttttgttgtgacatttattcgaacgtaaacaagatcaagaaggtgaaatgcccggttcttgtcatacacggaacagaggatgatgtggtgaattggttacacggaaacaggctttggaaaatggcaaaggaaccgtatgaaccgctctggattaaaggcggtggacattgcaaccttgagatatatccggactacattagacacctataccggtttatacaagacatggaaaatacaaccactaagtctcgtctcaaaacgatttggcaagaaatccgtcggcgagatgaatccacaggatgttgttgttccggactgtgcagacctagctgcagttgtcccaaacctcggtgtcccaaacctagttgcagttgcggctgcggttgtggcgactgcggttgtttcaagtgttcgtgtccgactttgaagggatgtttctcttgctgcaagaaaccgagctgtgttagtagttgttgctgtcccacgttcaaatgcagcagctgctttgggaagccaaaatgtccgaaatgctcttgttggaaatgtctaaaatgccccgacaccgagtgttgccggagtagttgttgttgttccggttgttttagctggttgtgttgctgcggtggagggaggaggaaagagggggagaggagaggatctactacgttggagaagagtgaagggtgatattggtaatttgtatagattttgttcaaagatttggtaaaaaacattagaagattcatggaaagaaactgagattttgaagctaaaagttcatttattattcc

SEQ ID NO: 46862 - protein, 422 aa, Arabidopsis thaliana
  peptide (1)..(422): Ceres Seq. ID no. 14309768
MGCMFSHLAAKFAFFPPSPPTYHLTKTPDGKLSAVSSASSSSSTFPSAGDPSLDVKVVKTRRGNKVTAFYLRNPNARLTLLYSHGNAADLGQLFDLFVQLKVNLRVNLMGYDYSGYGASTGKPSEYDTYADIEAAYECLQTDYGVGQEDLILYGQSVGSGPTLHLASKLPRLRGVVLHSGILSGLRVLCHVKFKFCCDIYSNVNKIKKVKCPVLVIHGTEDDVVNWLHGNRLWKMAKEPYEPLWIKGGGHCNLEIYPDYIRHLYRFIQDMENTTTKSRLKTIWQEIRRRDESTGCCCSGLCRPSCSCPKPRCPKPSCSCGCGCGDCGCFKCSCPTLKGCFSCCKKPSCVSSCCCPTFKCSSCFGKPKCPKCSCWKCLKCPDTECCRSSCCCSGCFSWLCCCGGGRRKEGERRGSTTLEKSEG

SEQ ID NO: 46863 - protein, 419 aa, Arabidopsis thaliana
  peptide (1)..(419): Ceres Seq. ID no. 14309769
MFSHLAAKFAFFPPSPPTYHLTKTPDGKLSAVSSASSSSSTFPSAGDPSLDVKVVKTRRGNKVTAFYLRNPNARLTLLYSHGNAADLGQLFDLFVQLKVNLRVNLMGYDYSGYGASTGKPSEYDTYADIEAAYECLQTDYGVGQEDLILYGQSVGSGPTLHLASKLPRLRGVVLHSGILSGLRVLCHVKFKFCCDIYSNVNKIKKVKCPVLVIHGTEDDVVNWLHGNRLWKMAKEPYEPLWIKGGGHCNLEIYPDYIRHLYRFIQDMENTTTKSRLKTIWQEIRRRDESTGCCCSGLCRPSCSCPKPRCPKPSCSCGCGCGDCGCFKCSCPTLKGCFSCCKKPSCVSSCCCPTFKCSSCFGKPKCPKCSCWKCLKCPDTECCRSSCCCSGCFSWLCCCGGGRRKEGERRGSTTLEKSEG

SEQ ID NO: 46864 - protein, 314 aa, Arabidopsis thaliana
  peptide (1)..(314): Ceres Seq. ID no. 14309770
MGYDYSGYGASTGKPSEYDTYADIEAAYECLQTDYGVGQEDLILYGQSVGSGPTLHLASKLPRLRGVVLHSGILSGLRVLCHVKFKFCCDIYSNVNKIKKVKCPVLVIHGTEDDVVNWLHGNRLWKMAKEPYEPLWIKGGGHCNLEIYPDYIRHLYRFIQDMENTTTKSRLKTIWQEIRRRDESTGCCCSGLCRPSCSCPKPRCPKPSCSCGCGCGDCGCFKCSCPTLKGCFSCCKKPSCVSSCCCPTFKCSSCFGKPKCPKCSCWKCLKCPDTECCRSSCCCSGCFSWLCCCGGGRRKEGERRGSTTLEKSEG

SEQ ID NO: 46865 - DNA, 2533 bp, Arabidopsis thaliana
  misc_feature (1)..(2533): Ceres Seq. ID no. 12578004
  misc_feature (1)..(2533): Ortholog of  Ceres SEQ ID NO 13654854 as cited in SEQ ID NO 62466
  misc_feature (1)..(2533): Ortholog of  Ceres SEQ ID NO 13565116 as cited in SEQ ID NO 0
tctctttttcattaattccgaaaattttgactcgcaaaatctcaacgaagctcgaaaatggattcacgaaccaaggggaagacggtgatggaagttggtggcgatggcgttgccgtcataacactcatcaatcctcccgtcaattctctatccttcgacgtgctatacaatctcaaaagtaattacgaggaggccttgagcaggaatgatgttaaagctattgttattactggtgcaaaggggaggttctctggtggctttgatatatctggttttggtgaaatgcagaaggggaatgtcaaagagccaaaggctggttacatttcgattgacatcataaccgacttgcttgaagctgctaggaaaccgtctgtcgctgccattgatggacttgccttgggaggaggattagaacttgctatggcttgtcatgctaggatatcagctcctgctgcacagttaggcttgcctgagctgcaacttggtgttattcctggttttggaggaacgcagcgtctcccgcgtcttgttggtctcaccaaagcccttgaaatgattttgacatctaagccagttaaagctgaggaaggtcattctttgggtcttattgatgctgtggtgccacctgcggagttagtaaccactgctcgtcgctgggcccttgacatagtcgggaggagaaaaccatgggtatctagtgtttccaagactgataagttacctcctcttggagaggcaagggagatactgacgtttgccaaggcacagacactcaagcgtgcccccaatatgaaacaccctttaatgtgccttgacgctattgaagtaggtattgtttctggtccaagggctggtttagaaaaggaagctgaagtcgcctcacaagtggtaaaactggataccaccaaaggcttgatccacgtcttcttttctcagcgaggaactgctaaggttcctggagttactgatcgtgggttggtgccaaggaagattaagaaggtagccataattggaggcgggttgatgggatctggaatagctactgcgttgatcctaagtaactatccagtgattctcaaggaggtaaatgagaaattcctggaggctggaattggcagagttaaagctaatctccagagccgtgtaaggaagggaagcatgtctcaggaaaagtttgagaaaaccatgtctctccttaagggttctcttgattatgaaagctttagagatgtggacatggtcattgaggctgttattgagaatatatctttgaagcaacaaatttttgctgatctggagaaatactgtcctcagcattgtatccttgctagcaacacatcgaccattgacttgaacaaaattggggagcggaccaagtctcaggatcgaattgttggagcacattttttcagtccagcacatatcatgccgctacttgaaatagttcggaccaatcatacctctgcccaagtaattgttgacctgttagatgttgggaagaagattaagaaaacaccagttgtggtgggaaactgcacagggtttgcagtgaataggatgttcttcccttacacacaggcagctatgttccttgttgagtgtggagcagatccatatctaatcgacagggcaatcagcaagtttggaatgccaatgggtcccttcagactgtgtgacctggttggatttggtgtggcgattgcaaccgcaacgcagtttatcgagaacttctcagaacggacttacaaatcaatgattattccacttatgcaagaggacaagagagctggtgaagccactcgcaaaggtttctatttgtatgatgataagcgcaaggcgaaacctgatcctgagctaaagaaatatatcgaaaaggcaagaagcatatctggagtaaagcttgaccctaagttggcgaatttgtcggagaaggacattattgaaatgacattcttcccagtagtaaacgaggcgtgtagggtttttgctgaaggtatcgctgtcaaagcagcagaccttgacattgctggcataatgggaatgggttttccaccttacagaggaggaatcatgttctgggctgattccatcggatcgaaatacatttactcgaggctggatgagtggtcgaaggcttatggtgaattcttcaagccttgtgcttttttggctgagaggggatctaaaggagttcttttgagcgctcccgtgaaacaagccagctcacggttgtaaggtcagcgtttcagtggaaccatttctccattggtgcatcttctgtgttttctttatgttcacattttacttagccgggaagtgggtatcttttggcctcagaagcttttaaataaagtctcatctcagacatatgaatctgggaggaagtagggattaagttgtagtagcaataagatttgttttatgttgtgctttgtcatacaacaaagttgtcagatacatttgttgttataaagctatatggagtaagttctatgatttaatgataatgttgtcatttgacaaatcagttaaa

SEQ ID NO: 46866 - protein, 725 aa, Arabidopsis thaliana
  peptide (1)..(725): Ceres Seq. ID no. 12578005
MDSRTKGKTVMEVGGDGVAVITLINPPVNSLSFDVLYNLKSNYEEALSRNDVKAIVITGAKGRFSGGFDISGFGEMQKGNVKEPKAGYISIDIITDLLEAARKPSVAAIDGLALGGGLELAMACHARISAPAAQLGLPELQLGVIPGFGGTQRLPRLVGLTKALEMILTSKPVKAEEGHSLGLIDAVVPPAELVTTARRWALDIVGRRKPWVSSVSKTDKLPPLGEAREILTFAKAQTLKRAPNMKHPLMCLDAIEVGIVSGPRAGLEKEAEVASQVVKLDTTKGLIHVFFSQRGTAKVPGVTDRGLVPRKIKKVAIIGGGLMGSGIATALILSNYPVILKEVNEKFLEAGIGRVKANLQSRVRKGSMSQEKFEKTMSLLKGSLDYESFRDVDMVIEAVIENISLKQQIFADLEKYCPQHCILASNTSTIDLNKIGERTKSQDRIVGAHFFSPAHIMPLLEIVRTNHTSAQVIVDLLDVGKKIKKTPVVVGNCTGFAVNRMFFPYTQAAMFLVECGADPYLIDRAISKFGMPMGPFRLCDLVGFGVAIATATQFIENFSERTYKSMIIPLMQEDKRAGEATRKGFYLYDDKRKAKPDPELKKYIEKARSISGVKLDPKLANLSEKDIIEMTFFPVVNEACRVFAEGIAVKAADLDIAGIMGMGFPPYRGGIMFWADSIGSKYIYSRLDEWSKAYGEFFKPCAFLAERGSKGVLLSAPVKQASSRL

SEQ ID NO: 46867 - protein, 715 aa, Arabidopsis thaliana
  peptide (1)..(715): Ceres Seq. ID no. 12578006
MEVGGDGVAVITLINPPVNSLSFDVLYNLKSNYEEALSRNDVKAIVITGAKGRFSGGFDISGFGEMQKGNVKEPKAGYISIDIITDLLEAARKPSVAAIDGLALGGGLELAMACHARISAPAAQLGLPELQLGVIPGFGGTQRLPRLVGLTKALEMILTSKPVKAEEGHSLGLIDAVVPPAELVTTARRWALDIVGRRKPWVSSVSKTDKLPPLGEAREILTFAKAQTLKRAPNMKHPLMCLDAIEVGIVSGPRAGLEKEAEVASQVVKLDTTKGLIHVFFSQRGTAKVPGVTDRGLVPRKIKKVAIIGGGLMGSGIATALILSNYPVILKEVNEKFLEAGIGRVKANLQSRVRKGSMSQEKFEKTMSLLKGSLDYESFRDVDMVIEAVIENISLKQQIFADLEKYCPQHCILASNTSTIDLNKIGERTKSQDRIVGAHFFSPAHIMPLLEIVRTNHTSAQVIVDLLDVGKKIKKTPVVVGNCTGFAVNRMFFPYTQAAMFLVECGADPYLIDRAISKFGMPMGPFRLCDLVGFGVAIATATQFIENFSERTYKSMIIPLMQEDKRAGEATRKGFYLYDDKRKAKPDPELKKYIEKARSISGVKLDPKLANLSEKDIIEMTFFPVVNEACRVFAEGIAVKAADLDIAGIMGMGFPPYRGGIMFWADSIGSKYIYSRLDEWSKAYGEFFKPCAFLAERGSKGVLLSAPVKQASSRL

SEQ ID NO: 46868 - protein, 650 aa, Arabidopsis thaliana
  peptide (1)..(650): Ceres Seq. ID no. 12578007
MQKGNVKEPKAGYISIDIITDLLEAARKPSVAAIDGLALGGGLELAMACHARISAPAAQLGLPELQLGVIPGFGGTQRLPRLVGLTKALEMILTSKPVKAEEGHSLGLIDAVVPPAELVTTARRWALDIVGRRKPWVSSVSKTDKLPPLGEAREILTFAKAQTLKRAPNMKHPLMCLDAIEVGIVSGPRAGLEKEAEVASQVVKLDTTKGLIHVFFSQRGTAKVPGVTDRGLVPRKIKKVAIIGGGLMGSGIATALILSNYPVILKEVNEKFLEAGIGRVKANLQSRVRKGSMSQEKFEKTMSLLKGSLDYESFRDVDMVIEAVIENISLKQQIFADLEKYCPQHCILASNTSTIDLNKIGERTKSQDRIVGAHFFSPAHIMPLLEIVRTNHTSAQVIVDLLDVGKKIKKTPVVVGNCTGFAVNRMFFPYTQAAMFLVECGADPYLIDRAISKFGMPMGPFRLCDLVGFGVAIATATQFIENFSERTYKSMIIPLMQEDKRAGEATRKGFYLYDDKRKAKPDPELKKYIEKARSISGVKLDPKLANLSEKDIIEMTFFPVVNEACRVFAEGIAVKAADLDIAGIMGMGFPPYRGGIMFWADSIGSKYIYSRLDEWSKAYGEFFKPCAFLAERGSKGVLLSAPVKQASSRL

SEQ ID NO: 46869 - DNA, 1173 bp, Arabidopsis thaliana
  misc_feature (1)..(1173): Ceres Seq. ID no. 13646906
  misc_feature (1)..(1173): Ortholog of  Ceres SEQ ID NO 15169976 as cited in SEQ ID NO 60438
ggaaagaaaaaaaatcaacacaccgagaaaaaaaatggaagatctatggaagagagcgaaatcgtttgcagaagaagcagcgaagaaatcacaaaccataacactacaatcatcttcaacaacattcgtcaatctcgtcaccgaaaccgctaaaaaatccaaagagttcgctctcgaagcttctaagaaagctgattcgatcaatgtctccgagttcgtcgccgagacggcgaagaagtcaaaggaattcgctgctgaggtttcaacgaaagcggatcagctcaaagtcgtagcattgaaacaagctgatcagatccagaatataaaatcgattgccgacattatacctggaggattaggaggatcaggatctggtggtggtggttctgagatttctgaatctgagcttgttagttttggtattactgatgatttgagagagtttgttaaaggtttgacatctgctacgttccaggcttttcctgaacaagatgaatcgtcggaagtttctgatttggaaacaagtgcgtcgaatgttcggaaggatctttctgagtggcaggagagacatgccactcttgttcttggttctgtcaagcaaatttcgaagttgagatatgaactatgcccacgagttatgaaagaaaggaggttctggaggatatactttaccttagtgagcactcatgttgcaccatatgaaaggaagtacatggaggaacttaggaacaaagcagagagtaaagatgaagaagctaagaagagtccagggcttggaaggacagaatcagctgaaaagaacagaatatctactgcatcgtctgagcaagatctcgatacattcctgctgggagatctagaagacagtgacgaagctcctgatgatggtgatggtgatgatggaggaagcctgggtgatgatgactttgacaagattggcaactctgatgttgaggaagagaaagaatcaaatgcagcaaaaaattagaaatattattaagttttgttacatacccaattgttgggaagtaaatgaggatggtatatgatctgtttcatcatcagtgattcagtgtatagcttttgatgcaaaagatgaagacacattttattcattcgaattcgcaaattataagaaaaaaaaaaaaaaaaaaactcgagggggggcccggt

SEQ ID NO: 46870 - protein, 328 aa, Arabidopsis thaliana
  peptide (1)..(328): Ceres Seq. ID no. 13646907
ERKKINTPRKKMEDLWKRAKSFAEEAAKKSQTITLQSSSTTFVNLVTETAKKSKEFALEASKKADSINVSEFVAETAKKSKEFAAEVSTKADQLKVVALKQADQIQNIKSIADIIPGGLGGSGSGGGGSEISESELVSFGITDDLREFVKGLTSATFQAFPEQDESSEVSDLETSASNVRKDLSEWQERHATLVLGSVKQISKLRYELCPRVMKERRFWRIYFTLVSTHVAPYERKYMEELRNKAESKDEEAKKSPGLGRTESAEKNRISTASSEQDLDTFLLGDLEDSDEAPDDGDGDDGGSLGDDDFDKIGNSDVEEEKESNAAKN

SEQ ID NO: 46871 - protein, 317 aa, Arabidopsis thaliana
  peptide (1)..(317): Ceres Seq. ID no. 13646908
MEDLWKRAKSFAEEAAKKSQTITLQSSSTTFVNLVTETAKKSKEFALEASKKADSINVSEFVAETAKKSKEFAAEVSTKADQLKVVALKQADQIQNIKSIADIIPGGLGGSGSGGGGSEISESELVSFGITDDLREFVKGLTSATFQAFPEQDESSEVSDLETSASNVRKDLSEWQERHATLVLGSVKQISKLRYELCPRVMKERRFWRIYFTLVSTHVAPYERKYMEELRNKAESKDEEAKKSPGLGRTESAEKNRISTASSEQDLDTFLLGDLEDSDEAPDDGDGDDGGSLGDDDFDKIGNSDVEEEKESNAAKN

SEQ ID NO: 46872 - DNA, 4254 bp, Arabidopsis thaliana
  misc_feature (1)..(4254): Ceres Seq. ID no. 13578712
  misc_feature (1)..(4254): Ortholog of  Ceres SEQ ID NO 13623497 as cited in SEQ ID NO 0
atggcctctgattccgccggagccacaatctccggcaacttctcaaactccgacaactcagaaaccctaaatctcaacactacgaaactctactcatcagcaatttcctctatctctccacaattcccctcaccgaaaccaacatcttcatgtccttcaatccctaattcaaaacgaatccctaatactaacttcatcgtcgatctcttccgcctcccacaccaatcatcctccgtcgctttcttcctctcacatttccactccgatcactactccggtctctcctcttcctggtccaaaggaataatctactgctcacacaaaaccgctcgtctcgttgcagaaatccttcaagttccttcacaattcgttttcgctttacctatgaaccaaatggttaagatcgatggctctgaagttgtgttgattgaagctaatcattgtccaggagcggtacagtttttgtttaaagtcaaattagagagcagtggatttgaaaagtatgttcatactggagattttagattctgtgatgagatgagatttgatccgtttcttaatggttttgttggttgtgatggtgtttttctcgatactacttattgtaatcctaagtttgtttttccgagtcaagaagagtctgttggttatgttgttagtgtgatagataagattagtgaggagaaggttttgtttcttgtagctacttatgttgttggtaaagagaagattttggttgagattgctaggagatgtaagaggaaaatcgttgtcgatgcgagaaagatgtcgatgttgtcggttttggggtgtggtgaggagggaatgtttactgaagatgagaatgagagtgatgttcatgttgtggggtggaatgtgttgggtgagacttggccgtattttaggccgaattttgtgaagatgaatgagattatggttgagaaagggtatgataaggttgtaggttttgtgcctacagggtggacttatgaagtgaagcggaataagtttgcggttaggtttaaagattcgatggagattcatcttgtaccgtatagtgagcattcgaattatgatgaacttagagagtttataaagttcctgaaacctaaaagagttattcctactgttggagttgatattgagaagtttgattgcaaggaggttaataagatgcagaagcatttctctggattggttgatgagatggcaaacaagaaagattttttattgggtttctatcgtcagtcttaccagaagaatgagaaaagtgatgtagatgttgtgtcacacagtgctgaggtttacgaagaggaagagaaaaatgcatgtgaagacggtggagagaatgttccatcatctagaggacccatattgcatgatacaactccaagtagtgattcaagattgctgataaaactacgtgattctttgcctgcttgggtcactgaagagcagatgttagatctgattaagaagcatgctggtaatcccgtggatatagtaagtaacttttatgaatatgaagcagagctttacaagcaagcctctcttcccacgccttccttgaataatcaggctgttttgtttgatgacgatgtaaccgacctccaacctaatcctgtgaaaggcatttgtccagatgttcaagcaattcaaaaaggttttgacttaccaagaaaaatgaatttaacaaagggtactatttctcctgggaagagaggcaaaagctcgggcagtaagtcaaacaagaaggccaagaaagatccaaaatcaaaaccagttggtccagggcagccaacactttttaagtttttcaataaggtcttagatggtggatctaattctgttagtgttggttcagagactgaagaatgcaatacagataaaaagatggtccacattgatgcttcagaagcatacaaagaagtgacagatcaatttattgatattgttaacggttctgaatctttaagagattatgctgcttccatcattgatgaggctaaaggagatataagtagggcactgaacatctattatagcaaaccccgtgaaatacctggtgaccatgcaggtgagagaggactctctagcaaaacaattcagtatccgaaatgttcagaagcatgctcctctcaggaggacaaaaaggcttcagaaaattcaggacatgcagtcaacatatgcgtgcagacatcagcagaggaaagtgtagacaagaattatgtatctctacctcctgaaaaatatcaacctaaagagcacgcttgttggagggagggacagcctgctccatatatccaccttgtccgaacatttgcttctgttgaaagtgaaaagggaaagatcaaagctatgtctatgctttgcaacatgtttagaagcttgtttgctctctctccagaagatgttctgcccgctgtttatctttgcacaaataagattgccgctgaccatgagaatattgagcttaacattggtggaagtctaatctcttctgcattggaagaagcatgtggaataagtcggtctactgtgagagatatgtataatagcttgggggatcttggggatgttgctcagctatgtcgacaaacgcaaaagctactggttcctccacctccacttctagttagagatgtgttttcaactctacgaaagataagtgtgcagacaggtactggaagtactaggctaaagaaaaatctcatcgtgaagctaatgcgctcttgtagagagaaagagatcaaatttcttgttagaacattggcccgtaatttaaggattggcgctatgttgagaactgttctacctgcacttgggcgagcaatcgttatgaattctttctggaatgaccataataaagaactatcagaaagctgtttcagggagaaacttgagggtgtttctgctgcagtagttgaggcttacaacattcttccatctctggacgtggttgttccttctctcatggacaaagacattgagttttcaacgtcaactctgtcaatggtcccagggatacctataaaacccatgcttgcaaaaattgctaagggggttcaagaattttttaacctctcccaagaaaaggcctttacttgtgaatacaaatatgatggccagcgcgcccagatccataagttacttgatggtactgtgtgtatcttttctcggaatggggacgaaacaacgtccagatttccggatctggttgatgtcataaaacagttttcttgccctgccgctgagacattcatgttggacgcagaggtggttgccactgatagaataaatggaaacaaactcatgtcattccaagagttatcaacaagagagagagggagcaaagatgctttgataactacagaaagtattaaggttgaagtctgcgtcttcgtgtttgatattatgtttgtcaatggagaacagctgttggctcttcccctccgtgagagacgaagacgtctaaaggaggtcttccctgagactaggccaggttatcttgagtatgctaaggaaataactgtaagtgctacggtgggagcagaagaagcgtctctgaataatcatgacacattgagtaggataaatgcttttcttgaagaagcatttcagtcatcttgtgaaggaatcatggtcaagtctttagatgtaaatgctggatactgccccacaaagcgctctgattcatggctcaaggttaagcgagattatgtagatggattgggcgatacattggatttagttcctattggtgcttggtatggcaatgggagaaaagcaggatggtatagtccattccttatggcctgcttcaaccctgagactgaagaattccagagtgtctgccgtgtcatgtctggtttttctgatgccttttacatcgaggtaatgaaaagctcaactctaacgttgttgtttaatgatgaaacagatgggatgaaagaattctactcggaggataagatccttgcgaaaaagccgccttactacagaacaggggagacacctgacatgtggttttccgcagaggtagtttgggaaatcagaggtgctgatttcacagtctcgcctgttcacagtgccagtttaggtctcgtccatccatcgcgaggcatctctgttaggtttccgagatttatcagtaaagtgacagatagaaatcctgaagaatgtagtacggctacagatatcgcagagatgtttcatgctcaaaccagaaaaatgaacatcacttctcaacattaa

SEQ ID NO: 46873 - protein, 1417 aa, Arabidopsis thaliana
  peptide (1)..(1417): Ceres Seq. ID no. 13578713
MASDSAGATISGNFSNSDNSETLNLNTTKLYSSAISSISPQFPSPKPTSSCPSIPNSKRIPNTNFIVDLFRLPHQSSSVAFFLSHFHSDHYSGLSSSWSKGIIYCSHKTARLVAEILQVPSQFVFALPMNQMVKIDGSEVVLIEANHCPGAVQFLFKVKLESSGFEKYVHTGDFRFCDEMRFDPFLNGFVGCDGVFLDTTYCNPKFVFPSQEESVGYVVSVIDKISEEKVLFLVATYVVGKEKILVEIARRCKRKIVVDARKMSMLSVLGCGEEGMFTEDENESDVHVVGWNVLGETWPYFRPNFVKMNEIMVEKGYDKVVGFVPTGWTYEVKRNKFAVRFKDSMEIHLVPYSEHSNYDELREFIKFLKPKRVIPTVGVDIEKFDCKEVNKMQKHFSGLVDEMANKKDFLLGFYRQSYQKNEKSDVDVVSHSAEVYEEEEKNACEDGGENVPSSRGPILHDTTPSSDSRLLIKLRDSLPAWVTEEQMLDLIKKHAGNPVDIVSNFYEYEAELYKQASLPTPSLNNQAVLFDDDVTDLQPNPVKGICPDVQAIQKGFDLPRKMNLTKGTISPGKRGKSSGSKSNKKAKKDPKSKPVGPGQPTLFKFFNKVLDGGSNSVSVGSETEECNTDKKMVHIDASEAYKEVTDQFIDIVNGSESLRDYAASIIDEAKGDISRALNIYYSKPREIPGDHAGERGLSSKTIQYPKCSEACSSQEDKKASENSGHAVNICVQTSAEESVDKNYVSLPPEKYQPKEHACWREGQPAPYIHLVRTFASVESEKGKIKAMSMLCNMFRSLFALSPEDVLPAVYLCTNKIAADHENIELNIGGSLISSALEEACGISRSTVRDMYNSLGDLGDVAQLCRQTQKLLVPPPPLLVRDVFSTLRKISVQTGTGSTRLKKNLIVKLMRSCREKEIKFLVRTLARNLRIGAMLRTVLPALGRAIVMNSFWNDHNKELSESCFREKLEGVSAAVVEAYNILPSLDVVVPSLMDKDIEFSTSTLSMVPGIPIKPMLAKIAKGVQEFFNLSQEKAFTCEYKYDGQRAQIHKLLDGTVCIFSRNGDETTSRFPDLVDVIKQFSCPAAETFMLDAEVVATDRINGNKLMSFQELSTRERGSKDALITTESIKVEVCVFVFDIMFVNGEQLLALPLRERRRRLKEVFPETRPGYLEYAKEITVSATVGAEEASLNNHDTLSRINAFLEEAFQSSCEGIMVKSLDVNAGYCPTKRSDSWLKVKRDYVDGLGDTLDLVPIGAWYGNGRKAGWYSPFLMACFNPETEEFQSVCRVMSGFSDAFYIEVMKSSTLTLLFNDETDGMKEFYSEDKILAKKPPYYRTGETPDMWFSAEVVWEIRGADFTVSPVHSASLGLVHPSRGISVRFPRFISKVTDRNPEECSTATDIAEMFHAQTRKMNITSQH

SEQ ID NO: 46874 - protein, 1289 aa, Arabidopsis thaliana
  peptide (1)..(1289): Ceres Seq. ID no. 13578714
MNQMVKIDGSEVVLIEANHCPGAVQFLFKVKLESSGFEKYVHTGDFRFCDEMRFDPFLNGFVGCDGVFLDTTYCNPKFVFPSQEESVGYVVSVIDKISEEKVLFLVATYVVGKEKILVEIARRCKRKIVVDARKMSMLSVLGCGEEGMFTEDENESDVHVVGWNVLGETWPYFRPNFVKMNEIMVEKGYDKVVGFVPTGWTYEVKRNKFAVRFKDSMEIHLVPYSEHSNYDELREFIKFLKPKRVIPTVGVDIEKFDCKEVNKMQKHFSGLVDEMANKKDFLLGFYRQSYQKNEKSDVDVVSHSAEVYEEEEKNACEDGGENVPSSRGPILHDTTPSSDSRLLIKLRDSLPAWVTEEQMLDLIKKHAGNPVDIVSNFYEYEAELYKQASLPTPSLNNQAVLFDDDVTDLQPNPVKGICPDVQAIQKGFDLPRKMNLTKGTISPGKRGKSSGSKSNKKAKKDPKSKPVGPGQPTLFKFFNKVLDGGSNSVSVGSETEECNTDKKMVHIDASEAYKEVTDQFIDIVNGSESLRDYAASIIDEAKGDISRALNIYYSKPREIPGDHAGERGLSSKTIQYPKCSEACSSQEDKKASENSGHAVNICVQTSAEESVDKNYVSLPPEKYQPKEHACWREGQPAPYIHLVRTFASVESEKGKIKAMSMLCNMFRSLFALSPEDVLPAVYLCTNKIAADHENIELNIGGSLISSALEEACGISRSTVRDMYNSLGDLGDVAQLCRQTQKLLVPPPPLLVRDVFSTLRKISVQTGTGSTRLKKNLIVKLMRSCREKEIKFLVRTLARNLRIGAMLRTVLPALGRAIVMNSFWNDHNKELSESCFREKLEGVSAAVVEAYNILPSLDVVVPSLMDKDIEFSTSTLSMVPGIPIKPMLAKIAKGVQEFFNLSQEKAFTCEYKYDGQRAQIHKLLDGTVCIFSRNGDETTSRFPDLVDVIKQFSCPAAETFMLDAEVVATDRINGNKLMSFQELSTRERGSKDALITTESIKVEVCVFVFDIMFVNGEQLLALPLRERRRRLKEVFPETRPGYLEYAKEITVSATVGAEEASLNNHDTLSRINAFLEEAFQSSCEGIMVKSLDVNAGYCPTKRSDSWLKVKRDYVDGLGDTLDLVPIGAWYGNGRKAGWYSPFLMACFNPETEEFQSVCRVMSGFSDAFYIEVMKSSTLTLLFNDETDGMKEFYSEDKILAKKPPYYRTGETPDMWFSAEVVWEIRGADFTVSPVHSASLGLVHPSRGISVRFPRFISKVTDRNPEECSTATDIAEMFHAQTRKMNITSQH

SEQ ID NO: 46875 - protein, 1286 aa, Arabidopsis thaliana
  peptide (1)..(1286): Ceres Seq. ID no. 13578715
MVKIDGSEVVLIEANHCPGAVQFLFKVKLESSGFEKYVHTGDFRFCDEMRFDPFLNGFVGCDGVFLDTTYCNPKFVFPSQEESVGYVVSVIDKISEEKVLFLVATYVVGKEKILVEIARRCKRKIVVDARKMSMLSVLGCGEEGMFTEDENESDVHVVGWNVLGETWPYFRPNFVKMNEIMVEKGYDKVVGFVPTGWTYEVKRNKFAVRFKDSMEIHLVPYSEHSNYDELREFIKFLKPKRVIPTVGVDIEKFDCKEVNKMQKHFSGLVDEMANKKDFLLGFYRQSYQKNEKSDVDVVSHSAEVYEEEEKNACEDGGENVPSSRGPILHDTTPSSDSRLLIKLRDSLPAWVTEEQMLDLIKKHAGNPVDIVSNFYEYEAELYKQASLPTPSLNNQAVLFDDDVTDLQPNPVKGICPDVQAIQKGFDLPRKMNLTKGTISPGKRGKSSGSKSNKKAKKDPKSKPVGPGQPTLFKFFNKVLDGGSNSVSVGSETEECNTDKKMVHIDASEAYKEVTDQFIDIVNGSESLRDYAASIIDEAKGDISRALNIYYSKPREIPGDHAGERGLSSKTIQYPKCSEACSSQEDKKASENSGHAVNICVQTSAEESVDKNYVSLPPEKYQPKEHACWREGQPAPYIHLVRTFASVESEKGKIKAMSMLCNMFRSLFALSPEDVLPAVYLCTNKIAADHENIELNIGGSLISSALEEACGISRSTVRDMYNSLGDLGDVAQLCRQTQKLLVPPPPLLVRDVFSTLRKISVQTGTGSTRLKKNLIVKLMRSCREKEIKFLVRTLARNLRIGAMLRTVLPALGRAIVMNSFWNDHNKELSESCFREKLEGVSAAVVEAYNILPSLDVVVPSLMDKDIEFSTSTLSMVPGIPIKPMLAKIAKGVQEFFNLSQEKAFTCEYKYDGQRAQIHKLLDGTVCIFSRNGDETTSRFPDLVDVIKQFSCPAAETFMLDAEVVATDRINGNKLMSFQELSTRERGSKDALITTESIKVEVCVFVFDIMFVNGEQLLALPLRERRRRLKEVFPETRPGYLEYAKEITVSATVGAEEASLNNHDTLSRINAFLEEAFQSSCEGIMVKSLDVNAGYCPTKRSDSWLKVKRDYVDGLGDTLDLVPIGAWYGNGRKAGWYSPFLMACFNPETEEFQSVCRVMSGFSDAFYIEVMKSSTLTLLFNDETDGMKEFYSEDKILAKKPPYYRTGETPDMWFSAEVVWEIRGADFTVSPVHSASLGLVHPSRGISVRFPRFISKVTDRNPEECSTATDIAEMFHAQTRKMNITSQH

SEQ ID NO: 46876 - DNA, 2463 bp, Arabidopsis thaliana; identical to SEQ ID NO: 36172
  misc_feature (1)..(2463): Ceres Seq. ID no. 12601343
  misc_feature (1)..(2463): Ortholog of  Ceres SEQ ID NO 12465083 as cited in SEQ ID NO 68239

SEQ ID NO: 46877 - protein, 718 aa, Arabidopsis thaliana; identical to SEQ ID NO: 36173
  peptide (1)..(718): Ceres Seq. ID no. 12601344

SEQ ID NO: 46878 - protein, 685 aa, Arabidopsis thaliana; identical to SEQ ID NO: 36174
  peptide (1)..(685): Ceres Seq. ID no. 12601345

SEQ ID NO: 46879 - protein, 662 aa, Arabidopsis thaliana; identical to SEQ ID NO: 36175
  peptide (1)..(662): Ceres Seq. ID no. 12601346

SEQ ID NO: 46880 - DNA, 1897 bp, Arabidopsis thaliana
  misc_feature (1)..(1897): Ceres Seq. ID no. 13646965
  misc_feature (1)..(1897): Ortholog of  Ceres SEQ ID NO 13597798 as cited in SEQ ID NO 64311
gaccggaaaataatgctgctccggtcatttcgcaccgtcgagcttctccgccgaatctccacttcttcagtctctggatatcgaacttctccttcacttttacaacgttgcaatggcttccaaacctatttaccacacagagtaacaacaacagagagtcctttcccttcacacatctctcgattctgttcttctcagagcgcgaattcgcaaaatgagaatcgacacacgactctatcatcaccggtttcttcacggagggttaataacagaaagatttcacggcggaggaaggcgggaaaatcattatcaatctcgccggcggcggatgcggttgatttggcgttagactcagtggtgaagatcttcactgtttctacaagtcctagttactttcttccttggcagaataagtctcaacgagaatctatgggctctggatttgtgatttctggaaggaagattataacgaatgcgcatgtcgtggctgatcactcctttgtgttagttagaaagcatggatcgtcgataaaacacagagcagaagttcaagcggttggtcatgaatgtgatttggctatattggtagttgatagtgaagtgttttgggaaggtatgaatgctttggagctaggagatataccgtttcttcaggaagctgtggctgtagttggctatcctcaaggtggtgacaacatttctgttacaaaaggtgttgtgtctcgagttgaaccgacacaatatgttcacggtgccacccagctaatggctatacaaatagatgctgctattaaccccggaaatagtggtggcccagctatcatgggaaacaaagtagctggtgtcgcatttcaaaatctttcaggtgctgagaatataggctatataattccaacaccagtgataaagcatttcataaatggcgttgaagaatgtggtaaatacattggtttttgttcaatgggtgtatcatgtcagcctatggagaatggtgaacttcgtagtggttttcagatgagttctgaaatgacaggggttcttgttagcaaaataaaccctctatcagatgctcacaaaattttgaagaaagatgatgttcttcttgcatttgatggtgttcctatagcaaatgatggaacagttccttttcggaacagggagagaatcactttcgaccatttggtttctatgaagaaaccagatgaaacagccttggttaaagttttgagagaggggaaagaacatgaattcagtatcacactaagacctctgcaaccactagttccagtgcatcaatttgatcagcttcccagttattatatatttgcgggcttcgtatttgtacctcttactcagccataccttcatgaatatggagaagattggtataacacttctccccgcacattgtgccatcgtgcattaaaagatttgcccaaaaaagccggtcaacaacttgtcattgtctctcaggtgttaatggatgatatcaacacaggatacgagcgtctcgcagaactacaagtgaataaagtgaacggagtagaagtgaataatctgagacatctatgtcagctcatagagaactgcaacaccgaaaagctgaggatagacttagacgatgagagtagggtaatcgtcttgaactaccaatccgcaaaaattgccacttctttgattttgaaacgacacagaatagcatcagcgatttccagcgatctgcttatcgaacaaaatctagaaaccgagttggcttcttgttctgcggtttgagctatcgccaacacgtatggcatgttgtacacttacaaattcattcataatttgtaaactacaatgttgtatactcataaacatttaggatttgataagtggcttgtcacgagcctgaattttg

SEQ ID NO: 46881 - protein, 590 aa, Arabidopsis thaliana
  peptide (1)..(590): Ceres Seq. ID no. 13646966
DRKIMLLRSFRTVELLRRISTSSVSGYRTSPSLLQRCNGFQTYLPHRVTTTESPFPSHISRFCSSQSANSQNENRHTTLSSPVSSRRVNNRKISRRRKAGKSLSISPAADAVDLALDSVVKIFTVSTSPSYFLPWQNKSQRESMGSGFVISGRKIITNAHVVADHSFVLVRKHGSSIKHRAEVQAVGHECDLAILVVDSEVFWEGMNALELGDIPFLQEAVAVVGYPQGGDNISVTKGVVSRVEPTQYVHGATQLMAIQIDAAINPGNSGGPAIMGNKVAGVAFQNLSGAENIGYIIPTPVIKHFINGVEECGKYIGFCSMGVSCQPMENGELRSGFQMSSEMTGVLVSKINPLSDAHKILKKDDVLLAFDGVPIANDGTVPFRNRERITFDHLVSMKKPDETALVKVLREGKEHEFSITLRPLQPLVPVHQFDQLPSYYIFAGFVFVPLTQPYLHEYGEDWYNTSPRTLCHRALKDLPKKAGQQLVIVSQVLMDDINTGYERLAELQVNKVNGVEVNNLRHLCQLIENCNTEKLRIDLDDESRVIVLNYQSAKIATSLILKRHRIASAISSDLLIEQNLETELASCSAV

SEQ ID NO: 46882 - protein, 586 aa, Arabidopsis thaliana
  peptide (1)..(586): Ceres Seq. ID no. 13646967
MLLRSFRTVELLRRISTSSVSGYRTSPSLLQRCNGFQTYLPHRVTTTESPFPSHISRFCSSQSANSQNENRHTTLSSPVSSRRVNNRKISRRRKAGKSLSISPAADAVDLALDSVVKIFTVSTSPSYFLPWQNKSQRESMGSGFVISGRKIITNAHVVADHSFVLVRKHGSSIKHRAEVQAVGHECDLAILVVDSEVFWEGMNALELGDIPFLQEAVAVVGYPQGGDNISVTKGVVSRVEPTQYVHGATQLMAIQIDAAINPGNSGGPAIMGNKVAGVAFQNLSGAENIGYIIPTPVIKHFINGVEECGKYIGFCSMGVSCQPMENGELRSGFQMSSEMTGVLVSKINPLSDAHKILKKDDVLLAFDGVPIANDGTVPFRNRERITFDHLVSMKKPDETALVKVLREGKEHEFSITLRPLQPLVPVHQFDQLPSYYIFAGFVFVPLTQPYLHEYGEDWYNTSPRTLCHRALKDLPKKAGQQLVIVSQVLMDDINTGYERLAELQVNKVNGVEVNNLRHLCQLIENCNTEKLRIDLDDESRVIVLNYQSAKIATSLILKRHRIASAISSDLLIEQNLETELASCSAV

SEQ ID NO: 46883 - protein, 447 aa, Arabidopsis thaliana
  peptide (1)..(447): Ceres Seq. ID no. 13646968
MGSGFVISGRKIITNAHVVADHSFVLVRKHGSSIKHRAEVQAVGHECDLAILVVDSEVFWEGMNALELGDIPFLQEAVAVVGYPQGGDNISVTKGVVSRVEPTQYVHGATQLMAIQIDAAINPGNSGGPAIMGNKVAGVAFQNLSGAENIGYIIPTPVIKHFINGVEECGKYIGFCSMGVSCQPMENGELRSGFQMSSEMTGVLVSKINPLSDAHKILKKDDVLLAFDGVPIANDGTVPFRNRERITFDHLVSMKKPDETALVKVLREGKEHEFSITLRPLQPLVPVHQFDQLPSYYIFAGFVFVPLTQPYLHEYGEDWYNTSPRTLCHRALKDLPKKAGQQLVIVSQVLMDDINTGYERLAELQVNKVNGVEVNNLRHLCQLIENCNTEKLRIDLDDESRVIVLNYQSAKIATSLILKRHRIASAISSDLLIEQNLETELASCSAV

SEQ ID NO: 46884 - DNA, 2395 bp, Arabidopsis thaliana
  misc_feature (1)..(2395): Ceres Seq. ID no. 13647202
  misc_feature (1)..(2395): Ortholog of  Ceres SEQ ID NO 13596198 as cited in SEQ ID NO 68488
ggaaaaaggtcgcaacttgttgtgtctctctttctccaactaccctttcgagcttagctgtccactcttctctcccgatgaaatcttcatctttcgtatctctcctccttctcatgccctaaatttcatctcctctcttgtattgattctgttaaaaatctcacctttcaattcaaaaccccttccatttttgtgattaatatgcctacttggtggggaagaaagtcctgcaagaacaaggacgataatcacagaggaatcatctccacagatagagatatcaagagctctgctgttgttgttgatcctcctctcactcctactcgtggtggtacacctcgttgcagtcgtgaattcgctggagcttcttctgctttctctggttttgactctgattctaccgagaagaaaggtcaccctcttcctcgtcctttgctctctcctgtttcgatccatcatcaagatcatgtaagcggatccacttctggatctacatctgtttctagcgttagctcatctggatcagctgatgatcagagtcaacttgttgcttctaggggtcgtggtgatgtgaaattcaatgtagcagcagcaccacgtagtcctgagagagtttctccaaaggcagctactattactactaggcccacgtctccacggcatcagcgtttgtctggagttgtgagcttagagtcttctacagggaggaatgatgatggaaggtcctcctctgagtgtcatcctttgcctcgaccacctacttctcctacaagcccttctgctgtgcatggttccaggattggaggaggctacgagacctctccttcggggttttccacgtggaaaaaagggaaatttcttgggagtggcacctttggtcaagtctatcttggtttcaacagtgagaaagggaaaatgtgtgctattaaagaggtcaaggtcatttctgacgatcaaacatcaaaagaatgtctgaagcaactaaatcaggagataaatttgcttaaccagctttgtcatccgaatattgtccagtattacggaagtgaactgagtgaagaaaccttgtccgtctacttggagtacgtgtcaggtggttcaatccataaactacttaaggattatggttctttcactgaacccgttatccaaaactacacgcggcagattcttgctgggcttgcctatttacatggacgaaatacagtacatagggacatcaaaggagcaaatatattagtggatccgaatggtgaaatcaagttggcagactttgggatggccaaacatgtaacagccttttctactatgctttcttttaaagggagtccttactggatggcacccgaggttgtgatgagccaaaatggctacactcatgcagtcgatatctggagtttgggttgtactattctggaaatggcaacatcaaagccaccttggagccagtttgaaggggttgctgcgattttcaaaatcggaaacagtaaagacaccccggaaatacctgatcacctttcaaatgatgcaaagaattttataaggctttgtctgcaacgaaatccgacagtacgtcctacagcttctcagcttctagaacacccttttctacgtaacacaacaagagtggctagtactagtttgcccaaagacttccccccacgttcctatgatggaaacttctcactgcagcctacaagggaaccctatccagggagactgagccatgataattatgcaaaacagccattgtctagaactataaagagcccgagcagagaaaacgtaagagctatcacatccttaccagtatctccatgttcaagccctttacgccaacttgggccagcatacaaaagttgtttcctgtcacctcctcacccgtcttacgcatttcctgggcaagacagtgggtacaacctagcagagtttgctgcaagccctttcaggatgaagaaagacgcaatgatggaaccatctagtttcaggactcaaacaccgaattcaccattgagatcaagactggtgtagaaatggagcaaagattgagagactgaaagccacatactataaacaaggcccaatgaccatgtataaaacagtgtctacccctagttttggccttctccttctcaacacccagggaaatatgaagttatgagaccttagttgtgtgtgtgtggagcatctcctagaagtggagatttttggaacaagaaggagaaatttggggggaaaacagaaagatgtaaagagaaacatgaaaatgaatacaaagtttatagagtgtgagaagtatagatagtaagttgtgttgtcacacaaagataatattcaaccatttgttttcaacctacagtgtgaatatacttttcagaaagtaaattagttactc

SEQ ID NO: 46885 - protein, 609 aa, Arabidopsis thaliana
  peptide (1)..(609): Ceres Seq. ID no. 13647203
MPTWWGRKSCKNKDDNHRGIISTDRDIKSSAVVVDPPLTPTRGGTPRCSREFAGASSAFSGFDSDSTEKKGHPLPRPLLSPVSIHHQDHVSGSTSGSTSVSSVSSSGSADDQSQLVASRGRGDVKFNVAAAPRSPERVSPKAATITTRPTSPRHQRLSGVVSLESSTGRNDDGRSSSECHPLPRPPTSPTSPSAVHGSRIGGGYETSPSGFSTWKKGKFLGSGTFGQVYLGFNSEKGKMCAIKEVKVISDDQTSKECLKQLNQEINLLNQLCHPNIVQYYGSELSEETLSVYLEYVSGGSIHKLLKDYGSFTEPVIQNYTRQILAGLAYLHGRNTVHRDIKGANILVDPNGEIKLADFGMAKHVTAFSTMLSFKGSPYWMAPEVVMSQNGYTHAVDIWSLGCTILEMATSKPPWSQFEGVAAIFKIGNSKDTPEIPDHLSNDAKNFIRLCLQRNPTVRPTASQLLEHPFLRNTTRVASTSLPKDFPPRSYDGNFSLQPTREPYPGRLSHDNYAKQPLSRTIKSPSRENVRAITSLPVSPCSSPLRQLGPAYKSCFLSPPHPSYAFPGQDSGYNLAEFAASPFRMKKDAMMEPSSFRTQTPNSPLRSRLV

SEQ ID NO: 46886 - protein, 371 aa, Arabidopsis thaliana
  peptide (1)..(371): Ceres Seq. ID no. 13647204
MCAIKEVKVISDDQTSKECLKQLNQEINLLNQLCHPNIVQYYGSELSEETLSVYLEYVSGGSIHKLLKDYGSFTEPVIQNYTRQILAGLAYLHGRNTVHRDIKGANILVDPNGEIKLADFGMAKHVTAFSTMLSFKGSPYWMAPEVVMSQNGYTHAVDIWSLGCTILEMATSKPPWSQFEGVAAIFKIGNSKDTPEIPDHLSNDAKNFIRLCLQRNPTVRPTASQLLEHPFLRNTTRVASTSLPKDFPPRSYDGNFSLQPTREPYPGRLSHDNYAKQPLSRTIKSPSRENVRAITSLPVSPCSSPLRQLGPAYKSCFLSPPHPSYAFPGQDSGYNLAEFAASPFRMKKDAMMEPSSFRTQTPNSPLRSRLV

SEQ ID NO: 46887 - DNA, 902 bp, Arabidopsis thaliana
  misc_feature (1)..(902): Ceres Seq. ID no. 12574797
  misc_feature (1)..(902): Ortholog of  Ceres SEQ ID NO 13582619 as cited in SEQ ID NO 56520
  misc_feature (1)..(902): Ortholog of  Ceres SEQ ID NO 13660872 as cited in SEQ ID NO 60830
  misc_feature (1)..(902): Ortholog of  Ceres SEQ ID NO 12616221 as cited in SEQ ID NO 63291
  misc_feature (1)..(902): Ortholog of  Ceres SEQ ID NO 13662799 as cited in SEQ ID NO 65338
acaccgcactctcttcttcttcttcttcttcctctctgttttttctctctctttgtttggaaccaccatggataatgtcaaacttgttaagaatggtgttttgagattgccacctggattcagattccatcctactgatgaagaacttgtggttcaataccttaagaggaaagtttgttcttctcctttgccagcttcaatcatccctgagtttgatgtttgcagagctgatccttgggatttacctggcaatttggagaaagagaggtacttctttagcacaagggaagctaaatacccaaatgggaaccggtctaaccgggcaactgggtctggttattggaaagctaccggtattgataaacgggttgtgacctctagaggaaatcaaatcgttggtttgaagaaaactcttgtcttctacaaaggcaaaccacctcatggctcaagaaccgattggatcatgcacgaatatcgcctctcttcttctcctccgagttctatgggtcccactcagaactgggtactctgtcgtatcttcttgaagaaaagagccggtaacaagaacgacgacgacgacggagatagccgtaatcttagacataataataataacaattcgagtgaccaaattgagataattacaacagaccaaacagatgataaaacaaaaccaatcttctttgatttcatgagaaaagaaagaacaacagatttgaaccttttgccgagctctccttcttccgatcatgcttcaagtggagtcacgacggagatcttctcttcttccgatgaagagaccagtagttgcaatagtttcagatgaaatctttaatttaattttaatgttgactatcttaataagttattatagttttatattaatacgactctctttcctt

SEQ ID NO: 46888 - protein, 274 aa, Arabidopsis thaliana
  peptide (1)..(274): Ceres Seq. ID no. 12574798
HRTLFFFFFFLSVFSLSLFGTTMDNVKLVKNGVLRLPPGFRFHPTDEELVVQYLKRKVCSSPLPASIIPEFDVCRADPWDLPGNLEKERYFFSTREAKYPNGNRSNRATGSGYWKATGIDKRVVTSRGNQIVGLKKTLVFYKGKPPHGSRTDWIMHEYRLSSSPPSSMGPTQNWVLCRIFLKKRAGNKNDDDDGDSRNLRHNNNNNSSDQIEIITTDQTDDKTKPIFFDFMRKERTTDLNLLPSSPSSDHASSGVTTEIFSSSDEETSSCNSFR

SEQ ID NO: 46889 - protein, 252 aa, Arabidopsis thaliana
  peptide (1)..(252): Ceres Seq. ID no. 12574799
MDNVKLVKNGVLRLPPGFRFHPTDEELVVQYLKRKVCSSPLPASIIPEFDVCRADPWDLPGNLEKERYFFSTREAKYPNGNRSNRATGSGYWKATGIDKRVVTSRGNQIVGLKKTLVFYKGKPPHGSRTDWIMHEYRLSSSPPSSMGPTQNWVLCRIFLKKRAGNKNDDDDGDSRNLRHNNNNNSSDQIEIITTDQTDDKTKPIFFDFMRKERTTDLNLLPSSPSSDHASSGVTTEIFSSSDEETSSCNSFR

SEQ ID NO: 46890 - DNA, 1755 bp, Arabidopsis thaliana
  misc_feature (1)..(1755): Ceres Seq. ID no. 15168981
  misc_feature (1)..(1755): Ortholog of  Ceres SEQ ID NO 14313532 as cited in SEQ ID NO 20462
ggactcacagtgagtgtgacataagacaaacggattttgtttcctttacaatttaacgaaacagtaattaacactctcgaatggattcgtagagagcagcaaactccactctgacgccatacataaacaattcttaactttatcctctcatccttatcactcttcctcaaaacttcgaaaatgcatgcgatcgatttcaaagagattcaggagaagctctctgatggattccggccttggcaacgatcgtttcagttctgggctcgtgccactgatatctacaccggatacaaggtttctctttgattgatgggtatttcaacttcgtatgaacttcgtcaaggatgttaataagcacgaggagatgtgggagagacaacatgaacttgctgctcataaagtttattctatgtgctctgaccttggtggtttcttccttaagattgcacaaattctagggaaacctgacttggctccagctgcttgggtgagaaaactcgtcactttgtgtgatcaagctcctgccacaccatttgatgccgttcgagttgtcctggagaaagagttaggtaaaagcatcgaacaagtgtttgaaacatttgatgagaagcctcttggctctgcttctattgctcaggtacaccgagcaagagtaaagggtgacaagagggatgttgttgtaaaggtccaacatcctggcgttgagaagttgatgatggttgatatcagaaacttgcaaatatttgcattatacatgcagaaaactgatatcaaatttgacttgttctccatgacaaaggaaatagagaagcagattgggtatgaattcgactttaaaagggaggccaatgcaatggagaagatccgacgttttctatatgataacaatagaaagagtcctgttctggttcccagggtgtttccaaatttggtgaccaggaaggttctggttatggaattcatgaacggaatcccgatcttgagccttggtgatgagatggcaaaaagagggataaatcctcatggtaaaatggcagaggcagcaaaattcaatatactacacagtttgtcccaagcatatggccaaatgatactgaagagtggtttctttcatgcggatccacatcctgggaatatcttgattggtaaaggttcagaggttgcactgctggactatggtcaagtgaaagaactccctgaccacctgagacttggttatgcaaatttgggaacttggtatagctacagtagccaagtgtaagaatgagcaacaagagcttctccagttagcaaaaacaatgttcgacacagagatgcctcctggtacgacaactctgcaacctttctcagaagactcttcgatcaaaaagatttcggttgaggcatttccagaggaactcttctctgttcttcgcacagtagttctgttaagaggactcagcgtagggattggcattaattactcctgcgctcaacactggagggctatggcagaagaggctttgcatgcatctggaagactctcaacaggtagaaagcagaagcgtcgatgtagttctcttagaaggctatacccagggccaagagagagttaataaaatcccctgcctcttgcaaatgatgctctcagtctttagtctttacattattttctggatacagctaaggcagcaagttgtctcttaccttaaccggtttagttggtttgaaactttgactagtgagtacatctttataaaagttttgtcattatac

SEQ ID NO: 46891 - protein, 310 aa, Arabidopsis thaliana
  peptide (1)..(310): Ceres Seq. ID no. 15168982
MNFVKDVNKHEEMWERQHELAAHKVYSMCSDLGGFFLKIAQILGKPDLAPAAWVRKLVTLCDQAPATPFDAVRVVLEKELGKSIEQVFETFDEKPLGSASIAQVHRARVKGDKRDVVVKVQHPGVEKLMMVDIRNLQIFALYMQKTDIKFDLFSMTKEIEKQIGYEFDFKREANAMEKIRRFLYDNNRKSPVLVPRVFPNLVTRKVLVMEFMNGIPILSLGDEMAKRGINPHGKMAEAAKFNILHSLSQAYGQMILKSGFFHADPHPGNILIGKGSEVALLDYGQVKELPDHLRLGYANLGTWYSYSSQV

SEQ ID NO: 46892 - protein, 298 aa, Arabidopsis thaliana
  peptide (1)..(298): Ceres Seq. ID no. 15168983
MWERQHELAAHKVYSMCSDLGGFFLKIAQILGKPDLAPAAWVRKLVTLCDQAPATPFDAVRVVLEKELGKSIEQVFETFDEKPLGSASIAQVHRARVKGDKRDVVVKVQHPGVEKLMMVDIRNLQIFALYMQKTDIKFDLFSMTKEIEKQIGYEFDFKREANAMEKIRRFLYDNNRKSPVLVPRVFPNLVTRKVLVMEFMNGIPILSLGDEMAKRGINPHGKMAEAAKFNILHSLSQAYGQMILKSGFFHADPHPGNILIGKGSEVALLDYGQVKELPDHLRLGYANLGTWYSYSSQV

SEQ ID NO: 46893 - protein, 283 aa, Arabidopsis thaliana
  peptide (1)..(283): Ceres Seq. ID no. 15168984
MCSDLGGFFLKIAQILGKPDLAPAAWVRKLVTLCDQAPATPFDAVRVVLEKELGKSIEQVFETFDEKPLGSASIAQVHRARVKGDKRDVVVKVQHPGVEKLMMVDIRNLQIFALYMQKTDIKFDLFSMTKEIEKQIGYEFDFKREANAMEKIRRFLYDNNRKSPVLVPRVFPNLVTRKVLVMEFMNGIPILSLGDEMAKRGINPHGKMAEAAKFNILHSLSQAYGQMILKSGFFHADPHPGNILIGKGSEVALLDYGQVKELPDHLRLGYANLGTWYSYSSQV

SEQ ID NO: 46894 - DNA, 2204 bp, Arabidopsis thaliana
  misc_feature (1)..(2204): Ceres Seq. ID no. 12574800
  misc_feature (1)..(2204): Ortholog of  Ceres SEQ ID NO 13595900 as cited in SEQ ID NO 69289
acgaaggccgtctcgtcagatttctttttcatttttcttttaacgtttggtttcgtctctaatccattatcttccttaagaaaaaaaaaattcagcaaaaaaaaagagaaaaaaatagtgaatcaagctgtctcgtagcagtctttatagatcaaacgataatcgaatccaacgacccattttttttttttttgggtctgatttcgtctctctttgttcttttcaccttttttttttgttttggttttgtctcttccgtttcattttgtgtttcttcaatctgatctaaagcttttgtctgaaaaaaagtgtcagactttctatgaagatgttgttggtcaatgggtgatttttagtttgtgttaaagcagaagcataagattacttggtgaatcgattacaattttgatttgattcagatatttgaagggttcttactagaatttgaattggggatctttgaatttcgatcaggcttttagagaggtagggaacattgaattgagatctgggtcaacttttggttttgttggggattagttgttttaagagatcgaagaaaggaggaagctttttgatttggtaacgatggatcgtgtggttggtggtaagtataagcttggacgtaaacttggaagtggatcatttggtgaactttttctaggggttaatgtacaaactggagaagaagttgctgtgaagcttgaacctgcgagagctagacatcctcaacttcattatgaatcaaagctttatatgcttcttcaaggaggaactggtattccacatctaaaatggtatggggttgagggtgaatacaactgtatggtgattgaccttttgggtccgagtatggaggatttatttaattattgtagtcggaggttcaatctaaagacggttctaatgctcgcagatcaaatgatcaatagagttgagtatatgcatgtccggggatttcttcatcgtgacataaagcctgataactttttgatgggtcttggacgcaaagcgaaccaggtgtacatcattgactacggacttgcaaaaaagtatagagatctccaaactcatagacacattccctacagggaaaacaagaatcttactggaacagctcgatatgcaagtgttaacactcatcttggaattgagcaaagtaggagggacgatctggaatctcttggctacgtgcttatgtattttcttcgaggaagtcttccttggcaaggccttcgtgcgggtaccaaaaaacagaagtatgacaagatcagcgaaaagaaaaggcttacacctgtagaggttctctgtaaatcctttccacctgagttcacatcatacttcctctatgtacgatcattgcggtttgaagacaaaccagattatccatacctaaagaggcttttcagggatctctttattcgagaaggttatcagtttgactatgtatttgattggacaatcttgaagtatccacagtttagttcgggctccagctctagctccaagccaagatcaagcctgagaccagctatgaatcctccagtaccaattgccgaaagaccagataaaccttcagctggagctgggcaagacagtcgagatagattctcaggtgctttagaggcatatgctagaagaaatggctcaggaagcggtgtggtacaagctgatcgatctagaccaagaacctcagagaatgtattagcatcgtcaaaggatacaacaccacaaaactatgagagagtcgaaagaccaatctcttcaacaagacacgcaagttcttcaagaaaagctgttgtatcgagcgtacgagccacttcttcagctgatttcacagagaaccgctctagcagagttgtcccaagcaatggccgttcctcaaccgctcagaggactcagctcgtccctgacccaaccactagaccgtcatcttcttcttttacccgagctgcgccgtcgaggactgctcgtgacatcacgctccagagctttgagctactcaccatagggaatggaaagaggaagtgagaggcttggctttatcgtgagcgtgttggaggacactgcgacattttaatggatggagactttgtttttatttcacgaaattatcggtttcctaatttaaggaataaatcgaacatcatttgattacaaattatatgtgataaagtatatggttttaacttgttaagctcatc

SEQ ID NO: 46895 - protein, 480 aa, Arabidopsis thaliana
  peptide (1)..(480): Ceres Seq. ID no. 12574801
MDRVVGGKYKLGRKLGSGSFGELFLGVNVQTGEEVAVKLEPARARHPQLHYESKLYMLLQGGTGIPHLKWYGVEGEYNCMVIDLLGPSMEDLFNYCSRRFNLKTVLMLADQMINRVEYMHVRGFLHRDIKPDNFLMGLGRKANQVYIIDYGLAKKYRDLQTHRHIPYRENKNLTGTARYASVNTHLGIEQSRRDDLESLGYVLMYFLRGSLPWQGLRAGTKKQKYDKISEKKRLTPVEVLCKSFPPEFTSYFLYVRSLRFEDKPDYPYLKRLFRDLFIREGYQFDYVFDWTILKYPQFSSGSSSSSKPRSSLRPAMNPPVPIAERPDKPSAGAGQDSRDRFSGALEAYARRNGSGSGVVQADRSRPRTSENVLASSKDTTPQNYERVERPISSTRHASSSRKAVVSSVRATSSADFTENRSSRVVPSNGRSSTAQRTQLVPDPTTRPSSSSFTRAAPSRTARDITLQSFELLTIGNGKRK

SEQ ID NO: 46896 - protein, 424 aa, Arabidopsis thaliana
  peptide (1)..(424): Ceres Seq. ID no. 12574802
MLLQGGTGIPHLKWYGVEGEYNCMVIDLLGPSMEDLFNYCSRRFNLKTVLMLADQMINRVEYMHVRGFLHRDIKPDNFLMGLGRKANQVYIIDYGLAKKYRDLQTHRHIPYRENKNLTGTARYASVNTHLGIEQSRRDDLESLGYVLMYFLRGSLPWQGLRAGTKKQKYDKISEKKRLTPVEVLCKSFPPEFTSYFLYVRSLRFEDKPDYPYLKRLFRDLFIREGYQFDYVFDWTILKYPQFSSGSSSSSKPRSSLRPAMNPPVPIAERPDKPSAGAGQDSRDRFSGALEAYARRNGSGSGVVQADRSRPRTSENVLASSKDTTPQNYERVERPISSTRHASSSRKAVVSSVRATSSADFTENRSSRVVPSNGRSSTAQRTQLVPDPTTRPSSSSFTRAAPSRTARDITLQSFELLTIGNGKRK

SEQ ID NO: 46897 - protein, 401 aa, Arabidopsis thaliana
  peptide (1)..(401): Ceres Seq. ID no. 12574803
MVIDLLGPSMEDLFNYCSRRFNLKTVLMLADQMINRVEYMHVRGFLHRDIKPDNFLMGLGRKANQVYIIDYGLAKKYRDLQTHRHIPYRENKNLTGTARYASVNTHLGIEQSRRDDLESLGYVLMYFLRGSLPWQGLRAGTKKQKYDKISEKKRLTPVEVLCKSFPPEFTSYFLYVRSLRFEDKPDYPYLKRLFRDLFIREGYQFDYVFDWTILKYPQFSSGSSSSSKPRSSLRPAMNPPVPIAERPDKPSAGAGQDSRDRFSGALEAYARRNGSGSGVVQADRSRPRTSENVLASSKDTTPQNYERVERPISSTRHASSSRKAVVSSVRATSSADFTENRSSRVVPSNGRSSTAQRTQLVPDPTTRPSSSSFTRAAPSRTARDITLQSFELLTIGNGKRK

SEQ ID NO: 46898 - DNA, 1530 bp, Arabidopsis thaliana
  misc_feature (1)..(1530): Ceres Seq. ID no. 15168985
  misc_feature (1)..(1530): Ortholog of  Ceres SEQ ID NO 13585382 as cited in SEQ ID NO 63889
gaatggcttcacttcttattttcccccaccttcaccattttgattcttcactggaccgtagagaggtactagtagttcgccattcacaagcatcaaggcgatttctcactccgaaagcttcaattaatggcagcggaatcacaaacggagctgcagcggaaaccacctctaaacctagtcgcaaagggaggaagaagaagcaaacatcgacggtaattgagaaagataacaccgagactgatcctgaattgaatccggagttagctgattacgacgacgggatcgagtttccgtacgacgatccgcctcttgtgtgttgcttcggagctgtacagaaggagttagttccggtggtgcgagtccatgataatccgatgcatcctgatatgtactcgcagtggaagatgctacagtgggatccaccggagtttgggagagctccgggaggtccgccgtcgaatgtggcgatctctcatgtacggttaggtgggagagctgcgtttatggggaaagtaggtgaagatgattttggagatgagcttgttctgatgatgaatcaggagagagttcagacgagagctgtgaaattcgatgagaattcgaaaactgcttgtactcgtgtcaagatcaagtttaaggacgggaaaatgatggcggagactgtgaaagaaccacctgaggactcgctatttgcttcagaactcaatttagctgtgcttaaagaggcgaggatttttcatttcaattcagaagtgttgacgtctcctacaatgcaatcaactctttttacggcaatacaatggtctaagaagtttggtgggcttattttctttgacttgaatctcccattaccgctgtggagatcgcgcaatgagactaggaagttgatcaagaaagcatggaatgaagcaaacatcattgaagtttcacagcaagagcttgagtttctacttgatgaagattactacgagaggagaagaaactacacaccacagtacttcgctgaggattttgatcagacgaaaaacagaagagactattaccattacacaccagaggaaatcaagtcattgtggcatgacaagctgaagctattggttgtgactgatggaacacttcggcttcattactatactcctacttttgatggtgttgtgattggaacagaagatgtgcttataactcctttcacctgtgataggaccggttctggtgatgctgttgttgcagggataatgagaaagctaacaacttgtcctgagatgtttgaggatcaggatgtgatggagcgacagctcaggtttgcagttgctgctgggatcatagcgcagtggacaattggtgcagttagaggtttccctactgaaagcgcgacacagaatttgaaagaacaagtttatgttccatcaatgtggtagaatagaagatgaagaactgaacttgtgtactcaatgtttttgaacaatgtgtgagttgtatactgattcagatttgtaatccagagaaatgtacaatcaatttttttagttc

SEQ ID NO: 46899 - protein, 471 aa, Arabidopsis thaliana
  peptide (1)..(471): Ceres Seq. ID no. 15168986
MASLLIFPHLHHFDSSLDRREVLVVRHSQASRRFLTPKASINGSGITNGAAAETTSKPSRKGRKKKQTSTVIEKDNTETDPELNPELADYDDGIEFPYDDPPLVCCFGAVQKELVPVVRVHDNPMHPDMYSQWKMLQWDPPEFGRAPGGPPSNVAISHVRLGGRAAFMGKVGEDDFGDELVLMMNQERVQTRAVKFDENSKTACTRVKIKFKDGKMMAETVKEPPEDSLFASELNLAVLKEARIFHFNSEVLTSPTMQSTLFTAIQWSKKFGGLIFFDLNLPLPLWRSRNETRKLIKKAWNEANIIEVSQQELEFLLDEDYYERRRNYTPQYFAEDFDQTKNRRDYYHYTPEEIKSLWHDKLKLLVVTDGTLRLHYYTPTFDGVVIGTEDVLITPFTCDRTGSGDAVVAGIMRKLTTCPEMFEDQDVMERQLRFAVAAGIIAQWTIGAVRGFPTESATQNLKEQVYVPSMW

SEQ ID NO: 46900 - protein, 347 aa, Arabidopsis thaliana
  peptide (1)..(347): Ceres Seq. ID no. 15168987
MHPDMYSQWKMLQWDPPEFGRAPGGPPSNVAISHVRLGGRAAFMGKVGEDDFGDELVLMMNQERVQTRAVKFDENSKTACTRVKIKFKDGKMMAETVKEPPEDSLFASELNLAVLKEARIFHFNSEVLTSPTMQSTLFTAIQWSKKFGGLIFFDLNLPLPLWRSRNETRKLIKKAWNEANIIEVSQQELEFLLDEDYYERRRNYTPQYFAEDFDQTKNRRDYYHYTPEEIKSLWHDKLKLLVVTDGTLRLHYYTPTFDGVVIGTEDVLITPFTCDRTGSGDAVVAGIMRKLTTCPEMFEDQDVMERQLRFAVAAGIIAQWTIGAVRGFPTESATQNLKEQVYVPSMW

SEQ ID NO: 46901 - protein, 343 aa, Arabidopsis thaliana
  peptide (1)..(343): Ceres Seq. ID no. 15168988
MYSQWKMLQWDPPEFGRAPGGPPSNVAISHVRLGGRAAFMGKVGEDDFGDELVLMMNQERVQTRAVKFDENSKTACTRVKIKFKDGKMMAETVKEPPEDSLFASELNLAVLKEARIFHFNSEVLTSPTMQSTLFTAIQWSKKFGGLIFFDLNLPLPLWRSRNETRKLIKKAWNEANIIEVSQQELEFLLDEDYYERRRNYTPQYFAEDFDQTKNRRDYYHYTPEEIKSLWHDKLKLLVVTDGTLRLHYYTPTFDGVVIGTEDVLITPFTCDRTGSGDAVVAGIMRKLTTCPEMFEDQDVMERQLRFAVAAGIIAQWTIGAVRGFPTESATQNLKEQVYVPSMW

SEQ ID NO: 46902 - DNA, 1288 bp, Arabidopsis thaliana
  misc_feature (1)..(1288): Ceres Seq. ID no. 13646915
  misc_feature (1)..(1288): Ortholog of  Ceres SEQ ID NO 13596581 as cited in SEQ ID NO 62420
  misc_feature (1)..(1288): Ortholog of  Ceres SEQ ID NO 13591273 as cited in SEQ ID NO 65904
  misc_feature (1)..(1288): Ortholog of  Ceres SEQ ID NO 13623086 as cited in SEQ ID NO 0
gagatccctccatcattgttcaccatggacaaggcttcaatcactgaaggaaagccgattcgatgcaaagcagcaatcttaagaaaagcaggagaaccattggtgatagaagagatccaagttgatccacctcaagcttacgaagtcagaatcaaaattttatgcacttctctatgtcacacggatgttactttctggaaactagacagtggaccgcttgcaagatttcctaggattctaggtcatgaagcagtcggtgtggtcgagagtattggagaaaaggtagacggatttaaacaaggcgacgtcgttttgccagtgtttcatcctcaatgtgaagaatgcaaagagtgcaaatctccaaagagcaactggtgcacaagatatacaaacgattacttatcaaacacaagacgatatggaatgacttcaagattcaaggactctcttggagaagatattcaccatttcatctttgtctcaagttttactgaatataccgtagtagatatcgcacatctcgtcaaaatctctcctgaaattcccgttgatatagcggccttgctcagctgcagtgttgccacaggaattggagctgcgtggaaagtagctgacgtagaggaaggttccactgtcgttatctttggccttggtgctgttggactagcggttgcagaaggagtcagattgcgtggagccgcaaaaatcatcggtgtggatagcaatcccgcgaaatttgaaataggtaaaagatttggaatcacggattttgtcaatcctgctttgtgtggggagaagaaaattagcgaggtgattagagaaatgacagatgtaggagctgactacagttttgaatgcattggtttagcttccttgatggaagaggcattcaagagtactcgcccgggatcgggtaaaacgatagtattggggatggaacaaaaggctttgccaataagcttgggtagttatgatcttctcagaggcagaactgtatgcggcactttatttggcggtttgaaacccaaacttgatattcctattctcgtggatcgttatttgaaaaaggagcttaatctagaggatctgattacacacgaattaagctttgaagaaattaacaaagctttccatttattggctgagggaaactctatccgttgcattatatggatggataaataatccttttatcttcatttgaattttcttcctagttcttctatgtcccaaaacatagtacttggtaacaaaaaaaaaaaaaaaaaaactcgagggggggcccggt

SEQ ID NO: 46903 - protein, 394 aa, Arabidopsis thaliana
  peptide (1)..(394): Ceres Seq. ID no. 13646916
EIPPSLFTMDKASITEGKPIRCKAAILRKAGEPLVIEEIQVDPPQAYEVRIKILCTSLCHTDVTFWKLDSGPLARFPRILGHEAVGVVESIGEKVDGFKQGDVVLPVFHPQCEECKECKSPKSNWCTRYTNDYLSNTRRYGMTSRFKDSLGEDIHHFIFVSSFTEYTVVDIAHLVKISPEIPVDIAALLSCSVATGIGAAWKVADVEEGSTVVIFGLGAVGLAVAEGVRLRGAAKIIGVDSNPAKFEIGKRFGITDFVNPALCGEKKISEVIREMTDVGADYSFECIGLASLMEEAFKSTRPGSGKTIVLGMEQKALPISLGSYDLLRGRTVCGTLFGGLKPKLDIPILVDRYLKKELNLEDLITHELSFEEINKAFHLLAEGNSIRCIIWMDK

SEQ ID NO: 46904 - protein, 386 aa, Arabidopsis thaliana
  peptide (1)..(386): Ceres Seq. ID no. 13646917
MDKASITEGKPIRCKAAILRKAGEPLVIEEIQVDPPQAYEVRIKILCTSLCHTDVTFWKLDSGPLARFPRILGHEAVGVVESIGEKVDGFKQGDVVLPVFHPQCEECKECKSPKSNWCTRYTNDYLSNTRRYGMTSRFKDSLGEDIHHFIFVSSFTEYTVVDIAHLVKISPEIPVDIAALLSCSVATGIGAAWKVADVEEGSTVVIFGLGAVGLAVAEGVRLRGAAKIIGVDSNPAKFEIGKRFGITDFVNPALCGEKKISEVIREMTDVGADYSFECIGLASLMEEAFKSTRPGSGKTIVLGMEQKALPISLGSYDLLRGRTVCGTLFGGLKPKLDIPILVDRYLKKELNLEDLITHELSFEEINKAFHLLAEGNSIRCIIWMDK

SEQ ID NO: 46905 - protein, 253 aa, Arabidopsis thaliana
  peptide (1)..(253): Ceres Seq. ID no. 13646918
MTSRFKDSLGEDIHHFIFVSSFTEYTVVDIAHLVKISPEIPVDIAALLSCSVATGIGAAWKVADVEEGSTVVIFGLGAVGLAVAEGVRLRGAAKIIGVDSNPAKFEIGKRFGITDFVNPALCGEKKISEVIREMTDVGADYSFECIGLASLMEEAFKSTRPGSGKTIVLGMEQKALPISLGSYDLLRGRTVCGTLFGGLKPKLDIPILVDRYLKKELNLEDLITHELSFEEINKAFHLLAEGNSIRCIIWMDK

SEQ ID NO: 46906 - DNA, 2061 bp, Arabidopsis thaliana
  misc_feature (1)..(2061): Ceres Seq. ID no. 12600798
  misc_feature (1)..(2061): Ortholog of  Ceres SEQ ID NO 13598807 as cited in SEQ ID NO 0
  misc_feature (1)..(2061): Ortholog of  Ceres SEQ ID NO 15180149 as cited in SEQ ID NO 0
aacaccgtgttgttcttgtttcctttttttctgtttcgctttatgaacttcggagagaagacgaaatctcgctcgctttcgccgccgtgatatttgattctccgatcactacaacgattccgatctgtcctccgttgatttcgatcctgattttgatattgtttcgacatgaaattggtgtgatctcgtttcgagtttcgtggcgtatttgcttattttaagtgtgtggaatcgatttttaatgggggataattctggtagaagtagaaactctatgatggcaactgtttcttctgggaaagagttgttacctaaaagaagcttagtagctgctattccaagagctgttcagcagacaatctctaagcatgtttcttttgggagtaatggtagatttggaagtggaaccgctcgtaatgcagctgtgtttctgcttaaaatcgctgttttagaagttgttcgaagggtttcaaaggctaaatgtcctcatttgtggaatagtcttcaggcgttgcaatgtctttgttatcctcctcttaagtggattcaaagatgggctcctttcaaggagttgatcaatgcaatgcagatgttgtctcggccattgttggtcatcacgatagctgaggctctgacagaccagtcagagttaaagcaagaagcctcaggtggtaccaattctcatgcatcttcagaatcagaatcacaatctgactcgcagactttacagtctccatcagatataagaattgaagatgaggctccacttcctgtaatttcacaagactggcttagaaaactctatgaagaactggaaaagcagagacttagcttaccagagagactcaatgaagacgagcttcatagattctacagggtgtcaaatggagacttcacatccttactatcttcgataaaaaagacaattcattggagggagacttacagaattctttctgaagaagaacttgagacatggtcaagtttactcttttggcatggatatgataagaaccaacgaccttgcctcattgttcgtttggggctagcttttctaaagttgccatctcatgagagacctcgtttcgctcaggcaatcatatctcaggtagagcacggcgttttgcatcttctgacccctgagaattcagaacttacagtgttagtcgattgtgaaggattatctcctctgaggattcccatgcagatgatgagatcttgttcttccattcttcaagatcacttccctaaccgtcttggctgcctattcatcattcgcctccctcctgttgtccgtgtcatttcccagactttcatccaaattcttagaccaaccacacgcaagaagctgagaattgaaggggaaactttccatcgagtcctctctgaatacctccagacacttccttcataccttggtagcaactgcaactgcaaaagatgctcaaatctcaacgaacaagatccaccacagccacaaacacacccaagaagaaagagaagaagctcgagtgaaacagagaagctagacgacagccactggagttacaatgcccagacacctgatttatcctatgaagacgagccgagcctgaacatatgcagccaagttctgcgaacagcagtcgtgttcttactcatgatatggctcttcggtgcactactagctggatttgctgatcctgagagcagacccttttaagcttccataaggtaagaaccatccataattaatttcaggcacatgcgtatgtcttctgtatacatagtaatagtaagtgtgataggcgttgatatatacatagtcattagtgaataaaccccatctctcatccagcgtggtcattgcaaacgcggactcaacgtagttttgggtcttggtttagggttaatggttgttgcggttgagtacatttgtacgttgggagaaagtaattatggtccagttaaatcgtgatgagactttggtcaccctctgcagtaaaactctgtgtacaattgttgccattgttggtaatgttttgtaaaaatcagatttatttaatgtgattagaaattgag

SEQ ID NO: 46907 - protein, 486 aa, Arabidopsis thaliana
  peptide (1)..(486): Ceres Seq. ID no. 12600799
MGDNSGRSRNSMMATVSSGKELLPKRSLVAAIPRAVQQTISKHVSFGSNGRFGSGTARNAAVFLLKIAVLEVVRRVSKAKCPHLWNSLQALQCLCYPPLKWIQRWAPFKELINAMQMLSRPLLVITIAEALTDQSELKQEASGGTNSHASSESESQSDSQTLQSPSDIRIEDEAPLPVISQDWLRKLYEELEKQRLSLPERLNEDELHRFYRVSNGDFTSLLSSIKKTIHWRETYRILSEEELETWSSLLFWHGYDKNQRPCLIVRLGLAFLKLPSHERPRFAQAIISQVEHGVLHLLTPENSELTVLVDCEGLSPLRIPMQMMRSCSSILQDHFPNRLGCLFIIRLPPVVRVISQTFIQILRPTTRKKLRIEGETFHRVLSEYLQTLPSYLGSNCNCKRCSNLNEQDPPQPQTHPRRKRRSSSETEKLDDSHWSYNAQTPDLSYEDEPSLNICSQVLRTAVVFLLMIWLFGALLAGFADPESRPF

SEQ ID NO: 46908 - protein, 475 aa, Arabidopsis thaliana
  peptide (1)..(475): Ceres Seq. ID no. 12600800
MMATVSSGKELLPKRSLVAAIPRAVQQTISKHVSFGSNGRFGSGTARNAAVFLLKIAVLEVVRRVSKAKCPHLWNSLQALQCLCYPPLKWIQRWAPFKELINAMQMLSRPLLVITIAEALTDQSELKQEASGGTNSHASSESESQSDSQTLQSPSDIRIEDEAPLPVISQDWLRKLYEELEKQRLSLPERLNEDELHRFYRVSNGDFTSLLSSIKKTIHWRETYRILSEEELETWSSLLFWHGYDKNQRPCLIVRLGLAFLKLPSHERPRFAQAIISQVEHGVLHLLTPENSELTVLVDCEGLSPLRIPMQMMRSCSSILQDHFPNRLGCLFIIRLPPVVRVISQTFIQILRPTTRKKLRIEGETFHRVLSEYLQTLPSYLGSNCNCKRCSNLNEQDPPQPQTHPRRKRRSSSETEKLDDSHWSYNAQTPDLSYEDEPSLNICSQVLRTAVVFLLMIWLFGALLAGFADPESRPF

SEQ ID NO: 46909 - protein, 474 aa, Arabidopsis thaliana
  peptide (1)..(474): Ceres Seq. ID no. 12600801
MATVSSGKELLPKRSLVAAIPRAVQQTISKHVSFGSNGRFGSGTARNAAVFLLKIAVLEVVRRVSKAKCPHLWNSLQALQCLCYPPLKWIQRWAPFKELINAMQMLSRPLLVITIAEALTDQSELKQEASGGTNSHASSESESQSDSQTLQSPSDIRIEDEAPLPVISQDWLRKLYEELEKQRLSLPERLNEDELHRFYRVSNGDFTSLLSSIKKTIHWRETYRILSEEELETWSSLLFWHGYDKNQRPCLIVRLGLAFLKLPSHERPRFAQAIISQVEHGVLHLLTPENSELTVLVDCEGLSPLRIPMQMMRSCSSILQDHFPNRLGCLFIIRLPPVVRVISQTFIQILRPTTRKKLRIEGETFHRVLSEYLQTLPSYLGSNCNCKRCSNLNEQDPPQPQTHPRRKRRSSSETEKLDDSHWSYNAQTPDLSYEDEPSLNICSQVLRTAVVFLLMIWLFGALLAGFADPESRPF

SEQ ID NO: 46910 - DNA, 1443 bp, Arabidopsis thaliana; identical to SEQ ID NO: 23501
  misc_feature (1)..(1443): Ceres Seq. ID no. 12601407
  misc_feature (1)..(1443): Ortholog of  Ceres SEQ ID NO 14314559 as cited in SEQ ID NO 52317
  misc_feature (1)..(1443): Ortholog of  Ceres SEQ ID NO 15174571 as cited in SEQ ID NO 53570
  misc_feature (1)..(1443): Ortholog of  Ceres SEQ ID NO 14314367 as cited in SEQ ID NO 57446

SEQ ID NO: 46911 - protein, 393 aa, Arabidopsis thaliana; identical to SEQ ID NO: 23502
  peptide (1)..(393): Ceres Seq. ID no. 12601408

SEQ ID NO: 46912 - protein, 344 aa, Arabidopsis thaliana; identical to SEQ ID NO: 23503
  peptide (1)..(344): Ceres Seq. ID no. 12601409

SEQ ID NO: 46913 - protein, 342 aa, Arabidopsis thaliana; identical to SEQ ID NO: 23504
  peptide (1)..(342): Ceres Seq. ID no. 12601410

SEQ ID NO: 46914 - DNA, 1289 bp, Arabidopsis thaliana
  misc_feature (1)..(1289): Ceres Seq. ID no. 12575606
  misc_feature (1)..(1289): Ortholog of  Ceres SEQ ID NO 15171508 as cited in SEQ ID NO 58526
  misc_feature (1)..(1289): Ortholog of  Ceres SEQ ID NO 13654989 as cited in SEQ ID NO 63117
  misc_feature (1)..(1289): Ortholog of  Ceres SEQ ID NO 13584744 as cited in SEQ ID NO 69137
gggctttgtaatggtctacaaaggataagaaaaaaccaaatccaaactaaagctatgcattttccacttgtttcggcttggaacaagataaggagaagcaaatcatatgatacggatccatgggtctacagaacagcagaatgctggcaaatcgaagatcaggcttctcagccaaggaagcgaagattcgggtcatcagtttataccctcaaggagatggaggaggccacaagttctttcagtgatgagaatctcctcggtaaaggaggctttggccgagtttaccaaggcactttaaaaacaggagaggttgttgcaatcaagaagatggatttacctacgtttaaaaaggctgacggagaaagagaatttcgtgtggaggtggatatcttgagcagactcgaccacccaaatctggtctctttgatcggctattgtgcagatgggaaacaccggttcctagtatatgaatatatgcaaaatggaaacctgcaagatcatttgaatgcaaaaataagctggccaataaggctcagaattgcactaggagcagcaaaaggactcgcgtatctccattcaagttcttctgttgggattccaattgttcacagagacttcaaatccaccaacgttctactagactccaattataatgcaaagatatccgactttggactagcaaagttgatgccagaaggaaaggatacttgtgtcacagcaagagttctaggaacattcggctatttcgacccagaatatacatcgacaggtaaacttactctacaaagcgacatttatgcatttggggttgtgctgctagaactacttactggacgcagagcagttgacttaactcagggcccaaatgaacagaacctggtgctacaggttaggaatatactgaatgatagaaagaaattgcgtaaggttatagatgtcgagctgcctcggaattcatacagcatggaagctataaccatgtttgctgatctagcatcacggtgcatccgtatagagagtaaagagcgaccttcagtgatggattgtgttaaggaactgcaactaattatctacacaaactcgaagggtggtttgggtgggacgattcctacattcagaaggctctagacactgaattcttcgaaacaagtaaaatggattactgtcatttttcctaaaatgagaggtcactgataaaaaaacccttgataaatataaacaaacaatactaattatgaattaccggataatttcaattcaacttccagctaggaaactttgatcaagcg

SEQ ID NO: 46915 - protein, 375 aa, Arabidopsis thaliana
  peptide (1)..(375): Ceres Seq. ID no. 12575607
GLCNGLQRIRKNQIQTKAMHFPLVSAWNKIRRSKSYDTDPWVYRTAECWQIEDQASQPRKRRFGSSVYTLKEMEEATSSFSDENLLGKGGFGRVYQGTLKTGEVVAIKKMDLPTFKKADGEREFRVEVDILSRLDHPNLVSLIGYCADGKHRFLVYEYMQNGNLQDHLNAKISWPIRLRIALGAAKGLAYLHSSSSVGIPIVHRDFKSTNVLLDSNYNAKISDFGLAKLMPEGKDTCVTARVLGTFGYFDPEYTSTGKLTLQSDIYAFGVVLLELLTGRRAVDLTQGPNEQNLVLQVRNILNDRKKLRKVIDVELPRNSYSMEAITMFADLASRCIRIESKERPSVMDCVKELQLIIYTNSKGGLGGTIPTFRRL

SEQ ID NO: 46916 - protein, 357 aa, Arabidopsis thaliana
  peptide (1)..(357): Ceres Seq. ID no. 12575608
MHFPLVSAWNKIRRSKSYDTDPWVYRTAECWQIEDQASQPRKRRFGSSVYTLKEMEEATSSFSDENLLGKGGFGRVYQGTLKTGEVVAIKKMDLPTFKKADGEREFRVEVDILSRLDHPNLVSLIGYCADGKHRFLVYEYMQNGNLQDHLNAKISWPIRLRIALGAAKGLAYLHSSSSVGIPIVHRDFKSTNVLLDSNYNAKISDFGLAKLMPEGKDTCVTARVLGTFGYFDPEYTSTGKLTLQSDIYAFGVVLLELLTGRRAVDLTQGPNEQNLVLQVRNILNDRKKLRKVIDVELPRNSYSMEAITMFADLASRCIRIESKERPSVMDCVKELQLIIYTNSKGGLGGTIPTFRRL

SEQ ID NO: 46917 - protein, 303 aa, Arabidopsis thaliana
  peptide (1)..(303): Ceres Seq. ID no. 12575609
MEEATSSFSDENLLGKGGFGRVYQGTLKTGEVVAIKKMDLPTFKKADGEREFRVEVDILSRLDHPNLVSLIGYCADGKHRFLVYEYMQNGNLQDHLNAKISWPIRLRIALGAAKGLAYLHSSSSVGIPIVHRDFKSTNVLLDSNYNAKISDFGLAKLMPEGKDTCVTARVLGTFGYFDPEYTSTGKLTLQSDIYAFGVVLLELLTGRRAVDLTQGPNEQNLVLQVRNILNDRKKLRKVIDVELPRNSYSMEAITMFADLASRCIRIESKERPSVMDCVKELQLIIYTNSKGGLGGTIPTFRRL

SEQ ID NO: 46918 - DNA, 1246 bp, Arabidopsis thaliana; identical to SEQ ID NO: 26472
  misc_feature (1)..(1246): Ceres Seq. ID no. 13591822
  misc_feature (1)..(1246): Ortholog of  Ceres SEQ ID NO 12614942 as cited in SEQ ID NO 68635

SEQ ID NO: 46919 - protein, 169 aa, Arabidopsis thaliana; identical to SEQ ID NO: 26473
  peptide (1)..(169): Ceres Seq. ID no. 13591823

SEQ ID NO: 46920 - protein, 100 aa, Arabidopsis thaliana; identical to SEQ ID NO: 26474
  peptide (1)..(100): Ceres Seq. ID no. 13591824

SEQ ID NO: 46921 - protein, 95 aa, Arabidopsis thaliana; identical to SEQ ID NO: 26475
  peptide (1)..(95): Ceres Seq. ID no. 13591825

SEQ ID NO: 46922 - DNA, 1158 bp, Arabidopsis thaliana
  misc_feature (1)..(1158): Ceres Seq. ID no. 13647028
  misc_feature (1)..(1158): Ortholog of  Ceres SEQ ID NO 12635907 as cited in SEQ ID NO 525
  misc_feature (1)..(1158): Ortholog of  Ceres SEQ ID NO 13503463 as cited in SEQ ID NO 65057
gaaagaaactcattctgatttttaatctctgacgagcaaagaaccctatagctaaaagactaaaccaatggcgattatctctgagatggaggaggcgagaccctcgatggtgcctttcaccgcaagttttgatccttcaaacccattagcgtttctggagaaagttcttgacgttatcgggaaagagagcaattttctgaagaaagacacggctgagaaggagatcatgattgctgttatggctgcgaagcagaggttgagggaagcggagaagaagaagttggagaaggagagtgttaagtccatggaggttgagaagccaaagaaagatagcttgaagcccacggaggtggagaagccgaaggaggagagcttgatggcgactgatcccatggagattgagaagcctaaagaggagaaagaatcgggtcccatcgttcctaacaaaggcaatgggcttgattttgagaaatactcaagggggacagaatctccaagaggtcacaattaacattccagtgccggaaggcactaaatcaaggtctgttacctgtgaaatcaagaagaaccgtctcaaagttggtctgaaagggcaagagctaatcatcgatggagaattcttcaattctgtcaagcctgacgactgcttctggaatatcgaggatcaaaagatgatatcggtgcttttgacaaagcaagaccagatggagtggtggaagtattgtgtgaagggagaacctgagatagacactcagaaagttgaaccagagaccagcaaacttggtgatctcgaccctgaaactcgcgcatccgttgagaagatgatgtttgatcaaaggcagaagcagatgggactaccaacgagtgatgagatagagaagaaagatatgctcaagaagttcatggctcagaatcctgggatggacttctctaatgcaaagtttaactgatgatctttactcaactcttcttcgtttaagccagttttgtgttccaatataatcttgttatgtcttcaagattacaatcctgcccttttggtttacttcaagacagttgttgattcgttaaatacctacttccttaagaaaacttcatctgtttttttgcttattgaagtgttcatgagtcatgactatgaatatagtttcgttttct

SEQ ID NO: 46923 - protein, 165 aa, Arabidopsis thaliana
  peptide (1)..(165): Ceres Seq. ID no. 13647029
MGLILRNTQGGQNLQEVTINIPVPEGTKSRSVTCEIKKNRLKVGLKGQELIIDGEFFNSVKPDDCFWNIEDQKMISVLLTKQDQMEWWKYCVKGEPEIDTQKVEPETSKLGDLDPETRASVEKMMFDQRQKQMGLPTSDEIEKKDMLKKFMAQNPGMDFSNAKFN

SEQ ID NO: 46924 - protein, 147 aa, Arabidopsis thaliana
  peptide (1)..(147): Ceres Seq. ID no. 13647030
MAIISEMEEARPSMVPFTASFDPSNPLAFLEKVLDVIGKESNFLKKDTAEKEIMIAVMAAKQRLREAEKKKLEKESVKSMEVEKPKKDSLKPTEVEKPKEESLMATDPMEIEKPKEEKESGPIVPNKGNGLDFEKYSRGTESPRGHN

SEQ ID NO: 46925 - protein, 141 aa, Arabidopsis thaliana
  peptide (1)..(141): Ceres Seq. ID no. 13647031
MEEARPSMVPFTASFDPSNPLAFLEKVLDVIGKESNFLKKDTAEKEIMIAVMAAKQRLREAEKKKLEKESVKSMEVEKPKKDSLKPTEVEKPKEESLMATDPMEIEKPKEEKESGPIVPNKGNGLDFEKYSRGTESPRGHN

SEQ ID NO: 46926 - DNA, 1525 bp, Arabidopsis thaliana; identical to SEQ ID NO: 42915
  misc_feature (1)..(1525): Ceres Seq. ID no. 12601754
  misc_feature (1)..(1525): Ortholog of  Ceres SEQ ID NO 14308099 as cited in SEQ ID NO 58651
  misc_feature (1)..(1525): Ortholog of  Ceres SEQ ID NO 13596893 as cited in SEQ ID NO 62932

SEQ ID NO: 46927 - protein, 423 aa, Arabidopsis thaliana; identical to SEQ ID NO: 23456
  peptide (1)..(423): Ceres Seq. ID no. 12601755

SEQ ID NO: 46928 - protein, 363 aa, Arabidopsis thaliana; identical to SEQ ID NO: 23457
  peptide (1)..(363): Ceres Seq. ID no. 12601756

SEQ ID NO: 46929 - protein, 329 aa, Arabidopsis thaliana; identical to SEQ ID NO: 23458
  peptide (1)..(329): Ceres Seq. ID no. 12601757

SEQ ID NO: 46930 - DNA, 1606 bp, Arabidopsis thaliana
  misc_feature (1)..(1606): Ceres Seq. ID no. 13592120
  misc_feature (1)..(1606): Ortholog of  Ceres SEQ ID NO 12460981 as cited in SEQ ID NO 65146
tgtttcttcaatatctctttctctccaacaaaatcaaaatcaagaaaacaaaaaagaaaaactctcaagaaacaatggatgcttcattgtctccattcgatcaccaaaaaactcaaaacacagagccaaagaaaagcttcattacctcactaatcactctccgttcaaacaacatcaaagaagacacatacttcgtctcagaactcaaacccacggagcaaaaatcacttcaagaactcaaagaaaagctctcagcttcatcctccaaagcttcttcaatgtggggagtctcactcctcggtggagacgacaaagctgacgtaatcctcctcaagttcctcagagcaagagatttcaaagtagcagactctttgagaatgcttgagaagtgtttggagtggagagaagagttcaaagcagagaaattgacagaagaagatctgggttttaaagatttggaaggtaaagttgcttacatgagaggctacgacaaagaaggacacccagtttgttacaatgcttatggtgtgtttaaagagaaagagatgtatgagagagtgtttggtgatgaagagaagcttaacaagtttctgagatggagagttcaggttttggagagaggtgttaaaatgcttcattttaaacctggtggtgttaattccattattcaagttacagatcttaaagatatgcctaagagagagcttagagttgcttctaatcagatcctctctctttttcaagataattaccctgaattggttgctactaagatattcataaacgtgccttggtacttcagtgtgatctactcaatgttcagcccattcctgactcagagaacaaagagcaagtttgtgatgtccaaagaaggcaatgcagcagaaacactctacaagttcattaggccagaagatattccggtgcaatacggtggtcttagccgtcctactgattcgcaaaacggaccgccaaaaccggcgtctgaattctccatcaagggtggtgagaaagttaacattcagattgaaggcattgagggtggagcaaccataacatgggatatagtagttggaggatgggatttagagtacagtgcagagtttgttccaaacgctgaagagagttacgcgatcgttgtcgagaaaccgaagaagatgaaagctacagatgaagctgtttgcaactctttcactacagtagaagctgggaagctcattctctctgttgacaatactctctctcgcaagaagaaagttgctgcttaccgttacactgtccggaaatctactacaaccgtctaatctataaccggtttttcagaagattggttgctttcttactactactttttgtgggtgtgttgaggggttttctttcttgggtttgagtactaggtttgttttgcttactcaacggttcatgttgaaccggaaatatcgataaatttgcgaggaaatcatatgtataaaaactatgatttgtatgacatttgatgtttggccttaatattttaactagagattgaagttttagtctgcaaagtgtaagcttatgtactctcttgtaccatgtttagctattgaagaccagtggtccattgctt

SEQ ID NO: 46931 - protein, 433 aa, Arabidopsis thaliana
  peptide (1)..(433): Ceres Seq. ID no. 13592121
FLQYLFLSNKIKIKKTKKKNSQETMDASLSPFDHQKTQNTEPKKSFITSLITLRSNNIKEDTYFVSELKPTEQKSLQELKEKLSASSSKASSMWGVSLLGGDDKADVILLKFLRARDFKVADSLRMLEKCLEWREEFKAEKLTEEDLGFKDLEGKVAYMRGYDKEGHPVCYNAYGVFKEKEMYERVFGDEEKLNKFLRWRVQVLERGVKMLHFKPGGVNSIIQVTDLKDMPKRELRVASNQILSLFQDNYPELVATKIFINVPWYFSVIYSMFSPFLTQRTKSKFVMSKEGNAAETLYKFIRPEDIPVQYGGLSRPTDSQNGPPKPASEFSIKGGEKVNIQIEGIEGGATITWDIVVGGWDLEYSAEFVPNAEESYAIVVEKPKKMKATDEAVCNSFTTVEAGKLILSVDNTLSRKKKVAAYRYTVRKSTTTV

SEQ ID NO: 46932 - protein, 409 aa, Arabidopsis thaliana
  peptide (1)..(409): Ceres Seq. ID no. 13592122
MDASLSPFDHQKTQNTEPKKSFITSLITLRSNNIKEDTYFVSELKPTEQKSLQELKEKLSASSSKASSMWGVSLLGGDDKADVILLKFLRARDFKVADSLRMLEKCLEWREEFKAEKLTEEDLGFKDLEGKVAYMRGYDKEGHPVCYNAYGVFKEKEMYERVFGDEEKLNKFLRWRVQVLERGVKMLHFKPGGVNSIIQVTDLKDMPKRELRVASNQILSLFQDNYPELVATKIFINVPWYFSVIYSMFSPFLTQRTKSKFVMSKEGNAAETLYKFIRPEDIPVQYGGLSRPTDSQNGPPKPASEFSIKGGEKVNIQIEGIEGGATITWDIVVGGWDLEYSAEFVPNAEESYAIVVEKPKKMKATDEAVCNSFTTVEAGKLILSVDNTLSRKKKVAAYRYTVRKSTTTV

SEQ ID NO: 46933 - protein, 341 aa, Arabidopsis thaliana
  peptide (1)..(341): Ceres Seq. ID no. 13592123
MWGVSLLGGDDKADVILLKFLRARDFKVADSLRMLEKCLEWREEFKAEKLTEEDLGFKDLEGKVAYMRGYDKEGHPVCYNAYGVFKEKEMYERVFGDEEKLNKFLRWRVQVLERGVKMLHFKPGGVNSIIQVTDLKDMPKRELRVASNQILSLFQDNYPELVATKIFINVPWYFSVIYSMFSPFLTQRTKSKFVMSKEGNAAETLYKFIRPEDIPVQYGGLSRPTDSQNGPPKPASEFSIKGGEKVNIQIEGIEGGATITWDIVVGGWDLEYSAEFVPNAEESYAIVVEKPKKMKATDEAVCNSFTTVEAGKLILSVDNTLSRKKKVAAYRYTVRKSTTTV

SEQ ID NO: 46934 - DNA, 1021 bp, Arabidopsis thaliana
  misc_feature (1)..(1021): Ceres Seq. ID no. 12574941
  misc_feature (1)..(1021): Ortholog of  Ceres SEQ ID NO 14315862 as cited in SEQ ID NO 60207
gagagagcaagccattgcaggaaatggcgattccagtgacgagaatgatggttcctcacgcaataccatcgcttcgtctctcacatccaaaccctagtcgcgttgacttcctctgtcgctgtgctccatcagaaatccaaccacttcggcctgaactctctttatctgtcggaattcacgcaatccctcatccagataaggtagagaaaggtggtgaagatgctttctttgtaagtagttatagaggtggagtcatggctgttgcagatggtgtctccggttgggctgaacaagatgttgatccttccttgttctctaaagaacttatggctaacgcttctcgtttagttgatgaccaagaggtcagatatgatcctggttttctcattgacaaagctcataccgcaactacttctagaggttctgccacaattattctagctatgcttgaggaagtgggtattctcaaaataggcaatgttggtgactgtggacttaagcttcttcgggaaggtcagattatttttgccactgctccacaagagcactattttgactgtccttaccaactaagctctgaggggtctgctcaaacttatctagatgcatcgtttagcatagtggaagtacagaagggagacgtgatcgtgatgggttcagacggacttttcgataatgtgtttgatcatgagatcgtttctatagtgaccaagcatacagatgttgcagagtcatcaaggttattagctgaagtggcgagtagccattcaagagatacagagtttgagtctccatatgcattagaagcaagagccaaggggtttgatgttcctctctggaagaaggtactaggaaagaagcttacaggagggaagcttgatgatgtcactgtgatcgttgccaaagttgttagctcatgaatcactctgttcatgataagatcttctctttattctttttgtacaagtccttgtaagaaacttgttcttcacagaaattgataaatggtatttcaaagttc

SEQ ID NO: 46935 - protein, 305 aa, Arabidopsis thaliana
  peptide (1)..(305): Ceres Seq. ID no. 12574942
ESKPLQEMAIPVTRMMVPHAIPSLRLSHPNPSRVDFLCRCAPSEIQPLRPELSLSVGIHAIPHPDKVEKGGEDAFFVSSYRGGVMAVADGVSGWAEQDVDPSLFSKELMANASRLVDDQEVRYDPGFLIDKAHTATTSRGSATIILAMLEEVGILKIGNVGDCGLKLLREGQIIFATAPQEHYFDCPYQLSSEGSAQTYLDASFSIVEVQKGDVIVMGSDGLFDNVFDHEIVSIVTKHTDVAESSRLLAEVASSHSRDTEFESPYALEARAKGFDVPLWKKVLGKKLTGGKLDDVTVIVAKVVSS

SEQ ID NO: 46936 - protein, 298 aa, Arabidopsis thaliana
  peptide (1)..(298): Ceres Seq. ID no. 12574943
MAIPVTRMMVPHAIPSLRLSHPNPSRVDFLCRCAPSEIQPLRPELSLSVGIHAIPHPDKVEKGGEDAFFVSSYRGGVMAVADGVSGWAEQDVDPSLFSKELMANASRLVDDQEVRYDPGFLIDKAHTATTSRGSATIILAMLEEVGILKIGNVGDCGLKLLREGQIIFATAPQEHYFDCPYQLSSEGSAQTYLDASFSIVEVQKGDVIVMGSDGLFDNVFDHEIVSIVTKHTDVAESSRLLAEVASSHSRDTEFESPYALEARAKGFDVPLWKKVLGKKLTGGKLDDVTVIVAKVVSS

SEQ ID NO: 46937 - protein, 291 aa, Arabidopsis thaliana
  peptide (1)..(291): Ceres Seq. ID no. 12574944
MMVPHAIPSLRLSHPNPSRVDFLCRCAPSEIQPLRPELSLSVGIHAIPHPDKVEKGGEDAFFVSSYRGGVMAVADGVSGWAEQDVDPSLFSKELMANASRLVDDQEVRYDPGFLIDKAHTATTSRGSATIILAMLEEVGILKIGNVGDCGLKLLREGQIIFATAPQEHYFDCPYQLSSEGSAQTYLDASFSIVEVQKGDVIVMGSDGLFDNVFDHEIVSIVTKHTDVAESSRLLAEVASSHSRDTEFESPYALEARAKGFDVPLWKKVLGKKLTGGKLDDVTVIVAKVVSS

SEQ ID NO: 46938 - DNA, 2714 bp, Arabidopsis thaliana; identical to SEQ ID NO: 44952
  misc_feature (1)..(2714): Ceres Seq. ID no. 12600111
  misc_feature (1)..(2714): Ortholog of  Ceres SEQ ID NO 14310206 as cited in SEQ ID NO 20650

SEQ ID NO: 46939 - protein, 773 aa, Arabidopsis thaliana; identical to SEQ ID NO: 44953
  peptide (1)..(773): Ceres Seq. ID no. 12600112

SEQ ID NO: 46940 - protein, 705 aa, Arabidopsis thaliana; identical to SEQ ID NO: 44954
  peptide (1)..(705): Ceres Seq. ID no. 12600113

SEQ ID NO: 46941 - protein, 695 aa, Arabidopsis thaliana; identical to SEQ ID NO: 44955
  peptide (1)..(695): Ceres Seq. ID no. 12600114

SEQ ID NO: 46942 - DNA, 1934 bp, Arabidopsis thaliana
  misc_feature (1)..(1934): Ceres Seq. ID no. 12600878
  misc_feature (1)..(1934): Ortholog of  Ceres SEQ ID NO 14310841 as cited in SEQ ID NO 53666
  misc_feature (1)..(1934): Ortholog of  Ceres SEQ ID NO 15178736 as cited in SEQ ID NO 56439
  misc_feature (1)..(1934): Ortholog of  Ceres SEQ ID NO 14308493 as cited in SEQ ID NO 60320
tctctctctctctctgctccatttctctcactttcttcacatctctgaagctcttcgtcacgcatctacaatggcatcgatgatgcaaccgcagatcatactgctgaaggaagggacggacacatctcagggcaaagcgcaactagtaagcaacatcaacgcttgcactgctgttggagatgtagttcgaaccacgctcgggccacgagggatggacaaactcattcacgacgataaaggatccgtcaccatttctaacgatggtgctaccatcatgaagctcctcgacattgttcatcctgctgctaagatcctcgtcgatatcgccaaatcccaagactccgaggtgggtgatgggacaactacagtggttcttcttgcagcagagtttttgaaggaagcgaagccatttattgaggatggtgttcacgctcagaatctaattaggagttaccgcactgcaagcactttggcaattgccaaggttaaagaactcgctgttagcattgaggggaagagtgtagaggaaaagaaaggtttattggctaaatgtgctgctacgactctctcatctaagcttatcggtggagaaaaggagttttttgctacaatggttgttgatgctgttatggccattgggaatgacgacaggctaaatctgattgggatcaagaaggttcctggtggcaatatgcgagactctttcctcgttgatggtgtagctttcaaaaaaacattctcgtatgctggttttgagcaacagccaaagaaatttcttaaccccaaaattctcttgcttaacatcgaattggagttgaaatctgagaaggaaaacgctgaaattaggctgtcagatccatcacagtaccagtcaatagttgatgcagaatggaatatcatttatgacaaactagacaaatgtgttgagagtggagcaaaagttgttctttctcgattggctattggtgatctagctactcagtattttgccgatcgtgatattttctgtgctggtcgtgttgctgaggaagatcttaaccgtgtggctgctgcagctggaggaacagttcagacaagtgttaacaacataatagatgaggttcttggaacttgtgagatttttgaggaaaaacaagttggtggggagagatttaatatattcagtggttgcccttcaggacgaacagcaactattgttctccgtggtggagctgatcagttcatcgaagaagctgagcggagtttacatgatgcgattatgattgtgagaagagctgtgaagaactcaactgttgttcctggaggtggagctatagatatggagataagcaagtacctgaggcagcattcaagaacaattgctgggaagtcacagcttttcatcaactcttatgcgaaggctctagaggttattccacgacagttatgtgataatgctggatttgatgcaactgacgtcttgaataaacttagacaaaaacacgccatgcaaagcggtgaaggagcttcgtatggagtggacattaacactggtggcatagcagattcttttgctaacttcgtttgggaaccagcagttgtgaagatcaacgcaataaatgctgcgactgaagcggcttgcctcattcttagtgtcgacgaaaccgtgaagaaccctaaatctgagagcgcacagggagacgccgcaggtgcaatggggagaggacgcggtggaggtcgtggccgtggaatgcgaaggcgataagctccgtctctaatgccaaacttgtgggattcttcttcttcttctctaatttcgattttgttgaatttttgttttgaagttaaaaaacctattattgggtttgtgtttgttcaattagaatactggttgggtatgtatgtctatacaatctgtgaaacataagttttagtgttgttttggttaaggagtt

SEQ ID NO: 46943 - protein, 580 aa, Arabidopsis thaliana
  peptide (1)..(580): Ceres Seq. ID no. 12600879
LSLSLLHFSHFLHISEALRHASTMASMMQPQIILLKEGTDTSQGKAQLVSNINACTAVGDVVRTTLGPRGMDKLIHDDKGSVTISNDGATIMKLLDIVHPAAKILVDIAKSQDSEVGDGTTTVVLLAAEFLKEAKPFIEDGVHAQNLIRSYRTASTLAIAKVKELAVSIEGKSVEEKKGLLAKCAATTLSSKLIGGEKEFFATMVVDAVMAIGNDDRLNLIGIKKVPGGNMRDSFLVDGVAFKKTFSYAGFEQQPKKFLNPKILLLNIELELKSEKENAEIRLSDPSQYQSIVDAEWNIIYDKLDKCVESGAKVVLSRLAIGDLATQYFADRDIFCAGRVAEEDLNRVAAAAGGTVQTSVNNIIDEVLGTCEIFEEKQVGGERFNIFSGCPSGRTATIVLRGGADQFIEEAERSLHDAIMIVRRAVKNSTVVPGGGAIDMEISKYLRQHSRTIAGKSQLFINSYAKALEVIPRQLCDNAGFDATDVLNKLRQKHAMQSGEGASYGVDINTGGIADSFANFVWEPAVVKINAINAATEAACLILSVDETVKNPKSESAQGDAAGAMGRGRGGGRGRGMRRR

SEQ ID NO: 46944 - protein, 557 aa, Arabidopsis thaliana
  peptide (1)..(557): Ceres Seq. ID no. 12600880
MASMMQPQIILLKEGTDTSQGKAQLVSNINACTAVGDVVRTTLGPRGMDKLIHDDKGSVTISNDGATIMKLLDIVHPAAKILVDIAKSQDSEVGDGTTTVVLLAAEFLKEAKPFIEDGVHAQNLIRSYRTASTLAIAKVKELAVSIEGKSVEEKKGLLAKCAATTLSSKLIGGEKEFFATMVVDAVMAIGNDDRLNLIGIKKVPGGNMRDSFLVDGVAFKKTFSYAGFEQQPKKFLNPKILLLNIELELKSEKENAEIRLSDPSQYQSIVDAEWNIIYDKLDKCVESGAKVVLSRLAIGDLATQYFADRDIFCAGRVAEEDLNRVAAAAGGTVQTSVNNIIDEVLGTCEIFEEKQVGGERFNIFSGCPSGRTATIVLRGGADQFIEEAERSLHDAIMIVRRAVKNSTVVPGGGAIDMEISKYLRQHSRTIAGKSQLFINSYAKALEVIPRQLCDNAGFDATDVLNKLRQKHAMQSGEGASYGVDINTGGIADSFANFVWEPAVVKINAINAATEAACLILSVDETVKNPKSESAQGDAAGAMGRGRGGGRGRGMRRR

SEQ ID NO: 46945 - protein, 554 aa, Arabidopsis thaliana
  peptide (1)..(554): Ceres Seq. ID no. 12600881
MMQPQIILLKEGTDTSQGKAQLVSNINACTAVGDVVRTTLGPRGMDKLIHDDKGSVTISNDGATIMKLLDIVHPAAKILVDIAKSQDSEVGDGTTTVVLLAAEFLKEAKPFIEDGVHAQNLIRSYRTASTLAIAKVKELAVSIEGKSVEEKKGLLAKCAATTLSSKLIGGEKEFFATMVVDAVMAIGNDDRLNLIGIKKVPGGNMRDSFLVDGVAFKKTFSYAGFEQQPKKFLNPKILLLNIELELKSEKENAEIRLSDPSQYQSIVDAEWNIIYDKLDKCVESGAKVVLSRLAIGDLATQYFADRDIFCAGRVAEEDLNRVAAAAGGTVQTSVNNIIDEVLGTCEIFEEKQVGGERFNIFSGCPSGRTATIVLRGGADQFIEEAERSLHDAIMIVRRAVKNSTVVPGGGAIDMEISKYLRQHSRTIAGKSQLFINSYAKALEVIPRQLCDNAGFDATDVLNKLRQKHAMQSGEGASYGVDINTGGIADSFANFVWEPAVVKINAINAATEAACLILSVDETVKNPKSESAQGDAAGAMGRGRGGGRGRGMRRR

SEQ ID NO: 46946 - DNA, 3299 bp, Arabidopsis thaliana
  misc_feature (1)..(3299): Ceres Seq. ID no. 12575618
  misc_feature (1)..(3299): Ortholog of  Ceres SEQ ID NO 13656662 as cited in SEQ ID NO 65594
ataatcgacatgaagctgtccttttcacttgttttcaatgctctcacgttgcttcttcaagtttgcatctttgctcaagccaggttttctaatgagactgatatgcaagctttgcttgagttcaagtctcaagtttctgaaaacaacaagagagaggtcttggcttcatggaatcactcctccccattttgtaattggattggagtcacatgtggccgcaggagagaaagagttataagtttgaaccttggaggattcaagttaaccggtgtgatctcaccctccattggtaatctctcctttcttagattacttaatcttgcagacaactcttttggaagtaccatccctcaaaaggtgggaaggctatttaggcttcagtacttgaacatgagctataatcttctcgaaggaaggattccgtctagtctttctaactgctctagactgtcgaccgttgatttatcgtcaaaccatcttggacatggtgttccttcagaactaggttcactttctaagcttgccattctggatcttagcaaaaacaaccttactggaaattttcctgcatctttaggaaacttgacgtcacttcagaagcttgactttgcatataaccagatgagaggtgagattccagacgaagtagctagattgactcaaatggtgtttttccaaatagcactgaatagtttttcaggtggttttcctcctgcattgtacaacatctcctctcttgagtctctatctctagctgacaatagcttttcgggtaatcttagggctgattttggttatcttctaccaaatctaagaagacttcttttgggaacaaatcagttcactggagctattcccaaaacacttgccaatatctcaagccttgaaaggtttgatatctcatctaattacctgtctggtagtatccctttgagctttggaaagttacgtaatctgtggtggttagggattcgtaataactctcttggaaataactcgtccagtggtcttgaatttattggggctgtggcgaactgcactcaattagagtacttagatgttggttacaatagacttggaggtgagcttcctgcttctatagccaatctgtccactacattgactagtctgttccttggacaaaatcttatctctggaaccattcctcatgacatcgggaatcttgtaagcctgcaagaactcagcttagaaacaaatatgttgagtggagaacttcccgtctctttcgggaagcttttgaacttgcaggttgtggatctgtattcaaatgcaatatcgggggaaataccatcttattttggcaacatgactcggttgcagaagctccatttgaatagcaatagtttccacggaagaatccctcagagtcttggacgttgtcgatacttgctagacctgtggatggatacaaataggttgaatgggactatacctcaggaaatactgcaaattccatccctcgcttacatagatttgtcaaacaatttcttgacaggccattttccagaagaagttggaaagttagaacttcttgttggactaggtgcttcgtacaacaaattatcaggaaagatgccacaagctatagggggttgtctttcgatggaatttctctttatgcaaggaaattcgtttgacggagccattccagatataagccggttggtaagcctaaagaatgttgacttctccaacaacaatctctctggccggatacctcgatatctggccagtcttccttcgctgcgaaatctgaatctttctatgaacaagtttgagggaagggtgccaacaacaggagtgtttcgaaatgctacagcagtttctgtttttggtaacacaaatatttgcggaggcgtccgagaaatgcaactaaagccatgcattgtacaggcatctccaaggaagagaaagcctctgtcagttagaaagaaagttgtcagtggtatttgtataggtatagcttcgcttttgttaatcataattgtggcttctctgtgttggttcatgaagaggaaaaagaaaaacaatgccagtgatggtaacccatctgattctactactttggggatgttccatgagaaggtaagttatgaagagcttcatagtgcaacaagtcgcttctcttcaaccaatttgattggttcaggcaatttcggtaatgtgtttaaaggattgcttggccctgagaataaactcgtcgcggttaaagttttgaacctcctaaagcatggagcgacgaaaagctttatggcggaatgtgaaaccttcaagggtatacgacatcgtaaccttgtaaaactgataacggtttgttcaagccttgattccgagggaaatgatttcagagctctggtctatgagttcatgccaaaaggaagtctggatatgtggctgcagctagaagatctggaaagggtaaacgatcactcgagatctttaacacccgcagagaaactcaacatagcaatagatgtggcttcagctttggagtatctgcacgttcattgtcatgaccctgtagctcactgtgatattaagccaagcaacattcttctagacgatgatctgactgctcatgttagtgactttggtttggctcagctcctctataaatacgatcgagaatcctttctaaaccagtttagttctgctggtgtcagaggcaccattggctatgccgcgccagagtatggaatgggaggccaaccatcaatacaaggagatgtgtacagcttcggaattctacttttggagatgtttagtggaaagaaaccaacagatgaatcatttgcaggcgattataacctccacagctacacaaagtctatattatcgggttgcacgagcagtggaggcagcaacgccattgatgaggggttgagactggttttgcaggtggggataaagtgttctgaagaatatccgagggataggatgagaacggatgaagcagtacgagaattaatctcaataagatctaagttcttcagttccaagacgactattacagagagtcctcgagatgctccgcaaagttctcctcaggaatggatgttaaatacggacatgcatactatgtagacccttctcaactacttatggggacacagtaaaagtgtatttgcgtgtgcatcatcgaaacagaacaaatgttgggaggaggagagactactagttataataagagaataaattaaaatctatctctgctgtagcctttttttttttgttgtgggtgaaaatgattatgatcacatatatatggtcgttgaata

SEQ ID NO: 46947 - protein, 1034 aa, Arabidopsis thaliana
  peptide (1)..(1034): Ceres Seq. ID no. 12575619
IIDMKLSFSLVFNALTLLLQVCIFAQARFSNETDMQALLEFKSQVSENNKREVLASWNHSSPFCNWIGVTCGRRRERVISLNLGGFKLTGVISPSIGNLSFLRLLNLADNSFGSTIPQKVGRLFRLQYLNMSYNLLEGRIPSSLSNCSRLSTVDLSSNHLGHGVPSELGSLSKLAILDLSKNNLTGNFPASLGNLTSLQKLDFAYNQMRGEIPDEVARLTQMVFFQIALNSFSGGFPPALYNISSLESLSLADNSFSGNLRADFGYLLPNLRRLLLGTNQFTGAIPKTLANISSLERFDISSNYLSGSIPLSFGKLRNLWWLGIRNNSLGNNSSSGLEFIGAVANCTQLEYLDVGYNRLGGELPASIANLSTTLTSLFLGQNLISGTIPHDIGNLVSLQELSLETNMLSGELPVSFGKLLNLQVVDLYSNAISGEIPSYFGNMTRLQKLHLNSNSFHGRIPQSLGRCRYLLDLWMDTNRLNGTIPQEILQIPSLAYIDLSNNFLTGHFPEEVGKLELLVGLGASYNKLSGKMPQAIGGCLSMEFLFMQGNSFDGAIPDISRLVSLKNVDFSNNNLSGRIPRYLASLPSLRNLNLSMNKFEGRVPTTGVFRNATAVSVFGNTNICGGVREMQLKPCIVQASPRKRKPLSVRKKVVSGICIGIASLLLIIIVASLCWFMKRKKKNNASDGNPSDSTTLGMFHEKVSYEELHSATSRFSSTNLIGSGNFGNVFKGLLGPENKLVAVKVLNLLKHGATKSFMAECETFKGIRHRNLVKLITVCSSLDSEGNDFRALVYEFMPKGSLDMWLQLEDLERVNDHSRSLTPAEKLNIAIDVASALEYLHVHCHDPVAHCDIKPSNILLDDDLTAHVSDFGLAQLLYKYDRESFLNQFSSAGVRGTIGYAAPEYGMGGQPSIQGDVYSFGILLLEMFSGKKPTDESFAGDYNLHSYTKSILSGCTSSGGSNAIDEGLRLVLQVGIKCSEEYPRDRMRTDEAVRELISIRSKFFSSKTTITESPRDAPQSSPQEWMLNTDMHTM

SEQ ID NO: 46948 - protein, 1031 aa, Arabidopsis thaliana
  peptide (1)..(1031): Ceres Seq. ID no. 12575620
MKLSFSLVFNALTLLLQVCIFAQARFSNETDMQALLEFKSQVSENNKREVLASWNHSSPFCNWIGVTCGRRRERVISLNLGGFKLTGVISPSIGNLSFLRLLNLADNSFGSTIPQKVGRLFRLQYLNMSYNLLEGRIPSSLSNCSRLSTVDLSSNHLGHGVPSELGSLSKLAILDLSKNNLTGNFPASLGNLTSLQKLDFAYNQMRGEIPDEVARLTQMVFFQIALNSFSGGFPPALYNISSLESLSLADNSFSGNLRADFGYLLPNLRRLLLGTNQFTGAIPKTLANISSLERFDISSNYLSGSIPLSFGKLRNLWWLGIRNNSLGNNSSSGLEFIGAVANCTQLEYLDVGYNRLGGELPASIANLSTTLTSLFLGQNLISGTIPHDIGNLVSLQELSLETNMLSGELPVSFGKLLNLQVVDLYSNAISGEIPSYFGNMTRLQKLHLNSNSFHGRIPQSLGRCRYLLDLWMDTNRLNGTIPQEILQIPSLAYIDLSNNFLTGHFPEEVGKLELLVGLGASYNKLSGKMPQAIGGCLSMEFLFMQGNSFDGAIPDISRLVSLKNVDFSNNNLSGRIPRYLASLPSLRNLNLSMNKFEGRVPTTGVFRNATAVSVFGNTNICGGVREMQLKPCIVQASPRKRKPLSVRKKVVSGICIGIASLLLIIIVASLCWFMKRKKKNNASDGNPSDSTTLGMFHEKVSYEELHSATSRFSSTNLIGSGNFGNVFKGLLGPENKLVAVKVLNLLKHGATKSFMAECETFKGIRHRNLVKLITVCSSLDSEGNDFRALVYEFMPKGSLDMWLQLEDLERVNDHSRSLTPAEKLNIAIDVASALEYLHVHCHDPVAHCDIKPSNILLDDDLTAHVSDFGLAQLLYKYDRESFLNQFSSAGVRGTIGYAAPEYGMGGQPSIQGDVYSFGILLLEMFSGKKPTDESFAGDYNLHSYTKSILSGCTSSGGSNAIDEGLRLVLQVGIKCSEEYPRDRMRTDEAVRELISIRSKFFSSKTTITESPRDAPQSSPQEWMLNTDMHTM

SEQ ID NO: 46949 - protein, 1000 aa, Arabidopsis thaliana
  peptide (1)..(1000): Ceres Seq. ID no. 12575621
MQALLEFKSQVSENNKREVLASWNHSSPFCNWIGVTCGRRRERVISLNLGGFKLTGVISPSIGNLSFLRLLNLADNSFGSTIPQKVGRLFRLQYLNMSYNLLEGRIPSSLSNCSRLSTVDLSSNHLGHGVPSELGSLSKLAILDLSKNNLTGNFPASLGNLTSLQKLDFAYNQMRGEIPDEVARLTQMVFFQIALNSFSGGFPPALYNISSLESLSLADNSFSGNLRADFGYLLPNLRRLLLGTNQFTGAIPKTLANISSLERFDISSNYLSGSIPLSFGKLRNLWWLGIRNNSLGNNSSSGLEFIGAVANCTQLEYLDVGYNRLGGELPASIANLSTTLTSLFLGQNLISGTIPHDIGNLVSLQELSLETNMLSGELPVSFGKLLNLQVVDLYSNAISGEIPSYFGNMTRLQKLHLNSNSFHGRIPQSLGRCRYLLDLWMDTNRLNGTIPQEILQIPSLAYIDLSNNFLTGHFPEEVGKLELLVGLGASYNKLSGKMPQAIGGCLSMEFLFMQGNSFDGAIPDISRLVSLKNVDFSNNNLSGRIPRYLASLPSLRNLNLSMNKFEGRVPTTGVFRNATAVSVFGNTNICGGVREMQLKPCIVQASPRKRKPLSVRKKVVSGICIGIASLLLIIIVASLCWFMKRKKKNNASDGNPSDSTTLGMFHEKVSYEELHSATSRFSSTNLIGSGNFGNVFKGLLGPENKLVAVKVLNLLKHGATKSFMAECETFKGIRHRNLVKLITVCSSLDSEGNDFRALVYEFMPKGSLDMWLQLEDLERVNDHSRSLTPAEKLNIAIDVASALEYLHVHCHDPVAHCDIKPSNILLDDDLTAHVSDFGLAQLLYKYDRESFLNQFSSAGVRGTIGYAAPEYGMGGQPSIQGDVYSFGILLLEMFSGKKPTDESFAGDYNLHSYTKSILSGCTSSGGSNAIDEGLRLVLQVGIKCSEEYPRDRMRTDEAVRELISIRSKFFSSKTTITESPRDAPQSSPQEWMLNTDMHTM

SEQ ID NO: 46950 - DNA, 853 bp, Arabidopsis thaliana
  misc_feature (1)..(853): Ceres Seq. ID no. 13646928
  misc_feature (1)..(853): Ortholog of  Ceres SEQ ID NO 13583590 as cited in SEQ ID NO 62482
gagtgttcttcttccacagtcgagagtcgaaaaccctaatctctgtactcaagcaacattttcagacgaaagcaatcagaaactcaggtgaatcagaagcatgattcgagttacgaaaccaaaagcgatcatcgaatcactgagttaccatcttatccaaagatgctccgcaagtggaactcctaaaggaaaagcaaagctgaagacaggtcagccattgaagcgtaacaaactctccatcaagaaaggtggtggcggcggcggagcacctgttgaaggagaggaagcagttaaaggaaaaggtagaatttccgatgagaagcagaaactctacgagcaatgcttaaacgctccttgtcctgttcgctacttgaccccccaagagatcgagcgtgaggcgcaacgtgagaagctaggtttgattagtaaagagaagcaacgagatatggagatccagaagaaaggaggagctgcttcaatgggagtcaccgatgagccgatgcgaattgggacgccaggtttggattacatttcgttagggatttttgaagctgaggaattgcctaagtataagcttacggaagaagatggagagagacttgcgaaggagtatagtaaagtgttgatgagagagcatagagagcgtcgtgcagctgaaactgcgcttttgaatttgaagaaatctgctattgaggcattgccggagaatctgaagaaggcggcgttagagcctgatttgacaccgtttccggcgaatcgaggtatggctactcttacaccgcctattgaagggtatcttgagaaggttatggatgcagctaagaagagttcaagtaaagagaagttgagatga

SEQ ID NO: 46951 - protein, 250 aa, Arabidopsis thaliana
  peptide (1)..(250): Ceres Seq. ID no. 13646929
MIRVTKPKAIIESLSYHLIQRCSASGTPKGKAKLKTGQPLKRNKLSIKKGGGGGGAPVEGEEAVKGKGRISDEKQKLYEQCLNAPCPVRYLTPQEIEREAQREKLGLISKEKQRDMEIQKKGGAASMGVTDEPMRIGTPGLDYISLGIFEAEELPKYKLTEEDGERLAKEYSKVLMREHRERRAAETALLNLKKSAIEALPENLKKAALEPDLTPFPANRGMATLTPPIEGYLEKVMDAAKKSSSKEKLR

SEQ ID NO: 46952 - protein, 135 aa, Arabidopsis thaliana
  peptide (1)..(135): Ceres Seq. ID no. 13646930
MEIQKKGGAASMGVTDEPMRIGTPGLDYISLGIFEAEELPKYKLTEEDGERLAKEYSKVLMREHRERRAAETALLNLKKSAIEALPENLKKAALEPDLTPFPANRGMATLTPPIEGYLEKVMDAAKKSSSKEKLR

SEQ ID NO: 46953 - DNA, 1140 bp, Arabidopsis thaliana
  misc_feature (1)..(1140): Ceres Seq. ID no. 13579027
  misc_feature (1)..(1140): Ortholog of  Ceres SEQ ID NO 14314593 as cited in SEQ ID NO 52313
  misc_feature (1)..(1140): Ortholog of  Ceres SEQ ID NO 13655547 as cited in SEQ ID NO 63739
atgatgaaagggatctcttcagtttctcaatcgatcaattataatccatacatcgaattcaatcgaccgcagcttcagatcagtactgtgaatcccaatccagctcaatctcgattttcccgccctcgatccctccgtgttctctcactctccgccgatccatcggcaaatcggaatcctaaatcagccgttgacgcacacgcgccgccactggtggttgtgggatctgcgaacgccgatatctatgtggagatcgagagattacccaaggaaggggaaacgatttcggccaagacagggcaaacgctcgccggaggaaaaggcgcgaatcaggcggcgtgtggagcgaagctaatgtatccgacttacttcgttggtcgtttgggagaggacgcgcacgggaagctaatagctgaggcgttgggcgatgatgggtgtggggttcacttggactacgtgagatctgtgaataatgagccgacgggacacgcggtggtgatgcttcagtcggacggtcagaattcgatcattatcgttggtggtgcaaatatgaaagcttggcctgagattatgagcgatgatgatcttgagattgtgaggaatgctggtattgtgcttctgcaaagggagatcccagattccatcaatattcaagttgctaaggctgtgaagaaagcaggtgttccagtcatccttgatgtgggaggaatggatacgcctataccaaatgagctattggattccattgatatcttgagccccaatgaaactgagctcagtcgcttgacaggaatgccaactgaaacttttgaacagattagccaagctgttgcaaagtgccataagttgggagttaagcaagttctagtaaaactcgggtccaaaggatctgcactattcatacaaggggaaaaaccaatccagcagtctatcataccggctgcacaagtggttgatactacaggagctggggatactttcactgcagcatttgcagtcgctatggtagagggcaagtcccatgaggaatgcttgagatttgctgctgcagctgcctctctttgtgtccaagtaaagggtgcaataccgagcatgcctgaccgaaaatctgttttgaagctccttaaatttagtatctaa

SEQ ID NO: 46954 - protein, 379 aa, Arabidopsis thaliana
  peptide (1)..(379): Ceres Seq. ID no. 13579028
MMKGISSVSQSINYNPYIEFNRPQLQISTVNPNPAQSRFSRPRSLRVLSLSADPSANRNPKSAVDAHAPPLVVVGSANADIYVEIERLPKEGETISAKTGQTLAGGKGANQAACGAKLMYPTYFVGRLGEDAHGKLIAEALGDDGCGVHLDYVRSVNNEPTGHAVVMLQSDGQNSIIIVGGANMKAWPEIMSDDDLEIVRNAGIVLLQREIPDSINIQVAKAVKKAGVPVILDVGGMDTPIPNELLDSIDILSPNETELSRLTGMPTETFEQISQAVAKCHKLGVKQVLVKLGSKGSALFIQGEKPIQQSIIPAAQVVDTTGAGDTFTAAFAVAMVEGKSHEECLRFAAAAASLCVQVKGAIPSMPDRKSVLKLLKFSI

SEQ ID NO: 46955 - protein, 378 aa, Arabidopsis thaliana
  peptide (1)..(378): Ceres Seq. ID no. 13579029
MKGISSVSQSINYNPYIEFNRPQLQISTVNPNPAQSRFSRPRSLRVLSLSADPSANRNPKSAVDAHAPPLVVVGSANADIYVEIERLPKEGETISAKTGQTLAGGKGANQAACGAKLMYPTYFVGRLGEDAHGKLIAEALGDDGCGVHLDYVRSVNNEPTGHAVVMLQSDGQNSIIIVGGANMKAWPEIMSDDDLEIVRNAGIVLLQREIPDSINIQVAKAVKKAGVPVILDVGGMDTPIPNELLDSIDILSPNETELSRLTGMPTETFEQISQAVAKCHKLGVKQVLVKLGSKGSALFIQGEKPIQQSIIPAAQVVDTTGAGDTFTAAFAVAMVEGKSHEECLRFAAAAASLCVQVKGAIPSMPDRKSVLKLLKFSI

SEQ ID NO: 46956 - protein, 261 aa, Arabidopsis thaliana
  peptide (1)..(261): Ceres Seq. ID no. 13579030
MYPTYFVGRLGEDAHGKLIAEALGDDGCGVHLDYVRSVNNEPTGHAVVMLQSDGQNSIIIVGGANMKAWPEIMSDDDLEIVRNAGIVLLQREIPDSINIQVAKAVKKAGVPVILDVGGMDTPIPNELLDSIDILSPNETELSRLTGMPTETFEQISQAVAKCHKLGVKQVLVKLGSKGSALFIQGEKPIQQSIIPAAQVVDTTGAGDTFTAAFAVAMVEGKSHEECLRFAAAAASLCVQVKGAIPSMPDRKSVLKLLKFSI

SEQ ID NO: 46957 - DNA, 2204 bp, Arabidopsis thaliana
  misc_feature (1)..(2204): Ceres Seq. ID no. 13592016
  misc_feature (1)..(2204): Ortholog of  Ceres SEQ ID NO 14309779 as cited in SEQ ID NO 229
ctctttcctttgtcactatccgttgagaacccaaacggctctctctcttgtctgactctctctctctctctctctctcgatcggtcgaaattttctctgtaactctcttctctctttacgaatcccgatatgagccacgggtggttatggttatgaataatcctgcaaacaacaacccagtagcagcgtcttcagcgtcagccgtagctttagctccgccgccacatccgccgcagcctcaccgtccttctacttcctgtgatcgtcacccggatgagcgtttcaccggattttgcccttcttgtctctttgaccgtctctctgttctagacatcaccggaaaaaacaacaacgccgtcgcgtcttcttctaagaaaccaccgtcttcttccgccgctcttaaagcaatcttcaaaccctcttcctcctccggttcgttcttcccggaacttcggaggacgaaatcgttttcagcatcaaaggctgaagctttttctctaggtgcgtttgagccacagagaagatcctgtgatgttagggttaggaacactctttggtctctgtttcacgaagacgccgagcataattctcaaaccaaagagggtttatcagtaaattgcagtgagattgatctcgaacgcatcaattcaatagtaaagtctcctgttttcgaggaggaaactgaaattgaaagtgagcaagacaacgagaaagacataaagtttgagactttcaaggaacccagaagtgtaatcgacgaaatcgttgaagaagaagaagaagaggaaacgaagaaagttgaggactttacaatggagtttaatccacagacaacggcgaagaagacgaacagagacttcaaagagattgcagggagtttctggtcagcggcgtcagtattcagcaagaaattgcagaaatggagacaaaagcagaagcttaagaagcatagaaccggaaatctcggagccggatcctctgctttaccggtggagaaggcaatcgggagacaacttagagatactcaatctgaaatcgctgagtatggttacggaaggagatcgtgtgatacagatccaagattctcaattgacgctggaagattctcgcttgatgctggtagggtttcggttgatgaccctcgttactcttttgaggagccacgcgcttcgtgggatggatatttgattggaagagctgctgctccgatgcgaatgccgtcgatgttatctgtagtggaagattctccggttcggaatcatgttcaccggtcagatactcacattccggtggaaaagtcaccacaagtatcagaagctgtgattgatgagattgttcctggtggatctgcacagaccagagagtattacttagactcatcatcttcacgaaggaggaagagccttgaccgttctagctccactaggaagttatcagcctctgtcatggctgaaattgatgaactaaagctgactcaagacagagaggctaaagacttggtttcacattcgaattcactgagagacgattgttgctctgttgagaacaactatgagatgggtgttagagaaaatgtagggactatagaatgcaacaagaagaggacgaagaaatctcgatggagttggaacatattcgggttgcttcatcgaaaaaacgggaacaaatacgaggaagaagaaagaagaagcggtgtggatagaacgttttcggggtcgtggaatgtagaaccgaggaacgggtttgatccgaagatgattaggagcaatagtagtgtgagttggagaagttccggaaccactggaggagggttgcaacggaatagtgtggatggatacattagtgggaagaagaaagttagtaaggctgagaatggaatgctcaagttttacttgacaccgggtaaaggaaggcgaagaggaagcggcaattcgaccgcaccgacaagccggcctgttccggcttctcaaccttttggtagtagaaatgttatgaacttttactaacaacattgtaatgagctcgagtcttctttttagatgtagttggaataatgtgtgatgaagttgcattgacagaaaatgttcaaagatttacatattttttttttgggttcaatctgattcttgtgttgggatttgattttgccaattttagaaatttgtagttcaaagtgttaatccatcttctttggtcatgaatgt

SEQ ID NO: 46958 - protein, 619 aa, Arabidopsis thaliana
  peptide (1)..(619): Ceres Seq. ID no. 13592017
MVMNNPANNNPVAASSASAVALAPPPHPPQPHRPSTSCDRHPDERFTGFCPSCLFDRLSVLDITGKNNNAVASSSKKPPSSSAALKAIFKPSSSSGSFFPELRRTKSFSASKAEAFSLGAFEPQRRSCDVRVRNTLWSLFHEDAEHNSQTKEGLSVNCSEIDLERINSIVKSPVFEEETEIESEQDNEKDIKFETFKEPRSVIDEIVEEEEEEETKKVEDFTMEFNPQTTAKKTNRDFKEIAGSFWSAASVFSKKLQKWRQKQKLKKHRTGNLGAGSSALPVEKAIGRQLRDTQSEIAEYGYGRRSCDTDPRFSIDAGRFSLDAGRVSVDDPRYSFEEPRASWDGYLIGRAAAPMRMPSMLSVVEDSPVRNHVHRSDTHIPVEKSPQVSEAVIDEIVPGGSAQTREYYLDSSSSRRRKSLDRSSSTRKLSASVMAEIDELKLTQDREAKDLVSHSNSLRDDCCSVENNYEMGVRENVGTIECNKKRTKKSRWSWNIFGLLHRKNGNKYEEEERRSGVDRTFSGSWNVEPRNGFDPKMIRSNSSVSWRSSGTTGGGLQRNSVDGYISGKKKVSKAENGMLKFYLTPGKGRRRGSGNSTAPTSRPVPASQPFGSRNVMNFY

SEQ ID NO: 46959 - protein, 617 aa, Arabidopsis thaliana
  peptide (1)..(617): Ceres Seq. ID no. 13592018
MNNPANNNPVAASSASAVALAPPPHPPQPHRPSTSCDRHPDERFTGFCPSCLFDRLSVLDITGKNNNAVASSSKKPPSSSAALKAIFKPSSSSGSFFPELRRTKSFSASKAEAFSLGAFEPQRRSCDVRVRNTLWSLFHEDAEHNSQTKEGLSVNCSEIDLERINSIVKSPVFEEETEIESEQDNEKDIKFETFKEPRSVIDEIVEEEEEEETKKVEDFTMEFNPQTTAKKTNRDFKEIAGSFWSAASVFSKKLQKWRQKQKLKKHRTGNLGAGSSALPVEKAIGRQLRDTQSEIAEYGYGRRSCDTDPRFSIDAGRFSLDAGRVSVDDPRYSFEEPRASWDGYLIGRAAAPMRMPSMLSVVEDSPVRNHVHRSDTHIPVEKSPQVSEAVIDEIVPGGSAQTREYYLDSSSSRRRKSLDRSSSTRKLSASVMAEIDELKLTQDREAKDLVSHSNSLRDDCCSVENNYEMGVRENVGTIECNKKRTKKSRWSWNIFGLLHRKNGNKYEEEERRSGVDRTFSGSWNVEPRNGFDPKMIRSNSSVSWRSSGTTGGGLQRNSVDGYISGKKKVSKAENGMLKFYLTPGKGRRRGSGNSTAPTSRPVPASQPFGSRNVMNFY

SEQ ID NO: 46960 - protein, 397 aa, Arabidopsis thaliana
  peptide (1)..(397): Ceres Seq. ID no. 13592019
MEFNPQTTAKKTNRDFKEIAGSFWSAASVFSKKLQKWRQKQKLKKHRTGNLGAGSSALPVEKAIGRQLRDTQSEIAEYGYGRRSCDTDPRFSIDAGRFSLDAGRVSVDDPRYSFEEPRASWDGYLIGRAAAPMRMPSMLSVVEDSPVRNHVHRSDTHIPVEKSPQVSEAVIDEIVPGGSAQTREYYLDSSSSRRRKSLDRSSSTRKLSASVMAEIDELKLTQDREAKDLVSHSNSLRDDCCSVENNYEMGVRENVGTIECNKKRTKKSRWSWNIFGLLHRKNGNKYEEEERRSGVDRTFSGSWNVEPRNGFDPKMIRSNSSVSWRSSGTTGGGLQRNSVDGYISGKKKVSKAENGMLKFYLTPGKGRRRGSGNSTAPTSRPVPASQPFGSRNVMNFY

SEQ ID NO: 46961 - DNA, 2794 bp, Arabidopsis thaliana; identical to SEQ ID NO: 45202
  misc_feature (1)..(2794): Ceres Seq. ID no. 12601525
  misc_feature (1)..(2794): Ortholog of  Ceres SEQ ID NO 13600595 as cited in SEQ ID NO 629

SEQ ID NO: 46962 - protein, 845 aa, Arabidopsis thaliana; identical to SEQ ID NO: 45203
  peptide (1)..(845): Ceres Seq. ID no. 12601526

SEQ ID NO: 46963 - protein, 775 aa, Arabidopsis thaliana; identical to SEQ ID NO: 45204
  peptide (1)..(775): Ceres Seq. ID no. 12601527

SEQ ID NO: 46964 - protein, 723 aa, Arabidopsis thaliana; identical to SEQ ID NO: 45205
  peptide (1)..(723): Ceres Seq. ID no. 12601528

SEQ ID NO: 46965 - DNA, 2375 bp, Arabidopsis thaliana; identical to SEQ ID NO: 45480
  misc_feature (1)..(2375): Ceres Seq. ID no. 13576307
  misc_feature (1)..(2375): Ortholog of  Ceres SEQ ID NO 13532807 as cited in SEQ ID NO 53012
  misc_feature (1)..(2375): Ortholog of  Ceres SEQ ID NO 13663060 as cited in SEQ ID NO 60964
  misc_feature (1)..(2375): Ortholog of  Ceres SEQ ID NO 13500573 as cited in SEQ ID NO 67431
  misc_feature (1)..(2375): Ortholog of  Ceres SEQ ID NO 13656501 as cited in SEQ ID NO 69206

SEQ ID NO: 46966 - protein, 606 aa, Arabidopsis thaliana; identical to SEQ ID NO: 45481
  peptide (1)..(606): Ceres Seq. ID no. 13576308

SEQ ID NO: 46967 - protein, 594 aa, Arabidopsis thaliana; identical to SEQ ID NO: 45482
  peptide (1)..(594): Ceres Seq. ID no. 13576309

SEQ ID NO: 46968 - protein, 516 aa, Arabidopsis thaliana; identical to SEQ ID NO: 45483
  peptide (1)..(516): Ceres Seq. ID no. 13576310

SEQ ID NO: 46969 - DNA, 1233 bp, Arabidopsis thaliana
  misc_feature (1)..(1233): Ceres Seq. ID no. 12604466
  misc_feature (1)..(1233): Ortholog of  Ceres SEQ ID NO 15225707 as cited in SEQ ID NO 54212
  misc_feature (1)..(1233): Ortholog of  Ceres SEQ ID NO 14308608 as cited in SEQ ID NO 58855
  misc_feature (1)..(1233): Ortholog of  Ceres SEQ ID NO 14303684 as cited in SEQ ID NO 66254
gaagaacaaaccctagctcctctctttttctctctctacctctctttctctatcttctcttatcactacttctctcgccgatcaatcatcatgaacgatcctgataatcccgatctgagcaacgacgactctgcttggagagaactcacactcacagctcaagattctgacttcttcgaccgagacacttccaatatcctctctgacttcggttggaacctccaccactcctccgatcatcctcacagtctcagattcgactccgatttaacacaaaccaccggagtcaaacctaccaccgtcacttcttcttgttcctcatccgccgccgtttccgttgccgttacctctactaataataatccctcagctacctcaagttcaagtgaagatccggccgagaactcaaccgcctccgccgagaaaacaccaccaccggagacaccagtgaaggagaagaagaaggctcaaaagcgaattcggcaaccaagattcgcattcatgaccaagagtgatgtggataatcttgaagatggatatcgatggcgtaaatatggacaaaaagccgtcaagaatagcccattcccaaggagctactatagatgcacaaacagcagatgcacggtgaagaagagagtagaacgttcatcagatgatccatcgatagtgatcacaacatacgaaggacaacattgccatcaaaccattggattccctcgtggtggaatcctcactgcacacgacccacatagcttcacttctcatcatcatctccctcctccattaccaaatccttattattaccaagaactccttcatcaacttcacagagacaataatgctccttcaccgcggttaccccgacctactactgaagatacacctgccgtgtctactccatcagaggaaggcttacttggtgatattgtacctcaaactatgcgcaacccttgaggtaagcttggtacgtaacaatagttaaggaggtgctaactcattatatatagaagatattgcagcccggaatatgcgcagggagggtttaacaatatggcgttgtaacaatggatctatatataactatatatatatattacttcattgttgatcaatagcacaccaccggtacgtttgcaatttcttcatgtatatttcttgttatataagtagttatatatccagatataattttgatgtaacacaacattaatcttaatcttggatccatcccac

SEQ ID NO: 46970 - protein, 317 aa, Arabidopsis thaliana
  peptide (1)..(317): Ceres Seq. ID no. 12604467
EEQTLAPLFFSLYLSFSIFSYHYFSRRSIIMNDPDNPDLSNDDSAWRELTLTAQDSDFFDRDTSNILSDFGWNLHHSSDHPHSLRFDSDLTQTTGVKPTTVTSSCSSSAAVSVAVTSTNNNPSATSSSSEDPAENSTASAEKTPPPETPVKEKKKAQKRIRQPRFAFMTKSDVDNLEDGYRWRKYGQKAVKNSPFPRSYYRCTNSRCTVKKRVERSSDDPSIVITTYEGQHCHQTIGFPRGGILTAHDPHSFTSHHHLPPPLPNPYYYQELLHQLHRDNNAPSPRLPRPTTEDTPAVSTPSEEGLLGDIVPQTMRNP

SEQ ID NO: 46971 - protein, 287 aa, Arabidopsis thaliana
  peptide (1)..(287): Ceres Seq. ID no. 12604468
MNDPDNPDLSNDDSAWRELTLTAQDSDFFDRDTSNILSDFGWNLHHSSDHPHSLRFDSDLTQTTGVKPTTVTSSCSSSAAVSVAVTSTNNNPSATSSSSEDPAENSTASAEKTPPPETPVKEKKKAQKRIRQPRFAFMTKSDVDNLEDGYRWRKYGQKAVKNSPFPRSYYRCTNSRCTVKKRVERSSDDPSIVITTYEGQHCHQTIGFPRGGILTAHDPHSFTSHHHLPPPLPNPYYYQELLHQLHRDNNAPSPRLPRPTTEDTPAVSTPSEEGLLGDIVPQTMRNP

SEQ ID NO: 46972 - DNA, 1208 bp, Arabidopsis thaliana
  misc_feature (1)..(1208): Ceres Seq. ID no. 13579031
  misc_feature (1)..(1208): Ortholog of  Ceres SEQ ID NO 13592961 as cited in SEQ ID NO 20522
  misc_feature (1)..(1208): Ortholog of  Ceres SEQ ID NO 12583469 as cited in SEQ ID NO 51031
  misc_feature (1)..(1208): Ortholog of  Ceres SEQ ID NO 15226378 as cited in SEQ ID NO 62741
  misc_feature (1)..(1208): Ortholog of  Ceres SEQ ID NO 13597389 as cited in SEQ ID NO 63426
  misc_feature (1)..(1208): Ortholog of  Ceres SEQ ID NO 15169639 as cited in SEQ ID NO 64624
  misc_feature (1)..(1208): Ortholog of  Ceres SEQ ID NO 13595998 as cited in SEQ ID NO 68161
aaaagtcagcttaaagctctcgcatggcgtctcaagattgtcatatgttattgagcttctttatatctacttttttaatcactgtcgtgacctcgcaaactcgatgccgaaatttcaagtcgatcatcagtttcggcgactcgattactgatactggaaacttactcggcctctctagtcctaacgatcttcctgagtcagcctttccgccatacggagaaaccttcttccaccatccgtctggtcgtttctccgatggccgcctcatcatcgacttcattgctgaattcttagggattccacatgtgcctccgttttatggatctaaaaatggaaactttgagaaaggagttaattttgcggtgggaggagcaacagcactagaatgttctgttcttgaggagaaaggaactcattgttctcaaagcaatattagtttaggaaaccagcttaagagcttcaaagagagtttaccatatctttgtggctcctcatcaccagattgtagagatatgattgaaaatgcatttattctcattggagaaattggagggaatgattacaacttcccattatttgatcgcaagaacattgaggaagtcaaagagctggttccccttgtgatcactactatttcttcggcgatctcggagttggttgatatgggagcaagaacattcctagttcctggaaattttccacttggatgctctgtagcctatttgacgttatacgaaacaccaaacaaagaagaatacaatcctctaacaggatgtttgacatggctgaacgacttttcagtataccacaacgagcagcttcaagcagaactcaaaagacttaggaatctttaccctcatgtcaacatcatatatggtgactactacaatactctgttgcgccttatgcaagaaccatccaaattcgggctcatggacagacctttgcccgcttgttgcgggttaggaggaccatacaacttcacctttagtataaaatgtgggagtaaaggagttgaatattgtagtgatccttcgaagtatgtgaattgggacggcattcatatgactgaggctgcatacaaatggatatccgagggcgtactaacagggccatatgcgattcctcctttcaattggtcatgcctcgactctaagattaagaacaatgagtcattacacacacaatattctttgatgaacagctga

SEQ ID NO: 46973 - protein, 394 aa, Arabidopsis thaliana
  peptide (1)..(394): Ceres Seq. ID no. 13579032
MASQDCHMLLSFFISTFLITVVTSQTRCRNFKSIISFGDSITDTGNLLGLSSPNDLPESAFPPYGETFFHHPSGRFSDGRLIIDFIAEFLGIPHVPPFYGSKNGNFEKGVNFAVGGATALECSVLEEKGTHCSQSNISLGNQLKSFKESLPYLCGSSSPDCRDMIENAFILIGEIGGNDYNFPLFDRKNIEEVKELVPLVITTISSAISELVDMGARTFLVPGNFPLGCSVAYLTLYETPNKEEYNPLTGCLTWLNDFSVYHNEQLQAELKRLRNLYPHVNIIYGDYYNTLLRLMQEPSKFGLMDRPLPACCGLGGPYNFTFSIKCGSKGVEYCSDPSKYVNWDGIHMTEAAYKWISEGVLTGPYAIPPFNWSCLDSKIKNNESLHTQYSLMNS

SEQ ID NO: 46974 - protein, 387 aa, Arabidopsis thaliana
  peptide (1)..(387): Ceres Seq. ID no. 13579033
MLLSFFISTFLITVVTSQTRCRNFKSIISFGDSITDTGNLLGLSSPNDLPESAFPPYGETFFHHPSGRFSDGRLIIDFIAEFLGIPHVPPFYGSKNGNFEKGVNFAVGGATALECSVLEEKGTHCSQSNISLGNQLKSFKESLPYLCGSSSPDCRDMIENAFILIGEIGGNDYNFPLFDRKNIEEVKELVPLVITTISSAISELVDMGARTFLVPGNFPLGCSVAYLTLYETPNKEEYNPLTGCLTWLNDFSVYHNEQLQAELKRLRNLYPHVNIIYGDYYNTLLRLMQEPSKFGLMDRPLPACCGLGGPYNFTFSIKCGSKGVEYCSDPSKYVNWDGIHMTEAAYKWISEGVLTGPYAIPPFNWSCLDSKIKNNESLHTQYSLMNS

SEQ ID NO: 46975 - protein, 231 aa, Arabidopsis thaliana
  peptide (1)..(231): Ceres Seq. ID no. 13579034
MIENAFILIGEIGGNDYNFPLFDRKNIEEVKELVPLVITTISSAISELVDMGARTFLVPGNFPLGCSVAYLTLYETPNKEEYNPLTGCLTWLNDFSVYHNEQLQAELKRLRNLYPHVNIIYGDYYNTLLRLMQEPSKFGLMDRPLPACCGLGGPYNFTFSIKCGSKGVEYCSDPSKYVNWDGIHMTEAAYKWISEGVLTGPYAIPPFNWSCLDSKIKNNESLHTQYSLMNS

SEQ ID NO: 46976 - DNA, 2468 bp, Arabidopsis thaliana
  misc_feature (1)..(2468): Ceres Seq. ID no. 12600639
  misc_feature (1)..(2468): Ortholog of  Ceres SEQ ID NO 15177561 as cited in SEQ ID NO 53065
  misc_feature (1)..(2468): Ortholog of  Ceres SEQ ID NO 13595521 as cited in SEQ ID NO 59840
agttggttcacttcagcacatgatcctcgtctctctttctttctctctctcaatcacaagtttcagttacacagctgaacccaaagtatctcacattctgatctaatcagaacactgttttgtctgtgtaacataaacaaacgatcctgtttttatggaaaatttaatgaaacagtgacgattcttctacacttctttataatgacaaacatttcatagtaccaaaatacacaaataccttttctttattcttctcacccttctctgtttctttatcattcatggctccaaattcagtagcagtgacaatggagaagccagacaacttctctttactagagatcaacggctcagatccatcctcattccccgacaaacgtaaatccatcagtccaaaacaattctcatggttccttcttctcaaagctcatagactcatctcgtgtctctcgtggctagtctcttcggttaaaaagcgaatcgcgttctccgcgaagaacattaacgaagaagaagatcctaaaagcagaggaaaacaaatgtacagattcatcaaagcttgtcttgtcatctccattattgccttgtccatagaaatcgttgcacatttcaagaaatggaatcttgatctcattaaccgaccgtcttgggaggtttacgggcttgtcgaatggtcgtacatggcttggctctcgtttcgatccgattacatcgctcctcttgtcatcagtctctccagattctgcactgtactctttttgattcagtctcttgatcggttagtcctctgtctcggttgcttttggatcaaatttaaaaagatcgaacctaagctcaccgaagaatctatcgatttagaagacccctccagtttcccaatggtccttattcagatcccaatgtgcaacgaacgagaggtgtatgaacaatcaataggagcagcttcacaacttgattggccaaaagataggatcttaattcaagtattagatgattcagacgatccaaatttacagcttttgatcaaagaagaagtatcggtttgggccgaaaaaggcgtaaacataatttacaggcataggttgatcagaactggttacaaagctggcaatttgaaatcagccatgacttgtgattacgttaaagattacgagtttgtgactatcttcgacgcagatttcacaccaaatcctgatttcctcaagaagactgttcctcatttcaagggtaatccagagctagggttggtccaagcaaggtggtcatttgtgaacaaagatgagaatctcctcacgaggctacaaaacataaacttatgtttccacttcgaagtagaacaacaagtgaacggtgtgtttctcaatttcttcggattcaatggaaccgctggagtatggaggatcaaggcattggaagaatccggcggatggctcgagagaaccaccgtggaagatatggatatcgcggttagagcgcatctcaacggctggaagtttatttaccttaatgatgttgaagtcacttgcgagttgccagagtcttatgaagcttacaagaagcaacaacatcgttggcattccggtcctatgcagctgttccggttatgccttccttcaattatcaaatcaaagatatcggtttggaagaaggcgaatttgatcttccttttctttcttctaaggaagcttattctaccattttactcattcacactcttttgcattatacttccattgacaatgttcatacccgaagccgagcttccgttgtggatcatctgctatgttcctatcttcatttcgcttctcaacattctcccgtcacctaaatctttccctttcttagtcccttaccttcttttcgaaaacacaatgtcaataaccaagttcaacgccatgatctccgggctgtttcagtttggatcggcttacgagtgggttgtgacgaagaaaaccgggagatcatcggagtccgatttgctagcgtttgctgaaaaggaagagaagttgcataggagaaactcggagtcaggtttggagcttctgagcaaacttaaggagcaagagacaaatcttgtagggcaagaaaccgtgaagaagagccttggagggctaatgaggccgaagaacaagaagaagacgaacatggtgttcaagaaagagctcgggcttgcgttcttgctgctaaccgcagctgcaaggagctttctatcggcgcacggtcttcacttctactttttgttgtttcagggactgtctttcttggttgtagggttggatttgatcggagaacagatcagctagacacacacaaaaccaagacagagaacaaggaaaaaaataccgtttatattcactatttttttgtttgttttttaaattcttttccctttttatatgtgggttttatacataattttcaagaacttataatgtccagtttcagataaatgaattgaaacgaatttg

SEQ ID NO: 46977 - protein, 673 aa, Arabidopsis thaliana
  peptide (1)..(673): Ceres Seq. ID no. 12600640
MAPNSVAVTMEKPDNFSLLEINGSDPSSFPDKRKSISPKQFSWFLLLKAHRLISCLSWLVSSVKKRIAFSAKNINEEEDPKSRGKQMYRFIKACLVISIIALSIEIVAHFKKWNLDLINRPSWEVYGLVEWSYMAWLSFRSDYIAPLVISLSRFCTVLFLIQSLDRLVLCLGCFWIKFKKIEPKLTEESIDLEDPSSFPMVLIQIPMCNEREVYEQSIGAASQLDWPKDRILIQVLDDSDDPNLQLLIKEEVSVWAEKGVNIIYRHRLIRTGYKAGNLKSAMTCDYVKDYEFVTIFDADFTPNPDFLKKTVPHFKGNPELGLVQARWSFVNKDENLLTRLQNINLCFHFEVEQQVNGVFLNFFGFNGTAGVWRIKALEESGGWLERTTVEDMDIAVRAHLNGWKFIYLNDVEVTCELPESYEAYKKQQHRWHSGPMQLFRLCLPSIIKSKISVWKKANLIFLFFLLRKLILPFYSFTLFCIILPLTMFIPEAELPLWIICYVPIFISLLNILPSPKSFPFLVPYLLFENTMSITKFNAMISGLFQFGSAYEWVVTKKTGRSSESDLLAFAEKEEKLHRRNSESGLELLSKLKEQETNLVGQETVKKSLGGLMRPKNKKKTNMVFKKELGLAFLLLTAAARSFLSAHGLHFYFLLFQGLSFLVVGLDLIGEQIS

SEQ ID NO: 46978 - protein, 664 aa, Arabidopsis thaliana
  peptide (1)..(664): Ceres Seq. ID no. 12600641
MEKPDNFSLLEINGSDPSSFPDKRKSISPKQFSWFLLLKAHRLISCLSWLVSSVKKRIAFSAKNINEEEDPKSRGKQMYRFIKACLVISIIALSIEIVAHFKKWNLDLINRPSWEVYGLVEWSYMAWLSFRSDYIAPLVISLSRFCTVLFLIQSLDRLVLCLGCFWIKFKKIEPKLTEESIDLEDPSSFPMVLIQIPMCNEREVYEQSIGAASQLDWPKDRILIQVLDDSDDPNLQLLIKEEVSVWAEKGVNIIYRHRLIRTGYKAGNLKSAMTCDYVKDYEFVTIFDADFTPNPDFLKKTVPHFKGNPELGLVQARWSFVNKDENLLTRLQNINLCFHFEVEQQVNGVFLNFFGFNGTAGVWRIKALEESGGWLERTTVEDMDIAVRAHLNGWKFIYLNDVEVTCELPESYEAYKKQQHRWHSGPMQLFRLCLPSIIKSKISVWKKANLIFLFFLLRKLILPFYSFTLFCIILPLTMFIPEAELPLWIICYVPIFISLLNILPSPKSFPFLVPYLLFENTMSITKFNAMISGLFQFGSAYEWVVTKKTGRSSESDLLAFAEKEEKLHRRNSESGLELLSKLKEQETNLVGQETVKKSLGGLMRPKNKKKTNMVFKKELGLAFLLLTAAARSFLSAHGLHFYFLLFQGLSFLVVGLDLIGEQIS

SEQ ID NO: 46979 - protein, 587 aa, Arabidopsis thaliana
  peptide (1)..(587): Ceres Seq. ID no. 12600642
MYRFIKACLVISIIALSIEIVAHFKKWNLDLINRPSWEVYGLVEWSYMAWLSFRSDYIAPLVISLSRFCTVLFLIQSLDRLVLCLGCFWIKFKKIEPKLTEESIDLEDPSSFPMVLIQIPMCNEREVYEQSIGAASQLDWPKDRILIQVLDDSDDPNLQLLIKEEVSVWAEKGVNIIYRHRLIRTGYKAGNLKSAMTCDYVKDYEFVTIFDADFTPNPDFLKKTVPHFKGNPELGLVQARWSFVNKDENLLTRLQNINLCFHFEVEQQVNGVFLNFFGFNGTAGVWRIKALEESGGWLERTTVEDMDIAVRAHLNGWKFIYLNDVEVTCELPESYEAYKKQQHRWHSGPMQLFRLCLPSIIKSKISVWKKANLIFLFFLLRKLILPFYSFTLFCIILPLTMFIPEAELPLWIICYVPIFISLLNILPSPKSFPFLVPYLLFENTMSITKFNAMISGLFQFGSAYEWVVTKKTGRSSESDLLAFAEKEEKLHRRNSESGLELLSKLKEQETNLVGQETVKKSLGGLMRPKNKKKTNMVFKKELGLAFLLLTAAARSFLSAHGLHFYFLLFQGLSFLVVGLDLIGEQIS

SEQ ID NO: 46980 - DNA, 2895 bp, Arabidopsis thaliana
  misc_feature (1)..(2895): Ceres Seq. ID no. 13579276
  misc_feature (1)..(2895): Ortholog of  Ceres SEQ ID NO 12589728 as cited in SEQ ID NO 0
  misc_feature (1)..(2895): Ortholog of  Ceres SEQ ID NO 14302164 as cited in SEQ ID NO 0
atgatgataccggaactagggagaagaccgatgcatagaggtaacgaagattcatcttttggggatgattacgagaaagagattggagtattgcttggtgagcagcagagaaggcaagtagaggcggatgagcttgagagagagcttaacttgtatagaagtggctctgctccaccgactgttgatggttctcttagtgctgccggagggctttttagcggcggaggtggggcttcttttctggaatttggtggagttaataagggtaatgggtttggtggtgatgatgaggagtttaggaaagatccagcttacttgtcttattactatgctaatatgaagttgaatccgaggttgccacctcctttgatgtctagggaggatttgagggttgctcagaggcttaaagggagtaataatgtgttaggtggtgttggggataggagaaaagtgaatgacagtcggtctttgttctctatgccacctggttttgaggctggaaaacctggtgcttctgcttctgagtgggatgctaatggattgattggtttgggacttggaggcaagcagaagagttttgctgatatctttcaggcggatatggggcatcctgttgtacagcagccctcacgtcctgctagtcgtaatacctttgatgagaatgttgactctaataataacctgtctccatctgcatcacaaggcattggagcgccatctccatactgctatgcagctgttctgggttcatctttgtctagaaatggaactccagatccacagggcattgctagggtgcctagtccttgccttactcccattggcagtggaagagtgagttcaaatgataagaggaacacaagtaatcaaagcccgttcaacggtgttacatctggtctcaacgagtcttctgatcttgtcaatgctttatccggcttgaacctgtcaggcactggcgggctagatgaacgtggtcaggctgagcaagatgtcgaaaaggtcaggaactatatgtttggactgcaagatgggcataatgaagtcaatccacatgggttcccaaacagatctgatcaagctaggggaactgcttcgtgcaggaattcacaaatgagagggtcacaaggatctgcatataatagtggaagtggagtagctaatccttaccagcatcatgatagcccaaactattacgcattaaatccagctgtagcttctatgatggctaaccaacttggaactaataactattctccaatgtatgaaaatgcttctgccactttgggatattctgcaatggactccagacttcatggtggaagttttgtttcttctggtcaaaacctctctgaatcacgaaatattggcagggtcggtaatcgaatgatggaaggaggtacgggtcacccgtcacatcttgcagacccgatgtatcatcagtatgcaaggttctctgaaaatgctgattcgtttgatcttcttaatgacccttcaatggacaggaactatggtaattcatacatgaatatgcttgaaattcagagggcttatctcggatctcagaaatcacagtatggtcttccttacaaatcagggagccctaacagccatagctattatggcagtccaacatttgggtctaatatgtcatatcctggcagcccattggctcatcatggtatgccaaactctcttatgtcaccttacagccctatgagacgaggtgaagtaaatatgcgatatcccgctgcaacaagaaactatactggaggggtaatgggttcttggcacatggatgctagtttggatgaaggatttggatcttcaatgcttgaagagttcaaaagtaacaaaacaagagggttcgaactttctgaaatagctggccatgttgtagagttcagttcggatcagtatggaagccggtttattcagcagaaactcgagacagcaacaactgatgagaaaaacatggtttatgaggagatcatgccaaaagctcttgccctgatgactgacgtttttggaaactatgtgattcagaagttctttgagcatggactcccaccacagagaagagaattgggagagaaactcattgacaatgttttgcctcttagcttacagatgtatggttgtcgtgtcatccagaaggcaattgaggtggttgatctagaccagaaaatccaaatggtcaaagaacttgatggacatgtgatgcgatgtgtacgtgatcagaatgggaaccatgtggttcaaaagtgtattgaatgtgtgcctgaagaaaacattgagtttattatttcaactttctttggccatgtggtgaccctctccactcacccatacgggtgccgtgttattcagagagtattggaacactgccataaccctgatacacagagtaaggttatggaagaaatcctgtccactgttagtatgctgacccaagatcagtatggaaactatgttgttcagcatgtactggagcatggaaagcctgatgagcgcactgtgataatcaaagagttagcggggaagattgttcagatgagccaacagaagtttgcatcaaacgttgttgagaagtgtttgacttttggaggtcctgaggaacgggaattgctggtgaatgagatgctgggcacaactgatgaaaacgagcctcttcaggcgatgatgaaggatcagtttgcaaactatgtagtgcaaaaagtcctggagacatgtgatgaccaacagcgtgaactgatactgactcgtattaaagtgcatctgaatgctctaaagaaatacacttacggaaagcatatcgttgcccgtgttgaaaaactcgttgctgctggagagaggagaatggctttgcagtcattaccccagcctctggtggcgtaa

SEQ ID NO: 46981 - protein, 964 aa, Arabidopsis thaliana
  peptide (1)..(964): Ceres Seq. ID no. 13579277
MMIPELGRRPMHRGNEDSSFGDDYEKEIGVLLGEQQRRQVEADELERELNLYRSGSAPPTVDGSLSAAGGLFSGGGGASFLEFGGVNKGNGFGGDDEEFRKDPAYLSYYYANMKLNPRLPPPLMSREDLRVAQRLKGSNNVLGGVGDRRKVNDSRSLFSMPPGFEAGKPGASASEWDANGLIGLGLGGKQKSFADIFQADMGHPVVQQPSRPASRNTFDENVDSNNNLSPSASQGIGAPSPYCYAAVLGSSLSRNGTPDPQGIARVPSPCLTPIGSGRVSSNDKRNTSNQSPFNGVTSGLNESSDLVNALSGLNLSGTGGLDERGQAEQDVEKVRNYMFGLQDGHNEVNPHGFPNRSDQARGTASCRNSQMRGSQGSAYNSGSGVANPYQHHDSPNYYALNPAVASMMANQLGTNNYSPMYENASATLGYSAMDSRLHGGSFVSSGQNLSESRNIGRVGNRMMEGGTGHPSHLADPMYHQYARFSENADSFDLLNDPSMDRNYGNSYMNMLEIQRAYLGSQKSQYGLPYKSGSPNSHSYYGSPTFGSNMSYPGSPLAHHGMPNSLMSPYSPMRRGEVNMRYPAATRNYTGGVMGSWHMDASLDEGFGSSMLEEFKSNKTRGFELSEIAGHVVEFSSDQYGSRFIQQKLETATTDEKNMVYEEIMPKALALMTDVFGNYVIQKFFEHGLPPQRRELGEKLIDNVLPLSLQMYGCRVIQKAIEVVDLDQKIQMVKELDGHVMRCVRDQNGNHVVQKCIECVPEENIEFIISTFFGHVVTLSTHPYGCRVIQRVLEHCHNPDTQSKVMEEILSTVSMLTQDQYGNYVVQHVLEHGKPDERTVIIKELAGKIVQMSQQKFASNVVEKCLTFGGPEERELLVNEMLGTTDENEPLQAMMKDQFANYVVQKVLETCDDQQRELILTRIKVHLNALKKYTYGKHIVARVEKLVAAGERRMALQSLPQPLVA

SEQ ID NO: 46982 - protein, 963 aa, Arabidopsis thaliana
  peptide (1)..(963): Ceres Seq. ID no. 13579278
MIPELGRRPMHRGNEDSSFGDDYEKEIGVLLGEQQRRQVEADELERELNLYRSGSAPPTVDGSLSAAGGLFSGGGGASFLEFGGVNKGNGFGGDDEEFRKDPAYLSYYYANMKLNPRLPPPLMSREDLRVAQRLKGSNNVLGGVGDRRKVNDSRSLFSMPPGFEAGKPGASASEWDANGLIGLGLGGKQKSFADIFQADMGHPVVQQPSRPASRNTFDENVDSNNNLSPSASQGIGAPSPYCYAAVLGSSLSRNGTPDPQGIARVPSPCLTPIGSGRVSSNDKRNTSNQSPFNGVTSGLNESSDLVNALSGLNLSGTGGLDERGQAEQDVEKVRNYMFGLQDGHNEVNPHGFPNRSDQARGTASCRNSQMRGSQGSAYNSGSGVANPYQHHDSPNYYALNPAVASMMANQLGTNNYSPMYENASATLGYSAMDSRLHGGSFVSSGQNLSESRNIGRVGNRMMEGGTGHPSHLADPMYHQYARFSENADSFDLLNDPSMDRNYGNSYMNMLEIQRAYLGSQKSQYGLPYKSGSPNSHSYYGSPTFGSNMSYPGSPLAHHGMPNSLMSPYSPMRRGEVNMRYPAATRNYTGGVMGSWHMDASLDEGFGSSMLEEFKSNKTRGFELSEIAGHVVEFSSDQYGSRFIQQKLETATTDEKNMVYEEIMPKALALMTDVFGNYVIQKFFEHGLPPQRRELGEKLIDNVLPLSLQMYGCRVIQKAIEVVDLDQKIQMVKELDGHVMRCVRDQNGNHVVQKCIECVPEENIEFIISTFFGHVVTLSTHPYGCRVIQRVLEHCHNPDTQSKVMEEILSTVSMLTQDQYGNYVVQHVLEHGKPDERTVIIKELAGKIVQMSQQKFASNVVEKCLTFGGPEERELLVNEMLGTTDENEPLQAMMKDQFANYVVQKVLETCDDQQRELILTRIKVHLNALKKYTYGKHIVARVEKLVAAGERRMALQSLPQPLVA

SEQ ID NO: 46983 - protein, 954 aa, Arabidopsis thaliana
  peptide (1)..(954): Ceres Seq. ID no. 13579279
MHRGNEDSSFGDDYEKEIGVLLGEQQRRQVEADELERELNLYRSGSAPPTVDGSLSAAGGLFSGGGGASFLEFGGVNKGNGFGGDDEEFRKDPAYLSYYYANMKLNPRLPPPLMSREDLRVAQRLKGSNNVLGGVGDRRKVNDSRSLFSMPPGFEAGKPGASASEWDANGLIGLGLGGKQKSFADIFQADMGHPVVQQPSRPASRNTFDENVDSNNNLSPSASQGIGAPSPYCYAAVLGSSLSRNGTPDPQGIARVPSPCLTPIGSGRVSSNDKRNTSNQSPFNGVTSGLNESSDLVNALSGLNLSGTGGLDERGQAEQDVEKVRNYMFGLQDGHNEVNPHGFPNRSDQARGTASCRNSQMRGSQGSAYNSGSGVANPYQHHDSPNYYALNPAVASMMANQLGTNNYSPMYENASATLGYSAMDSRLHGGSFVSSGQNLSESRNIGRVGNRMMEGGTGHPSHLADPMYHQYARFSENADSFDLLNDPSMDRNYGNSYMNMLEIQRAYLGSQKSQYGLPYKSGSPNSHSYYGSPTFGSNMSYPGSPLAHHGMPNSLMSPYSPMRRGEVNMRYPAATRNYTGGVMGSWHMDASLDEGFGSSMLEEFKSNKTRGFELSEIAGHVVEFSSDQYGSRFIQQKLETATTDEKNMVYEEIMPKALALMTDVFGNYVIQKFFEHGLPPQRRELGEKLIDNVLPLSLQMYGCRVIQKAIEVVDLDQKIQMVKELDGHVMRCVRDQNGNHVVQKCIECVPEENIEFIISTFFGHVVTLSTHPYGCRVIQRVLEHCHNPDTQSKVMEEILSTVSMLTQDQYGNYVVQHVLEHGKPDERTVIIKELAGKIVQMSQQKFASNVVEKCLTFGGPEERELLVNEMLGTTDENEPLQAMMKDQFANYVVQKVLETCDDQQRELILTRIKVHLNALKKYTYGKHIVARVEKLVAAGERRMALQSLPQPLVA

SEQ ID NO: 46984 - DNA, 1909 bp, Arabidopsis thaliana
  misc_feature (1)..(1909): Ceres Seq. ID no. 14302717
  misc_feature (1)..(1909): Ortholog of  Ceres SEQ ID NO 14309779 as cited in SEQ ID NO 229
tcttcccatctctctcccctctaagcaattaagcagacaagacactgatgatatgagacgaagagaaagaagtcttatcactcatcctttcctcttatgaatctctccgccgaccaagctcccgtcaccgccgtcgacgaactagctccgccttctcaaccgcatcgcttatctacatcatgtgatctccacccagaagagcgtttctccggtttctgtccttcttgtctttgcgaccgcctctccgtcttagatcacaacgccgctccgccaccgtcttcttcttcccggaaacctccctctatctccgctgtttcgttaaaagctctcttcaagccctcctctagtggtaccaacaactccaacggaaacggtcgggtcagacccggtttcttcccggagctccgacgtacaaagtccttttccgcaaagaacaacgaaggattttccggtgggtttgagccacagcgtcggtcttgtgacgtcagacttcgtgacgacgaaagaaaccttcccatcaatgaagctgcctccgtcgataaaatcgaggaggaggctagggagtctagcgtgagtgagatagttttagaggtgactgaagaagctgaaattgaggaggatgaagaaaacggtgagaacgatcccggcgagatagttgaggaaaaaagcagcgaaattggtgaggaagaagaggaattgaagccaatgaaggattacatggatctctactcacaaacaaagaaaccgtcggtgaaagatttcgccgggagtttcttttcggcggcctctgttttcagcaagaagcttcagaaatggaagcagaagcagaaggtgaagaagccgagaaacggtgtcggcggaggacggccacagtctgaaatcggaataggccggagatcaagcgacaccgacccgagattctctcttgacgccgggagattctccgtcgatataggtcggatttcaatggacgattctcgctactcattagatgagccaagagcgtcgtgggatggacacttaatcggcaggacaacggcggctagggttcctctgccgccatcgatgttatcagttgtggaaaatgctccgttgaatcgatcagacatgcagattccatcgtctccgtcaattaaaccgattagcggtgactccgacccgattatcataatcccaggcggatccaatcaaactcgagactactacactggacctccgtcgtcacggagacggaagagcctcgacagatccaattctattagaaaaattgtaacggagctagaggatgtcaaatcggtatcaaattcgacaacaacaatagactcaaattccatggaaacagcggagaacaaagggaatcaaaacggcgataagaaatcgagacggtggggaaaatggagcattttagggtttatatacagaaaaggtaaggacgatgaagaagaagataggtatagcagatccaacagcgccggaatggttgagaggtctttatcggaatcatggccggagatgaggaatggagaaggaggaggaccgaagatgaggaggagtaacagcaatgtgagctggcgaagctccggtggaggatcggcgaggaataagagttcgaggtattcgtccaaagatggagagaacggaatgttgaggttttatttgactccgatgaggagaagctggaagaccagcggtggtagtggtggaggcggaggcggtggtggtggtggtgggtgggagaagacggcggctaaggcgaatagtcacggccactctatagcgaggagggttatgaggctgtattgaccaaagtgtccctcttcattttaattattgggagcaatgtgaggttttggtttggggttctctaattatctttctttgtgaataaattggatatctacttaaccgg

SEQ ID NO: 46985 - protein, 568 aa, Arabidopsis thaliana
  peptide (1)..(568): Ceres Seq. ID no. 14302718
MNLSADQAPVTAVDELAPPSQPHRLSTSCDLHPEERFSGFCPSCLCDRLSVLDHNAAPPPSSSSRKPPSISAVSLKALFKPSSSGTNNSNGNGRVRPGFFPELRRTKSFSAKNNEGFSGGFEPQRRSCDVRLRDDERNLPINEAASVDKIEEEARESSVSEIVLEVTEEAEIEEDEENGENDPGEIVEEKSSEIGEEEEELKPMKDYMDLYSQTKKPSVKDFAGSFFSAASVFSKKLQKWKQKQKVKKPRNGVGGGRPQSEIGIGRRSSDTDPRFSLDAGRFSVDIGRISMDDSRYSLDEPRASWDGHLIGRTTAARVPLPPSMLSVVENAPLNRSDMQIPSSPSIKPISGDSDPIIIIPGGSNQTRDYYTGPPSSRRRKSLDRSNSIRKIVTELEDVKSVSNSTTTIDSNSMETAENKGNQNGDKKSRRWGKWSILGFIYRKGKDDEEEDRYSRSNSAGMVERSLSESWPEMRNGEGGGPKMRRSNSNVSWRSSGGGSARNKSSRYSSKDGENGMLRFYLTPMRRSWKTSGGSGGGGGGGGGGGWEKTAAKANSHGHSIARRVMRLY

SEQ ID NO: 46986 - protein, 365 aa, Arabidopsis thaliana
  peptide (1)..(365): Ceres Seq. ID no. 14302719
MKDYMDLYSQTKKPSVKDFAGSFFSAASVFSKKLQKWKQKQKVKKPRNGVGGGRPQSEIGIGRRSSDTDPRFSLDAGRFSVDIGRISMDDSRYSLDEPRASWDGHLIGRTTAARVPLPPSMLSVVENAPLNRSDMQIPSSPSIKPISGDSDPIIIIPGGSNQTRDYYTGPPSSRRRKSLDRSNSIRKIVTELEDVKSVSNSTTTIDSNSMETAENKGNQNGDKKSRRWGKWSILGFIYRKGKDDEEEDRYSRSNSAGMVERSLSESWPEMRNGEGGGPKMRRSNSNVSWRSSGGGSARNKSSRYSSKDGENGMLRFYLTPMRRSWKTSGGSGGGGGGGGGGGWEKTAAKANSHGHSIARRVMRLY

SEQ ID NO: 46987 - protein, 361 aa, Arabidopsis thaliana
  peptide (1)..(361): Ceres Seq. ID no. 14302720
MDLYSQTKKPSVKDFAGSFFSAASVFSKKLQKWKQKQKVKKPRNGVGGGRPQSEIGIGRRSSDTDPRFSLDAGRFSVDIGRISMDDSRYSLDEPRASWDGHLIGRTTAARVPLPPSMLSVVENAPLNRSDMQIPSSPSIKPISGDSDPIIIIPGGSNQTRDYYTGPPSSRRRKSLDRSNSIRKIVTELEDVKSVSNSTTTIDSNSMETAENKGNQNGDKKSRRWGKWSILGFIYRKGKDDEEEDRYSRSNSAGMVERSLSESWPEMRNGEGGGPKMRRSNSNVSWRSSGGGSARNKSSRYSSKDGENGMLRFYLTPMRRSWKTSGGSGGGGGGGGGGGWEKTAAKANSHGHSIARRVMRLY

SEQ ID NO: 46988 - DNA, 1045 bp, Arabidopsis thaliana
  misc_feature (1)..(1045): Ceres Seq. ID no. 13646974
  misc_feature (1)..(1045): Ortholog of  Ceres SEQ ID NO 15176153 as cited in SEQ ID NO 0
atcaaaggccaaaagaacagaaaaaagtttttttcacgcggtggcaatggcaatggcgtctgcttcttcctcctcctcctccatatccgtcatcattttcctcctcttggcgcctctctgcctttcacgtgagccaccttcacaaatcccaaacggaaccctagatctctctttactatggtacggccaattcacgcctactcaaaaggagagggttcacgatttcatagaatcgcttaacttcgacgccaaggaaggtcttgacccgaaggtatcggcgtggtggaaagtggtggagagttaccaagagaggtttgaggtgaaggatatttaccgacagaagaagagtaacagaaccgtagctccgaggattaaggtgaaggttgtccggagttatgtggatgagaagatgaagtatggaaaggaattgacaatggggaacggtgagaaacttgttgagacggctatcggaaatatgtcgaaagtggttcccgtggtattactttcggcgcaagttagggctcatggcgtagggttttgtgacggaacttgccaacataacgccctagccaaaattaaaggtcaaaaagaaccacgacggtacataatggtaagcaacccggaggtggaatgtcccggagagtgcgcttggcctttccacacggccgataagggtccacgtggcatgacctatcaaccggcaagtggagaagtcggagctgacgcactggttattcagctagccaccggtttagccgatttggccaccaatccagatctaaccaagtccttattcaaatctgagacgacaccgtacaacgatgacgtaaagaaaaaccatgaatcttcgtcaatgtatattgtggaccctgcaaccaagtgcactcgggtttttggatccggagcttttccaggtttcactggtagaattcgggttgacccgattactggtggagcctttaattcacacggaatcaaccacttgaaattcttgattccttctatttgggaccctaagaccaaatcttgctggactcctatgtaa

SEQ ID NO: 46989 - protein, 347 aa, Arabidopsis thaliana
  peptide (1)..(347): Ceres Seq. ID no. 13646975
SKAKRTEKSFFHAVAMAMASASSSSSSISVIIFLLLAPLCLSREPPSQIPNGTLDLSLLWYGQFTPTQKERVHDFIESLNFDAKEGLDPKVSAWWKVVESYQERFEVKDIYRQKKSNRTVAPRIKVKVVRSYVDEKMKYGKELTMGNGEKLVETAIGNMSKVVPVVLLSAQVRAHGVGFCDGTCQHNALAKIKGQKEPRRYIMVSNPEVECPGECAWPFHTADKGPRGMTYQPASGEVGADALVIQLATGLADLATNPDLTKSLFKSETTPYNDDVKKNHESSSMYIVDPATKCTRVFGSGAFPGFTGRIRVDPITGGAFNSHGINHLKFLIPSIWDPKTKSCWTPM

SEQ ID NO: 46990 - protein, 332 aa, Arabidopsis thaliana
  peptide (1)..(332): Ceres Seq. ID no. 13646976
MAMASASSSSSSISVIIFLLLAPLCLSREPPSQIPNGTLDLSLLWYGQFTPTQKERVHDFIESLNFDAKEGLDPKVSAWWKVVESYQERFEVKDIYRQKKSNRTVAPRIKVKVVRSYVDEKMKYGKELTMGNGEKLVETAIGNMSKVVPVVLLSAQVRAHGVGFCDGTCQHNALAKIKGQKEPRRYIMVSNPEVECPGECAWPFHTADKGPRGMTYQPASGEVGADALVIQLATGLADLATNPDLTKSLFKSETTPYNDDVKKNHESSSMYIVDPATKCTRVFGSGAFPGFTGRIRVDPITGGAFNSHGINHLKFLIPSIWDPKTKSCWTPM

SEQ ID NO: 46991 - protein, 330 aa, Arabidopsis thaliana
  peptide (1)..(330): Ceres Seq. ID no. 13646977
MASASSSSSSISVIIFLLLAPLCLSREPPSQIPNGTLDLSLLWYGQFTPTQKERVHDFIESLNFDAKEGLDPKVSAWWKVVESYQERFEVKDIYRQKKSNRTVAPRIKVKVVRSYVDEKMKYGKELTMGNGEKLVETAIGNMSKVVPVVLLSAQVRAHGVGFCDGTCQHNALAKIKGQKEPRRYIMVSNPEVECPGECAWPFHTADKGPRGMTYQPASGEVGADALVIQLATGLADLATNPDLTKSLFKSETTPYNDDVKKNHESSSMYIVDPATKCTRVFGSGAFPGFTGRIRVDPITGGAFNSHGINHLKFLIPSIWDPKTKSCWTPM

SEQ ID NO: 46992 - DNA, 3225 bp, Arabidopsis thaliana; identical to SEQ ID NO: 45117
  misc_feature (1)..(3225): Ceres Seq. ID no. 12560311
  misc_feature (1)..(3225): Ortholog of  Ceres SEQ ID NO 14308128 as cited in SEQ ID NO 51081
  misc_feature (1)..(3225): Ortholog of  Ceres SEQ ID NO 15171088 as cited in SEQ ID NO 54178
  misc_feature (1)..(3225): Ortholog of  Ceres SEQ ID NO 13590691 as cited in SEQ ID NO 66290

SEQ ID NO: 46993 - protein, 920 aa, Arabidopsis thaliana; identical to SEQ ID NO: 45118
  peptide (1)..(920): Ceres Seq. ID no. 12560312

SEQ ID NO: 46994 - protein, 907 aa, Arabidopsis thaliana; identical to SEQ ID NO: 45119
  peptide (1)..(907): Ceres Seq. ID no. 12560313

SEQ ID NO: 46995 - protein, 765 aa, Arabidopsis thaliana; identical to SEQ ID NO: 45120
  peptide (1)..(765): Ceres Seq. ID no. 12560314

SEQ ID NO: 46996 - DNA, 3798 bp, Arabidopsis thaliana; identical to SEQ ID NO: 45415
  misc_feature (1)..(3798): Ceres Seq. ID no. 13618884
  misc_feature (1)..(3798): Ortholog of  Ceres SEQ ID NO 13658778 as cited in SEQ ID NO 66511

SEQ ID NO: 46997 - protein, 1081 aa, Arabidopsis thaliana; identical to SEQ ID NO: 45416
  peptide (1)..(1081): Ceres Seq. ID no. 13618885

SEQ ID NO: 46998 - protein, 1048 aa, Arabidopsis thaliana; identical to SEQ ID NO: 45417
  peptide (1)..(1048): Ceres Seq. ID no. 13618886

SEQ ID NO: 46999 - protein, 857 aa, Arabidopsis thaliana; identical to SEQ ID NO: 45418
  peptide (1)..(857): Ceres Seq. ID no. 13618887

SEQ ID NO: 47000 - DNA, 1298 bp, Arabidopsis thaliana; identical to SEQ ID NO: 27690
  misc_feature (1)..(1298): Ceres Seq. ID no. 12600704
  misc_feature (1)..(1298): Ortholog of  Ceres SEQ ID NO 12613953 as cited in SEQ ID NO 68388

SEQ ID NO: 47001 - protein, 327 aa, Arabidopsis thaliana; identical to SEQ ID NO: 27691
  peptide (1)..(327): Ceres Seq. ID no. 12600705

SEQ ID NO: 47002 - protein, 317 aa, Arabidopsis thaliana; identical to SEQ ID NO: 27692
  peptide (1)..(317): Ceres Seq. ID no. 12600706

SEQ ID NO: 47003 - protein, 311 aa, Arabidopsis thaliana; identical to SEQ ID NO: 27693
  peptide (1)..(311): Ceres Seq. ID no. 12600707

SEQ ID NO: 47004 - DNA, 1807 bp, Arabidopsis thaliana
  misc_feature (1)..(1807): Ceres Seq. ID no. 13591791
  misc_feature (1)..(1807): Ortholog of  Ceres SEQ ID NO 14313228 as cited in SEQ ID NO 67057
  misc_feature (1)..(1807): Ortholog of  Ceres SEQ ID NO 13584744 as cited in SEQ ID NO 69137
ggcagattcctttctcctcgagaacaaaaaaaacttctttttttttctctttctctcttggcttctctttagaaagtgactcaccagaaaaaaaaaagggtttttgcttttcgggtttagctaagaaaaatctttcaatcttccttaaatctttcaaaaccccaaaatgggacctcgttgctctaagctctctctctgttggtggccgacccatctcaaatcaactcacaacgaagcttctgatctagataacggaacggacgatttgccgtcgtttacggagtttagtttcgaccaactacgagctgctacttgtggattctctacagacagtattgtctccgaacatggtgttaaagctcctaatgttgtgtataaaggcagacttgaagatgaccgatggatcgctgttaaacgattcaatagatccgcttggcctgatactcgtcaatttcttgaagaagcaaaagctgtggggcagttgaggaatgagaggttggcgaatttgattggattctgttgtgaaggagacgagagattgctcgttgctgagtttatgccttttgaaactctctcgaagcatctctttcactgggatagtcagccaatgaagtggtctatgaggttgagagtggctttgtatcttgcacaagcacttgagtattgtagcagcaaaggtcgcgccttgtaccacgatcttaatgcttacaggatcttgtttgaccaggatggtaacccgagattatcttgctttggtcttatgaagaatagtagggatgggaagagttacagtacaaatttggctttcacacctcctgaatacctaagaacagggagagtgattccggagagtgtggtctacagcttcggaacgctgttgctagatcttctcagcggcaaacacataccaccaagccatgcgcttgatctgattcgtgggaagaatttcctgatgctgatggactcgtgtctagatggccatttctcaaacgatgatggaaccgatttggttcgtttagcttcccgttgtttgcagtatgaagctcgtgaaaggccaaatgtgaaatctctcgtgtcctcactcgctcctcttcagaaagaaactgatattccgtctcatgttttaatggggattccacatggagctgcttctccaaaggaaacaacttcgcttacccctcttggtgacgcttgttcacgacatgatctcacagcaatacatgaaattctcgaaaaggttggatacaaagatgacgagggtgtagcaaatgagctctcgttccaagtgtggaccgaccagattcaggagactctaaactccaagaaacaaggagatgctgcgttcaaaggcaaagactttgtcactgctgttgaatgttacacgcagttcatcgaagatggcacaatggtatcgccaacagtttttgcaaggaggtgtttgtgttatctgatgagcaatatgcctcaagaggctcttggtgatgcaatgcaggcgcaagtagtgtctcctgaatggccaacggctttctatcttcaggccgctgctctcttcagccttggaatggataaagacgcctgtgaaaccctaaaagatggaacttccttggaagccaagaaacataacaacagaaactgaaaacttcaagtgtataggtttcttctctcttccgccttcttcgttttgtgattggattctgagaaagcctcattgtctctgtcttctttaagcattatcttaaatttgtggtttccaatttgaagagatgattcaaatcacatttgaatcaagaaaagaaggatctttctc

SEQ ID NO: 47005 - protein, 489 aa, Arabidopsis thaliana
  peptide (1)..(489): Ceres Seq. ID no. 13591792
MGPRCSKLSLCWWPTHLKSTHNEASDLDNGTDDLPSFTEFSFDQLRAATCGFSTDSIVSEHGVKAPNVVYKGRLEDDRWIAVKRFNRSAWPDTRQFLEEAKAVGQLRNERLANLIGFCCEGDERLLVAEFMPFETLSKHLFHWDSQPMKWSMRLRVALYLAQALEYCSSKGRALYHDLNAYRILFDQDGNPRLSCFGLMKNSRDGKSYSTNLAFTPPEYLRTGRVIPESVVYSFGTLLLDLLSGKHIPPSHALDLIRGKNFLMLMDSCLDGHFSNDDGTDLVRLASRCLQYEARERPNVKSLVSSLAPLQKETDIPSHVLMGIPHGAASPKETTSLTPLGDACSRHDLTAIHEILEKVGYKDDEGVANELSFQVWTDQIQETLNSKKQGDAAFKGKDFVTAVECYTQFIEDGTMVSPTVFARRCLCYLMSNMPQEALGDAMQAQVVSPEWPTAFYLQAAALFSLGMDKDACETLKDGTSLEAKKHNNRN

SEQ ID NO: 47006 - protein, 359 aa, Arabidopsis thaliana
  peptide (1)..(359): Ceres Seq. ID no. 13591793
MPFETLSKHLFHWDSQPMKWSMRLRVALYLAQALEYCSSKGRALYHDLNAYRILFDQDGNPRLSCFGLMKNSRDGKSYSTNLAFTPPEYLRTGRVIPESVVYSFGTLLLDLLSGKHIPPSHALDLIRGKNFLMLMDSCLDGHFSNDDGTDLVRLASRCLQYEARERPNVKSLVSSLAPLQKETDIPSHVLMGIPHGAASPKETTSLTPLGDACSRHDLTAIHEILEKVGYKDDEGVANELSFQVWTDQIQETLNSKKQGDAAFKGKDFVTAVECYTQFIEDGTMVSPTVFARRCLCYLMSNMPQEALGDAMQAQVVSPEWPTAFYLQAAALFSLGMDKDACETLKDGTSLEAKKHNNRN

SEQ ID NO: 47007 - protein, 342 aa, Arabidopsis thaliana
  peptide (1)..(342): Ceres Seq. ID no. 13591794
MKWSMRLRVALYLAQALEYCSSKGRALYHDLNAYRILFDQDGNPRLSCFGLMKNSRDGKSYSTNLAFTPPEYLRTGRVIPESVVYSFGTLLLDLLSGKHIPPSHALDLIRGKNFLMLMDSCLDGHFSNDDGTDLVRLASRCLQYEARERPNVKSLVSSLAPLQKETDIPSHVLMGIPHGAASPKETTSLTPLGDACSRHDLTAIHEILEKVGYKDDEGVANELSFQVWTDQIQETLNSKKQGDAAFKGKDFVTAVECYTQFIEDGTMVSPTVFARRCLCYLMSNMPQEALGDAMQAQVVSPEWPTAFYLQAAALFSLGMDKDACETLKDGTSLEAKKHNNRN

SEQ ID NO: 47008 - DNA, 1066 bp, Arabidopsis thaliana
  misc_feature (1)..(1066): Ceres Seq. ID no. 12576107
  misc_feature (1)..(1066): Ortholog of  Ceres SEQ ID NO 14311683 as cited in SEQ ID NO 51263
  misc_feature (1)..(1066): Ortholog of  Ceres SEQ ID NO 13661430 as cited in SEQ ID NO 61258
  misc_feature (1)..(1066): Ortholog of  Ceres SEQ ID NO 13590940 as cited in SEQ ID NO 68653
  misc_feature (1)..(1066): Ortholog of  Ceres SEQ ID NO 14301982 as cited in SEQ ID NO 0
  misc_feature (1)..(1066): Ortholog of  Ceres SEQ ID NO 15179001 as cited in SEQ ID NO 0
  misc_feature (1)..(1066): Ortholog of  Ceres SEQ ID NO 15180040 as cited in SEQ ID NO 0
agaaaaatgacttcttcagtactaaccccaagcttaaagcttttagctatgacgaattcttcctcttcgacccttttttgtattccttctatcttcaacatctcgtcctctgaatctcaccgcttcaatttttccttatcctcacgacccgttaatctcacactctctctcaaatccaaaactcttcgtaactcatctcctgttgttactttcgtttcccaaacttcgaattgggctgaggaagaagaaggtgaggatggaagcatcggaggtacttcagtcactgtagatgagagtttcgagtctgaagacggtgttggattcccggagccaccggaagaggctaaattattcgtcggaaacttgccgtacgatgttgatagtcaagctttagctatgctctttgaacaagctggtactgttgagatttcagaggttatatacaatagggacactgatcaaagtcgtggatttgggtttgtaacaatgagtacagttgaagaagcagagaaagctgttgagaagttcaatagttttgaagtgaatgggaggcgtttgacagtaaacagagcagctccaagaggatcaagacctgaacgacaacctcgtgtatatgatgctgcgtttaggatctatgttgggaacctgccatgggatgtggatagtggtcgtttggaacgattatttagcgagcatgggaaagtagttgatgcccgagtggtttctgatagagagacaggtcgttcacgtgggtttgggtttgttcaaatgtcgaatgagaatgaagttaacgttgccattgctgctcttgatggacagaatttggaaggcagagcaattaaagtgaacgtggctgaggaacgaacaaggcgttgattttgatagctcagtgagtgttaatattgtgagttatgattagaaatgttctcacttacaattccaatgtagcgagtatgtgaaaccaaacttgagttcaagcttttgtaaacatattttctttattacccatcaaaacatattacaaaacattacacaaccttttatatgtacactaagacgtgggatg

SEQ ID NO: 47009 - protein, 291 aa, Arabidopsis thaliana
  peptide (1)..(291): Ceres Seq. ID no. 12576108
RKMTSSVLTPSLKLLAMTNSSSSTLFCIPSIFNISSSESHRFNFSLSSRPVNLTLSLKSKTLRNSSPVVTFVSQTSNWAEEEEGEDGSIGGTSVTVDESFESEDGVGFPEPPEEAKLFVGNLPYDVDSQALAMLFEQAGTVEISEVIYNRDTDQSRGFGFVTMSTVEEAEKAVEKFNSFEVNGRRLTVNRAAPRGSRPERQPRVYDAAFRIYVGNLPWDVDSGRLERLFSEHGKVVDARVVSDRETGRSRGFGFVQMSNENEVNVAIAALDGQNLEGRAIKVNVAEERTRR

SEQ ID NO: 47010 - protein, 289 aa, Arabidopsis thaliana
  peptide (1)..(289): Ceres Seq. ID no. 12576109
MTSSVLTPSLKLLAMTNSSSSTLFCIPSIFNISSSESHRFNFSLSSRPVNLTLSLKSKTLRNSSPVVTFVSQTSNWAEEEEGEDGSIGGTSVTVDESFESEDGVGFPEPPEEAKLFVGNLPYDVDSQALAMLFEQAGTVEISEVIYNRDTDQSRGFGFVTMSTVEEAEKAVEKFNSFEVNGRRLTVNRAAPRGSRPERQPRVYDAAFRIYVGNLPWDVDSGRLERLFSEHGKVVDARVVSDRETGRSRGFGFVQMSNENEVNVAIAALDGQNLEGRAIKVNVAEERTRR

SEQ ID NO: 47011 - protein, 275 aa, Arabidopsis thaliana
  peptide (1)..(275): Ceres Seq. ID no. 12576110
MTNSSSSTLFCIPSIFNISSSESHRFNFSLSSRPVNLTLSLKSKTLRNSSPVVTFVSQTSNWAEEEEGEDGSIGGTSVTVDESFESEDGVGFPEPPEEAKLFVGNLPYDVDSQALAMLFEQAGTVEISEVIYNRDTDQSRGFGFVTMSTVEEAEKAVEKFNSFEVNGRRLTVNRAAPRGSRPERQPRVYDAAFRIYVGNLPWDVDSGRLERLFSEHGKVVDARVVSDRETGRSRGFGFVQMSNENEVNVAIAALDGQNLEGRAIKVNVAEERTRR

SEQ ID NO: 47012 - DNA, 945 bp, Arabidopsis thaliana; identical to SEQ ID NO: 22011
  misc_feature (1)..(945): Ceres Seq. ID no. 13592238
  misc_feature (1)..(945): Ortholog of  Ceres SEQ ID NO 13594593 as cited in SEQ ID NO 52026

SEQ ID NO: 47013 - protein, 255 aa, Arabidopsis thaliana; identical to SEQ ID NO: 22012
  peptide (1)..(255): Ceres Seq. ID no. 13592239

SEQ ID NO: 47014 - protein, 241 aa, Arabidopsis thaliana; identical to SEQ ID NO: 22013
  peptide (1)..(241): Ceres Seq. ID no. 13592240

SEQ ID NO: 47015 - protein, 167 aa, Arabidopsis thaliana; identical to SEQ ID NO: 22014
  peptide (1)..(167): Ceres Seq. ID no. 13592241

SEQ ID NO: 47016 - DNA, 1917 bp, Arabidopsis thaliana
  misc_feature (1)..(1917): Ceres Seq. ID no. 12728489
  misc_feature (1)..(1917): Ortholog of  Ceres SEQ ID NO 13596509 as cited in SEQ ID NO 62004
  misc_feature (1)..(1917): Ortholog of  Ceres SEQ ID NO 14307904 as cited in SEQ ID NO 66440
  misc_feature (1)..(1917): Ortholog of  Ceres SEQ ID NO 13659971 as cited in SEQ ID NO 67565
  misc_feature (1)..(1917): Ortholog of  Ceres SEQ ID NO 13500385 as cited in SEQ ID NO 67583
aaacgaagatctatctgcatgatttgggcttagctttttcgtccccaaatattgcgcttcatcgagattgctagggtttctcctcttcgatcttcgctgctcatcaacatctattgattcaattttcgtgctattgtttccctctctgatttcttaatcggaaatttcgtctcgattcgattcattaggttccatcactcttttctgatcggtgaaaggaggagaagacctgttgttttcttatgtaagtgattctgatattcgttatctgttggctggtttgatgaggaagaagcggaaaggtagtgaaactgagggttgggagaatttaccagatgatttatcatgttcaactgcatcacgatcatccaacttcaggtcgcacttttcactagagggttatgctagacttaagaaacggtgtaaggagactgaagctgtcgagtctgttggttcctttaagagacgaattgctggtgttgctactgcacctccttgtggtgcatcatctttggtttcgtcaggaagaggtttgaagaggaagatagggtgcatagatgtttccacacagactggtaggaagaataaaatagacgatgactatgtttttggtcgaaatattgggaaagggaaatttgggtcagtcaggatctgtaagtctaggaagaatgggactgagtttgcttgtaaaactctgaagaagggggaggagactgttcaccgggaagttgagataatgcaacatttgtctggtcatcctcgggttgtcacattgcatgctgtgtatgaagagtcagactgtttccatcttgtgatggagctgtgttcagggggacgtttgattgatcagatggtaaaggtgggcaggtattctgagcaacgagcagctaatatattcaaggaccttatgctagtgatcaattattgccatgagatgggagttgtgcatagagatataaaacctgagaatattctcctaacagctgctgggaagatacagctggctgattttggcctcgccatgagaattgcaaaaggtcaaacactgtcaggattggcaggaagtcctgcttatgttgcacctgaagttctttccgaaaattattcagagaaggttgacgtttggagtgcaggtgtcctcttatacgctctcttgtctggtgtactcccttttaagggagactcattggatgctattttcgaagcaatcaaaaacgtgaagcttgatttcaacacgggagtgtgggagtctgtgtccaaacctgcccgtgatctcttggcgagaatgctaacaagggaagaatctgccagaatcacagcggatgaagtgctaaggcatccatggatactcttttacacagaccggacactcaagaccatgtgtatcaagtcgaagcacaagagtcaagcaggatcttctacgtgtctccagaatcgcagtcccacagagaaaactgacctaaacagagctgacagggaaaagaagataccatctgattcaccgactgattcattctccaacacagaggaggaagaagatgagagcggtgtggtcgatgtgcttgttgttgcaatcgccaacgtgaggatctcagaaccaaagagaagcagagtctgtagtcccaccaataaccccattgagcagcaacactcttctaacttgacctcgactagtacactctgtcgagctttctgacaaaaccacaaacgcagatgggcattgtccaagcgacaagctatggtttctccacgatcttagtgacctttctgttataatagttggtgatatgattctgtgttttttcctcttctatatctcttactttgaccatgtacagatcatgtaaatagaatatgctaaacaaatgattgatccgatttggatcggagttataaggtgttgtttctagtcccttc

SEQ ID NO: 47017 - protein, 470 aa, Arabidopsis thaliana
  peptide (1)..(470): Ceres Seq. ID no. 12728490
MRKKRKGSETEGWENLPDDLSCSTASRSSNFRSHFSLEGYARLKKRCKETEAVESVGSFKRRIAGVATAPPCGASSLVSSGRGLKRKIGCIDVSTQTGRKNKIDDDYVFGRNIGKGKFGSVRICKSRKNGTEFACKTLKKGEETVHREVEIMQHLSGHPRVVTLHAVYEESDCFHLVMELCSGGRLIDQMVKVGRYSEQRAANIFKDLMLVINYCHEMGVVHRDIKPENILLTAAGKIQLADFGLAMRIAKGQTLSGLAGSPAYVAPEVLSENYSEKVDVWSAGVLLYALLSGVLPFKGDSLDAIFEAIKNVKLDFNTGVWESVSKPARDLLARMLTREESARITADEVLRHPWILFYTDRTLKTMCIKSKHKSQAGSSTCLQNRSPTEKTDLNRADREKKIPSDSPTDSFSNTEEEEDESGVVDVLVVAIANVRISEPKRSRVCSPTNNPIEQQHSSNLTSTSTLCRAF

SEQ ID NO: 47018 - protein, 319 aa, Arabidopsis thaliana
  peptide (1)..(319): Ceres Seq. ID no. 12728491
MQHLSGHPRVVTLHAVYEESDCFHLVMELCSGGRLIDQMVKVGRYSEQRAANIFKDLMLVINYCHEMGVVHRDIKPENILLTAAGKIQLADFGLAMRIAKGQTLSGLAGSPAYVAPEVLSENYSEKVDVWSAGVLLYALLSGVLPFKGDSLDAIFEAIKNVKLDFNTGVWESVSKPARDLLARMLTREESARITADEVLRHPWILFYTDRTLKTMCIKSKHKSQAGSSTCLQNRSPTEKTDLNRADREKKIPSDSPTDSFSNTEEEEDESGVVDVLVVAIANVRISEPKRSRVCSPTNNPIEQQHSSNLTSTSTLCRAF

SEQ ID NO: 47019 - protein, 293 aa, Arabidopsis thaliana
  peptide (1)..(293): Ceres Seq. ID no. 12728492
MELCSGGRLIDQMVKVGRYSEQRAANIFKDLMLVINYCHEMGVVHRDIKPENILLTAAGKIQLADFGLAMRIAKGQTLSGLAGSPAYVAPEVLSENYSEKVDVWSAGVLLYALLSGVLPFKGDSLDAIFEAIKNVKLDFNTGVWESVSKPARDLLARMLTREESARITADEVLRHPWILFYTDRTLKTMCIKSKHKSQAGSSTCLQNRSPTEKTDLNRADREKKIPSDSPTDSFSNTEEEEDESGVVDVLVVAIANVRISEPKRSRVCSPTNNPIEQQHSSNLTSTSTLCRAF

SEQ ID NO: 47020 - DNA, 1479 bp, Arabidopsis thaliana
  misc_feature (1)..(1479): Ceres Seq. ID no. 14310182
  misc_feature (1)..(1479): Ortholog of  Ceres SEQ ID NO 14315063 as cited in SEQ ID NO 52256
  misc_feature (1)..(1479): Ortholog of  Ceres SEQ ID NO 14310736 as cited in SEQ ID NO 52901
  misc_feature (1)..(1479): Ortholog of  Ceres SEQ ID NO 14308594 as cited in SEQ ID NO 60384
  misc_feature (1)..(1479): Ortholog of  Ceres SEQ ID NO 13662880 as cited in SEQ ID NO 65422
  misc_feature (1)..(1479): Ortholog of  Ceres SEQ ID NO 14302071 as cited in SEQ ID NO 66585
  misc_feature (1)..(1479): Ortholog of  Ceres SEQ ID NO 14316013 as cited in SEQ ID NO 67181
  misc_feature (1)..(1479): Ortholog of  Ceres SEQ ID NO 12779098 as cited in SEQ ID NO 67698
  misc_feature (1)..(1479): Ortholog of  Ceres SEQ ID NO 13596180 as cited in SEQ ID NO 67941
  misc_feature (1)..(1479): Ortholog of  Ceres SEQ ID NO 13591190 as cited in SEQ ID NO 68044
gagagagaaattcacaacaaaaatggagactagggaaacaaaaccagtgatctttctcttccctttccctttacaaggtcacttaaacccaatgtttcagctcgccaacatcttcttcaacagaggcttctccatcactgtgatccacactaagttcaactctccaaactcttccaatttccctcacttcagtttcgtatccattcccgatggcttgtctgaacctgaatcctatcccgatgtcattgagattctccatgacctcaattccaagtgtgttgctccttttggtgattgcttaaagaagcttatatctgaagaaccaacagcagcttgtgtgattgttgacgctctttggtacttcactcacgatttaaccgagaaattcaatttcccgaggattgttctccgaaccgttaacctctcagctttcgtcgctttctcaaagtttcatgttttacgagagaaagggtatctttctttacaagagactaaggcagactcaccggttccggagcttccgtatcttagaatgaaggatcttccatggttccagacagaagatccaagatcaggggataagttacagataggtgtgatgaagtcactaaagtcttcctcaggaatcatattcaaagccattgaagatcttgaaacagatcagcttgatgaagcccgcatagaattcccagttccactcttctgtattggaccctttcacaggtacgtttcagcttcatccagtagcttacttgcacacgacatgacttgtctctcctggttagacaagcaagcaacaaattccgtaatctacgcaagtcttggaagcattgcttcgatcgatgaatctgaattcttggagattgcttggggtctaagaaacagcaaccaaccttttctatgggtggttagacccggtttaatccacgggaaagaatggatcgagattctgcctaaagggttcatcaaaaatctcgagggccggtgtaaaatagtgaaatgggcacctcagcctgaagttttagctcaccgtgcaacaggcggattcttaacacattgtggatggaactcaacacttgagggcatatgtgaagctataccaatgatatgcagaccatcttttggggaccagagggtgaatgctagatacattaacgatgtttggaagatcggattgcatttggaaaacaaggtagagagactagtgatcgaaaacgcggttagaacactaatgacgagctcggaaggggaagagatccgcaagaggattatgcccatgaaggaaactgttgaacaatgccttaagcttggaggttcatcatttcggaatctcgaaaacttaattgcttatatattgtctttctaatgcggtgttcttcttctccacatccaaatttgctttcctttgatttaatctgcattcccataataagacacattttatcattcaaaaactttaccatgtatatttgaattatc

SEQ ID NO: 47021 - protein, 454 aa, Arabidopsis thaliana
  peptide (1)..(454): Ceres Seq. ID no. 14310183
REKFTTKMETRETKPVIFLFPFPLQGHLNPMFQLANIFFNRGFSITVIHTKFNSPNSSNFPHFSFVSIPDGLSEPESYPDVIEILHDLNSKCVAPFGDCLKKLISEEPTAACVIVDALWYFTHDLTEKFNFPRIVLRTVNLSAFVAFSKFHVLREKGYLSLQETKADSPVPELPYLRMKDLPWFQTEDPRSGDKLQIGVMKSLKSSSGIIFKAIEDLETDQLDEARIEFPVPLFCIGPFHRYVSASSSSLLAHDMTCLSWLDKQATNSVIYASLGSIASIDESEFLEIAWGLRNSNQPFLWVVRPGLIHGKEWIEILPKGFIKNLEGRCKIVKWAPQPEVLAHRATGGFLTHCGWNSTLEGICEAIPMICRPSFGDQRVNARYINDVWKIGLHLENKVERLVIENAVRTLMTSSEGEEIRKRIMPMKETVEQCLKLGGSSFRNLENLIAYILSF

SEQ ID NO: 47022 - protein, 447 aa, Arabidopsis thaliana
  peptide (1)..(447): Ceres Seq. ID no. 14310184
METRETKPVIFLFPFPLQGHLNPMFQLANIFFNRGFSITVIHTKFNSPNSSNFPHFSFVSIPDGLSEPESYPDVIEILHDLNSKCVAPFGDCLKKLISEEPTAACVIVDALWYFTHDLTEKFNFPRIVLRTVNLSAFVAFSKFHVLREKGYLSLQETKADSPVPELPYLRMKDLPWFQTEDPRSGDKLQIGVMKSLKSSSGIIFKAIEDLETDQLDEARIEFPVPLFCIGPFHRYVSASSSSLLAHDMTCLSWLDKQATNSVIYASLGSIASIDESEFLEIAWGLRNSNQPFLWVVRPGLIHGKEWIEILPKGFIKNLEGRCKIVKWAPQPEVLAHRATGGFLTHCGWNSTLEGICEAIPMICRPSFGDQRVNARYINDVWKIGLHLENKVERLVIENAVRTLMTSSEGEEIRKRIMPMKETVEQCLKLGGSSFRNLENLIAYILSF

SEQ ID NO: 47023 - protein, 424 aa, Arabidopsis thaliana
  peptide (1)..(424): Ceres Seq. ID no. 14310185
MFQLANIFFNRGFSITVIHTKFNSPNSSNFPHFSFVSIPDGLSEPESYPDVIEILHDLNSKCVAPFGDCLKKLISEEPTAACVIVDALWYFTHDLTEKFNFPRIVLRTVNLSAFVAFSKFHVLREKGYLSLQETKADSPVPELPYLRMKDLPWFQTEDPRSGDKLQIGVMKSLKSSSGIIFKAIEDLETDQLDEARIEFPVPLFCIGPFHRYVSASSSSLLAHDMTCLSWLDKQATNSVIYASLGSIASIDESEFLEIAWGLRNSNQPFLWVVRPGLIHGKEWIEILPKGFIKNLEGRCKIVKWAPQPEVLAHRATGGFLTHCGWNSTLEGICEAIPMICRPSFGDQRVNARYINDVWKIGLHLENKVERLVIENAVRTLMTSSEGEEIRKRIMPMKETVEQCLKLGGSSFRNLENLIAYILSF

SEQ ID NO: 47024 - DNA, 2930 bp, Arabidopsis thaliana
  misc_feature (1)..(2930): Ceres Seq. ID no. 13591795
  misc_feature (1)..(2930): Ortholog of  Ceres SEQ ID NO 14303487 as cited in SEQ ID NO 54521
  misc_feature (1)..(2930): Ortholog of  Ceres SEQ ID NO 14316302 as cited in SEQ ID NO 55232
  misc_feature (1)..(2930): Ortholog of  Ceres SEQ ID NO 14308274 as cited in SEQ ID NO 55597
  misc_feature (1)..(2930): Ortholog of  Ceres SEQ ID NO 13659710 as cited in SEQ ID NO 60808
aaatctcctcacctgcaagagaaaaaaaaaactttcattttattcgtcgtcagtttcatcttgttgcttcggagcgagcgagaattatcgtcggagaatttatcgtctctctctctgaaaattctgatcggtgaagaatcgtcggatcgaaagttcgtttatcttctcgtttacgtttccgtgatttaaatcctttggggtttttttttcttggtaatgtctgtgtttctgaatgtgtggttgatttttgttcgtacactttactttgatcgattaggtttatgtatagttaattgaaattttttggaagatttcagaagaagaagagaagaaacaatccgtaatctagacccttgaattgacctaataataggatacatatgatgactatgaagcagtctttgagtggcagggttcttaggggggtctttggtatctatctgtaggagggcttttaggtgctgtttcgggagattaaagccagattcaaggtgagtctgagagcttggttcttgtatcttcttgtttaccaatgggaatctaggtcactgagaaaccatccttcttgttgatctagtggaaaaaatcgattatttttctatcccaagtagttgctttttctttcttaaccttaacttgtgcaatcttcattctacctaagcatttccccttgataatgaaactctttaatcatctctgatttggccaagagtgttctttttttttgtcatctcatctatggtggattaacagaggttcctcttagttattcttcaagaaggcggcatgaatgctcactttgtttgtagtctgcttatctcagctatggtctccatagtgagtttcccttagagcatatctcgttgttgtccatgatgaagtttttgctccatgcggatcttgtgaacttgctagtagaatttttccgggtaacggcatcagaagatttttattccttcgattatggggttaccatttaggtcaagccaaaacaggtcagctttaaagatgggggtccattaactaggagtacccttcaagcctttgtttccttaaagaaatttctgattcgtatgttgactgaagagatctggtgcaaagtggcagtgggaggtaggtctatcctctttggacacttacccatctctttaaaacccggttatcccaagttttatgtcagtcccaaaccttgtttgatggtgtttgccttgcttttacgataggttggtcatatccggttgaaactggatagatttcccaagattgaaggactgaagtgaacactcaatgtgctaagcttttatttctctatgaaagctccatcaaccaagagggctgtttttagttgtttaacagggtatttgtagatcttcttgttttggtgattgttcctcttggagaaagctgattggagctgtttcaaaaatggattgtcttggtgtggtgcaatgtagatggaagcaacagttcatcgagtttttttgctggattttcaggtgactgataatgtttgcgaaatgaggaatagattttctaaatattttcttacttgcaggtttcataagctttccatcaactagcagtatctgccaatatcacagacagataattcgtaatgggagacgtatatttcaaccatttcgctcagcaactgcagatgtctgaccaagagaagggtgaaatgtcaagacattcacaccctcattcaatcaatgaagaatctgagtcgtcaactctggaaagggtagcagcagagtcattaacaaacaaagtccttgatagaggactaatggagtatgggtaggttttactccctatttgtatattcttagctttgagcttgtttcttggatgaatacccctatgttcttgcagatgtccacattacagaagaaggtgttgcattagagctccttgctgtaatgagatctttggttgccatcactgtcattatgaggcgaagaacaacataaatgtagatcagaagcagaggcatgatattcctcgccaccaagttgaacaggttatttgtttactttgtggtactgaacaagaggtgggccaaatttgtatccactgtggagtgtgcatggggaagtacttctgtaaagtctgcaagctctacgatgatgatacgtctaaaaaacagtaccactgcgatgggtgtggaatttgcagaatcggaggacgtgaaaatttctttcactgttacaagtgtggctgttgttattcaatcctcctcaagaacggtcacccttgtgtcgaaggagcaatgcatcacgactgccccatttgctttgagtttctgtttgaatcacggaacgatgtgacggttttaccatgtggacacacaattcatcagaagtgcttggaggaaatgagagatcattaccaatatgcgtgcccactttgctcaaaatctgtatgcgacatgtcaaaagtgtgggagaagtttgacatggagattgcggctacaccaatgccagaaccataccagaacagaatggttcagattctctgcaacgactgtgggaagaaagcagaggtacagtaccatgtggtggctcagaaatgcccaaactgcaaatcatacaacactcgccaaaccagaggctgaagctttttttgaagttgatttgctatcaaatgcaattaagagcttttcacttgatccaatagtgtcattggatccttaacttgaggactgggtctctcgagtctatctcttctcactctcttcttcaatattctctgagtcgtctcttgttcactagtctatatgtttccttggtgttgtttgatggtctggttagtttccattgtgattcatctcctttgtaattctgcggctttattgaaaagtttcgtttaatctgttaaaaaccctaaaaaatttgaacttgtatgaataaaaaattttagctgctcgc

SEQ ID NO: 47025 - protein, 175 aa, Arabidopsis thaliana
  peptide (1)..(175): Ceres Seq. ID no. 13591796
MGKYFCKVCKLYDDDTSKKQYHCDGCGICRIGGRENFFHCYKCGCCYSILLKNGHPCVEGAMHHDCPICFEFLFESRNDVTVLPCGHTIHQKCLEEMRDHYQYACPLCSKSVCDMSKVWEKFDMEIAATPMPEPYQNRMVQILCNDCGKKAEVQYHVVAQKCPNCKSYNTRQTRG

SEQ ID NO: 47026 - protein, 114 aa, Arabidopsis thaliana
  peptide (1)..(114): Ceres Seq. ID no. 13591797
MHHDCPICFEFLFESRNDVTVLPCGHTIHQKCLEEMRDHYQYACPLCSKSVCDMSKVWEKFDMEIAATPMPEPYQNRMVQILCNDCGKKAEVQYHVVAQKCPNCKSYNTRQTRG

SEQ ID NO: 47027 - protein, 111 aa, Arabidopsis thaliana
  peptide (1)..(111): Ceres Seq. ID no. 13591798
MIFLATKLNRLFVYFVVLNKRWAKFVSTVECAWGSTSVKSASSTMMIRLKNSTTAMGVEFAESEDVKISFTVTSVAVVIQSSSRTVTLVSKEQCITTAPFALSFCLNHGTM

SEQ ID NO: 47028 - DNA, 2058 bp, Arabidopsis thaliana
  misc_feature (1)..(2058): Ceres Seq. ID no. 12574655
  misc_feature (1)..(2058): Ortholog of  Ceres SEQ ID NO 14307374 as cited in SEQ ID NO 54073
atgggttgtggatttcacttcccttggttcttcttcttgatcattggccttcaagctcctctctcattgtccctcacttcccaaggatccgcattgttgaagttccgggcaagagtcaactcagatcctcatgggactcttgcgaattggaatgtttctggtattaatgatctctgctattggtcaggggttacttgtgttgacggtaaagtgcagattctggatcttagcggatattctttggaaggaacgttagctcctgagcttagccaattgagtgacttaagatctctaatactctctcggaaccatttctccggtggaattccaaaggagtatgggagtttcgaaaacttggaagtcctggatttgagagagaatgatttgagcggacaaattccacctgagctaagcaatggcttatcgctaaaacacttgttgctttctggtaacaaattttcggatgatatgagaataaagatcgtgagacttcaatcttcgtatgaagttcggttaaagaagagtccaaagttatcacctttggctgttctcggctgtattaacagaaaacttggacactgtgtttcaagaaaccgtatcattcaagtaaaaaaggtagaagctattgtattccggatcaaagcaacctccagacgtttcttgaaagcattccctagctttttggaggaaactgatatctacaaacgacgtgagctactcgaggagacaagtaatttagcggctgagcctgctccttcagctcctagtccttctcccgggattataactgaagcttcacctcgaagcagcgggtctttccctgcagtaaccaatgcaaagaagagaagaccacctttagtccctcctgtaccttctcctgataagggcagtactagtcctgatatctctaagaatcagccacaagataataaacagtcaaaaggatcaaaacatgtatggctgtatgtggttatcgcggttgcttctttcgtcggtttactgattatagtagcggttatcttcttctgccggaaaagagctgtcaagagcataggtccttggaaaactggtcttagtggacaattgcagaaagcttttgttaccggggtaccaaagctcaatcggtctgagcttgaaacagcgtgtgaagatttcagcaacatcatagagacatttgacggttacactgtgtataaaggaacattgtcgagtggtgttgagatagcggtagcttcaaccgcgattgctgaatctaaagaatggacaagagccatggaaatggcataccgtagaaagattgatactctgtcacggatcaaccataagaactttgtgaatctgattggatactgcgaagaagatgatccttttaataggatgatggtctttgaatatgctccaaatggaactcttttcgaacatttgcacgttaataacgttttccgcctatcagataaggagacagagcatcttgattggagcgcacggatgagaataataatgggaacggcttactgtcttcaacatatgcacgggatgaacccgcctatggctcatacggacttcaattcatcggaaatctacctaaccgatgactacgcagccaaggtctcggagattccattcaacttagaggcaagattaaatccgaagaaacacgtgagtggagacttagagcaaacgtcattgttactacctccagaaccggaggctaacgtccatagcttcggagtcctgatgctcgaaatcatctctggaaagctctctttctcagacgaatacggatctatcgagcaatgggcatcgaagtaccttgaaaaagacgacttgggagagatgatagatccatcgttaaagacattcaaagaagaggagcttgaagtgatctgcgatgtgatacgagaatgtctgaaaacagaacagagacaacgaccttcaatgaaagatgtagcggaacaactgaaacaagttatcaacataactcctgagaaagctactccaagatcctctcctctttggtgggcagagctcgaaatcttgtcctctgaagctacttga

SEQ ID NO: 47029 - protein, 685 aa, Arabidopsis thaliana
  peptide (1)..(685): Ceres Seq. ID no. 12574656
MGCGFHFPWFFFLIIGLQAPLSLSLTSQGSALLKFRARVNSDPHGTLANWNVSGINDLCYWSGVTCVDGKVQILDLSGYSLEGTLAPELSQLSDLRSLILSRNHFSGGIPKEYGSFENLEVLDLRENDLSGQIPPELSNGLSLKHLLLSGNKFSDDMRIKIVRLQSSYEVRLKKSPKLSPLAVLGCINRKLGHCVSRNRIIQVKKVEAIVFRIKATSRRFLKAFPSFLEETDIYKRRELLEETSNLAAEPAPSAPSPSPGIITEASPRSSGSFPAVTNAKKRRPPLVPPVPSPDKGSTSPDISKNQPQDNKQSKGSKHVWLYVVIAVASFVGLLIIVAVIFFCRKRAVKSIGPWKTGLSGQLQKAFVTGVPKLNRSELETACEDFSNIIETFDGYTVYKGTLSSGVEIAVASTAIAESKEWTRAMEMAYRRKIDTLSRINHKNFVNLIGYCEEDDPFNRMMVFEYAPNGTLFEHLHVNNVFRLSDKETEHLDWSARMRIIMGTAYCLQHMHGMNPPMAHTDFNSSEIYLTDDYAAKVSEIPFNLEARLNPKKHVSGDLEQTSLLLPPEPEANVHSFGVLMLEIISGKLSFSDEYGSIEQWASKYLEKDDLGEMIDPSLKTFKEEELEVICDVIRECLKTEQRQRPSMKDVAEQLKQVINITPEKATPRSSPLWWAELEILSSEAT

SEQ ID NO: 47030 - protein, 529 aa, Arabidopsis thaliana
  peptide (1)..(529): Ceres Seq. ID no. 12574657
MRIKIVRLQSSYEVRLKKSPKLSPLAVLGCINRKLGHCVSRNRIIQVKKVEAIVFRIKATSRRFLKAFPSFLEETDIYKRRELLEETSNLAAEPAPSAPSPSPGIITEASPRSSGSFPAVTNAKKRRPPLVPPVPSPDKGSTSPDISKNQPQDNKQSKGSKHVWLYVVIAVASFVGLLIIVAVIFFCRKRAVKSIGPWKTGLSGQLQKAFVTGVPKLNRSELETACEDFSNIIETFDGYTVYKGTLSSGVEIAVASTAIAESKEWTRAMEMAYRRKIDTLSRINHKNFVNLIGYCEEDDPFNRMMVFEYAPNGTLFEHLHVNNVFRLSDKETEHLDWSARMRIIMGTAYCLQHMHGMNPPMAHTDFNSSEIYLTDDYAAKVSEIPFNLEARLNPKKHVSGDLEQTSLLLPPEPEANVHSFGVLMLEIISGKLSFSDEYGSIEQWASKYLEKDDLGEMIDPSLKTFKEEELEVICDVIRECLKTEQRQRPSMKDVAEQLKQVINITPEKATPRSSPLWWAELEILSSEAT

SEQ ID NO: 47031 - DNA, 1509 bp, Arabidopsis thaliana; identical to SEQ ID NO: 43466
  misc_feature (1)..(1509): Ceres Seq. ID no. 13646986
  misc_feature (1)..(1509): Ortholog of  Ceres SEQ ID NO 14311572 as cited in SEQ ID NO 51713
  misc_feature (1)..(1509): Ortholog of  Ceres SEQ ID NO 14308664 as cited in SEQ ID NO 55450
  misc_feature (1)..(1509): Ortholog of  Ceres SEQ ID NO 15226673 as cited in SEQ ID NO 66997
  misc_feature (1)..(1509): Ortholog of  Ceres SEQ ID NO 14302998 as cited in SEQ ID NO 67440

SEQ ID NO: 47032 - protein, 393 aa, Arabidopsis thaliana; identical to SEQ ID NO: 43467
  peptide (1)..(393): Ceres Seq. ID no. 13646987

SEQ ID NO: 47033 - protein, 383 aa, Arabidopsis thaliana; identical to SEQ ID NO: 43468
  peptide (1)..(383): Ceres Seq. ID no. 13646988

SEQ ID NO: 47034 - protein, 284 aa, Arabidopsis thaliana; identical to SEQ ID NO: 43469
  peptide (1)..(284): Ceres Seq. ID no. 13646989

SEQ ID NO: 47035 - DNA, 2079 bp, Arabidopsis thaliana
  misc_feature (1)..(2079): Ceres Seq. ID no. 13578677
  misc_feature (1)..(2079): Ortholog of  Ceres SEQ ID NO 14314659 as cited in SEQ ID NO 56868
gaatcaaagagagagatcccgtaaatgttttatactctgatttctagggtttgcttttgattctctttcgcgttccagataaataaatccttttgtggaataatttcgtgatttcgtttgtgggttatccgaattttgtctgaatttgagtttttgagaaggaaaggtttgttttttcgggggatggtggaaatgaggaaatctggaggtttaagaccggagtctgaatcggcggccaggtgccgagatgagctaccggtgaaattggagattgctgaagatgatttagaagaagagcatggtcctctcaacaaacgatctaggttatggagtcctgggacaagctcatcgacaatggcaccagctaagtataacccgcttgatgagccgagtcctcttggattgagtcttaagaagagtccatctttgttggagttgattcagatgaagataacgcattgtggtgatcctaaagcagctgaaacgttgaaagctggtgcacttggctctggtcttaagagagaaagtaaaactattgctgctgctgcatcagttggaccgactttggcgccaggaagtattgagaagctgaaagcttctaactttcctgcttcgcttttgaagatcgggcagtgggagtataaatcgaggtatgaaggtgatttggtggcaaagtgttactttgctaaacacaaacttgtttgggaagtgttggaacaaggtcttaagagtaaaatcgagatccagtggtcagatattatggctttgaaggcaaactgtcctgaagacggacctggaactttgactctcgtgcttgctagacagcccttatttttccgggaaacaaacccacagcctagaaagcataccttgtggcaggcgacatcagatttcactgatggccaagccagcatgaacaggcagcattttctgcaatgtgctcaagggataatgaacaaacattttgaaaagctcgttcaatgtgatcatcgtctgttccatctaagccgacagccggagatagctattgactctccctactttgatgcacggcaatctatttttgaggatccaagtgaatcaaaaggccatccttttgggaatttgaatcttagtacaggtccttcgatctctgggactcagaatttagcatctcctgttggggctcagtcatcatctgagcatatgtatctgtctcatgaagcaccatcacccagctcagtgatagatgctcgtgcaaatgaaggaattgggggttctgaagcagtcaattcaagaaacagaacagattgtggtcagatcgaagcacctggaatacaccaatctatgtcactgagtgatttccttgcggttctctgtgatacaaaaaacacaacggatttgaatctggctgacgacgtagatggactacaccaatctatgtcagttagtgatttcgttgcatatttatctgattcaagaaacataactgattcagatcagataaaagtacctggactacaccaatctatgtcagtgagcgatttcgttggacttctctctgattctgctggtggaagtcatccggaacatatggagaaatttgagatcatgaaacagcagttgctaagtgataatatccagttcgaggcaccagatgagaagtctctcatgccaagggttaactctttattcaacctcttgtacaaggatcccaacgtcgctgcaaactcacagctcaataccgaaatgtcggttggattgaagtctgaacccaagggaattgtttctgacaacaacaacaacaacaacaacaacaacagagttcttgatacagcttctagcagcaaaccacagggtatgttaaggaaagactcattcagcgatttgctattacacctcccccggatcacatccttgccaaagttcttgtccaacatttcagaagaagatggtgatgcatataatagataatttatagataccgcctttcttttctggatttggcaagtataggaacctggactagtagcttttctgttttttttttcttgtaaatcaaaattatcacttggtaactacaacccccacagggatttg

SEQ ID NO: 47036 - protein, 589 aa, Arabidopsis thaliana
  peptide (1)..(589): Ceres Seq. ID no. 13578678
MVEMRKSGGLRPESESAARCRDELPVKLEIAEDDLEEEHGPLNKRSRLWSPGTSSSTMAPAKYNPLDEPSPLGLSLKKSPSLLELIQMKITHCGDPKAAETLKAGALGSGLKRESKTIAAAASVGPTLAPGSIEKLKASNFPASLLKIGQWEYKSRYEGDLVAKCYFAKHKLVWEVLEQGLKSKIEIQWSDIMALKANCPEDGPGTLTLVLARQPLFFRETNPQPRKHTLWQATSDFTDGQASMNRQHFLQCAQGIMNKHFEKLVQCDHRLFHLSRQPEIAIDSPYFDARQSIFEDPSESKGHPFGNLNLSTGPSISGTQNLASPVGAQSSSEHMYLSHEAPSPSSVIDARANEGIGGSEAVNSRNRTDCGQIEAPGIHQSMSLSDFLAVLCDTKNTTDLNLADDVDGLHQSMSVSDFVAYLSDSRNITDSDQIKVPGLHQSMSVSDFVGLLSDSAGGSHPEHMEKFEIMKQQLLSDNIQFEAPDEKSLMPRVNSLFNLLYKDPNVAANSQLNTEMSVGLKSEPKGIVSDNNNNNNNNNRVLDTASSSKPQGMLRKDSFSDLLLHLPRITSLPKFLSNISEEDGDAYNR

SEQ ID NO: 47037 - protein, 586 aa, Arabidopsis thaliana
  peptide (1)..(586): Ceres Seq. ID no. 13578679
MRKSGGLRPESESAARCRDELPVKLEIAEDDLEEEHGPLNKRSRLWSPGTSSSTMAPAKYNPLDEPSPLGLSLKKSPSLLELIQMKITHCGDPKAAETLKAGALGSGLKRESKTIAAAASVGPTLAPGSIEKLKASNFPASLLKIGQWEYKSRYEGDLVAKCYFAKHKLVWEVLEQGLKSKIEIQWSDIMALKANCPEDGPGTLTLVLARQPLFFRETNPQPRKHTLWQATSDFTDGQASMNRQHFLQCAQGIMNKHFEKLVQCDHRLFHLSRQPEIAIDSPYFDARQSIFEDPSESKGHPFGNLNLSTGPSISGTQNLASPVGAQSSSEHMYLSHEAPSPSSVIDARANEGIGGSEAVNSRNRTDCGQIEAPGIHQSMSLSDFLAVLCDTKNTTDLNLADDVDGLHQSMSVSDFVAYLSDSRNITDSDQIKVPGLHQSMSVSDFVGLLSDSAGGSHPEHMEKFEIMKQQLLSDNIQFEAPDEKSLMPRVNSLFNLLYKDPNVAANSQLNTEMSVGLKSEPKGIVSDNNNNNNNNNRVLDTASSSKPQGMLRKDSFSDLLLHLPRITSLPKFLSNISEEDGDAYNR

SEQ ID NO: 47038 - protein, 532 aa, Arabidopsis thaliana
  peptide (1)..(532): Ceres Seq. ID no. 13578680
MAPAKYNPLDEPSPLGLSLKKSPSLLELIQMKITHCGDPKAAETLKAGALGSGLKRESKTIAAAASVGPTLAPGSIEKLKASNFPASLLKIGQWEYKSRYEGDLVAKCYFAKHKLVWEVLEQGLKSKIEIQWSDIMALKANCPEDGPGTLTLVLARQPLFFRETNPQPRKHTLWQATSDFTDGQASMNRQHFLQCAQGIMNKHFEKLVQCDHRLFHLSRQPEIAIDSPYFDARQSIFEDPSESKGHPFGNLNLSTGPSISGTQNLASPVGAQSSSEHMYLSHEAPSPSSVIDARANEGIGGSEAVNSRNRTDCGQIEAPGIHQSMSLSDFLAVLCDTKNTTDLNLADDVDGLHQSMSVSDFVAYLSDSRNITDSDQIKVPGLHQSMSVSDFVGLLSDSAGGSHPEHMEKFEIMKQQLLSDNIQFEAPDEKSLMPRVNSLFNLLYKDPNVAANSQLNTEMSVGLKSEPKGIVSDNNNNNNNNNRVLDTASSSKPQGMLRKDSFSDLLLHLPRITSLPKFLSNISEEDGDAYNR

SEQ ID NO: 47039 - DNA, 824 bp, Arabidopsis thaliana
  misc_feature (1)..(824): Ceres Seq. ID no. 13592007
  misc_feature (1)..(824): Ortholog of  Ceres SEQ ID NO 13597524 as cited in SEQ ID NO 64782
agtcatcatcaaagctttctgatacctgaacaacaacaacaacccctaaaatctcggaagccataatgagcagagcattgttcaggaacgtagccgtcgacaccgctcggctcatacggcggaacgcggcggcgtcaacagaccaatatggtaagaccggagttgctcaatcgagaccttatttccggtcacgtcagcttctcgaaagagcaaaagaaacaggagtctcaccttctccttctttgggtttctcttcttcttcatctccgtcgaggattgggttcgttggatggtatcttggtatggttaaatcacacccagttgtgaccaaaagtgtcacttcctctcttatttacattgccgccgacttgtcttctcagacgattgcgaaaacttcttctgagtcttatgacttggtgagaacagcaaggatgggaggatatggtttatttgtcttgggtccaacacttcactactggttcaatttcatgtcaagactctttcctaaacaagatttgatcacaacgtttaagaaaatggctatgggacagacgatctacgggcctattatgactgttattttcttctcattgaatgcatccctacaaggggaacgcggttcagttatacttgccagattgaaaagggacttactccccgcgctctttaacggtgtcatgtattggcctctatgtgattttatcacattcagattcttccctgttcatttacagcctcttgtaagcaactcattttcgtatgtatggactatctacatgacttacatggcaaaccgtgaaaaaccagtcgcaatttcaacctga

SEQ ID NO: 47040 - protein, 252 aa, Arabidopsis thaliana
  peptide (1)..(252): Ceres Seq. ID no. 13592008
MSRALFRNVAVDTARLIRRNAAASTDQYGKTGVAQSRPYFRSRQLLERAKETGVSPSPSLGFSSSSSPSRIGFVGWYLGMVKSHPVVTKSVTSSLIYIAADLSSQTIAKTSSESYDLVRTARMGGYGLFVLGPTLHYWFNFMSRLFPKQDLITTFKKMAMGQTIYGPIMTVIFFSLNASLQGERGSVILARLKRDLLPALFNGVMYWPLCDFITFRFFPVHLQPLVSNSFSYVWTIYMTYMANREKPVAIST

SEQ ID NO: 47041 - protein, 173 aa, Arabidopsis thaliana
  peptide (1)..(173): Ceres Seq. ID no. 13592009
MVKSHPVVTKSVTSSLIYIAADLSSQTIAKTSSESYDLVRTARMGGYGLFVLGPTLHYWFNFMSRLFPKQDLITTFKKMAMGQTIYGPIMTVIFFSLNASLQGERGSVILARLKRDLLPALFNGVMYWPLCDFITFRFFPVHLQPLVSNSFSYVWTIYMTYMANREKPVAIST

SEQ ID NO: 47042 - protein, 130 aa, Arabidopsis thaliana
  peptide (1)..(130): Ceres Seq. ID no. 13592010
MGGYGLFVLGPTLHYWFNFMSRLFPKQDLITTFKKMAMGQTIYGPIMTVIFFSLNASLQGERGSVILARLKRDLLPALFNGVMYWPLCDFITFRFFPVHLQPLVSNSFSYVWTIYMTYMANREKPVAIST

SEQ ID NO: 47043 - DNA, 2739 bp, Arabidopsis thaliana; identical to SEQ ID NO: 46051
  misc_feature (1)..(2739): Ceres Seq. ID no. 13591630
  misc_feature (1)..(2739): Ortholog of  Ceres SEQ ID NO 15172609 as cited in SEQ ID NO 61938
  misc_feature (1)..(2739): Ortholog of  Ceres SEQ ID NO 13595870 as cited in SEQ ID NO 62101
  misc_feature (1)..(2739): Ortholog of  Ceres SEQ ID NO 13590241 as cited in SEQ ID NO 63878
  misc_feature (1)..(2739): Ortholog of  Ceres SEQ ID NO 13657939 as cited in SEQ ID NO 66349
  misc_feature (1)..(2739): Ortholog of  Ceres SEQ ID NO 13660597 as cited in SEQ ID NO 67655
  misc_feature (1)..(2739): Ortholog of  Ceres SEQ ID NO 13654484 as cited in SEQ ID NO 67717

SEQ ID NO: 47044 - protein, 809 aa, Arabidopsis thaliana; identical to SEQ ID NO: 46052
  peptide (1)..(809): Ceres Seq. ID no. 13591631

SEQ ID NO: 47045 - protein, 760 aa, Arabidopsis thaliana; identical to SEQ ID NO: 46053
  peptide (1)..(760): Ceres Seq. ID no. 13591632

SEQ ID NO: 47046 - protein, 722 aa, Arabidopsis thaliana; identical to SEQ ID NO: 46054
  peptide (1)..(722): Ceres Seq. ID no. 13591633

SEQ ID NO: 47047 - DNA, 1255 bp, Arabidopsis thaliana
  misc_feature (1)..(1255): Ceres Seq. ID no. 13578681
  misc_feature (1)..(1255): Ortholog of  Ceres SEQ ID NO 13648400 as cited in SEQ ID NO 20329
  misc_feature (1)..(1255): Ortholog of  Ceres SEQ ID NO 13659393 as cited in SEQ ID NO 67047
  misc_feature (1)..(1255): Ortholog of  Ceres SEQ ID NO 13654553 as cited in SEQ ID NO 68417
  misc_feature (1)..(1255): Ortholog of  Ceres SEQ ID NO 12635162 as cited in SEQ ID NO 0
  misc_feature (1)..(1255): Ortholog of  Ceres SEQ ID NO 15175178 as cited in SEQ ID NO 0
gtccagaaccctctctcgctctcccaaaaactcatctctcaccaccgtctcaaaccaagttcgatctaaaagccttttcctttagattctctccaacaacaaatctctttgaatcactcagtcatgtcggttttacttcctctctgtctgattatctccatgttcacctattcaagtaagccctgtttcctctgtttttctacatcttttatcagcaaaatgtttcttgtttatgttatatgttctcagttctaacaagtgggtctataaagattcagaattttagtatgagatctctgataaattcctcaaaaatctgaactttgccttgtgggtttagttctagcttgagccctgtaatgaatatgaatctgtttttgtttgtttggtaaatttttcagacgcagcgtattgtctttgcaaagaggggaacgagcaagtgcttcagaaggcaatagactacgcttgtggaaatggagctgactgtacccagatccaacccaccggagcttgttaccaacctaacaccgtcaaaaaccactgtgacgtcgccgtcaacagttactaccagaaaaaagcttcttccggtgccacctgtgactttaacggcgccgcctccccctctactacccctccgtcaactgcttcaaactgtttaactggttcaagctctagtggcactcctaccacaggaacaccaactactgggacaccaaccagtgggaccccgactaccggaactccgaccaccggaacccccaccactggaactccaaccagtgggactccaactagtggcttcccaaataccgggactccaaacacagggactaacactgggatgccaaattccaacgggatgccaacttcatcgtcatcttcggtgttcccggggactactcttggcccgactgggagcgggggactaggcgatccaaatgctggagagaagctgtctgttcgaactaacacagtggtcttcttattaaccggtgtagcagcaatgcttgtcatatgagggcttagaagtcacacgcggttatggttgtaattgagttgctgagagatcagatcttgccaacggctcatggttgatagagtcatcttttttttcactcgtctttctaggatttggacttaggttggccgagagacgtaatgctggtagtagctagtattttgggttatgtacaactttaactaagagctttacttttgtaaatccggaggatgagatgctcttttgtttctaaac

SEQ ID NO: 47048 - protein, 61 aa, Arabidopsis thaliana
  peptide (1)..(61): Ceres Seq. ID no. 13578682
MELTVPRSNPPELVTNLTPSKTTVTSPSTVTTRKKLLPVPPVTLTAPPPPLLPLRQLLQTV

SEQ ID NO: 47049 - protein, 58 aa, Arabidopsis thaliana
  peptide (1)..(58): Ceres Seq. ID no. 13578683
MPNSNGMPTSSSSSVFPGTTLGPTGSGGLGDPNAGEKLSVRTNTVVFLLTGVAAMLVI

SEQ ID NO: 47050 - protein, 58 aa, Arabidopsis thaliana
  peptide (1)..(58): Ceres Seq. ID no. 13578684
PEPSLALPKTHLSPPSQTKFDLKAFSFRFSPTTNLFESLSHVGFTSSLSDYLHVHLFK

SEQ ID NO: 47051 - DNA, 1425 bp, Arabidopsis thaliana
  misc_feature (1)..(1425): Ceres Seq. ID no. 13578725
  misc_feature (1)..(1425): Ortholog of  Ceres SEQ ID NO 14307871 as cited in SEQ ID NO 67222
atctgattcaggttggattgatcattgttcggagctccgggaaacatggcggcgacgagacaattacgaactctccaatctcagcctgaaaacaaggtatgtgtcgattgcgctcagaagaatcctcaatgggcgtcggtttcgtacggaatcttcatgtgtttggaatgctccgggaaacaccgaggcttaggcgttcacatatccttcgtcagatccgtaaccatggattcatggtctgcgatccagattaagaaaatggaagctggtggtaacgaacggctcaacaaattcttcgcgcaatacggaatcgctaaggagacagatattatctccaagtacaattcgaacgctgcttctgtgtatcgtgaccggatccaagctttagctgaaggtagaccatggaatgatccgccagttgttaaggaagcgaataagaagcctccgttggctcagggcggttacggaaacaacaataacaataacaatggaggatgggatagttgggataacgatgattcttacaaatctgatatgagaaggaatcagtcagcgaatgatttcagggcatcgggaaatagagaaggtgcacatgtgaagtcaaagtcgtcggaggatatctacacgcgatcgcagcttgaggcttctgccgctgggaaagagagtttcttcgcgaggagaatggcggagaatgagtctaagcctgaaggtcttcctccttcgcaaggtggcaagtatgtaggattcggatcaagctcggctccaccaccgagaaataatcaacaggatgatgttttctccgttgtttctcagggttttggaagactgtctctggttgctgcatctgcagctcagtcagctgctagtgttgttcaaacaggaaccaaggagttcacatccaaggtgaaggaaggtgggtatgatcacaaggtgagtgaaactgtaaatgtagttgctaataagacaacagagataggacataggacatggggaatcatgaaaggagtaatggcaatggcgacacagaaggtagaagagtttactaaagaaggatcaacaagctggaatcagcagagtgaaaatgagggcaatggttactaccagaactttggaaatgggaacaaagcagcgaattcatctgttggaggaggaaggccacaatcatcatcgacaagtggtcattacaacaactcgcagaattcaaattcttgggatagttggggagagaatgagaataagaagacagaagcagtagctccaaaggggtcatctgcttctaatgatgatgatggttggactggttgggatgatcatgatgccaaagatgatgggttcgatggtcattaccaaagtgcaggcgataagaaatctgctggtcacaacgggaaatcagacaccgcttggactggtggaggttttctctaa

SEQ ID NO: 47052 - protein, 459 aa, Arabidopsis thaliana
  peptide (1)..(459): Ceres Seq. ID no. 13578726
MAATRQLRTLQSQPENKVCVDCAQKNPQWASVSYGIFMCLECSGKHRGLGVHISFVRSVTMDSWSAIQIKKMEAGGNERLNKFFAQYGIAKETDIISKYNSNAASVYRDRIQALAEGRPWNDPPVVKEANKKPPLAQGGYGNNNNNNNGGWDSWDNDDSYKSDMRRNQSANDFRASGNREGAHVKSKSSEDIYTRSQLEASAAGKESFFARRMAENESKPEGLPPSQGGKYVGFGSSSAPPPRNNQQDDVFSVVSQGFGRLSLVAASAAQSAASVVQTGTKEFTSKVKEGGYDHKVSETVNVVANKTTEIGHRTWGIMKGVMAMATQKVEEFTKEGSTSWNQQSENEGNGYYQNFGNGNKAANSSVGGGRPQSSSTSGHYNNSQNSNSWDSWGENENKKTEAVAPKGSSASNDDDGWTGWDDHDAKDDGFDGHYQSAGDKKSAGHNGKSDTAWTGGGFL

SEQ ID NO: 47053 - protein, 422 aa, Arabidopsis thaliana
  peptide (1)..(422): Ceres Seq. ID no. 13578727
MCLECSGKHRGLGVHISFVRSVTMDSWSAIQIKKMEAGGNERLNKFFAQYGIAKETDIISKYNSNAASVYRDRIQALAEGRPWNDPPVVKEANKKPPLAQGGYGNNNNNNNGGWDSWDNDDSYKSDMRRNQSANDFRASGNREGAHVKSKSSEDIYTRSQLEASAAGKESFFARRMAENESKPEGLPPSQGGKYVGFGSSSAPPPRNNQQDDVFSVVSQGFGRLSLVAASAAQSAASVVQTGTKEFTSKVKEGGYDHKVSETVNVVANKTTEIGHRTWGIMKGVMAMATQKVEEFTKEGSTSWNQQSENEGNGYYQNFGNGNKAANSSVGGGRPQSSSTSGHYNNSQNSNSWDSWGENENKKTEAVAPKGSSASNDDDGWTGWDDHDAKDDGFDGHYQSAGDKKSAGHNGKSDTAWTGGGFL

SEQ ID NO: 47054 - protein, 399 aa, Arabidopsis thaliana
  peptide (1)..(399): Ceres Seq. ID no. 13578728
MDSWSAIQIKKMEAGGNERLNKFFAQYGIAKETDIISKYNSNAASVYRDRIQALAEGRPWNDPPVVKEANKKPPLAQGGYGNNNNNNNGGWDSWDNDDSYKSDMRRNQSANDFRASGNREGAHVKSKSSEDIYTRSQLEASAAGKESFFARRMAENESKPEGLPPSQGGKYVGFGSSSAPPPRNNQQDDVFSVVSQGFGRLSLVAASAAQSAASVVQTGTKEFTSKVKEGGYDHKVSETVNVVANKTTEIGHRTWGIMKGVMAMATQKVEEFTKEGSTSWNQQSENEGNGYYQNFGNGNKAANSSVGGGRPQSSSTSGHYNNSQNSNSWDSWGENENKKTEAVAPKGSSASNDDDGWTGWDDHDAKDDGFDGHYQSAGDKKSAGHNGKSDTAWTGGGFL

SEQ ID NO: 47055 - DNA, 1616 bp, Arabidopsis thaliana
  misc_feature (1)..(1616): Ceres Seq. ID no. 12575638
  misc_feature (1)..(1616): Ortholog of  Ceres SEQ ID NO 13648575 as cited in SEQ ID NO 20407
atgggtgagaaaacaaactcacgttatctcggtgtaatcatcactcgaaaatctataattttcttgttcatatcaatcatcaccgtcctttcttggttttttatcttttcttccacaaaccctaaccgagttctcgatcacatctcagtatcagaatccacagatgtacctctcatcatcatcaagaactcaaacagttctccacaaaacaacgcaccaaaaccccaaaacagagaaggagcagaaacagaggaacccattaaagaaaacagaggaggaacaaaaacagagtcatccatgaatcaaaacagaggcgaaaccctccggtgtatccaaagggtttctccttctccaaggccattgaaagtctacatgtatgatatgagtccagagtttcattttgggttattgggttggaaaccagagagaaacggtgtcgtttggcctgatatcagagtcaatgttcctcaccatccaggtggtcttaacttgcagcacagtgttgagtattggctcacattagatcttttgttctctgagcttccagaagattctagaagctctcgggccgcgatacgtgtaaagaactcgagcgaagctgatgtcgtgttcgtgcccttcttctcttcattgagctataaccgattctctaaggttaaccaaaagcagaagaagagccaggacaaagagttgcaggaaaatgtggtgaaatacgtaacgtcccaaaaagagtggaagacctcaggagggaaggatcatgtgatcatggcgcatcatccgaatagtatgtcgacggcaaggcataagctatttccggcgatgtttgtggtcgctgactttggtagatactcgccacatgttgccaatgttgacaaagacattgtggctccatacaaacaccttgttccatcgtatgttaatgacacatcgggctttgatggccgtccgatcttgctctacttccaaggagccatctaccgcaaagctggtggatttgtgagacaagagctatataatcttctcaaagaagaaaaagacgtccacttctctttcggaagcgtaaggaaccacggcatatctaaagccggcgaaggaatgagatcgtccaagttctgtctcaacatagccggggatacaccatcctcgaatcgcctcttcgacgccatagctagtcactgtatacccgtgatcattagcgatgacatcgagttaccatatgaggatgtcctcaactacaatgagttctgtctctttgtcagatcatcagacgctttaaagaaagggtttctgatgggtcttgtcaggagtattggcagagaagagtataataagatgtggcttcggttgaaggaagtggagaggtatttcgatttgcgttttccggtgaaggatgacgagggagattatgcagttcagatgatttggaaagctgttgccaggaaagctcctttggtgaagatgaaggttcacagatttcagaggtttacaaggcctttttagggtttctaatgatattttgggaatttgatttagatagaaagataatgaatacagtttccaatgcaaccatgtgaatgtttattacagtcagccatgtgaagaaagaggttactttg

SEQ ID NO: 47056 - protein, 499 aa, Arabidopsis thaliana
  peptide (1)..(499): Ceres Seq. ID no. 12575639
MGEKTNSRYLGVIITRKSIIFLFISIITVLSWFFIFSSTNPNRVLDHISVSESTDVPLIIIKNSNSSPQNNAPKPQNREGAETEEPIKENRGGTKTESSMNQNRGETLRCIQRVSPSPRPLKVYMYDMSPEFHFGLLGWKPERNGVVWPDIRVNVPHHPGGLNLQHSVEYWLTLDLLFSELPEDSRSSRAAIRVKNSSEADVVFVPFFSSLSYNRFSKVNQKQKKSQDKELQENVVKYVTSQKEWKTSGGKDHVIMAHHPNSMSTARHKLFPAMFVVADFGRYSPHVANVDKDIVAPYKHLVPSYVNDTSGFDGRPILLYFQGAIYRKAGGFVRQELYNLLKEEKDVHFSFGSVRNHGISKAGEGMRSSKFCLNIAGDTPSSNRLFDAIASHCIPVIISDDIELPYEDVLNYNEFCLFVRSSDALKKGFLMGLVRSIGREEYNKMWLRLKEVERYFDLRFPVKDDEGDYAVQMIWKAVARKAPLVKMKVHRFQRFTRPF

SEQ ID NO: 47057 - protein, 400 aa, Arabidopsis thaliana
  peptide (1)..(400): Ceres Seq. ID no. 12575640
MNQNRGETLRCIQRVSPSPRPLKVYMYDMSPEFHFGLLGWKPERNGVVWPDIRVNVPHHPGGLNLQHSVEYWLTLDLLFSELPEDSRSSRAAIRVKNSSEADVVFVPFFSSLSYNRFSKVNQKQKKSQDKELQENVVKYVTSQKEWKTSGGKDHVIMAHHPNSMSTARHKLFPAMFVVADFGRYSPHVANVDKDIVAPYKHLVPSYVNDTSGFDGRPILLYFQGAIYRKAGGFVRQELYNLLKEEKDVHFSFGSVRNHGISKAGEGMRSSKFCLNIAGDTPSSNRLFDAIASHCIPVIISDDIELPYEDVLNYNEFCLFVRSSDALKKGFLMGLVRSIGREEYNKMWLRLKEVERYFDLRFPVKDDEGDYAVQMIWKAVARKAPLVKMKVHRFQRFTRPF

SEQ ID NO: 47058 - protein, 375 aa, Arabidopsis thaliana
  peptide (1)..(375): Ceres Seq. ID no. 12575641
MYDMSPEFHFGLLGWKPERNGVVWPDIRVNVPHHPGGLNLQHSVEYWLTLDLLFSELPEDSRSSRAAIRVKNSSEADVVFVPFFSSLSYNRFSKVNQKQKKSQDKELQENVVKYVTSQKEWKTSGGKDHVIMAHHPNSMSTARHKLFPAMFVVADFGRYSPHVANVDKDIVAPYKHLVPSYVNDTSGFDGRPILLYFQGAIYRKAGGFVRQELYNLLKEEKDVHFSFGSVRNHGISKAGEGMRSSKFCLNIAGDTPSSNRLFDAIASHCIPVIISDDIELPYEDVLNYNEFCLFVRSSDALKKGFLMGLVRSIGREEYNKMWLRLKEVERYFDLRFPVKDDEGDYAVQMIWKAVARKAPLVKMKVHRFQRFTRPF

SEQ ID NO: 47059 - DNA, 1670 bp, Arabidopsis thaliana
  misc_feature (1)..(1670): Ceres Seq. ID no. 14316585
  misc_feature (1)..(1670): Ortholog of  Ceres SEQ ID NO 14311609 as cited in SEQ ID NO 58341
gataatttcggagaaaaaaatccacaaaagtttcaaacttttggcaaattaagcggtttttgttaggttttaattattttttccgatgatgaagcggcgatgagtgtcgtcgtcggagatagatcggagagtactctgatgcggagtgactataaagctcctccgagtcaagctattcccaaagctcgattacaagtttggttctttagagtttgttcttgcattttggtttggacttgtttgattcagctcttttggcattcccaaatcttcactggtttaaccaatcacatttctagattctctctcccggttcagtcagttccattacctcctcctcttcctccaaggaattacacaagtaatggaattttactagtgtcctgtaatggcggtttgaatcaaatgcgtgcagcgatttgtgatatggtgactgttgctaggctattgaatttgactcttgttgttcctgagcttgataaaaaatcattctgggctgatacaagtgactttgaggacatttttgatataaagcatttcattgattcgttaagagatgaagttaggatcataaggagacttcctaaacggtatagtaagaagtatggattcaaattgttcgaaatgccgcctgtgagctggtccaacgacaaatattacttgcaacaggtattgccgcggtttagtaaacgtaaagttatacatttcgttcggagtgatacgcgattggcgaacaatggtctttctcttgaccttcaaaggctgagatgccgagtgaatttccaaggactgagattcactccacggattgaggctttgggatcaaagttagttcggattcttcaacaaagagggtcttttgtggctttgcatttgagatatgagatggacatgttggctttctctggttgcactcatggttgtaccgatgaagaagctgaagaactcaaaaagatgaggtatgcatatccatggtggagagagaaagagatagtttcagaagaaaggagagtgcaaggactgtgtcctttgacaccggaggaggcggttttggttcttaaagcattggggtttcaaaaggatacacagatatacattgcagctggtgagatttttggtggtgcaaagagattagcccttctaaaggaatcatttccacgaattgtgaaaaaggaaatgctattagatccaacagaattgcaacagtttcagaaccattcatctcaaatggcagctctagatttcatagtatctgtagccagcaacacttttattcctacctattatggaaacatggcaaaagttgtcgaaggtcatcggaggtaccttgggtttaagaaaacaatcttgctagaccggaagagacttgtggagcttttagacttgcataacaacaaaacgctctcttgggatcagtttgcagtagctgtcaaggatgcccatcaaggacgacgaatgggagaaccaacacatcggaaagttatctccgttagaccgaaggaagaagattacttctatgccaatcctcaagaatgtatcagttaaaatgatatagatcactaaccactagagcaggatttgattagttcttgtttctttctttgtttatagacctttttcagtttctgtaaagtaagatgaagctaaaaagattgtgtcatcgttgtacc

SEQ ID NO: 47060 - protein, 481 aa, Arabidopsis thaliana
  peptide (1)..(481): Ceres Seq. ID no. 14316586
MSVVVGDRSESTLMRSDYKAPPSQAIPKARLQVWFFRVCSCILVWTCLIQLFWHSQIFTGLTNHISRFSLPVQSVPLPPPLPPRNYTSNGILLVSCNGGLNQMRAAICDMVTVARLLNLTLVVPELDKKSFWADTSDFEDIFDIKHFIDSLRDEVRIIRRLPKRYSKKYGFKLFEMPPVSWSNDKYYLQQVLPRFSKRKVIHFVRSDTRLANNGLSLDLQRLRCRVNFQGLRFTPRIEALGSKLVRILQQRGSFVALHLRYEMDMLAFSGCTHGCTDEEAEELKKMRYAYPWWREKEIVSEERRVQGLCPLTPEEAVLVLKALGFQKDTQIYIAAGEIFGGAKRLALLKESFPRIVKKEMLLDPTELQQFQNHSSQMAALDFIVSVASNTFIPTYYGNMAKVVEGHRRYLGFKKTILLDRKRLVELLDLHNNKTLSWDQFAVAVKDAHQGRRMGEPTHRKVISVRPKEEDYFYANPQECIS

SEQ ID NO: 47061 - protein, 468 aa, Arabidopsis thaliana
  peptide (1)..(468): Ceres Seq. ID no. 14316587
MRSDYKAPPSQAIPKARLQVWFFRVCSCILVWTCLIQLFWHSQIFTGLTNHISRFSLPVQSVPLPPPLPPRNYTSNGILLVSCNGGLNQMRAAICDMVTVARLLNLTLVVPELDKKSFWADTSDFEDIFDIKHFIDSLRDEVRIIRRLPKRYSKKYGFKLFEMPPVSWSNDKYYLQQVLPRFSKRKVIHFVRSDTRLANNGLSLDLQRLRCRVNFQGLRFTPRIEALGSKLVRILQQRGSFVALHLRYEMDMLAFSGCTHGCTDEEAEELKKMRYAYPWWREKEIVSEERRVQGLCPLTPEEAVLVLKALGFQKDTQIYIAAGEIFGGAKRLALLKESFPRIVKKEMLLDPTELQQFQNHSSQMAALDFIVSVASNTFIPTYYGNMAKVVEGHRRYLGFKKTILLDRKRLVELLDLHNNKTLSWDQFAVAVKDAHQGRRMGEPTHRKVISVRPKEEDYFYANPQECIS

SEQ ID NO: 47062 - protein, 379 aa, Arabidopsis thaliana
  peptide (1)..(379): Ceres Seq. ID no. 14316588
MRAAICDMVTVARLLNLTLVVPELDKKSFWADTSDFEDIFDIKHFIDSLRDEVRIIRRLPKRYSKKYGFKLFEMPPVSWSNDKYYLQQVLPRFSKRKVIHFVRSDTRLANNGLSLDLQRLRCRVNFQGLRFTPRIEALGSKLVRILQQRGSFVALHLRYEMDMLAFSGCTHGCTDEEAEELKKMRYAYPWWREKEIVSEERRVQGLCPLTPEEAVLVLKALGFQKDTQIYIAAGEIFGGAKRLALLKESFPRIVKKEMLLDPTELQQFQNHSSQMAALDFIVSVASNTFIPTYYGNMAKVVEGHRRYLGFKKTILLDRKRLVELLDLHNNKTLSWDQFAVAVKDAHQGRRMGEPTHRKVISVRPKEEDYFYANPQECIS

SEQ ID NO: 47063 - DNA, 1478 bp, Arabidopsis thaliana
  misc_feature (1)..(1478): Ceres Seq. ID no. 13578741
  misc_feature (1)..(1478): Ortholog of  Ceres SEQ ID NO 13596244 as cited in SEQ ID NO 69307
attcatttcaatcaatcttcttcttcttcttcttcttcttcctcagagaaattctgtgttgttgtatacagagagatgttctcatcttctacactcgtttattctctatctctcttcctctctctttctcttctcttcttcctcttcatcctctcaccacacatccttctctcttcctctaccctcatttccaccgccgatgacctagacgacctctctctcttccaccgcgccgtcgtctcttcctccaccaacaacaaccgtcgtctcatctccctctctccaaatccacccccaaagatcgctttcctcttcctaacaaactccgatctaaccttcttacctctctgggaaagcttcttccaaggtcaccaagatctctacaacgtttacatccacgcagatccaacctcctccgtctctcctcttctcgattcttcatcaatcaacgctaagttcatcccggcgagaagaaccgcacgagcttctccgacgttaatctccgccgaacgacgattactagcaaacgcaatcctcgacgatcctaacaatctctatttcgctttaatctcacaacactgtatccctctccattccttctcttacatccacaaccacctcttctccgatcatcatcaacaaagcttcatcgagatcctctccgatgaaccgttccttctgaaacgatacaacgcaagaggagacgacgcgatgcttcctgagatccagtaccaagacttccgtgttggatctcagttcttcgtattagcgaaacgtcatgctctaatggtgatcaaagagagaaagctatggaggaaattcaaattaccatgccttgatgttgaatcttgttaccctgaagaacattattttccgactttgttgtctcttgaggatcctcaaggatgtagtcactttacactcacacgtgttaattggaccggtagtgttggtggtcatcctcacacgtacgatgcctctgagatctcgccgcagctgattcactctctgcggagatctaattcgagtttagactatttcttcgccagaaaattcacgccggagtcattgcaaccgcttatggagattgcagatgctgtgatctttagggattgaattcggtgaaagtaaattaggtttcagatatcatcataaggaaggtttaggaagaagcttgtgttggcgctcgaagaagagtggctaaataaagatgaacttctgtgtgtgtgtgtgaaaattgctgtgttttttaagcttttgtgtgtctctagggaaggtagagatatgggaaaatggatgtaaaaaagaatgtaaatagagagcccccaaaggcaaagtgagagcatcatcattaagataaagccaaatcggcttttcttttgtaattcagctcctttccacgggagagagagggaatggcaaaagtgttgttccctctcttttgtttcgaaaaaagtgtgaatgaaaagatctttgtt

SEQ ID NO: 47064 - protein, 371 aa, Arabidopsis thaliana
  peptide (1)..(371): Ceres Seq. ID no. 13578742
IHFNQSSSSSSSSSSEKFCVVVYREMFSSSTLVYSLSLFLSLSLLFFLFILSPHILLSSSTLISTADDLDDLSLFHRAVVSSSTNNNRRLISLSPNPPPKIAFLFLTNSDLTFLPLWESFFQGHQDLYNVYIHADPTSSVSPLLDSSSINAKFIPARRTARASPTLISAERRLLANAILDDPNNLYFALISQHCIPLHSFSYIHNHLFSDHHQQSFIEILSDEPFLLKRYNARGDDAMLPEIQYQDFRVGSQFFVLAKRHALMVIKERKLWRKFKLPCLDVESCYPEEHYFPTLLSLEDPQGCSHFTLTRVNWTGSVGGHPHTYDASEISPQLIHSLRRSNSSLDYFFARKFTPESLQPLMEIADAVIFRD

SEQ ID NO: 47065 - protein, 346 aa, Arabidopsis thaliana
  peptide (1)..(346): Ceres Seq. ID no. 13578743
MFSSSTLVYSLSLFLSLSLLFFLFILSPHILLSSSTLISTADDLDDLSLFHRAVVSSSTNNNRRLISLSPNPPPKIAFLFLTNSDLTFLPLWESFFQGHQDLYNVYIHADPTSSVSPLLDSSSINAKFIPARRTARASPTLISAERRLLANAILDDPNNLYFALISQHCIPLHSFSYIHNHLFSDHHQQSFIEILSDEPFLLKRYNARGDDAMLPEIQYQDFRVGSQFFVLAKRHALMVIKERKLWRKFKLPCLDVESCYPEEHYFPTLLSLEDPQGCSHFTLTRVNWTGSVGGHPHTYDASEISPQLIHSLRRSNSSLDYFFARKFTPESLQPLMEIADAVIFRD

SEQ ID NO: 47066 - DNA, 2205 bp, Arabidopsis thaliana
  misc_feature (1)..(2205): Ceres Seq. ID no. 15168634
  misc_feature (1)..(2205): Ortholog of  Ceres SEQ ID NO 15168464 as cited in SEQ ID NO 59187
ggttatcgaaccaatggagaccccactccctcctttatcgcaactaaccccaaatcctactcccgccgccgccgtctcttccgctattccggcgccagtcaagagcgtagccgttcagcaaccgatcgatggatctccacgcgccgttgctactgataccggaggtattcctgagccacttgcggctgttcccggcgctaagcttcgtcttatgtgcagttttggtggccacatcatgcctcgtccacacgacaaatcgttgacgtactccggcggcgagactcgtattgtggttgttgatcgacgtgcgtcactgtcttcgctccgatctcgtctctctagtatgcttctcaacggccggtcctttactctcaagtaccagctccctagcgaagatctcgattcactcgtcaccatcactaccgatgaagatctggagaacatgatcgaggaatacgatcgcgcggcttcgtcagcgacggcgactgctacgcaacggctccggttgttccttttcgctaacaagctcgagaccgccgctactatgggaactctgcttgacggcacgaaatctgacacatggttcgtcgatgctctgaatcaatctggtttgcttcctcgtggtttatcagattccgccgccgtgaataataccttggtgaatctcgacgaagctagcggcggagagaccgagatccaaaaccttgaaactaatgttggtggcgagaacaataagcgaggggatttggttgctaacggtgtgatttcgcatcaggagatgcatatgagctcgatgcctgattctccaatgatggaagccgctggttcttcgataggatcttcttcttcatctccttccacatccaatttgccaccgattcgcgttagagtcagtgaggaccagaggatagaggaacaattggcacagatgaccttctcaaacatgcaaactcagaggcaatttgatgatggcgttagcttgatggcaaatcggccaatgatgattccacctggtgccatgaacgatactgcgatggcgtataacaacgcacctggtgatggtactgctcccgcaagcaatggccatgtctcacctgaagacgatcgaaccgaattaggtgtatcaactggctacaggaagccacctttgccgatgcaaccagtaacgatcccacctagaactgttggaggctatggcttgacatcccctgattctgttgcaagtgatactagcatttcttctgctacttcattttcaaagccgatgtactaccaagaccaacctccagctctgccaagagctcctccagtggcacagcctgaaaccacctcggcccaaagctctcaagtcttacctcagactgaaaacacttcagcccaaaccacctcccatgtcttatctcagccaggtacgtacacaactatggatcaacaacaacaccaacctctggctcaacaacctttcttacaccaaggcgttcagtatatccctcacccatcacaatacataccaatttactctcatcagcaacaaaactaccctgtttacgtgatgtccgtcccacaatctcagcagtatatcccagcaggaactcccccgctctacccgaactcaaaacccggcacaaactcgagacctgaagctgcccagaacgtttaccgagctgctccccctcaggttattcagcttcagcaacagcatcagtacatgggttacgctggagctcctcaacatagcacaaacgcaaacgccaattacggtactggagctcctcaacatagcacaaacgcaaacgccaactacggtggaccctttgaatacacaaactctccaaacgagacagtgtattaccacacaaagctcctgctgcaaacactgccattccattagcgtctccataccaaagcatgacaccagcagcagccgcagcagctctagccgatatgtccaagcaaatggctcttgacggcggcaaacagcaacagcatatggctgcgtctcagccgctttaaacgctggatctttggtaataaatgcgcaaagtgttaagtatagccgacacggcgcgctctgttctttttgcgtattacatgtaacgtcctgttacatctcgttagatatacataggatttgctatctcgttgttcttatcgtagtttgcttatgtctctctctcttttctgataaataaatatgttttggat

SEQ ID NO: 47067 - protein, 629 aa, Arabidopsis thaliana
  peptide (1)..(629): Ceres Seq. ID no. 15168635
VIEPMETPLPPLSQLTPNPTPAAAVSSAIPAPVKSVAVQQPIDGSPRAVATDTGGIPEPLAAVPGAKLRLMCSFGGHIMPRPHDKSLTYSGGETRIVVVDRRASLSSLRSRLSSMLLNGRSFTLKYQLPSEDLDSLVTITTDEDLENMIEEYDRAASSATATATQRLRLFLFANKLETAATMGTLLDGTKSDTWFVDALNQSGLLPRGLSDSAAVNNTLVNLDEASGGETEIQNLETNVGGENNKRGDLVANGVISHQEMHMSSMPDSPMMEAAGSSIGSSSSSPSTSNLPPIRVRVSEDQRIEEQLAQMTFSNMQTQRQFDDGVSLMANRPMMIPPGAMNDTAMAYNNAPGDGTAPASNGHVSPEDDRTELGVSTGYRKPPLPMQPVTIPPRTVGGYGLTSPDSVASDTSISSATSFSKPMYYQDQPPALPRAPPVAQPETTSAQSSQVLPQTENTSAQTTSHVLSQPGTYTTMDQQQHQPLAQQPFLHQGVQYIPHPSQYIPIYSHQQQNYPVYVMSVPQSQQYIPAGTPPLYPNSKPGTNSRPEAAQNVYRAAPPQVIQLQQQHQYMGYAGAPQHSTNANANYGTGAPQHSTNANANYGGPFEYTNSPNETVYYHTKLLLQTLPFH

SEQ ID NO: 47068 - protein, 625 aa, Arabidopsis thaliana
  peptide (1)..(625): Ceres Seq. ID no. 15168636
METPLPPLSQLTPNPTPAAAVSSAIPAPVKSVAVQQPIDGSPRAVATDTGGIPEPLAAVPGAKLRLMCSFGGHIMPRPHDKSLTYSGGETRIVVVDRRASLSSLRSRLSSMLLNGRSFTLKYQLPSEDLDSLVTITTDEDLENMIEEYDRAASSATATATQRLRLFLFANKLETAATMGTLLDGTKSDTWFVDALNQSGLLPRGLSDSAAVNNTLVNLDEASGGETEIQNLETNVGGENNKRGDLVANGVISHQEMHMSSMPDSPMMEAAGSSIGSSSSSPSTSNLPPIRVRVSEDQRIEEQLAQMTFSNMQTQRQFDDGVSLMANRPMMIPPGAMNDTAMAYNNAPGDGTAPASNGHVSPEDDRTELGVSTGYRKPPLPMQPVTIPPRTVGGYGLTSPDSVASDTSISSATSFSKPMYYQDQPPALPRAPPVAQPETTSAQSSQVLPQTENTSAQTTSHVLSQPGTYTTMDQQQHQPLAQQPFLHQGVQYIPHPSQYIPIYSHQQQNYPVYVMSVPQSQQYIPAGTPPLYPNSKPGTNSRPEAAQNVYRAAPPQVIQLQQQHQYMGYAGAPQHSTNANANYGTGAPQHSTNANANYGGPFEYTNSPNETVYYHTKLLLQTLPFH

SEQ ID NO: 47069 - protein, 559 aa, Arabidopsis thaliana
  peptide (1)..(559): Ceres Seq. ID no. 15168637
MCSFGGHIMPRPHDKSLTYSGGETRIVVVDRRASLSSLRSRLSSMLLNGRSFTLKYQLPSEDLDSLVTITTDEDLENMIEEYDRAASSATATATQRLRLFLFANKLETAATMGTLLDGTKSDTWFVDALNQSGLLPRGLSDSAAVNNTLVNLDEASGGETEIQNLETNVGGENNKRGDLVANGVISHQEMHMSSMPDSPMMEAAGSSIGSSSSSPSTSNLPPIRVRVSEDQRIEEQLAQMTFSNMQTQRQFDDGVSLMANRPMMIPPGAMNDTAMAYNNAPGDGTAPASNGHVSPEDDRTELGVSTGYRKPPLPMQPVTIPPRTVGGYGLTSPDSVASDTSISSATSFSKPMYYQDQPPALPRAPPVAQPETTSAQSSQVLPQTENTSAQTTSHVLSQPGTYTTMDQQQHQPLAQQPFLHQGVQYIPHPSQYIPIYSHQQQNYPVYVMSVPQSQQYIPAGTPPLYPNSKPGTNSRPEAAQNVYRAAPPQVIQLQQQHQYMGYAGAPQHSTNANANYGTGAPQHSTNANANYGGPFEYTNSPNETVYYHTKLLLQTLPFH

SEQ ID NO: 47070 - DNA, 1959 bp, Arabidopsis thaliana
  misc_feature (1)..(1959): Ceres Seq. ID no. 13579047
  misc_feature (1)..(1959): Ortholog of  Ceres SEQ ID NO 12587358 as cited in SEQ ID NO 62228
  misc_feature (1)..(1959): Ortholog of  Ceres SEQ ID NO 12635930 as cited in SEQ ID NO 0
gtgttctgaaaactttttccgatacacaaaatcggaggaagaagaagatgaagctcaaagtgtatgcggataggatgtcacagccatctcgtgctgtcctcatattctgcaaggttaacgaaatccaattcgacgagattttgatttccttggggaaacgtcaacagttatcccctgaattcaaagaaattaacccaatggggaaagttccagctattgttgatggcagacttaagctatttgagagtcacgctatattgatatatctttcctcagcatacgcaagtgtagttgatcattggtacccgaatgatctttccaaaagagccaagattcactccgttttggattggcatcacaccaatttacgccctggtgcatctggatatgttctgaatagcgttctagctccagctcttggtcttccactgaatccgaaagcagctgctgaagctgagaacatactaacaaactctctgtccactctagagactttttggcttaagggcagtgccaagtttttactcgggggcaagcaaccatctatagctgatctcagccttgtatgtgaacttatgcagctgcaggttttggatgacaaagatcgtcttagattgcttagccctcataagaaagttgaacaatggattgagagtacgagaaaagcgacaatgcctcactctgatgaggtccatgaggtccttttcagagccaaagatagatttcagaagcagcgagagatggcaaccgcatctaaaccgggtcctcaatctaagattatccaatttagtagtattggtgggacgagtgatggtccaaacctcgttcaagacacaaccgatcgtaaagctcgaagacgcaaatggagtccacctgacgatgtcattctcattagtgcttggttaaatactagtaaggatcgtaaagttgtcgtttatgatgaacaacaagcacatactttttggaagagaattggtgcacatgtttcaaatagcgcttcacttgcaaatctaccaaagcgagagtggaatcactgcaggcaaagatggaggaaaattaacgactacgtctgcaaatttgttggatgttatgatcaagctttgaatcaaagagctagtggtcaatctgaagatgatgttttccaagttgcataccaattgtactacaacaattacatgagtaatttcaaacttgagcatgcatggcgggagctccgacacaataaaaaatggtgtagtacatacacctctgaaaattctaaggggggtggaagctcaaagagaacaaagttgaatggaggtggtgtatattcttcaagctgtaatccggagagtgtgcctatagctctagatggagaggagcaagttatggatcgccctcttggtgtgaagtcgtcaaagcaaaaagagaagaaagttgctactaaaacaatgcttgaagaaagggaggccgattctagatcaagacttgagaacttgtgggtactagatgaagaggagcaagttatggatcttcctcttggtgtgaagtcatcgaagcagaaagagaggaaagttgctactaaaacaatgattgaagaaagggaggcagccaattttcgatcaagacttgggaacttgtggctactaaaggagaaagaagaaagggaggcagattcccgatcaagacttgagaacttgtgggcactgaaggagaaagacatagaagagcaaaagaaactaacaaggatggaagtccttaaaagtcttcttggaagaagaacaggtgaaacttctgaaaaggaagaaactttgaagaacaagctcattgatgagatgctctaatctctatgttctcgttgtatttatctctttattttctctatgtttatctcactatcaacttagtgacaggctatagacggcttttctagaaatagatactaactgaatcttccttaactatgttcaacgtttgttt

SEQ ID NO: 47071 - protein, 606 aa, Arabidopsis thaliana
  peptide (1)..(606): Ceres Seq. ID no. 13579048
VLKTFSDTQNRRKKKMKLKVYADRMSQPSRAVLIFCKVNEIQFDEILISLGKRQQLSPEFKEINPMGKVPAIVDGRLKLFESHAILIYLSSAYASVVDHWYPNDLSKRAKIHSVLDWHHTNLRPGASGYVLNSVLAPALGLPLNPKAAAEAENILTNSLSTLETFWLKGSAKFLLGGKQPSIADLSLVCELMQLQVLDDKDRLRLLSPHKKVEQWIESTRKATMPHSDEVHEVLFRAKDRFQKQREMATASKPGPQSKIIQFSSIGGTSDGPNLVQDTTDRKARRRKWSPPDDVILISAWLNTSKDRKVVVYDEQQAHTFWKRIGAHVSNSASLANLPKREWNHCRQRWRKINDYVCKFVGCYDQALNQRASGQSEDDVFQVAYQLYYNNYMSNFKLEHAWRELRHNKKWCSTYTSENSKGGGSSKRTKLNGGGVYSSSCNPESVPIALDGEEQVMDRPLGVKSSKQKEKKVATKTMLEEREADSRSRLENLWVLDEEEQVMDLPLGVKSSKQKERKVATKTMIEEREAANFRSRLGNLWLLKEKEEREADSRSRLENLWALKEKDIEEQKKLTRMEVLKSLLGRRTGETSEKEETLKNKLIDEML

SEQ ID NO: 47072 - protein, 591 aa, Arabidopsis thaliana
  peptide (1)..(591): Ceres Seq. ID no. 13579049
MKLKVYADRMSQPSRAVLIFCKVNEIQFDEILISLGKRQQLSPEFKEINPMGKVPAIVDGRLKLFESHAILIYLSSAYASVVDHWYPNDLSKRAKIHSVLDWHHTNLRPGASGYVLNSVLAPALGLPLNPKAAAEAENILTNSLSTLETFWLKGSAKFLLGGKQPSIADLSLVCELMQLQVLDDKDRLRLLSPHKKVEQWIESTRKATMPHSDEVHEVLFRAKDRFQKQREMATASKPGPQSKIIQFSSIGGTSDGPNLVQDTTDRKARRRKWSPPDDVILISAWLNTSKDRKVVVYDEQQAHTFWKRIGAHVSNSASLANLPKREWNHCRQRWRKINDYVCKFVGCYDQALNQRASGQSEDDVFQVAYQLYYNNYMSNFKLEHAWRELRHNKKWCSTYTSENSKGGGSSKRTKLNGGGVYSSSCNPESVPIALDGEEQVMDRPLGVKSSKQKEKKVATKTMLEEREADSRSRLENLWVLDEEEQVMDLPLGVKSSKQKERKVATKTMIEEREAANFRSRLGNLWLLKEKEEREADSRSRLENLWALKEKDIEEQKKLTRMEVLKSLLGRRTGETSEKEETLKNKLIDEML

SEQ ID NO: 47073 - protein, 582 aa, Arabidopsis thaliana
  peptide (1)..(582): Ceres Seq. ID no. 13579050
MSQPSRAVLIFCKVNEIQFDEILISLGKRQQLSPEFKEINPMGKVPAIVDGRLKLFESHAILIYLSSAYASVVDHWYPNDLSKRAKIHSVLDWHHTNLRPGASGYVLNSVLAPALGLPLNPKAAAEAENILTNSLSTLETFWLKGSAKFLLGGKQPSIADLSLVCELMQLQVLDDKDRLRLLSPHKKVEQWIESTRKATMPHSDEVHEVLFRAKDRFQKQREMATASKPGPQSKIIQFSSIGGTSDGPNLVQDTTDRKARRRKWSPPDDVILISAWLNTSKDRKVVVYDEQQAHTFWKRIGAHVSNSASLANLPKREWNHCRQRWRKINDYVCKFVGCYDQALNQRASGQSEDDVFQVAYQLYYNNYMSNFKLEHAWRELRHNKKWCSTYTSENSKGGGSSKRTKLNGGGVYSSSCNPESVPIALDGEEQVMDRPLGVKSSKQKEKKVATKTMLEEREADSRSRLENLWVLDEEEQVMDLPLGVKSSKQKERKVATKTMIEEREAANFRSRLGNLWLLKEKEEREADSRSRLENLWALKEKDIEEQKKLTRMEVLKSLLGRRTGETSEKEETLKNKLIDEML

SEQ ID NO: 47074 - DNA, 1969 bp, Arabidopsis thaliana; identical to SEQ ID NO: 44264
  misc_feature (1)..(1969): Ceres Seq. ID no. 12603622
  misc_feature (1)..(1969): Ortholog of  Ceres SEQ ID NO 14315290 as cited in SEQ ID NO 50908

SEQ ID NO: 47075 - protein, 600 aa, Arabidopsis thaliana; identical to SEQ ID NO: 44265
  peptide (1)..(600): Ceres Seq. ID no. 12603623

SEQ ID NO: 47076 - protein, 593 aa, Arabidopsis thaliana; identical to SEQ ID NO: 44266
  peptide (1)..(593): Ceres Seq. ID no. 12603624

SEQ ID NO: 47077 - protein, 583 aa, Arabidopsis thaliana; identical to SEQ ID NO: 44267
  peptide (1)..(583): Ceres Seq. ID no. 12603625

SEQ ID NO: 47078 - DNA, 2405 bp, Arabidopsis thaliana
  misc_feature (1)..(2405): Ceres Seq. ID no. 12601354
  misc_feature (1)..(2405): Ortholog of  Ceres SEQ ID NO 15174591 as cited in SEQ ID NO 53383
  misc_feature (1)..(2405): Ortholog of  Ceres SEQ ID NO 14310784 as cited in SEQ ID NO 58503
accgattctctctctctctctctctctctttcacttgcagtgtgtcgctttgctgccttcattctcatttcacacgaagattaaaaaaagttggtctctttcctaatttagaagagtgataaaccaatcccagatccgagtctctctccccatctccttctttctctcttttgaataacacactgcggttttttgcctttgagatctgtcattgtctcttccaaatctagaacctttacttgggttgtattcaaatatctgtaactagtgagaaatcatcaatttttaaagctgaagtcttcacttagtagtctgcatcctttaactcggaacgttgggtctccgtttggctttatctcaaataagaaggcaatgaaaggaagatcagatggagggcaaaagaagcgggtgattgctttggtttgcgttgcagcggtagttcttgttttcgtatatctgttctacggctcttctgatcatagagcatcggctatcgaatacgggagaaaactcgggttaggtggggatgatgatgatactaaacaggatgacacttctagctcatttggtgttgatgatggtttcactccgagaagttttcctgtgtgtgatgatcgacattcggagcttattccttgcttagataggaatcttatataccaaatgagattgaagctggatttgtctttgatggagcattatgaacgtcattgtcctcctcctgagagacgattcaattgcttgattccgcctcctaatggatataaggttccgattaaatggccaaaaagcagagatgaagtgtggaaagtgaacatacctcatactcatcttgcacatgagaagtctgaccaaaactggatggttgtcaaaggagataagattaatttccctggtggaggcacacattttcattatggtgctgataagtatattgcatcgatggcaaatatgcttaactatcctaacaacgtgctgaacaacggtggaaggctaaggacggttttcgatgttggttgtggtgttgcgagttttggaggttatcttttatcatcggatattctcacaatgtccttggctccaaatgatgtgcatcagaaccaaatccaatttgctcttgagagagggattcctgcctccctcggtgttttagggacaaagaggctcccatacccaagcagatcttttgaactttctcactgttcacgttgcagaatcgattggctacaaagagacgggattcttcttctcgagctagacagagtacttagacctggtggttattttgcatattcatctccagaggcatatgcacaagatgaagaggatcttagaatctggagagaaatgagtgctcttgtggagcgcatgtgttggaagatcgcggcaaaaaggaatcaaactgttatttggcagaaacctttgacaaatgattgttatctagaaagagaacctggaactcagcctcctctttgccgttctgataatgaccctgatgctgtgtggggcgtaaacatggaagcttgcattacttcttacagtgaccatgaccacaaaaccaagggaagtggattagctccatggccagctcggttaacctctcctcctcccagacttgctgattttggatattcaacgggcatgtttgagaaggacacggaactttggaggcagagagtagatacttattgggatctcttgagtccaagaatcgaatcagatacagtgaggaacataatggacatgaaagcaagcatgggctcttttgctgctgctctgaaagaaaaagatgtctgggtaatgaatgttgttcctgaggacggacctaacacgcttaaactgatatatgacagaggtttaatgggcgcggttcatagctggtgtgaagcattctcgacatatccaaggacatatgatctcctccatgcttgggatattatatcggatatcaagaaaaaaggatgtagtgaagtggatttgttactggagatggatcgaatactgcgcccgagcgggtttataatcataagggataaacaaagagtggtggattttgtgaagaagtatctaaaggcattgcattgggaagaagtaggtaccaagacagactcagattcagatcaagattcagacaatgttgtattcattgtccagaagaagctgtggttgactagtgaaagccttagagatatggagtgatgagtaagccacacgatacacaaaaattacgaccaatgatcatacaaccaacaaatttcattattgtagtagcaacattatttattaacgttgtttttaatttttttaattattgtatctttcttacattcttataagtgatgttgtttgtatgattttggtagagaagagaagacacgtataagtaaagaacgatagattctttt

SEQ ID NO: 47079 - protein, 608 aa, Arabidopsis thaliana
  peptide (1)..(608): Ceres Seq. ID no. 12601355
MKGRSDGGQKKRVIALVCVAAVVLVFVYLFYGSSDHRASAIEYGRKLGLGGDDDDTKQDDTSSSFGVDDGFTPRSFPVCDDRHSELIPCLDRNLIYQMRLKLDLSLMEHYERHCPPPERRFNCLIPPPNGYKVPIKWPKSRDEVWKVNIPHTHLAHEKSDQNWMVVKGDKINFPGGGTHFHYGADKYIASMANMLNYPNNVLNNGGRLRTVFDVGCGVASFGGYLLSSDILTMSLAPNDVHQNQIQFALERGIPASLGVLGTKRLPYPSRSFELSHCSRCRIDWLQRDGILLLELDRVLRPGGYFAYSSPEAYAQDEEDLRIWREMSALVERMCWKIAAKRNQTVIWQKPLTNDCYLEREPGTQPPLCRSDNDPDAVWGVNMEACITSYSDHDHKTKGSGLAPWPARLTSPPPRLADFGYSTGMFEKDTELWRQRVDTYWDLLSPRIESDTVRNIMDMKASMGSFAAALKEKDVWVMNVVPEDGPNTLKLIYDRGLMGAVHSWCEAFSTYPRTYDLLHAWDIISDIKKKGCSEVDLLLEMDRILRPSGFIIIRDKQRVVDFVKKYLKALHWEEVGTKTDSDSDQDSDNVVFIVQKKLWLTSESLRDME

SEQ ID NO: 47080 - protein, 511 aa, Arabidopsis thaliana
  peptide (1)..(511): Ceres Seq. ID no. 12601356
MRLKLDLSLMEHYERHCPPPERRFNCLIPPPNGYKVPIKWPKSRDEVWKVNIPHTHLAHEKSDQNWMVVKGDKINFPGGGTHFHYGADKYIASMANMLNYPNNVLNNGGRLRTVFDVGCGVASFGGYLLSSDILTMSLAPNDVHQNQIQFALERGIPASLGVLGTKRLPYPSRSFELSHCSRCRIDWLQRDGILLLELDRVLRPGGYFAYSSPEAYAQDEEDLRIWREMSALVERMCWKIAAKRNQTVIWQKPLTNDCYLEREPGTQPPLCRSDNDPDAVWGVNMEACITSYSDHDHKTKGSGLAPWPARLTSPPPRLADFGYSTGMFEKDTELWRQRVDTYWDLLSPRIESDTVRNIMDMKASMGSFAAALKEKDVWVMNVVPEDGPNTLKLIYDRGLMGAVHSWCEAFSTYPRTYDLLHAWDIISDIKKKGCSEVDLLLEMDRILRPSGFIIIRDKQRVVDFVKKYLKALHWEEVGTKTDSDSDQDSDNVVFIVQKKLWLTSESLRDME

SEQ ID NO: 47081 - protein, 502 aa, Arabidopsis thaliana
  peptide (1)..(502): Ceres Seq. ID no. 12601357
MEHYERHCPPPERRFNCLIPPPNGYKVPIKWPKSRDEVWKVNIPHTHLAHEKSDQNWMVVKGDKINFPGGGTHFHYGADKYIASMANMLNYPNNVLNNGGRLRTVFDVGCGVASFGGYLLSSDILTMSLAPNDVHQNQIQFALERGIPASLGVLGTKRLPYPSRSFELSHCSRCRIDWLQRDGILLLELDRVLRPGGYFAYSSPEAYAQDEEDLRIWREMSALVERMCWKIAAKRNQTVIWQKPLTNDCYLEREPGTQPPLCRSDNDPDAVWGVNMEACITSYSDHDHKTKGSGLAPWPARLTSPPPRLADFGYSTGMFEKDTELWRQRVDTYWDLLSPRIESDTVRNIMDMKASMGSFAAALKEKDVWVMNVVPEDGPNTLKLIYDRGLMGAVHSWCEAFSTYPRTYDLLHAWDIISDIKKKGCSEVDLLLEMDRILRPSGFIIIRDKQRVVDFVKKYLKALHWEEVGTKTDSDSDQDSDNVVFIVQKKLWLTSESLRDME

SEQ ID NO: 47082 - DNA, 1441 bp, Arabidopsis thaliana
  misc_feature (1)..(1441): Ceres Seq. ID no. 14310224
  misc_feature (1)..(1441): Ortholog of  Ceres SEQ ID NO 13596090 as cited in SEQ ID NO 68377
  misc_feature (1)..(1441): Ortholog of  Ceres SEQ ID NO 14303557 as cited in SEQ ID NO 68595
aagttcggttcccttcttctctcctcctccaccttctctccattttcttacctctcaacaagtttacacaaacaaaaaaacaaaaaaaaaacaaaaaaatgacaagttgttttttttaaaattcttttcttagacaaagacagagacagagagaggggaagattttgggtttggtgtttttctccttttcttcattgaaagttgtcttcttttttaatcttctttgattaaaatgggtaatgtgacgtcaaatgtggcggccaagttcgcattcttcccgccggagccagcaacatacggcgtaacgaaggatgacgagaccgggaagctggtcttcgccggagtgtcggctgacaagaacgtggaagtccaccaactcaccacaaagtccggcaacaaagttgttgccacgttttggagacacccttttgcgagattcacgcttctctattcccatggcaatgccgctgatcttggccaaatggtcgagctattcatcgaactccgtgctcatctccgcgtcaacatcatgagttatgattattcaggatatggagcttcaacaggaaagccgtctgaattcaacacgtattatgacatagaggcagtgtacaattgcttgcggagcgattatgggatcaagcaagaggagattattctgtacggacagtctgtaggaagcggtccaacgttgcacatggcttctcggttgaagaggcttagaggagttgttcttcacagcgccattctctctggaatcagagtcttgtatcctgtcaaaatgactctctggttcgatatattcaaaaacatagacaagattcgccatgtcaactcacaagtccttgtcatacatggcacaaatgacgagattgttgatttgtctcacgggaaacgactgtgggagctggcgaaggagaagtatgatccgttatgggtgaagggaggagggcattgcaacctcgagacttaccctgagtacatcaagcacctcaaaaagttcgtaaatgcaatggagaaactctctctaaccaatccaccacccaaacaactaactaatgagcccagtatcaccgagactaagcacaatcggtgcttgaaattcgggaaacggtagtagcagaatcacaagacaattggtttggtagatttcttccttggcatcgcatgtgcagagttatttcctcaatgtgatcaaaaccaatgctaaacacagggtcacagacaacggcgtaacagagatcatctagtgaggtatttcactgtagaatgttgccctgcttttgggtatttgatcgatgttcaatctcctgtaaaaatgtagcttcaagtttgggggtttctgtaacacatcattacttgtaggagaagcaacacagaaaagatgtaatcagcatttccttcgaactatctagtgctccttagcgagacaattaagtac

SEQ ID NO: 47083 - protein, 294 aa, Arabidopsis thaliana
  peptide (1)..(294): Ceres Seq. ID no. 14310225
MGNVTSNVAAKFAFFPPEPATYGVTKDDETGKLVFAGVSADKNVEVHQLTTKSGNKVVATFWRHPFARFTLLYSHGNAADLGQMVELFIELRAHLRVNIMSYDYSGYGASTGKPSEFNTYYDIEAVYNCLRSDYGIKQEEIILYGQSVGSGPTLHMASRLKRLRGVVLHSAILSGIRVLYPVKMTLWFDIFKNIDKIRHVNSQVLVIHGTNDEIVDLSHGKRLWELAKEKYDPLWVKGGGHCNLETYPEYIKHLKKFVNAMEKLSLTNPPPKQLTNEPSITETKHNRCLKFGKR

SEQ ID NO: 47084 - protein, 211 aa, Arabidopsis thaliana
  peptide (1)..(211): Ceres Seq. ID no. 14310226
MVELFIELRAHLRVNIMSYDYSGYGASTGKPSEFNTYYDIEAVYNCLRSDYGIKQEEIILYGQSVGSGPTLHMASRLKRLRGVVLHSAILSGIRVLYPVKMTLWFDIFKNIDKIRHVNSQVLVIHGTNDEIVDLSHGKRLWELAKEKYDPLWVKGGGHCNLETYPEYIKHLKKFVNAMEKLSLTNPPPKQLTNEPSITETKHNRCLKFGKR

SEQ ID NO: 47085 - protein, 195 aa, Arabidopsis thaliana
  peptide (1)..(195): Ceres Seq. ID no. 14310227
MSYDYSGYGASTGKPSEFNTYYDIEAVYNCLRSDYGIKQEEIILYGQSVGSGPTLHMASRLKRLRGVVLHSAILSGIRVLYPVKMTLWFDIFKNIDKIRHVNSQVLVIHGTNDEIVDLSHGKRLWELAKEKYDPLWVKGGGHCNLETYPEYIKHLKKFVNAMEKLSLTNPPPKQLTNEPSITETKHNRCLKFGKR

SEQ ID NO: 47086 - DNA, 880 bp, Arabidopsis thaliana
  misc_feature (1)..(880): Ceres Seq. ID no. 12601358
  misc_feature (1)..(880): Ortholog of  Ceres SEQ ID NO 13638567 as cited in SEQ ID NO 51303
  misc_feature (1)..(880): Ortholog of  Ceres SEQ ID NO 14301396 as cited in SEQ ID NO 51789
  misc_feature (1)..(880): Ortholog of  Ceres SEQ ID NO 12610031 as cited in SEQ ID NO 55811
  misc_feature (1)..(880): Ortholog of  Ceres SEQ ID NO 12610896 as cited in SEQ ID NO 55861
  misc_feature (1)..(880): Ortholog of  Ceres SEQ ID NO 12619664 as cited in SEQ ID NO 66048
  misc_feature (1)..(880): Ortholog of  Ceres SEQ ID NO 12635952 as cited in SEQ ID NO 0
atcaatcacaaagatctctctacttcaataaatctccaccttactttaagaacaagaaaaacacagtattaacaaatggcaggaatcaaagttttcggtcacccagcttccacagccactagaagagttctcatcgctcttcacgagaagaatgtcgactttgaattcgttcatgtcgagctcaaagatggtgaacacaagaaagagcctttcatccttcgcaacccctttggtaaagttccagcctttgaagatggagacttcaagattttcgaatcaagagcaattactcaatacatagctcatgaattctcagacaaaggaaacaaccttctctcaactggcaaggacatggcgatcatagccatgggcattgaaattgagtcgcatgagtttgacccagttggttcaaagcttgtttgggagcaagtcttaaagcctttgtatggtatgaccacagacaaaaccgttgttgaagaagaagaggctaagctagccaaagtcctcgatgtttacgaacacaggcttggtgagtccaagtatttggcttctgaccacttcactttggtcgatcttcacactatccctgtgattcaatacttacttggaactccaactaagaaactcttcgacgagcgtccacatgtgagtgcttgggttgctgacatcacttcaaggccttctgctcagaaggttctttaagtgaatctcaaactatttatcgatcagaagatgtaataaaagtggcgatgacctaattgcccaattctcataaactctgtttttctttttgtgtttactctgtttttctgctgccgagtgtttgatttgaatgtaatcttcgataatgagtcttgatataataaaatatttcttatct

SEQ ID NO: 47087 - protein, 208 aa, Arabidopsis thaliana
  peptide (1)..(208): Ceres Seq. ID no. 12601359
MAGIKVFGHPASTATRRVLIALHEKNVDFEFVHVELKDGEHKKEPFILRNPFGKVPAFEDGDFKIFESRAITQYIAHEFSDKGNNLLSTGKDMAIIAMGIEIESHEFDPVGSKLVWEQVLKPLYGMTTDKTVVEEEEAKLAKVLDVYEHRLGESKYLASDHFTLVDLHTIPVIQYLLGTPTKKLFDERPHVSAWVADITSRPSAQKVL

SEQ ID NO: 47088 - protein, 116 aa, Arabidopsis thaliana
  peptide (1)..(116): Ceres Seq. ID no. 12601360
MAIIAMGIEIESHEFDPVGSKLVWEQVLKPLYGMTTDKTVVEEEEAKLAKVLDVYEHRLGESKYLASDHFTLVDLHTIPVIQYLLGTPTKKLFDERPHVSAWVADITSRPSAQKVL

SEQ ID NO: 47089 - protein, 111 aa, Arabidopsis thaliana
  peptide (1)..(111): Ceres Seq. ID no. 12601361
MGIEIESHEFDPVGSKLVWEQVLKPLYGMTTDKTVVEEEEAKLAKVLDVYEHRLGESKYLASDHFTLVDLHTIPVIQYLLGTPTKKLFDERPHVSAWVADITSRPSAQKVL

SEQ ID NO: 47090 - DNA, 1265 bp, Arabidopsis thaliana
  misc_feature (1)..(1265): Ceres Seq. ID no. 14316565
  misc_feature (1)..(1265): Ortholog of  Ceres SEQ ID NO 13598234 as cited in SEQ ID NO 63461
  misc_feature (1)..(1265): Ortholog of  Ceres SEQ ID NO 13597254 as cited in SEQ ID NO 63858
  misc_feature (1)..(1265): Ortholog of  Ceres SEQ ID NO 12622778 as cited in SEQ ID NO 67562
aatcaggttccacatttggctttgcacaccttccttgatcctatcaatggcggatctgaaatcaaccttcctcgacgtttactctgttctcaagtctgatctgcttcaagatccttcctttgaattcacccacgaatctcgtcaatggcttgaacggatgcttgactacaatgtacgcggagggaagctaaatcgtggtctctctgtggttgatagctacaagctgttgaagcaaggtcaagacttgacggagaaagagactttcctctcatgtgctcttggttggtgcattgaatggcttcaagcttatttccttgtgcttgatgacatcatggacaactctgtcacacgccgtggccagccttgttggtttagaaagccaaaggttggtatgattgccattaacgatgggattctacttcgcaatcatatccacaggattctcaaaaagcacttcagggaaatgccttactatgttgacctcgttgatttgtttaacgaggtagagtttcaaacagcttgcggccagatgattgatttgatcaccacctttgatggagaaaaagatttgtctaagtactccttgaaatccatcggcgtattgttgagtacaaaacagcttattactcattttatcttcctgttgcttgcgcattgctcatggcgggagaaaatttggaaaaccatactgatgtgaagactgttcttgttgacatgggaatttactttcaagtacaggatgattatctggactgttttgctgatcctgagacacttggcaagatagggacagacatagaagatttcaaatgctcctggttggtagttaaggcattggaacgctgcagtgaagaacaaactaagatactatacgagaactatggtaaagccgaaccatcaaacgttgctaaagtgaaagctctctacaaagagattgatctcgagggagcgttcatggaatatgagaaggaaagctatgagaagctgacaaagttgatcgaagctcaccagagtaaagcaattcaagcagtgctaaaatctttcttggctaagatctacaagaggcagaagtagagacatactcgggcctctctccgttttattcttctgacatttatgtattggtgcatgacttcttttgccttagatcttatgttcccttccaaaaatagaatttgagattcttgttcatgcttatagtatagagacttagaaaatgtctatgtttcttttaatttctgaataaaaaatgtgcaatcagtgat

SEQ ID NO: 47091 - protein, 231 aa, Arabidopsis thaliana
  peptide (1)..(231): Ceres Seq. ID no. 14316566
IRFHIWLCTPSLILSMADLKSTFLDVYSVLKSDLLQDPSFEFTHESRQWLERMLDYNVRGGKLNRGLSVVDSYKLLKQGQDLTEKETFLSCALGWCIEWLQAYFLVLDDIMDNSVTRRGQPCWFRKPKVGMIAINDGILLRNHIHRILKKHFREMPYYVDLVDLFNEVEFQTACGQMIDLITTFDGEKDLSKYSLKSIGVLLSTKQLITHFIFLLLAHCSWREKIWKTILM

SEQ ID NO: 47092 - protein, 216 aa, Arabidopsis thaliana
  peptide (1)..(216): Ceres Seq. ID no. 14316567
MADLKSTFLDVYSVLKSDLLQDPSFEFTHESRQWLERMLDYNVRGGKLNRGLSVVDSYKLLKQGQDLTEKETFLSCALGWCIEWLQAYFLVLDDIMDNSVTRRGQPCWFRKPKVGMIAINDGILLRNHIHRILKKHFREMPYYVDLVDLFNEVEFQTACGQMIDLITTFDGEKDLSKYSLKSIGVLLSTKQLITHFIFLLLAHCSWREKIWKTILM

SEQ ID NO: 47093 - protein, 179 aa, Arabidopsis thaliana
  peptide (1)..(179): Ceres Seq. ID no. 14316568
MLDYNVRGGKLNRGLSVVDSYKLLKQGQDLTEKETFLSCALGWCIEWLQAYFLVLDDIMDNSVTRRGQPCWFRKPKVGMIAINDGILLRNHIHRILKKHFREMPYYVDLVDLFNEVEFQTACGQMIDLITTFDGEKDLSKYSLKSIGVLLSTKQLITHFIFLLLAHCSWREKIWKTILM

SEQ ID NO: 47094 - DNA, 1872 bp, Arabidopsis thaliana
  misc_feature (1)..(1872): Ceres Seq. ID no. 12601249
  misc_feature (1)..(1872): Ortholog of  Ceres SEQ ID NO 15176922 as cited in SEQ ID NO 55251
ggattgaaccctctctctctctctctgtttcttcgacgatctctttcgcaccgctcaatcatcctcccgattccgtaagtttcggttttgaatcgtttcttctcctctgccactatcgtcttcttctcggttttctatatcgttttagtttctttcaccgtcgtttcttttctctcccacgctcatccaattttcttcccctaaagaaccggaatttagtgtctgtgtgtgatggagtccagtagagtagtagtgggtggtgggctgcccttggcgaataggaggaactctagctttgccaaacccaaaatccaacaagggacttttctacctctatctcggatcaataatgtctctgccccccaaaaatgctcccttcacaccaatccaaaccccatgttcccttttgttactcgccgcaagagccagactaaccctgattgcggtgtcgtcaagttgggggaagaagatgactcttgctcttcactggacaaactcccggaggttaatggggttcacactggtgtagcacgtcctgtcgatatcaaacgagaactcgtgatgctctctcttccagccattgctggccaagctattgatcctttgacgctgctaatggagactgcatacatcggaaggctcggatctgtagagttgggttcagctggcgtttccatggccattttcaataccatatcaaagctcttcaacattccgctcctcagcgttgccacttctttcgtcgctgaagatattgcaaagattgccgctcaagatttagcctcagtgtcaacagcgctagtgttagccattggaattggcatcttcgaggcactggcattgtctttggcatctggaccctttctaaggttaatgggtatacaatctgtaagttcggtccagagaatgtcagaaatgttcatccctgcgcggcagtttcttgtccttagggcgcttggtgctcctgcttatgtggtttccttagcacttcaaggcatttttcgtggattcaaggatacaaaaactccagtctactgtttaggtattggtaattttctggctgtatttctattccctctgtttatatacaaattcaggatgggtgtagccggggcagcaatctctagtgtcatctcccagtacactgttgccattttgatgcttatactcttgaacaaaagagttatactgcttcctccaaagattgggtcactaaagttcggcgattacctaaaatcagggggatttgttctgggaaggactctttctgtgctcgtgaccatgactgttgccacatcaatggcggctcgtcagggagttttcgcaatggcagcacatcagatatgcatgcaagtgtggttggcggtatctctgcttactgatgcactagcttcatctggacaggccttgatcgcgagctctgcatccaaaagagactttgaaggtgtgaaagaggttactacttttgttctgaagataggagtggtgactgggatcgcactggctattgtgttggggatgtctttcagttcaatagctggtttgttttccaaagaccctgaagttctgcggattgtgagaaagggtgtattgtttgtagcggcgactcaaccaataacagcgctagcgtttatctttgatgggctgcactatgggatgtctgacttcccctacgcggcttgctcgatgatggtggtgggaggaatatcatcagcgttcatgctgtatgcaccggcagggttggggctaagtggagtgtgggtggggctgagcatgttcatgggattgcggatggtggctggattcagcagattaatgtggaggaagggtccatggtggttcatgcataccagtgacaagcgtcttgcttaa

SEQ ID NO: 47095 - protein, 546 aa, Arabidopsis thaliana
  peptide (1)..(546): Ceres Seq. ID no. 12601250
MESSRVVVGGGLPLANRRNSSFAKPKIQQGTFLPLSRINNVSAPQKCSLHTNPNPMFPFVTRRKSQTNPDCGVVKLGEEDDSCSSLDKLPEVNGVHTGVARPVDIKRELVMLSLPAIAGQAIDPLTLLMETAYIGRLGSVELGSAGVSMAIFNTISKLFNIPLLSVATSFVAEDIAKIAAQDLASVSTALVLAIGIGIFEALALSLASGPFLRLMGIQSVSSVQRMSEMFIPARQFLVLRALGAPAYVVSLALQGIFRGFKDTKTPVYCLGIGNFLAVFLFPLFIYKFRMGVAGAAISSVISQYTVAILMLILLNKRVILLPPKIGSLKFGDYLKSGGFVLGRTLSVLVTMTVATSMAARQGVFAMAAHQICMQVWLAVSLLTDALASSGQALIASSASKRDFEGVKEVTTFVLKIGVVTGIALAIVLGMSFSSIAGLFSKDPEVLRIVRKGVLFVAATQPITALAFIFDGLHYGMSDFPYAACSMMVVGGISSAFMLYAPAGLGLSGVWVGLSMFMGLRMVAGFSRLMWRKGPWWFMHTSDKRLA

SEQ ID NO: 47096 - protein, 491 aa, Arabidopsis thaliana
  peptide (1)..(491): Ceres Seq. ID no. 12601251
MFPFVTRRKSQTNPDCGVVKLGEEDDSCSSLDKLPEVNGVHTGVARPVDIKRELVMLSLPAIAGQAIDPLTLLMETAYIGRLGSVELGSAGVSMAIFNTISKLFNIPLLSVATSFVAEDIAKIAAQDLASVSTALVLAIGIGIFEALALSLASGPFLRLMGIQSVSSVQRMSEMFIPARQFLVLRALGAPAYVVSLALQGIFRGFKDTKTPVYCLGIGNFLAVFLFPLFIYKFRMGVAGAAISSVISQYTVAILMLILLNKRVILLPPKIGSLKFGDYLKSGGFVLGRTLSVLVTMTVATSMAARQGVFAMAAHQICMQVWLAVSLLTDALASSGQALIASSASKRDFEGVKEVTTFVLKIGVVTGIALAIVLGMSFSSIAGLFSKDPEVLRIVRKGVLFVAATQPITALAFIFDGLHYGMSDFPYAACSMMVVGGISSAFMLYAPAGLGLSGVWVGLSMFMGLRMVAGFSRLMWRKGPWWFMHTSDKRLA

SEQ ID NO: 47097 - protein, 436 aa, Arabidopsis thaliana
  peptide (1)..(436): Ceres Seq. ID no. 12601252
MLSLPAIAGQAIDPLTLLMETAYIGRLGSVELGSAGVSMAIFNTISKLFNIPLLSVATSFVAEDIAKIAAQDLASVSTALVLAIGIGIFEALALSLASGPFLRLMGIQSVSSVQRMSEMFIPARQFLVLRALGAPAYVVSLALQGIFRGFKDTKTPVYCLGIGNFLAVFLFPLFIYKFRMGVAGAAISSVISQYTVAILMLILLNKRVILLPPKIGSLKFGDYLKSGGFVLGRTLSVLVTMTVATSMAARQGVFAMAAHQICMQVWLAVSLLTDALASSGQALIASSASKRDFEGVKEVTTFVLKIGVVTGIALAIVLGMSFSSIAGLFSKDPEVLRIVRKGVLFVAATQPITALAFIFDGLHYGMSDFPYAACSMMVVGGISSAFMLYAPAGLGLSGVWVGLSMFMGLRMVAGFSRLMWRKGPWWFMHTSDKRLA

SEQ ID NO: 47098 - DNA, 3249 bp, Arabidopsis thaliana
  misc_feature (1)..(3249): Ceres Seq. ID no. 13578479
  misc_feature (1)..(3249): Ortholog of  Ceres SEQ ID NO 13600701 as cited in SEQ ID NO 0
ggaaaaatcgaaggataatctgtttcttccagcacaagttaacttgcaagagagagctcaaagatggaaccaacagaaaaaccatcgaccaaaccatcttctcggactctacctagagacactcgtggctctctcgaagtattcaacccgtcaactcagctgacccgacccgataacccggtgttccgtcctgaaccaccagcgtggcaaaacttgagtgatccacgtggcaccagtcctcaaccccgaccacaacaagaaccagctccatccaaccctgttcggtctgatcaagaaatcgctgtcacgacctcatggatggctctgaaagacccatcaccggagacaatctccaagaagacgatcaccgccgagaaaccacagaagtcggcggtggcggctgagcagagagcggcagagtggggattggttttgaagaccgatacaaagacgggaaagccacaaggagtaggcgtgaggaactctggtggaactgagaatgatcctaacgggaaaaagactacatcgcagagaaactcgcaaaactcttgccggagctccggtgagatgtcggacggagatgttcccggcgggaggagtgggattccaagagtatcggaagatctaaaagatgcgttgtcgacgtttcaacaaacgtttgtggtctcagatgctacaaaacctgattatccgattatgtatgcaagtgctggtttcttcaatatgactggttacacttccaaagaagtcgtcggcagaaactgccgatttttacaaggatcaggtacagatgcagatgagttagcaaagataagagagacattagctgctggtaacaattattgtgggcgtatattgaattacaagaaagatgggacctctttttggaatcttctcacgattgctcccattaaagacgagagtggcaaagtcctcaaatttatcggaatgcaagtggaggtgagcaagcacactgaaggggccaaagaaaaggctttgaggcccaatgggcttccggaatctctgattcgatacgatgcccgccaaaaagatatggcgacaaactcagtgacagagctagtagaggcggtgaagagacctcgggcactaagcgaatcgacgaatctccatcccttcatgacaaaatcggagagcgatgaacttccgaaaaaaccagctcggcgaatgtccgaaaatgttgttccgtcaggccgaagaaactctggcggcggaagaagaaactcgatgcagcgaatcaacgaaattcccgagaaaaaatctagaaaatcttccctttccttcatggggatcaagaagaagagcgaatctttggatgaatctatagacgatggatttatagagtatggagaagaagacgatgagattagtgatagggacgagagacctgagagtgtggatgataaagtgagacaaaaggaaatgagaaagggtattgatctagctactacactcgaacgtatcgagaagaatttcgtcatcactgatcctaggcttcccgataatcccattatttttgcatctgatagtttcttggagctcacggaatatagccgtgaagaaattcttggaagaaattgcaggtttctacaaggtccagagactgatctaaccacagtgaagaagattcgaaatgctattgataaccaaaccgaagtgacagttcagctcatcaactacaccaagagcggaaagaagttctggaacattttccacttgcaacctatgcgtgatcagaagggagaagtacaatactttattggagttcaactagacgggagcaagcacgtagaaccagttcgcaatgtcattgaagaaaccgcagtgaaagagggagaagacctggtgaaaaaaacagctgtgaatatcgatgaagcggttcgagaacttcctgatgccaacatgacaccagaggatttatgggcaaaccactcaaaggttgttcattgtaagcctcacaggaaagattcaccaccatggatagctatccaaaaggtgttggaaagtggtgaaccgattggtttgaagcatttcaaaccggtgaaacctttgggttctggtgacacaggaagtgtgcatctagtggaactcgttggaacagatcagttgtttgcaatgaaagcaatggacaaggctgttatgcttaaccgaaacaaagtacatagagctagagctgagagagagatcctagatttgcttgaccatccttttcttcctgcactctacgcttcttttcagacaaaaacacatatatgtcttataacagattactatccaggaggagaactcttcatgctcctagatcgacaacctaggaaggttctcaaagaagatgctgtaagattctatgctgctcaagttgtcgttgcactcgagtatcttcactgtcaaggaataatttaccgagacttgaaaccggaaaacgttttaatccaaggcaatggcgatatctctttgtcggattttgatctgtcttgcttgacatcttgcaaacctcagctgttgattccgagtatagacgagaagaagaagaaaaagcaacaaaagagtcaacaaactccaatcttcatggctgaaccaatgcgtgcatcaaactcatttgttggcactgaagagtacattgctccggaaattatatccggagcaggacatacgagtgcagtagactggtgggctcttggtatacttatgtatgaaatgttatacggatacactccttttagaggaaaaacaagacagaagactttcaccaatgttcttcaaaaagatctcaagtttccagctagcattcctgcaagtcttcaagtgaaacagctgatttttaggctgttacaacgagatccgaagaaaagactaggttgttttgaaggagcaaatgaagtcaagcaacattctttcttcaaaggcataaattgggctctgattcgatgcacgaaccctccagagctcgagactccgatattttctggtgaagctgaaaacggagagaaagttgttgatcctgagctagaagatctgcaaacaaatgttttttgagatttggactaaacgtttatcgttttcttttcaagaattgttggaaactctttgttctccaaaaatctcgtttttaattattttcattttaccattatctttatttatttataatgccaagtgtttctaataatttgtgtgagtttcttaagaatatgttttttatatatgtcaataaaattaatcaagttttgc

SEQ ID NO: 47099 - protein, 996 aa, Arabidopsis thaliana
  peptide (1)..(996): Ceres Seq. ID no. 13578480
MEPTEKPSTKPSSRTLPRDTRGSLEVFNPSTQLTRPDNPVFRPEPPAWQNLSDPRGTSPQPRPQQEPAPSNPVRSDQEIAVTTSWMALKDPSPETISKKTITAEKPQKSAVAAEQRAAEWGLVLKTDTKTGKPQGVGVRNSGGTENDPNGKKTTSQRNSQNSCRSSGEMSDGDVPGGRSGIPRVSEDLKDALSTFQQTFVVSDATKPDYPIMYASAGFFNMTGYTSKEVVGRNCRFLQGSGTDADELAKIRETLAAGNNYCGRILNYKKDGTSFWNLLTIAPIKDESGKVLKFIGMQVEVSKHTEGAKEKALRPNGLPESLIRYDARQKDMATNSVTELVEAVKRPRALSESTNLHPFMTKSESDELPKKPARRMSENVVPSGRRNSGGGRRNSMQRINEIPEKKSRKSSLSFMGIKKKSESLDESIDDGFIEYGEEDDEISDRDERPESVDDKVRQKEMRKGIDLATTLERIEKNFVITDPRLPDNPIIFASDSFLELTEYSREEILGRNCRFLQGPETDLTTVKKIRNAIDNQTEVTVQLINYTKSGKKFWNIFHLQPMRDQKGEVQYFIGVQLDGSKHVEPVRNVIEETAVKEGEDLVKKTAVNIDEAVRELPDANMTPEDLWANHSKVVHCKPHRKDSPPWIAIQKVLESGEPIGLKHFKPVKPLGSGDTGSVHLVELVGTDQLFAMKAMDKAVMLNRNKVHRARAEREILDLLDHPFLPALYASFQTKTHICLITDYYPGGELFMLLDRQPRKVLKEDAVRFYAAQVVVALEYLHCQGIIYRDLKPENVLIQGNGDISLSDFDLSCLTSCKPQLLIPSIDEKKKKKQQKSQQTPIFMAEPMRASNSFVGTEEYIAPEIISGAGHTSAVDWWALGILMYEMLYGYTPFRGKTRQKTFTNVLQKDLKFPASIPASLQVKQLIFRLLQRDPKKRLGCFEGANEVKQHSFFKGINWALIRCTNPPELETPIFSGEAENGEKVVDPELEDLQTNVF

SEQ ID NO: 47100 - protein, 911 aa, Arabidopsis thaliana
  peptide (1)..(911): Ceres Seq. ID no. 13578481
MALKDPSPETISKKTITAEKPQKSAVAAEQRAAEWGLVLKTDTKTGKPQGVGVRNSGGTENDPNGKKTTSQRNSQNSCRSSGEMSDGDVPGGRSGIPRVSEDLKDALSTFQQTFVVSDATKPDYPIMYASAGFFNMTGYTSKEVVGRNCRFLQGSGTDADELAKIRETLAAGNNYCGRILNYKKDGTSFWNLLTIAPIKDESGKVLKFIGMQVEVSKHTEGAKEKALRPNGLPESLIRYDARQKDMATNSVTELVEAVKRPRALSESTNLHPFMTKSESDELPKKPARRMSENVVPSGRRNSGGGRRNSMQRINEIPEKKSRKSSLSFMGIKKKSESLDESIDDGFIEYGEEDDEISDRDERPESVDDKVRQKEMRKGIDLATTLERIEKNFVITDPRLPDNPIIFASDSFLELTEYSREEILGRNCRFLQGPETDLTTVKKIRNAIDNQTEVTVQLINYTKSGKKFWNIFHLQPMRDQKGEVQYFIGVQLDGSKHVEPVRNVIEETAVKEGEDLVKKTAVNIDEAVRELPDANMTPEDLWANHSKVVHCKPHRKDSPPWIAIQKVLESGEPIGLKHFKPVKPLGSGDTGSVHLVELVGTDQLFAMKAMDKAVMLNRNKVHRARAEREILDLLDHPFLPALYASFQTKTHICLITDYYPGGELFMLLDRQPRKVLKEDAVRFYAAQVVVALEYLHCQGIIYRDLKPENVLIQGNGDISLSDFDLSCLTSCKPQLLIPSIDEKKKKKQQKSQQTPIFMAEPMRASNSFVGTEEYIAPEIISGAGHTSAVDWWALGILMYEMLYGYTPFRGKTRQKTFTNVLQKDLKFPASIPASLQVKQLIFRLLQRDPKKRLGCFEGANEVKQHSFFKGINWALIRCTNPPELETPIFSGEAENGEKVVDPELEDLQTNVF

SEQ ID NO: 47101 - protein, 828 aa, Arabidopsis thaliana
  peptide (1)..(828): Ceres Seq. ID no. 13578482
MSDGDVPGGRSGIPRVSEDLKDALSTFQQTFVVSDATKPDYPIMYASAGFFNMTGYTSKEVVGRNCRFLQGSGTDADELAKIRETLAAGNNYCGRILNYKKDGTSFWNLLTIAPIKDESGKVLKFIGMQVEVSKHTEGAKEKALRPNGLPESLIRYDARQKDMATNSVTELVEAVKRPRALSESTNLHPFMTKSESDELPKKPARRMSENVVPSGRRNSGGGRRNSMQRINEIPEKKSRKSSLSFMGIKKKSESLDESIDDGFIEYGEEDDEISDRDERPESVDDKVRQKEMRKGIDLATTLERIEKNFVITDPRLPDNPIIFASDSFLELTEYSREEILGRNCRFLQGPETDLTTVKKIRNAIDNQTEVTVQLINYTKSGKKFWNIFHLQPMRDQKGEVQYFIGVQLDGSKHVEPVRNVIEETAVKEGEDLVKKTAVNIDEAVRELPDANMTPEDLWANHSKVVHCKPHRKDSPPWIAIQKVLESGEPIGLKHFKPVKPLGSGDTGSVHLVELVGTDQLFAMKAMDKAVMLNRNKVHRARAEREILDLLDHPFLPALYASFQTKTHICLITDYYPGGELFMLLDRQPRKVLKEDAVRFYAAQVVVALEYLHCQGIIYRDLKPENVLIQGNGDISLSDFDLSCLTSCKPQLLIPSIDEKKKKKQQKSQQTPIFMAEPMRASNSFVGTEEYIAPEIISGAGHTSAVDWWALGILMYEMLYGYTPFRGKTRQKTFTNVLQKDLKFPASIPASLQVKQLIFRLLQRDPKKRLGCFEGANEVKQHSFFKGINWALIRCTNPPELETPIFSGEAENGEKVVDPELEDLQTNVF

SEQ ID NO: 47102 - DNA, 2517 bp, Arabidopsis thaliana
  misc_feature (1)..(2517): Ceres Seq. ID no. 14310218
  misc_feature (1)..(2517): Ortholog of  Ceres SEQ ID NO 15179271 as cited in SEQ ID NO 0
agaattatcgggagaacttcagacatgctctgctccgaccgaatctcatcatctatcaatttcatgtgacttattaaattgttctgtattctaagaagtggttccgtagaagcggagcaatgccgatttctatggaacttccagttttctctactctccgagtaccattgttctctcgtttagctttacttcctacttttggagttccgttttcgtcccttggtgctacgacgcgattgaactgtacatctcgaaaggcgcgtcggatttgcgtgatgtgcttagtgagggattctgctccgatagagacgtgcgagagagctggagaagatgggtctgacgagttcattgaggttcttgtcatcggtagtcgcaaggagtctatcatggattcatgcttggattctccttttccttctcttcctctccgattttggagtattagcaaggacagctctggaggtttagtgttacagcagaggctcaatcaccaagataatgcctcgaagaccatgaatccaattgagctgttacagtcacgtccaagggccttcatccttgtttgtacttttctcgcctaacattgtggctagtgctggatatggttctgaccaggttgaagctattaatattcttagtgcagtaagatctgggggtaacttagctgttgctgtgctattaaagcctttcagctttgaaggccgaaagcgtctagaagaggttaacgagttggctagaaaactgcagcaacacaccaatttctgtatagatatcgacatagaggttttactacagaaggatttggtaactttggacgaggcgctgagaaatgcaaacaatgctgtgtctatggcaataaatgcagcttccgctctgataagtgggatgcatggaaacttcatcgatgtgatgcataaagatcttaaagaacttgaaggttcagaagttaaaacgattctagaaagttacaaagaggcaaaggttggttttggagttggtcacaaccttaagacttcgatattacgagctatatatgactgcccattctttcgacctggtctaaaggatctaaacgctattatatgcattgtggctagttcggtacctctccagaagaaagacgtgaaaacaattcttcgtactttccgtcaaactatggagtacactggagatattatagtatctactgttcatgagcctgatctggagcctaaagtgcgtgtcacaacgttttttattctaagttcttcagaagaggaaacatccaacaaaggcaacattttttctggtcttgttccttttgttttaaatatcttcacgagatatcgttcacagctccaaaaagaaacaaatattggacttggagagacgccagtttcaattaaagattcagcagactctactgacataaaaacttccaatcagaatgttgaggaatttgaaattgactctgaggacctcctggaagtttctgagaacggtgatgatagtgaatacccattaaaagagggggaaccatccagaaacagtcgtctggatcttaaagatgaaaatgtagaagattttggtgcaatccagagggagcctattgccaattggagtatggatcagggatatcagattgagcagaaatggcaagctgattctggagacactgcagtgcttagcctgggaattgtcaaccttcctgttggtgtgagaccttcgaagaaattgaacagtaatctcagtgttgccagtcaactctctaggaaggctgattccagagaagaatcatttttcaaccctaatggctcgacaaaagactctagtgatactgcatctaccctgctatctgagaaatatgctgattttacaaagcaaagaaatctatccgctcgagcatcgtctatgctggaagctgaacgagattcatcaaaaagatggagtcctattcttgagatgcagtacagaggaggacttttcaagggaagatgccaaggaggccttcccgaaggaaagggtcgtttggtacttggagatggaagcatatatgatggaatgtggcacaacggtaaaagatctggtctcggaacattctacttcaagaatggagacgtgttccaaggcacatggagagaagatttaatacacggaaagggttggttttatttgcacaaaggtgatcgatggtttgcaaatttctggaaaggaaaagccagtggcgaaggccggttctattcaaagtccggtgagatattctttggacatttcaaagatggttggcgccacggacaattcctctgtatagatttggatggaacaagatactctgaaacttgggacgacggtgttctcattgaccggaaacaagtggacgccggagattgatatcatccggcaatgctgtaactatatagtgcatatcgattttgtcttttctcaggttattattatgacaaaacgtgattcataaaaagtattcctgtgacttaaaaactccttttctttgattagatgtttaaaagaaacgaatta

SEQ ID NO: 47103 - protein, 506 aa, Arabidopsis thaliana
  peptide (1)..(506): Ceres Seq. ID no. 14310219
MAINAASALISGMHGNFIDVMHKDLKELEGSEVKTILESYKEAKVGFGVGHNLKTSILRAIYDCPFFRPGLKDLNAIICIVASSVPLQKKDVKTILRTFRQTMEYTGDIIVSTVHEPDLEPKVRVTTFFILSSSEEETSNKGNIFSGLVPFVLNIFTRYRSQLQKETNIGLGETPVSIKDSADSTDIKTSNQNVEEFEIDSEDLLEVSENGDDSEYPLKEGEPSRNSRLDLKDENVEDFGAIQREPIANWSMDQGYQIEQKWQADSGDTAVLSLGIVNLPVGVRPSKKLNSNLSVASQLSRKADSREESFFNPNGSTKDSSDTASTLLSEKYADFTKQRNLSARASSMLEAERDSSKRWSPILEMQYRGGLFKGRCQGGLPEGKGRLVLGDGSIYDGMWHNGKRSGLGTFYFKNGDVFQGTWREDLIHGKGWFYLHKGDRWFANFWKGKASGEGRFYSKSGEIFFGHFKDGWRHGQFLCIDLDGTRYSETWDDGVLIDRKQVDAGD

SEQ ID NO: 47104 - protein, 494 aa, Arabidopsis thaliana
  peptide (1)..(494): Ceres Seq. ID no. 14310220
MHGNFIDVMHKDLKELEGSEVKTILESYKEAKVGFGVGHNLKTSILRAIYDCPFFRPGLKDLNAIICIVASSVPLQKKDVKTILRTFRQTMEYTGDIIVSTVHEPDLEPKVRVTTFFILSSSEEETSNKGNIFSGLVPFVLNIFTRYRSQLQKETNIGLGETPVSIKDSADSTDIKTSNQNVEEFEIDSEDLLEVSENGDDSEYPLKEGEPSRNSRLDLKDENVEDFGAIQREPIANWSMDQGYQIEQKWQADSGDTAVLSLGIVNLPVGVRPSKKLNSNLSVASQLSRKADSREESFFNPNGSTKDSSDTASTLLSEKYADFTKQRNLSARASSMLEAERDSSKRWSPILEMQYRGGLFKGRCQGGLPEGKGRLVLGDGSIYDGMWHNGKRSGLGTFYFKNGDVFQGTWREDLIHGKGWFYLHKGDRWFANFWKGKASGEGRFYSKSGEIFFGHFKDGWRHGQFLCIDLDGTRYSETWDDGVLIDRKQVDAGD

SEQ ID NO: 47105 - protein, 486 aa, Arabidopsis thaliana
  peptide (1)..(486): Ceres Seq. ID no. 14310221
MHKDLKELEGSEVKTILESYKEAKVGFGVGHNLKTSILRAIYDCPFFRPGLKDLNAIICIVASSVPLQKKDVKTILRTFRQTMEYTGDIIVSTVHEPDLEPKVRVTTFFILSSSEEETSNKGNIFSGLVPFVLNIFTRYRSQLQKETNIGLGETPVSIKDSADSTDIKTSNQNVEEFEIDSEDLLEVSENGDDSEYPLKEGEPSRNSRLDLKDENVEDFGAIQREPIANWSMDQGYQIEQKWQADSGDTAVLSLGIVNLPVGVRPSKKLNSNLSVASQLSRKADSREESFFNPNGSTKDSSDTASTLLSEKYADFTKQRNLSARASSMLEAERDSSKRWSPILEMQYRGGLFKGRCQGGLPEGKGRLVLGDGSIYDGMWHNGKRSGLGTFYFKNGDVFQGTWREDLIHGKGWFYLHKGDRWFANFWKGKASGEGRFYSKSGEIFFGHFKDGWRHGQFLCIDLDGTRYSETWDDGVLIDRKQVDAGD

SEQ ID NO: 47106 - DNA, 1374 bp, Arabidopsis thaliana
  misc_feature (1)..(1374): Ceres Seq. ID no. 13592445
  misc_feature (1)..(1374): Ortholog of  Ceres SEQ ID NO 14303884 as cited in SEQ ID NO 53685
  misc_feature (1)..(1374): Ortholog of  Ceres SEQ ID NO 14316111 as cited in SEQ ID NO 60001
  misc_feature (1)..(1374): Ortholog of  Ceres SEQ ID NO 12614713 as cited in SEQ ID NO 60887
  misc_feature (1)..(1374): Ortholog of  Ceres SEQ ID NO 14309256 as cited in SEQ ID NO 0
gggaggaaactcaaattgttacagttcacaagtaatctcttcttcaagctttctctctctaccaatttaagtatctctctttcttctcctctctctctctacgaaaactccgttagacccgttctctctgttctaattttattcttcttcgtgttctcgttagggtttttgattctttcaacacagacccaaatcaatttctctcgtgtctttacgatgacctcgaagaacaatggtttgtcagctgcgctcgtttcgaatctccaagatgtgctttcgaagagaaaagtaggaaatgaggaaaaagttggaagcgatggatcggcggaggaggctccgtctacatctgattccgttgatgttgcgtcggtggaggaagagatcgatgattctagacctattgttttagttacgaatggtgatgggattgattcgccagggcttgtttctctcgttgaggctttggttctcgaagggctttacaatgttcatgtttgtgctcctcaaacggacaaatcagcctctgctcattctactactccaggagaaacaatcgctgtaagctctgtaaaactcaaaggtgccacagcctttgaagtttcagggactcctgtggactgcatctcattaggattatctggagcgctttttgcttggtcaaaacctatactggtaattagtggaattaatcagggatcaagctgtggccatcaaatgttctattcaggtgcagttgctggaggcagggaggctttgatttctggggtaccctctttgtcaatatcgttgaattggaagaaaaatgaaagccaagaaagtcactttaaggatgctgttggtgtctgcttacctttgataaacgcaactatcagagacattgcgaaaggagttttccctaaagactgctctctcaacatagaaattccaacatcaccctcatcaaacaagggtttcaaggtaacaaagcaaagcatgtggaggcagtatcctagttggcaagctgtttcagctaatcgtcaccctggtgctgggaatttcatgtccaaccaacaaagtttaggggctcagcttgcccagcttggcagggatgcttcagcggctggggcggctcgtcgttttaccactcagaagaagagtattgtagaaattgaatcagttggtgttgctggtaaaactgatacccgtgttaagaaattctttcgtctagagtttcttgctaaagaacaagaacacacagatgaagatttggatgtcaaggctctagaagatggtttcgtttccgtgactccattttctctccttccaaaaacggattcagaaactcaagccgcagcatcagaatggatctccaaagcccttaactctgatcaatga

SEQ ID NO: 47107 - protein, 457 aa, Arabidopsis thaliana
  peptide (1)..(457): Ceres Seq. ID no. 13592446
GRKLKLLQFTSNLFFKLSLSTNLSISLSSPLSLYENSVRPVLSVLILFFFVFSLGFLILSTQTQINFSRVFTMTSKNNGLSAALVSNLQDVLSKRKVGNEEKVGSDGSAEEAPSTSDSVDVASVEEEIDDSRPIVLVTNGDGIDSPGLVSLVEALVLEGLYNVHVCAPQTDKSASAHSTTPGETIAVSSVKLKGATAFEVSGTPVDCISLGLSGALFAWSKPILVISGINQGSSCGHQMFYSGAVAGGREALISGVPSLSISLNWKKNESQESHFKDAVGVCLPLINATIRDIAKGVFPKDCSLNIEIPTSPSSNKGFKVTKQSMWRQYPSWQAVSANRHPGAGNFMSNQQSLGAQLAQLGRDASAAGAARRFTTQKKSIVEIESVGVAGKTDTRVKKFFRLEFLAKEQEHTDEDLDVKALEDGFVSVTPFSLLPKTDSETQAAASEWISKALNSDQ

SEQ ID NO: 47108 - protein, 385 aa, Arabidopsis thaliana
  peptide (1)..(385): Ceres Seq. ID no. 13592447
MTSKNNGLSAALVSNLQDVLSKRKVGNEEKVGSDGSAEEAPSTSDSVDVASVEEEIDDSRPIVLVTNGDGIDSPGLVSLVEALVLEGLYNVHVCAPQTDKSASAHSTTPGETIAVSSVKLKGATAFEVSGTPVDCISLGLSGALFAWSKPILVISGINQGSSCGHQMFYSGAVAGGREALISGVPSLSISLNWKKNESQESHFKDAVGVCLPLINATIRDIAKGVFPKDCSLNIEIPTSPSSNKGFKVTKQSMWRQYPSWQAVSANRHPGAGNFMSNQQSLGAQLAQLGRDASAAGAARRFTTQKKSIVEIESVGVAGKTDTRVKKFFRLEFLAKEQEHTDEDLDVKALEDGFVSVTPFSLLPKTDSETQAAASEWISKALNSDQ

SEQ ID NO: 47109 - DNA, 2589 bp, Arabidopsis thaliana; identical to SEQ ID NO: 46443
  misc_feature (1)..(2589): Ceres Seq. ID no. 12600667
  misc_feature (1)..(2589): Ortholog of  Ceres SEQ ID NO 15173102 as cited in SEQ ID NO 61106

SEQ ID NO: 47110 - protein, 798 aa, Arabidopsis thaliana; identical to SEQ ID NO: 46444
  peptide (1)..(798): Ceres Seq. ID no. 12600668

SEQ ID NO: 47111 - protein, 774 aa, Arabidopsis thaliana; identical to SEQ ID NO: 46445
  peptide (1)..(774): Ceres Seq. ID no. 12600669

SEQ ID NO: 47112 - protein, 626 aa, Arabidopsis thaliana; identical to SEQ ID NO: 46446
  peptide (1)..(626): Ceres Seq. ID no. 12600670

SEQ ID NO: 47113 - DNA, 1878 bp, Arabidopsis thaliana
  misc_feature (1)..(1878): Ceres Seq. ID no. 13647936
  misc_feature (1)..(1878): Ortholog of  Ceres SEQ ID NO 14307871 as cited in SEQ ID NO 67222
cggaagctctcacgtgacaaaaacacgcacaaaattattcaagttaccagctttattaagcaaaacgattgagccaaaaaaaacgcatcagaatctggaacctggatcagatctagtcaggggtcagatcggagagccggcaatataatggcagcggcgagacgattacggacgctccaatctcagccggagaacaaggtctgtgtcgattgctcccagaagaatccacaatgggcatcgatttcatatggaatcttcatgtgcttggaatgctccggtaagcaccgtggtttaggtgttcacatctcattcgtcagatccgtcaccatggattcatggtccgagatccagatcaagaaaatggacgctggaggcaacgagcgtctcaacaattttctcgctcagtacgggatctcgaaagagactgatatcatctccaagtacaattccaacgccgcgtctgtgtatcgagatcggatccaagctttagctgagggaagacaatggagagatccgccgattgttaaggaatcggttggtggtggattgatgaataagaagcctccgttgtctcaaggcggtggtagagattctggtaatggtggatgggataattgggataacgatgattcgtttagatctacggatatgaggaggaatcaatcggcgggtgattttaggtcatcgggaggtcgtggtgctccggcgaagtcgaaatcgtctgaggatatatattcacggtctcagctggaggcgtcggcggcgaataaggagagtttctttgcgaaaaggatggctgagaatgagtctaagcctgagggacttcctccttcacaaggtggtaagtatgttgggtttggatctagtccaggtccagctccgagaagcaatcaacagagtggtggtggtgatgttttctctgttatgtctgagggttttggaagattgtctcttgttgctgcatcagctgcaaatgttgttcagactggaaccatggagtttacttccaaggtcaaagaaggtggcttagatcagacggtcagtgagactgttaatgttgttgcgagtaagacaacagagataggacagaggacatgggggatcatgaaaggagtgatggcaattgcctcacaaaaggttgaagagttcactaaagaagaagcatcaacttggaatcaacagaataaaactgagggcaacggttactaccagaactctgggattggaaacaaaacagcaaattcatcttttggaggatcacaatcatcatcaagtggtcacaacaacagttatcgtaactcgaattcttgggatgactggggagaagagaacaatagcaaaaaggaagcagcaccaaaggtgtcgacttctaatgatgatgacgacggcggttgggctggttgggatgataatgatgctaaagatgatgatttctattatcagcctgcaagcgataagaaatctgtaggtcacaatgggaaatcagacactgcttggaccggtggaggttttctctaacggtgttacaggataatggtgaatgaagtttgtacaattaaggaatagcagagcctgtggtcttctcgtgctctgtcacaagagagagcagagtggtcatctcaaccattaagccaccactggtctttcttttcacatatcaattgcttggcgttcaatcaaatcgatcgtcactatttgttcttctacaatatatatagtttttttttttatttgtacaagtttcacagtcacagaggattgcttgctaaactattcgggttagtcttcagctctttttttgagattcaaacttttatttttcttgaaatttgtaatgatcacaaaagacaaattttccgttttattgtcttctttctc

SEQ ID NO: 47114 - protein, 456 aa, Arabidopsis thaliana
  peptide (1)..(456): Ceres Seq. ID no. 13647937
MAAARRLRTLQSQPENKVCVDCSQKNPQWASISYGIFMCLECSGKHRGLGVHISFVRSVTMDSWSEIQIKKMDAGGNERLNNFLAQYGISKETDIISKYNSNAASVYRDRIQALAEGRQWRDPPIVKESVGGGLMNKKPPLSQGGGRDSGNGGWDNWDNDDSFRSTDMRRNQSAGDFRSSGGRGAPAKSKSSEDIYSRSQLEASAANKESFFAKRMAENESKPEGLPPSQGGKYVGFGSSPGPAPRSNQQSGGGDVFSVMSEGFGRLSLVAASAANVVQTGTMEFTSKVKEGGLDQTVSETVNVVASKTTEIGQRTWGIMKGVMAIASQKVEEFTKEEASTWNQQNKTEGNGYYQNSGIGNKTANSSFGGSQSSSSGHNNSYRNSNSWDDWGEENNSKKEAAPKVSTSNDDDDGGWAGWDDNDAKDDDFYYQPASDKKSVGHNGKSDTAWTGGGFL

SEQ ID NO: 47115 - protein, 419 aa, Arabidopsis thaliana
  peptide (1)..(419): Ceres Seq. ID no. 13647938
MCLECSGKHRGLGVHISFVRSVTMDSWSEIQIKKMDAGGNERLNNFLAQYGISKETDIISKYNSNAASVYRDRIQALAEGRQWRDPPIVKESVGGGLMNKKPPLSQGGGRDSGNGGWDNWDNDDSFRSTDMRRNQSAGDFRSSGGRGAPAKSKSSEDIYSRSQLEASAANKESFFAKRMAENESKPEGLPPSQGGKYVGFGSSPGPAPRSNQQSGGGDVFSVMSEGFGRLSLVAASAANVVQTGTMEFTSKVKEGGLDQTVSETVNVVASKTTEIGQRTWGIMKGVMAIASQKVEEFTKEEASTWNQQNKTEGNGYYQNSGIGNKTANSSFGGSQSSSSGHNNSYRNSNSWDDWGEENNSKKEAAPKVSTSNDDDDGGWAGWDDNDAKDDDFYYQPASDKKSVGHNGKSDTAWTGGGFL

SEQ ID NO: 47116 - protein, 396 aa, Arabidopsis thaliana
  peptide (1)..(396): Ceres Seq. ID no. 13647939
MDSWSEIQIKKMDAGGNERLNNFLAQYGISKETDIISKYNSNAASVYRDRIQALAEGRQWRDPPIVKESVGGGLMNKKPPLSQGGGRDSGNGGWDNWDNDDSFRSTDMRRNQSAGDFRSSGGRGAPAKSKSSEDIYSRSQLEASAANKESFFAKRMAENESKPEGLPPSQGGKYVGFGSSPGPAPRSNQQSGGGDVFSVMSEGFGRLSLVAASAANVVQTGTMEFTSKVKEGGLDQTVSETVNVVASKTTEIGQRTWGIMKGVMAIASQKVEEFTKEEASTWNQQNKTEGNGYYQNSGIGNKTANSSFGGSQSSSSGHNNSYRNSNSWDDWGEENNSKKEAAPKVSTSNDDDDGGWAGWDDNDAKDDDFYYQPASDKKSVGHNGKSDTAWTGGGFL

SEQ ID NO: 47117 - DNA, 1691 bp, Arabidopsis thaliana
  misc_feature (1)..(1691): Ceres Seq. ID no. 13647940
  misc_feature (1)..(1691): Ortholog of  Ceres SEQ ID NO 12581920 as cited in SEQ ID NO 54896
gcttctctctctctctctctttctcttttcctatatattgacaagcttgcgatctctgttcgctagatctgtctgaaacagtgaggggattcctaggtttcagagcaaagtaatgtctccactcaagtacttgtgttttagaaaggtactcttgttgttgctytmwattccagtctcttccttttctcttcttcttctttctttgcctcatcagttgatgatcatgagctacaacgaatagatcctcatttccgagtgagaagattgttggtgaaagatctggattcaactggtgatgatgatgaaaccaatcttcctcctcctcctaagaagaagaagcttcttactgattctgtttcatcatcatcatcatcatctggtactaagaagaatcaaaccaagctccttaaacccatctcttcttcttcttccaccaagaaccaaactaaactcgccaagaccaccaccatgggtacgtctcacaaacttaactccacaaaatcttcttctaacacaaccaagaccagctctgagctcaagaagctcaattccggaacaaaatccacaaattctacttcttcgatcaagaaatcagcagatctgtccaaatcaagctcatccaaaaacaaaaccaccataaaacccccaagttccaaactttcttcacctccatcagagaagaaatcacaaccctcctcaaaaccagtgaccaaatcgaaacaatccgagaaagaaatcaaaccattctggctagacgacgaagaagacgaagatttcgtaagcgaattcagagatctaccaacaagattccaaagatccctaatcccagacctagagcgaatctcaacaacatccaaaaactacatcaacaaagccaacaaacagatcaccaaaaacttcaaaccctatttcggcaacaaatacgcaccaaccatagcttccgtagtctctttcgtcttcatcctcgtccctctactcttagtctcactcattttcaacagattcaaagcttatttctcactccagaagatcctaatcttcatccaaatctacctctcgatctacttctcaatcctatgcctctcatcgctcgtcaccggaatcgaaccactcaagtttctctacgcaacatcgagctcaacatacgtttgcttgcagatccggcaaaccctaggctacgtcttctacctcttgcttcttctcatgtacctcgttctcgtcttctccacggattgtggtttgggccttaaggtattgggcttggcgcagacctttgtgggctttgctgtaggtctgcattattacgtggcggtgtttcatagggtggtgcttcgtcagcctccgaagacgaactggaagatacacggtgtgtatgccacgtgtttcctttcgatttgtctgttatctaatgctgagaggaggaagaaagagtacttggaagaaggcggtgacgaagggaagaaaaattgaaattttctttattttattcttctctatctttgtatttttatattttaaattttgaaaaattcggcaaaattttagctgagaaatgcaatagaaagaacaattactggtggatggttggaaactttttttaaaaacttcaattgtatttataataaatcgataaatgtggaataaaatttcacaaaaaaaaaaaaaaaaaaactcgagggggggcccggtac

SEQ ID NO: 47118 - protein, 333 aa, Arabidopsis thaliana
  peptide (1)..(333): Ceres Seq. ID no. 15219508
MGTSHKLNSTKSSSNTTKTSSELKKLNSGTKSTNSTSSIKKSADLSKSSSSKNKTTIKPPSSKLSSPPSEKKSQPSSKPVTKSKQSEKEIKPFWLDDEEDEDFVSEFRDLPTRFQRSLIPDLERISTTSKNYINKANKQITKNFKPYFGNKYAPTIASVVSFVFILVPLLLVSLIFNRFKAYFSLQKILIFIQIYLSIYFSILCLSSLVTGIEPLKFLYATSSSTYVCLQIRQTLGYVFYLLLLLMYLVLVFSTDCGLGLKVLGLAQTFVGFAVGLHYYVAVFHRVVLRQPPKTNWKIHGVYATCFLSICLLSNAERRKKEYLEEGGDEGKKN

SEQ ID NO: 47119 - DNA, 2140 bp, Arabidopsis thaliana
  misc_feature (1)..(2140): Ceres Seq. ID no. 13647785
  misc_feature (1)..(2140): Ortholog of  Ceres SEQ ID NO 14307728 as cited in SEQ ID NO 54710
tcaatatctcttccccagatcctcctctctcttcttcactcttttaacggacacttttcactgatctattcactcactcaaatcgccgccggagctaaatcaatcaacaatgacgtcgacctacacgagattcgataccgtatttctcttttctaggttcgccggcgctaagtattcgccgttattgccgtctccgtcgtttactttatctacttccggcattcatcttagaaccaaaccgaattctcgttttcactcgattatagcatcatcctcatcttcatctgtagtcgccggaactgatagcattgagattaaatcgttgccgacgaagcctattgaaggacaaaagactggaactagcggactccggaagaaggtgaaagttttcatggaagagaattatttagccaactggattcaggcattgtttaattcattgccacccgaggactataagaatgcgacattggttttaggaggtgatggtcgttactttaacaaagaagcttcacagatcattatcaaaattgctgctgggaatggagttgggcaaattttagttggaaaggaaggcattttgtcaacsccagcggtttccgctgtaatcaggaaaagaaaggcaaatggaggattcatwatgagtgcaagycataatcctggtggacctgaatatgactggggtatcaagttcaattacagcagtggtcagcctgctcctgaaaccattactgacaaaatatatggaaatacactttcaatctctgagattaaggtggcagagattcctgatattgatctttctcaagttggagtgaccaaatatgggaatttcagtgtagaagttatagatcctgtttccgactatttggagctcatggaggatgttttcgactttgatctcatcagaggtcttctttcaagatcagattttgggttcatgtttgatgccatgcatgctgttactggtgcttatgcgaaaccaatttttgtcgacaatcttggagccaaaccggattcaatttccaacggagttcccctggaagattttgggcatggccatcctgatcctaatttgacatatgcaaaggatttggttgatgtcatgtatcgtgacaatggaccggatttcggagcagcaagtgatggtgatggtgacagaaatatggttttaggaaacaaattctttgtcactccttcagactctgtagctatcatcgcagccaatgcacaagaagcaattccatatttccgtgctggtcctaaggggctggcacgttctatgccgacaagtggtgctcttgatcgtgttgccgagaagttgaagcttcctttcttcgaggttcccactggatggaaattttttggaaatcttatggatgctggaaaattgtcaatctgtggagaagagagctttggcacaggttctgatcacatccgtgagaaggatggaatatgggctgtgttggcgtggctttcgatccttgctcatcgcaacaaggacacgaaaccaggggacaagttggtgtctgttgcagatgttgtgaaagagtattgggcgacatacggaaggaactttttttcaagatacgactatgaagaatgtgaatctgaaggagccaataaaatgatcgagtatcttagagaaatcttgtctaagagcaaggccggtgacgtttatggaaactatgtcctccagtttgcagatgacttctcatacacagaccctgttgatggaagtgttgcatccaagcaaggtgttcggtttgtgttcacggatggatccagaatcatatttcgtttatccggaactggctcagctggagctacagtgcgaatatacattgaacaatttgagccagacgtttcaaaacatgatgtggatgcacaaatagctcttaaacctttaatcgatcttgcattgtctgtatcaaagctgaaggacttcacagggagggagaagcccactgtcattacatgaagagaagtgtcacatggtcctttcgataaggcaatttgggttcctgacttcagttttgtctgccatgtttatttgaaaattccagagcaatgaaatgcttatccttgtaacatatataacttatatacgtctttctatataaataaaagcatttctttt

SEQ ID NO: 47120 - protein, 623 aa, Arabidopsis thaliana
  peptide (1)..(623): Ceres Seq. ID no. 15219487
  misc_feature (160)..(160): Xaa is any aa, unknown or other
  misc_feature (177)..(177): Xaa is any aa, unknown or other
  misc_feature (181)..(181): Xaa is any aa, unknown or other
MTSTYTRFDTVFLFSRFAGAKYSPLLPSPSFTLSTSGIHLRTKPNSRFHSIIASSSSSSVVAGTDSIEIKSLPTKPIEGQKTGTSGLRKKVKVFMEENYLANWIQALFNSLPPEDYKNATLVLGGDGRYFNKEASQIIIKIAAGNGVGQILVGKEGILSXPAVSAVIRKRKANGGFXMSAXHNPGGPEYDWGIKFNYSSGQPAPETITDKIYGNTLSISEIKVAEIPDIDLSQVGVTKYGNFSVEVIDPVSDYLELMEDVFDFDLIRGLLSRSDFGFMFDAMHAVTGAYAKPIFVDNLGAKPDSISNGVPLEDFGHGHPDPNLTYAKDLVDVMYRDNGPDFGAASDGDGDRNMVLGNKFFVTPSDSVAIIAANAQEAIPYFRAGPKGLARSMPTSGALDRVAEKLKLPFFEVPTGWKFFGNLMDAGKLSICGEESFGTGSDHIREKDGIWAVLAWLSILAHRNKDTKPGDKLVSVADVVKEYWATYGRNFFSRYDYEECESEGANKMIEYLREILSKSKAGDVYGNYVLQFADDFSYTDPVDGSVASKQGVRFVFTDGSRIIFRLSGTGSAGATVRIYIEQFEPDVSKHDVDAQIALKPLIDLALSVSKLKDFTGREKPTVIT

SEQ ID NO: 47121 - protein, 529 aa, Arabidopsis thaliana
  peptide (1)..(529): Ceres Seq. ID no. 15219488
  misc_feature (66)..(66): Xaa is any aa, unknown or other
  misc_feature (83)..(83): Xaa is any aa, unknown or other
  misc_feature (87)..(87): Xaa is any aa, unknown or other
MEENYLANWIQALFNSLPPEDYKNATLVLGGDGRYFNKEASQIIIKIAAGNGVGQILVGKEGILSXPAVSAVIRKRKANGGFXMSAXHNPGGPEYDWGIKFNYSSGQPAPETITDKIYGNTLSISEIKVAEIPDIDLSQVGVTKYGNFSVEVIDPVSDYLELMEDVFDFDLIRGLLSRSDFGFMFDAMHAVTGAYAKPIFVDNLGAKPDSISNGVPLEDFGHGHPDPNLTYAKDLVDVMYRDNGPDFGAASDGDGDRNMVLGNKFFVTPSDSVAIIAANAQEAIPYFRAGPKGLARSMPTSGALDRVAEKLKLPFFEVPTGWKFFGNLMDAGKLSICGEESFGTGSDHIREKDGIWAVLAWLSILAHRNKDTKPGDKLVSVADVVKEYWATYGRNFFSRYDYEECESEGANKMIEYLREILSKSKAGDVYGNYVLQFADDFSYTDPVDGSVASKQGVRFVFTDGSRIIFRLSGTGSAGATVRIYIEQFEPDVSKHDVDAQIALKPLIDLALSVSKLKDFTGREKPTVIT

SEQ ID NO: 47122 - protein, 446 aa, Arabidopsis thaliana
  peptide (1)..(446): Ceres Seq. ID no. 15219489
  misc_feature (4)..(4): Xaa is any aa, unknown or other
MSAXHNPGGPEYDWGIKFNYSSGQPAPETITDKIYGNTLSISEIKVAEIPDIDLSQVGVTKYGNFSVEVIDPVSDYLELMEDVFDFDLIRGLLSRSDFGFMFDAMHAVTGAYAKPIFVDNLGAKPDSISNGVPLEDFGHGHPDPNLTYAKDLVDVMYRDNGPDFGAASDGDGDRNMVLGNKFFVTPSDSVAIIAANAQEAIPYFRAGPKGLARSMPTSGALDRVAEKLKLPFFEVPTGWKFFGNLMDAGKLSICGEESFGTGSDHIREKDGIWAVLAWLSILAHRNKDTKPGDKLVSVADVVKEYWATYGRNFFSRYDYEECESEGANKMIEYLREILSKSKAGDVYGNYVLQFADDFSYTDPVDGSVASKQGVRFVFTDGSRIIFRLSGTGSAGATVRIYIEQFEPDVSKHDVDAQIALKPLIDLALSVSKLKDFTGREKPTVIT

SEQ ID NO: 47123 - DNA, 1237 bp, Arabidopsis thaliana
  misc_feature (1)..(1237): Ceres Seq. ID no. 13588261
  misc_feature (1)..(1237): Ortholog of  Ceres SEQ ID NO 15179562 as cited in SEQ ID NO 0
  misc_feature (1)..(1237): Ortholog of  Ceres SEQ ID NO 15179680 as cited in SEQ ID NO 0
aacataaattaagttttttttgtccttttctgcctttacctttccttctactcccgaaaaagcactgactttgctctgtttccttcgttcacacagagaaagagagaaatcttctgagcgaaattctgacaaaagagatgatggaatgggataatcagctacaacccaataaccatcactcttctaatcttcaagggatcgacgttaatggcggctccggcgccggaggaggaatgtacgtgaaggtgatgaccgatgagcagtatgaaactctcaggaaacagattgctatttacggcaccatttgtgagcgtcttgttgagatgcataaaactctcactgctcaacaagatcttgcaggagggagaatgggaggactatatgcagacccaatgatgtcatctttaggtcataagatgacagctagacagaggtggactcctacgccagtccagcttcagattctggaacgtatattcgatcaaggcacgggaacaccgagcaagcagaagatcaaagacataacagaagagctgagccaacacggccagattgctgaacaaaatgtctataactggttccagaaccgacgtgctcgatccaagaggaagcagcatggtggaggttcttctggaaataataatggtgagtctgaggtagagactgaagttgaagcattgaatgagaagagagtagtgaggccagagagtcttcttggtcttccagatggaaatagcaacaataatgggttagggacaacaacagcaacaactactgctcctaggcctgaagatctttgctttcagagccctgagattagctcagaccttcacttgctagatgttctatcaaacccaagggatgagcatcttgttggaaagatgggactggcggaaagttacaacctttatgatcatgttgaagattatggcatgtcaggctgattgaatacaagctgaggaaacttctaattatcagagagatcaatgaaatggatttggtagtcagtcataagcagtattagacttttgtttttcttaaattgtttctttcagggcttattaaagaaacaagtagtttatcttattaatcattttcagagaaacatttacatggattgttgaatcgtcttgtgatgcttgctttgataatttctgcattcagaacgatttttacatccttaaatgaattatactgtaagaaataaaaaaattccaagagaaaaacatttcaattc

SEQ ID NO: 47124 - protein, 268 aa, Arabidopsis thaliana
  peptide (1)..(268): Ceres Seq. ID no. 13588262
MMEWDNQLQPNNHHSSNLQGIDVNGGSGAGGGMYVKVMTDEQYETLRKQIAIYGTICERLVEMHKTLTAQQDLAGGRMGGLYADPMMSSLGHKMTARQRWTPTPVQLQILERIFDQGTGTPSKQKIKDITEELSQHGQIAEQNVYNWFQNRRARSKRKQHGGGSSGNNNGESEVETEVEALNEKRVVRPESLLGLPDGNSNNNGLGTTTATTTAPRPEDLCFQSPEISSDLHLLDVLSNPRDEHLVGKMGLAESYNLYDHVEDYGMSG

SEQ ID NO: 47125 - protein, 267 aa, Arabidopsis thaliana
  peptide (1)..(267): Ceres Seq. ID no. 13588263
MEWDNQLQPNNHHSSNLQGIDVNGGSGAGGGMYVKVMTDEQYETLRKQIAIYGTICERLVEMHKTLTAQQDLAGGRMGGLYADPMMSSLGHKMTARQRWTPTPVQLQILERIFDQGTGTPSKQKIKDITEELSQHGQIAEQNVYNWFQNRRARSKRKQHGGGSSGNNNGESEVETEVEALNEKRVVRPESLLGLPDGNSNNNGLGTTTATTTAPRPEDLCFQSPEISSDLHLLDVLSNPRDEHLVGKMGLAESYNLYDHVEDYGMSG

SEQ ID NO: 47126 - protein, 236 aa, Arabidopsis thaliana
  peptide (1)..(236): Ceres Seq. ID no. 13588264
MYVKVMTDEQYETLRKQIAIYGTICERLVEMHKTLTAQQDLAGGRMGGLYADPMMSSLGHKMTARQRWTPTPVQLQILERIFDQGTGTPSKQKIKDITEELSQHGQIAEQNVYNWFQNRRARSKRKQHGGGSSGNNNGESEVETEVEALNEKRVVRPESLLGLPDGNSNNNGLGTTTATTTAPRPEDLCFQSPEISSDLHLLDVLSNPRDEHLVGKMGLAESYNLYDHVEDYGMSG

SEQ ID NO: 47127 - DNA, 2704 bp, Arabidopsis thaliana
  misc_feature (1)..(2704): Ceres Seq. ID no. 12592568
  misc_feature (1)..(2704): Ortholog of  Ceres SEQ ID NO 12638191 as cited in SEQ ID NO 674
  misc_feature (1)..(2704): Ortholog of  Ceres SEQ ID NO 12583314 as cited in SEQ ID NO 56435
  misc_feature (1)..(2704): Ortholog of  Ceres SEQ ID NO 13654989 as cited in SEQ ID NO 63117
  misc_feature (1)..(2704): Ortholog of  Ceres SEQ ID NO 14303105 as cited in SEQ ID NO 66589
  misc_feature (1)..(2704): Ortholog of  Ceres SEQ ID NO 13584744 as cited in SEQ ID NO 69137
atggcgtttccaataaatctaacccaaacccttctcttcttcttctgccctcttcttcatctctctttcgctgctttcactccaactgataattatctcatcaattccggttctaacaccaatacatctttcttcacaacccgttcttttctcagcgactcttcagaacctggctcgagttttctctccaccgatcgatccatctcgatttctgacacgaacccatctccagattcacccgttttgtacaacacagctcgtgttttccccgtcggaggatcatacaaattccaagtcactaccaaaggcactcactttatccgtctccatttcgcgccttttaaagcttcgagatttaacttaaggtctgctaaatttcgagttttgattaatgggttctctgtgattaacagtttcagtactagctccgtcgttgttaaagaattcatactcaaaatcgatgaccctgttttagagatttcgtttttgccctttaaagcttctggatttgggtttgttaatgcggttgaagtgttttcagcacctaaggattatataatggatcaaggaacgaagcttgtgattcctaactctgctcaaatctttagtaacttgtcatctcaagttcttgagactgttcatagaatcaacgttggtggttcgaaattgacgccgtttaatgatacgttgtggaggacttgggttgttgatgacaactatcttctcttgagagctgctgctagacgtgcttggactactcattctccgaattatcaaaacggtggtgccacgagagagattgctccggataatgtttatatgactgctcaggagatggatcgagataatcaggagttgcaggcaaggtttaacattagttgggggtttcaggttgatgagaaacgagttcttcatttggttcgtttgcatttctgcgatatcgttagttcgtcgcttaatcagctctatttcaatgtctttatcaatgagtatcttgcgtttaaggatgttgatctctccacgcttactttccatgtgcttgcgtctccgttgtacattgattttgttgcggagtctgatcgttctggaatgttgaggattagtgttggaccgtctgatcttagtaatccggcgagagttaatgctctattgaatggagttgagatcatgaggattttgagccctgtgagttctgaagtggtatctggaaagaggaatgttgtctggatcgtggttggctcggttttgggaggttttgtgttcttgtcgctgttcttcttgagcgttttgtgcttgtgcaggcgcaagaacaacaagacgaggagttcagagagcacgggatggacacctttgaggaggtttagaggcagttccaatagtagaacaactgaaagaactgttagttctagtggctaccatactctgagaatctcgttcgcggagttacaatccggaaccaataactttgatagaagtttagttatcggagttggcggattcgggatggtttttagagggtctcttaaagacaacaccaaagtagctgtgaagagaggctctcctggttcaagacagggcttaccagagtttctctctgagataaccattctctctaagatccgtcatcgccatctagtttcacttgttgggtattgcgaagaacagtctgagatgattcttgtttatgagtacatggataaaggaccactcaaaagtcacttatacggatccaccaacccgcctttatcttggaaacaacggcttgaggtctgcattggtgcagccagaggacttcattaccttcacaccggttcttcgcaaggaatcatccaccgggatatcaaatccaccaatatcttactagataacaactatgtagccaaagttgcagactttggactctcaagatccggtccttgtattgatgagacacatgtgagcaccggtgtaaaaggaagctttggatatcttgatcctgaatacttcagaagacaacagctcacggataagtccgatgtttattcatttggtgttgttctttttgaagttctttgcgctagacccgctgttgatccgttgcttgttagggagcaagtaaatttagcagaatgggcaatagagtggcaaaggaaagggatgcttgatcagatcgttgatccgaatatcgcagatgaaatcaaaccgtgctcgttgaagaaattcgctgaaaccgcagagaaatgctgtgcggattacggtgtagatagaccgacaattggcgatgttctatggaacttagaacatgtgcttcagcttcaagaatccggaccattgaacattcctgaagaagattatggagatgttaccgacccgagaacggctcggcaaggtctgtctaatggctcgaacatagagagagactatggagatggaacttcaggcataatcagtagcacccaagtgttctctcagctaatgaccaacgctgggagataaattaaagtcattgctatatagagcaagtatttatcatagtcatagagtacaatacctaaaccgggaaaccaaagcggtgtaccggtatctcagattcggttcgtgtttggtataattttgtttggtttctgtaacttgtagagctatgattgttcatttgatatggatgaatcataaaccgttaaaaccagtacattatttggttaaatattaaaccggttaagagtgg

SEQ ID NO: 47128 - protein, 824 aa, Arabidopsis thaliana
  peptide (1)..(824): Ceres Seq. ID no. 12592569
MAFPINLTQTLLFFFCPLLHLSFAAFTPTDNYLINSGSNTNTSFFTTRSFLSDSSEPGSSFLSTDRSISISDTNPSPDSPVLYNTARVFPVGGSYKFQVTTKGTHFIRLHFAPFKASRFNLRSAKFRVLINGFSVINSFSTSSVVVKEFILKIDDPVLEISFLPFKASGFGFVNAVEVFSAPKDYIMDQGTKLVIPNSAQIFSNLSSQVLETVHRINVGGSKLTPFNDTLWRTWVVDDNYLLLRAAARRAWTTHSPNYQNGGATREIAPDNVYMTAQEMDRDNQELQARFNISWGFQVDEKRVLHLVRLHFCDIVSSSLNQLYFNVFINEYLAFKDVDLSTLTFHVLASPLYIDFVAESDRSGMLRISVGPSDLSNPARVNALLNGVEIMRILSPVSSEVVSGKRNVVWIVVGSVLGGFVFLSLFFLSVLCLCRRKNNKTRSSESTGWTPLRRFRGSSNSRTTERTVSSSGYHTLRISFAELQSGTNNFDRSLVIGVGGFGMVFRGSLKDNTKVAVKRGSPGSRQGLPEFLSEITILSKIRHRHLVSLVGYCEEQSEMILVYEYMDKGPLKSHLYGSTNPPLSWKQRLEVCIGAARGLHYLHTGSSQGIIHRDIKSTNILLDNNYVAKVADFGLSRSGPCIDETHVSTGVKGSFGYLDPEYFRRQQLTDKSDVYSFGVVLFEVLCARPAVDPLLVREQVNLAEWAIEWQRKGMLDQIVDPNIADEIKPCSLKKFAETAEKCCADYGVDRPTIGDVLWNLEHVLQLQESGPLNIPEEDYGDVTDPRTARQGLSNGSNIERDYGDGTSGIISSTQVFSQLMTNAGR

SEQ ID NO: 47129 - protein, 638 aa, Arabidopsis thaliana
  peptide (1)..(638): Ceres Seq. ID no. 12592570
MDQGTKLVIPNSAQIFSNLSSQVLETVHRINVGGSKLTPFNDTLWRTWVVDDNYLLLRAAARRAWTTHSPNYQNGGATREIAPDNVYMTAQEMDRDNQELQARFNISWGFQVDEKRVLHLVRLHFCDIVSSSLNQLYFNVFINEYLAFKDVDLSTLTFHVLASPLYIDFVAESDRSGMLRISVGPSDLSNPARVNALLNGVEIMRILSPVSSEVVSGKRNVVWIVVGSVLGGFVFLSLFFLSVLCLCRRKNNKTRSSESTGWTPLRRFRGSSNSRTTERTVSSSGYHTLRISFAELQSGTNNFDRSLVIGVGGFGMVFRGSLKDNTKVAVKRGSPGSRQGLPEFLSEITILSKIRHRHLVSLVGYCEEQSEMILVYEYMDKGPLKSHLYGSTNPPLSWKQRLEVCIGAARGLHYLHTGSSQGIIHRDIKSTNILLDNNYVAKVADFGLSRSGPCIDETHVSTGVKGSFGYLDPEYFRRQQLTDKSDVYSFGVVLFEVLCARPAVDPLLVREQVNLAEWAIEWQRKGMLDQIVDPNIADEIKPCSLKKFAETAEKCCADYGVDRPTIGDVLWNLEHVLQLQESGPLNIPEEDYGDVTDPRTARQGLSNGSNIERDYGDGTSGIISSTQVFSQLMTNAGR

SEQ ID NO: 47130 - protein, 551 aa, Arabidopsis thaliana
  peptide (1)..(551): Ceres Seq. ID no. 12592571
MTAQEMDRDNQELQARFNISWGFQVDEKRVLHLVRLHFCDIVSSSLNQLYFNVFINEYLAFKDVDLSTLTFHVLASPLYIDFVAESDRSGMLRISVGPSDLSNPARVNALLNGVEIMRILSPVSSEVVSGKRNVVWIVVGSVLGGFVFLSLFFLSVLCLCRRKNNKTRSSESTGWTPLRRFRGSSNSRTTERTVSSSGYHTLRISFAELQSGTNNFDRSLVIGVGGFGMVFRGSLKDNTKVAVKRGSPGSRQGLPEFLSEITILSKIRHRHLVSLVGYCEEQSEMILVYEYMDKGPLKSHLYGSTNPPLSWKQRLEVCIGAARGLHYLHTGSSQGIIHRDIKSTNILLDNNYVAKVADFGLSRSGPCIDETHVSTGVKGSFGYLDPEYFRRQQLTDKSDVYSFGVVLFEVLCARPAVDPLLVREQVNLAEWAIEWQRKGMLDQIVDPNIADEIKPCSLKKFAETAEKCCADYGVDRPTIGDVLWNLEHVLQLQESGPLNIPEEDYGDVTDPRTARQGLSNGSNIERDYGDGTSGIISSTQVFSQLMTNAGR

SEQ ID NO: 47131 - DNA, 1697 bp, Arabidopsis thaliana; identical to SEQ ID NO: 42629
  misc_feature (1)..(1697): Ceres Seq. ID no. 12602431
  misc_feature (1)..(1697): Ortholog of  Ceres SEQ ID NO 13646157 as cited in SEQ ID NO 20485
  misc_feature (1)..(1697): Ortholog of  Ceres SEQ ID NO 15175488 as cited in SEQ ID NO 54441
  misc_feature (1)..(1697): Ortholog of  Ceres SEQ ID NO 15175098 as cited in SEQ ID NO 57679

SEQ ID NO: 47132 - protein, 407 aa, Arabidopsis thaliana; identical to SEQ ID NO: 42630
  peptide (1)..(407): Ceres Seq. ID no. 12602432

SEQ ID NO: 47133 - protein, 393 aa, Arabidopsis thaliana; identical to SEQ ID NO: 42631
  peptide (1)..(393): Ceres Seq. ID no. 12602433

SEQ ID NO: 47134 - protein, 379 aa, Arabidopsis thaliana; identical to SEQ ID NO: 42632
  peptide (1)..(379): Ceres Seq. ID no. 12602434

SEQ ID NO: 47135 - DNA, 1746 bp, Arabidopsis thaliana
  misc_feature (1)..(1746): Ceres Seq. ID no. 13588265
  misc_feature (1)..(1746): Ortholog of  Ceres SEQ ID NO 13657677 as cited in SEQ ID NO 66119
acatttcgttgcagaaaacatatacttttccgacaaaacatggaagatgttaatcaggagaagaagaaagtacctccaatgtctgaaccagaaagatccacaccgattaagactacaggaggacagtatcgtttctgcaagtcatgtgttgaaggaagtagttgcaggacagtgaggtcaagaaccaagcttatgaacgttttgatagaacgtggaagacctcacgaggctcaaactgttttcaaaacattggcagagacgggacatagaccgtctttgatcagttacacaactcttttagctgcaatgacggttcagaaacagtatggttccataagctctatagtctctgaggtggaacagagcggaaccaaacttgattctatattcttcaatgctgttattaacgctttctctgagtccggtaacatggaagatgcggtgcaagctctgttgaaaatgaaagaacttggtctaaatccgactacgagtacttacaacactttgattaaagggtatgggattgcaggtaagcctgagagatcatctgagttactggatcttatgttggaagagggcaacgtcgatgttggaccgaatataaggacgtttaatgtgttggtgcaagcctggtgcaagaagaagaaggtggaggaggcgtgggaagtggtgaagaagatggaggagtgtggagttaggccggatacggtgacttataacacgattgcaacttgttatgtgcagaaaggagagaccgtgagagctgagagtgaggtggttgagaagatggttatgaaggagaaggcgaaaccgaacggaagaacgtgtgggattgttgtgggagggtattgcagagaagggagagtgagagatggtttgaggtttgtgcggagaatgaaggaaatgagagtggaagcgaatcttgtggtcttcaattctttgatcaatggctttgttgaagtcatggaccgtgatggtatcgatgaggagtgtaacgtgaaggcagatgtaatcacgtacagtactgtgatgaacgcttggagctcagctggatacatggagaaagctgcacaagtgtttaaagaaatggttaaagcaggagtcaaaccagacgctcacgcgtacagcattttagctaaagggtacgttagagcaaaagagccaaagaaagcagaggagcttcttgagacattgatagttgaatccaggcctaacgttgtgatcttcaccactgtgattagcgggtggtgtagcaatggaagtatggatgatgcaatgagggttttcaacaagatgtgcaagttcggggtttcgccaaatataaagacgtttgagactctgatgtggggttacctagaggtgaagcaaccatggaaagcagaagaagttttgcagatgatgagaggatgtggtgtaaagcctgagaattctaccttcttgctgttagcagaagcttggcgtgtcgcgggactcactgatgagtcgaacaaagctatcaatgcattgaaatgtaaagacatagagatcgcaaagttagagaagctgtaccaaaaacagtcctctggtagtagttttaacctattgcagattccagtcgggaaacgggagcttccaaccgcaaaagcgatgaatctttctgcttgtaaactcggagctcgagtgccaatcatatgccagaagcagtcccaagcacagtttgggatcagtggacagtttgtacattcttgtacagtgttcttgagctga

SEQ ID NO: 47136 - protein, 581 aa, Arabidopsis thaliana
  peptide (1)..(581): Ceres Seq. ID no. 13588266
TFRCRKHILFRQNMEDVNQEKKKVPPMSEPERSTPIKTTGGQYRFCKSCVEGSSCRTVRSRTKLMNVLIERGRPHEAQTVFKTLAETGHRPSLISYTTLLAAMTVQKQYGSISSIVSEVEQSGTKLDSIFFNAVINAFSESGNMEDAVQALLKMKELGLNPTTSTYNTLIKGYGIAGKPERSSELLDLMLEEGNVDVGPNIRTFNVLVQAWCKKKKVEEAWEVVKKMEECGVRPDTVTYNTIATCYVQKGETVRAESEVVEKMVMKEKAKPNGRTCGIVVGGYCREGRVRDGLRFVRRMKEMRVEANLVVFNSLINGFVEVMDRDGIDEECNVKADVITYSTVMNAWSSAGYMEKAAQVFKEMVKAGVKPDAHAYSILAKGYVRAKEPKKAEELLETLIVESRPNVVIFTTVISGWCSNGSMDDAMRVFNKMCKFGVSPNIKTFETLMWGYLEVKQPWKAEEVLQMMRGCGVKPENSTFLLLAEAWRVAGLTDESNKAINALKCKDIEIAKLEKLYQKQSSGSSFNLLQIPVGKRELPTAKAMNLSACKLGARVPIICQKQSQAQFGISGQFVHSCTVFLS

SEQ ID NO: 47137 - protein, 568 aa, Arabidopsis thaliana
  peptide (1)..(568): Ceres Seq. ID no. 13588267
MEDVNQEKKKVPPMSEPERSTPIKTTGGQYRFCKSCVEGSSCRTVRSRTKLMNVLIERGRPHEAQTVFKTLAETGHRPSLISYTTLLAAMTVQKQYGSISSIVSEVEQSGTKLDSIFFNAVINAFSESGNMEDAVQALLKMKELGLNPTTSTYNTLIKGYGIAGKPERSSELLDLMLEEGNVDVGPNIRTFNVLVQAWCKKKKVEEAWEVVKKMEECGVRPDTVTYNTIATCYVQKGETVRAESEVVEKMVMKEKAKPNGRTCGIVVGGYCREGRVRDGLRFVRRMKEMRVEANLVVFNSLINGFVEVMDRDGIDEECNVKADVITYSTVMNAWSSAGYMEKAAQVFKEMVKAGVKPDAHAYSILAKGYVRAKEPKKAEELLETLIVESRPNVVIFTTVISGWCSNGSMDDAMRVFNKMCKFGVSPNIKTFETLMWGYLEVKQPWKAEEVLQMMRGCGVKPENSTFLLLAEAWRVAGLTDESNKAINALKCKDIEIAKLEKLYQKQSSGSSFNLLQIPVGKRELPTAKAMNLSACKLGARVPIICQKQSQAQFGISGQFVHSCTVFLS

SEQ ID NO: 47138 - protein, 555 aa, Arabidopsis thaliana
  peptide (1)..(555): Ceres Seq. ID no. 13588268
MSEPERSTPIKTTGGQYRFCKSCVEGSSCRTVRSRTKLMNVLIERGRPHEAQTVFKTLAETGHRPSLISYTTLLAAMTVQKQYGSISSIVSEVEQSGTKLDSIFFNAVINAFSESGNMEDAVQALLKMKELGLNPTTSTYNTLIKGYGIAGKPERSSELLDLMLEEGNVDVGPNIRTFNVLVQAWCKKKKVEEAWEVVKKMEECGVRPDTVTYNTIATCYVQKGETVRAESEVVEKMVMKEKAKPNGRTCGIVVGGYCREGRVRDGLRFVRRMKEMRVEANLVVFNSLINGFVEVMDRDGIDEECNVKADVITYSTVMNAWSSAGYMEKAAQVFKEMVKAGVKPDAHAYSILAKGYVRAKEPKKAEELLETLIVESRPNVVIFTTVISGWCSNGSMDDAMRVFNKMCKFGVSPNIKTFETLMWGYLEVKQPWKAEEVLQMMRGCGVKPENSTFLLLAEAWRVAGLTDESNKAINALKCKDIEIAKLEKLYQKQSSGSSFNLLQIPVGKRELPTAKAMNLSACKLGARVPIICQKQSQAQFGISGQFVHSCTVFLS

SEQ ID NO: 47139 - DNA, 2678 bp, Arabidopsis thaliana
  misc_feature (1)..(2678): Ceres Seq. ID no. 13588926
  misc_feature (1)..(2678): Ortholog of  Ceres SEQ ID NO 14310016 as cited in SEQ ID NO 20753
gaattcggcacgaggcagcactctcacgaaatcgtcgtgacgaaacgataaaccctaagtcatggtaaaggaaactctaattcctccgtcatctacgtcaatgacgaccggaacatcttcttcttcgtctctttcaatgacgttatcctcaacaaacgcgttatcgtttttgtcgaaaggatggagagaggtatgggattcagcagatgcggatttgcagctgatgcgagacagagctaactctgttaagaatctagcatcaacgttcgatagagagatcgagaatttcctcaataactcggcgaggtctgcgtttcccgttggttcaccatcggcgtcgtctttctcaaatgaaattggtatcatgaagaagcttcagccgaagatttcggagtttcgtagggtttattcggcgccggagattagtcgcaaggttatggagagatggggacctgcgagagcgaagcttggaatggatctatcggcgattaagaaggcgattgtgtctgagatggaattggatgagcgtcagggagttttggagatgagtagattgaggagacggcgtaatagtgatagggttaggtttacggagtttttcgcggaggctgagagagatggagaagcttatttcggtgattgggaaccgattaggtctttgaagagtagatttaaagagtttgagaaacgaagctcgttagaaatattgagtggattcaagaacagtgaatttgttgagaagctcaaaaccagctttaaatcaatttacaaagaaactgatgaggctaaggatgtccctccgttggatgtacctgaactgttggcatgtttggttagacaatctgaaccttttcttgatcagattggtgttagaaaggatacatgtgaccgaatagtagaaagcctttgcaaatgcaagagccaacaactttggcgtctgccatctgcacaagcatccgatttaattgaaaatgataaccatggagttgatttggatatgaggatagccagtgttcttcaaagcacaggacaccattatgatggtgggttttggactgattttgtgaagcctgagacaccggaaaacaaaaggcatgtggcaattgttacaacagctagtcttccttggatgaccggaacagctgtaaatccgctattcagagcggcgtatttggcaaaagctgcaaaacagagtgttactctcgtggttccttggctctgcgaatctgatcaagaactagtgtatccaaacaatctcaccttcagctcacctgaagaacaagagagttatatacgtaaatggttggaggaaaggattggtttcaaggctgattttaaaatctccttttacccaggaaagttttcaaaagaaaggcgcagcatatttcctgctggtgacacttctcaatttatatcgtcaaaagatgctgacattgctatacttgaagaacctgaacatctcaactggtattatcacggcaagcgttggactgataaattcaaccatgttgttggaattgtccacacaaactacttagagtacatcaagagggagaagaatggagctcttcaagcattttttgtgaaccatgtaaacaattgggtcacacgagcgtattgtgacaaggttcttcgcctctctgcggcaacacaagatttaccaaagtctgttgtatgcaatgtccatggtgtcaatcccaagttccttatgattggggagaaaattgctgaagagagatcccgtggtgaacaagctttctcaaaaggtgcatacttcttaggaaaaatggtgtgggctaaaggatacagagaactaatagatctgatggctaaacacaaaagcgaacttgggagcttcaatctagatgtatatgggaacggtgaagatgcagtcgaggtccaacgtgcagcaaagaaacatgacttgaatctcaatttcctcaaaggaagggaccacgctgacgatgctcttcacaagtacaaagtgttcataaaccccagcatcagcgatgttctatgcacagcaaccgcagaagcactagccatggggaagtttgtggtgtgtgcagatcacccttcaaacgaattctttagatcattcccgaactgcttaacttacaaaacatccgaagactttgtgtccaaagtgcaagaagcaatgacgaaagagccactacctctcactcctgaacaaatgtacaatctctcttgggaagcagcaacacagaggttcatggagtattcagatctcgataagatcttaaacaatggagagggaggaaggaagatgcgaaaatcaagatcggttccgagctttaacgaggtggtcgatggaggattggcattctcacactatgttctaacagggaacgatttcttgagactatgcactggagcaacaccaagaacaaaagactatgataatcaacattgcaaggatctgaatctcgtaccacctcacgttcacaagccaatcttcggctggtagatatttccccataggccacccagttattgcttgtgacttattaaaccactacgttattgttatccttttttacttttacagttgttgtaggtcgtttgtttgttaatagaaagggtagattattattagatgtctttttgtaaaatatcaatacgaagcgtatttgatgatatataaaataactatattg

SEQ ID NO: 47140 - protein, 808 aa, Arabidopsis thaliana
  peptide (1)..(808): Ceres Seq. ID no. 13588927
MVKETLIPPSSTSMTTGTSSSSSLSMTLSSTNALSFLSKGWREVWDSADADLQLMRDRANSVKNLASTFDREIENFLNNSARSAFPVGSPSASSFSNEIGIMKKLQPKISEFRRVYSAPEISRKVMERWGPARAKLGMDLSAIKKAIVSEMELDERQGVLEMSRLRRRRNSDRVRFTEFFAEAERDGEAYFGDWEPIRSLKSRFKEFEKRSSLEILSGFKNSEFVEKLKTSFKSIYKETDEAKDVPPLDVPELLACLVRQSEPFLDQIGVRKDTCDRIVESLCKCKSQQLWRLPSAQASDLIENDNHGVDLDMRIASVLQSTGHHYDGGFWTDFVKPETPENKRHVAIVTTASLPWMTGTAVNPLFRAAYLAKAAKQSVTLVVPWLCESDQELVYPNNLTFSSPEEQESYIRKWLEERIGFKADFKISFYPGKFSKERRSIFPAGDTSQFISSKDADIAILEEPEHLNWYYHGKRWTDKFNHVVGIVHTNYLEYIKREKNGALQAFFVNHVNNWVTRAYCDKVLRLSAATQDLPKSVVCNVHGVNPKFLMIGEKIAEERSRGEQAFSKGAYFLGKMVWAKGYRELIDLMAKHKSELGSFNLDVYGNGEDAVEVQRAAKKHDLNLNFLKGRDHADDALHKYKVFINPSISDVLCTATAEALAMGKFVVCADHPSNEFFRSFPNCLTYKTSEDFVSKVQEAMTKEPLPLTPEQMYNLSWEAATQRFMEYSDLDKILNNGEGGRKMRKSRSVPSFNEVVDGGLAFSHYVLTGNDFLRLCTGATPRTKDYDNQHCKDLNLVPPHVHKPIFGW

SEQ ID NO: 47141 - protein, 795 aa, Arabidopsis thaliana
  peptide (1)..(795): Ceres Seq. ID no. 13588928
MTTGTSSSSSLSMTLSSTNALSFLSKGWREVWDSADADLQLMRDRANSVKNLASTFDREIENFLNNSARSAFPVGSPSASSFSNEIGIMKKLQPKISEFRRVYSAPEISRKVMERWGPARAKLGMDLSAIKKAIVSEMELDERQGVLEMSRLRRRRNSDRVRFTEFFAEAERDGEAYFGDWEPIRSLKSRFKEFEKRSSLEILSGFKNSEFVEKLKTSFKSIYKETDEAKDVPPLDVPELLACLVRQSEPFLDQIGVRKDTCDRIVESLCKCKSQQLWRLPSAQASDLIENDNHGVDLDMRIASVLQSTGHHYDGGFWTDFVKPETPENKRHVAIVTTASLPWMTGTAVNPLFRAAYLAKAAKQSVTLVVPWLCESDQELVYPNNLTFSSPEEQESYIRKWLEERIGFKADFKISFYPGKFSKERRSIFPAGDTSQFISSKDADIAILEEPEHLNWYYHGKRWTDKFNHVVGIVHTNYLEYIKREKNGALQAFFVNHVNNWVTRAYCDKVLRLSAATQDLPKSVVCNVHGVNPKFLMIGEKIAEERSRGEQAFSKGAYFLGKMVWAKGYRELIDLMAKHKSELGSFNLDVYGNGEDAVEVQRAAKKHDLNLNFLKGRDHADDALHKYKVFINPSISDVLCTATAEALAMGKFVVCADHPSNEFFRSFPNCLTYKTSEDFVSKVQEAMTKEPLPLTPEQMYNLSWEAATQRFMEYSDLDKILNNGEGGRKMRKSRSVPSFNEVVDGGLAFSHYVLTGNDFLRLCTGATPRTKDYDNQHCKDLNLVPPHVHKPIFGW

SEQ ID NO: 47142 - protein, 783 aa, Arabidopsis thaliana
  peptide (1)..(783): Ceres Seq. ID no. 13588929
MTLSSTNALSFLSKGWREVWDSADADLQLMRDRANSVKNLASTFDREIENFLNNSARSAFPVGSPSASSFSNEIGIMKKLQPKISEFRRVYSAPEISRKVMERWGPARAKLGMDLSAIKKAIVSEMELDERQGVLEMSRLRRRRNSDRVRFTEFFAEAERDGEAYFGDWEPIRSLKSRFKEFEKRSSLEILSGFKNSEFVEKLKTSFKSIYKETDEAKDVPPLDVPELLACLVRQSEPFLDQIGVRKDTCDRIVESLCKCKSQQLWRLPSAQASDLIENDNHGVDLDMRIASVLQSTGHHYDGGFWTDFVKPETPENKRHVAIVTTASLPWMTGTAVNPLFRAAYLAKAAKQSVTLVVPWLCESDQELVYPNNLTFSSPEEQESYIRKWLEERIGFKADFKISFYPGKFSKERRSIFPAGDTSQFISSKDADIAILEEPEHLNWYYHGKRWTDKFNHVVGIVHTNYLEYIKREKNGALQAFFVNHVNNWVTRAYCDKVLRLSAATQDLPKSVVCNVHGVNPKFLMIGEKIAEERSRGEQAFSKGAYFLGKMVWAKGYRELIDLMAKHKSELGSFNLDVYGNGEDAVEVQRAAKKHDLNLNFLKGRDHADDALHKYKVFINPSISDVLCTATAEALAMGKFVVCADHPSNEFFRSFPNCLTYKTSEDFVSKVQEAMTKEPLPLTPEQMYNLSWEAATQRFMEYSDLDKILNNGEGGRKMRKSRSVPSFNEVVDGGLAFSHYVLTGNDFLRLCTGATPRTKDYDNQHCKDLNLVPPHVHKPIFGW

SEQ ID NO: 47143 - DNA, 1075 bp, Arabidopsis thaliana; identical to SEQ ID NO: 22571
  misc_feature (1)..(1075): Ceres Seq. ID no. 13593739
  misc_feature (1)..(1075): Ortholog of  Ceres SEQ ID NO 15173003 as cited in SEQ ID NO 51318
  misc_feature (1)..(1075): Ortholog of  Ceres SEQ ID NO 15224290 as cited in SEQ ID NO 62810
  misc_feature (1)..(1075): Ortholog of  Ceres SEQ ID NO 14302267 as cited in SEQ ID NO 68607

SEQ ID NO: 47144 - protein, 282 aa, Arabidopsis thaliana; identical to SEQ ID NO: 22572
  peptide (1)..(282): Ceres Seq. ID no. 15221238

SEQ ID NO: 47145 - protein, 265 aa, Arabidopsis thaliana; identical to SEQ ID NO: 22573
  peptide (1)..(265): Ceres Seq. ID no. 15221239

SEQ ID NO: 47146 - protein, 219 aa, Arabidopsis thaliana; identical to SEQ ID NO: 22574
  peptide (1)..(219): Ceres Seq. ID no. 15221240

SEQ ID NO: 47147 - DNA, 2230 bp, Arabidopsis thaliana
  misc_feature (1)..(2230): Ceres Seq. ID no. 14302945
  misc_feature (1)..(2230): Ortholog of  Ceres SEQ ID NO 15174638 as cited in SEQ ID NO 53185
  misc_feature (1)..(2230): Ortholog of  Ceres SEQ ID NO 13657460 as cited in SEQ ID NO 66115
  misc_feature (1)..(2230): Ortholog of  Ceres SEQ ID NO 13659394 as cited in SEQ ID NO 67049
ggtggtagtagcagtgaaaaacaaaagcaatccaatcccaaacccatttgctcttaagattcttcacatagagaagtcacatgttccttcttcttcttccttcatcatccccaaacacacacaaactaaaaaaaaggcaaaaccctagatccaagatcagacctaatctaatcgaaactcatagctgaaaaatgaagagagatcatcaccaattccaaggtcgattgtccaaccacgggacttcttcttcttcatcatcaatctctaaagataagatgatgatggtgaaaaaagaagaagacggtggaggtaacatggacgacgagcttctcgctgttttaggttacaaagttaggtcatcggagatggcggaggttgctttgaaactcgaacaattagagacgatgatgagtaatgttcaagaagatggtttatctcatctcgcgacggatactgttcattataatccgtcggagctttattcttggcttgataatatgctctctgagcttaatcctcctcctcttccggcgagttctaacggtttagatccggttcttccttcgccggagatttgtggttttccagcttcggattatgaccttaaagtcattcccggaaacgcgatttatcagtttccggcgattgattcttcgtcttcgtcgaataatcagaacaagcgtttgaaatcatgctcgagtcctgattctatggttacatcgacttcgacgggtacgcagattggtggagtcataggaacgacggtgacgacaaccaccacgacaacgacggcggcggctgagtcaactcgttctgttatcctggttgactcgcaagagaacggtgttcgtttagtccacgcgcttatggcttgtgcagaagcaatccagcagaacaatttgactctagcggaagctcttgtgaagcaaatcggatgcttagctgtgtctcaagccggagctatgagaaaagtggctacttacttcgccgaagctttagcgcggcggatctaccgtctctctccgccgcagaatcagatcgatcattgtctctccgatactcttcagatgcacttttacgagacttgtccttatcttaaattcgctcacttcacggcgaaccaagcgattctcgaagcttttgaaggtaagaagagagtacacgtcattgatttctcgatgaaccaaggtcttcaatggcctgcacttatgcaagctcttgcgcttcgagaaggaggtcctccaactttccggttaaccggaattggtccaccggcgccggataattctgatcatcttcatgaagttggttgtaaattagctcagcttgcggaggcgattcacgtagaattcgaataccgtggattcgttgctaacagcttagccgatctcgatgcttcgatgcttgagcttagaccgagcgatacggaagctgttgcggttaactctgtttttgagctacataagctcttaggtcgtcccggtgggatagagaaagttctcggcgttgtgaaacagattaaaccggtgattttcacggtggttgagcaagaatcgaaccataacggaccggttttcttagaccggtttactgaatcgttacattattattcgactctgtttgattcgttggaaggagttccgaatagtcaagacaaagtcatgtctgaagtttacttagggaaacagatttgtaatctggtggcttgtgaaggtcctgacagagtcgagagacacgaaacgttgagtcaatggggaaaccggtttggttcgtccggtttagcgccggcacatcttgggtctaacgcgtttaagcaagcgagtatgcttttgtctgtgtttaatagtggccaaggttatcgtgtggaggagagtaatggatgtttgatgttgggttggcacactcgcccactcattaccacctccgcttggaaactctcgacggcggcgcactgagtttgactcgaagcatacgacggtggtggagtcgagtcgagtgaatttgagattgagatcagtggaccggtgatgacatatgttcggaccaagacctaaaccgaactgaatcgaaccgttttgccttttgtttattttatttattttcgttcacttgtttaaaattcttatatatatcgttttggtaggtcattttataatttatgcctttttgggatcaatttttaataggctgagtttgtatttattaataaatatcttatgaattttaaaac

SEQ ID NO: 47148 - protein, 587 aa, Arabidopsis thaliana
  peptide (1)..(587): Ceres Seq. ID no. 14302946
MKRDHHQFQGRLSNHGTSSSSSSISKDKMMMVKKEEDGGGNMDDELLAVLGYKVRSSEMAEVALKLEQLETMMSNVQEDGLSHLATDTVHYNPSELYSWLDNMLSELNPPPLPASSNGLDPVLPSPEICGFPASDYDLKVIPGNAIYQFPAIDSSSSSNNQNKRLKSCSSPDSMVTSTSTGTQIGGVIGTTVTTTTTTTTAAAESTRSVILVDSQENGVRLVHALMACAEAIQQNNLTLAEALVKQIGCLAVSQAGAMRKVATYFAEALARRIYRLSPPQNQIDHCLSDTLQMHFYETCPYLKFAHFTANQAILEAFEGKKRVHVIDFSMNQGLQWPALMQALALREGGPPTFRLTGIGPPAPDNSDHLHEVGCKLAQLAEAIHVEFEYRGFVANSLADLDASMLELRPSDTEAVAVNSVFELHKLLGRPGGIEKVLGVVKQIKPVIFTVVEQESNHNGPVFLDRFTESLHYYSTLFDSLEGVPNSQDKVMSEVYLGKQICNLVACEGPDRVERHETLSQWGNRFGSSGLAPAHLGSNAFKQASMLLSVFNSGQGYRVEESNGCLMLGWHTRPLITTSAWKLSTAAH

SEQ ID NO: 47149 - protein, 559 aa, Arabidopsis thaliana
  peptide (1)..(559): Ceres Seq. ID no. 14302947
MMMVKKEEDGGGNMDDELLAVLGYKVRSSEMAEVALKLEQLETMMSNVQEDGLSHLATDTVHYNPSELYSWLDNMLSELNPPPLPASSNGLDPVLPSPEICGFPASDYDLKVIPGNAIYQFPAIDSSSSSNNQNKRLKSCSSPDSMVTSTSTGTQIGGVIGTTVTTTTTTTTAAAESTRSVILVDSQENGVRLVHALMACAEAIQQNNLTLAEALVKQIGCLAVSQAGAMRKVATYFAEALARRIYRLSPPQNQIDHCLSDTLQMHFYETCPYLKFAHFTANQAILEAFEGKKRVHVIDFSMNQGLQWPALMQALALREGGPPTFRLTGIGPPAPDNSDHLHEVGCKLAQLAEAIHVEFEYRGFVANSLADLDASMLELRPSDTEAVAVNSVFELHKLLGRPGGIEKVLGVVKQIKPVIFTVVEQESNHNGPVFLDRFTESLHYYSTLFDSLEGVPNSQDKVMSEVYLGKQICNLVACEGPDRVERHETLSQWGNRFGSSGLAPAHLGSNAFKQASMLLSVFNSGQGYRVEESNGCLMLGWHTRPLITTSAWKLSTAAH

SEQ ID NO: 47150 - protein, 558 aa, Arabidopsis thaliana
  peptide (1)..(558): Ceres Seq. ID no. 14302948
MMVKKEEDGGGNMDDELLAVLGYKVRSSEMAEVALKLEQLETMMSNVQEDGLSHLATDTVHYNPSELYSWLDNMLSELNPPPLPASSNGLDPVLPSPEICGFPASDYDLKVIPGNAIYQFPAIDSSSSSNNQNKRLKSCSSPDSMVTSTSTGTQIGGVIGTTVTTTTTTTTAAAESTRSVILVDSQENGVRLVHALMACAEAIQQNNLTLAEALVKQIGCLAVSQAGAMRKVATYFAEALARRIYRLSPPQNQIDHCLSDTLQMHFYETCPYLKFAHFTANQAILEAFEGKKRVHVIDFSMNQGLQWPALMQALALREGGPPTFRLTGIGPPAPDNSDHLHEVGCKLAQLAEAIHVEFEYRGFVANSLADLDASMLELRPSDTEAVAVNSVFELHKLLGRPGGIEKVLGVVKQIKPVIFTVVEQESNHNGPVFLDRFTESLHYYSTLFDSLEGVPNSQDKVMSEVYLGKQICNLVACEGPDRVERHETLSQWGNRFGSSGLAPAHLGSNAFKQASMLLSVFNSGQGYRVEESNGCLMLGWHTRPLITTSAWKLSTAAH

SEQ ID NO: 47151 - DNA, 1662 bp, Arabidopsis thaliana
  misc_feature (1)..(1662): Ceres Seq. ID no. 13593528
  misc_feature (1)..(1662): Ortholog of  Ceres SEQ ID NO 13599900 as cited in SEQ ID NO 531
  misc_feature (1)..(1662): Ortholog of  Ceres SEQ ID NO 14310498 as cited in SEQ ID NO 55066
  misc_feature (1)..(1662): Ortholog of  Ceres SEQ ID NO 15176759 as cited in SEQ ID NO 59678
  misc_feature (1)..(1662): Ortholog of  Ceres SEQ ID NO 15172875 as cited in SEQ ID NO 60423
  misc_feature (1)..(1662): Ortholog of  Ceres SEQ ID NO 13659971 as cited in SEQ ID NO 67565
  misc_feature (1)..(1662): Ortholog of  Ceres SEQ ID NO 13500385 as cited in SEQ ID NO 67583
gattcatttgcacacttcttcttcttcttcctcatttctcttcctctcccatattccatggaattgctctacttcttcacctatgagagtaatatatcctcatgtactcaaaatactaatcaaacttcatgcttcaacaccaccttttcttaatcctccttcttcatcttcttcttccactatttcattttccctagtcggtgtaaatatcaaatggaggaagaacggcgagttctgttcggaaagtacgagatgggaaggttattaggcaaaggaaccttcgccaaagtctattacggcaaagagatcatcggcggcgagtgcgtcgcaatcaaagtcatcaacaaggatcaagtaatgaagagacctggaatgatggaacaaatcaaacgcgagatttcaatcatgaagctcgttcgtcatcccaacatagttgaattgaaagaagtcatggctacgaagaccaagatcttcttcgtcatggagttcgttaaaggcggcgagcttttctgcaaaatctctaaaggtaagttacacgaagacgctgctcgtagatatttccagcaattgatctcagccgttgattattgccatagtagaggcgtttctcatcgcgatctgaaacctgagaatcttcttttagatgagaatggagatttgaaaatctccgatttcggattatctgcgttaccggaacagattcttcaagacggattgcttcatacgcagtgtggaactccggcgtatgttgcgccggaggtattaaagaagaaaggatacgacggcgcgaaagctgatatctggtcgtgcggcgtcgttttgtatgttcttctcgccggatgtttgccgtttcaagatgagaatctgatgaatatgtatcggaagattttcagagcggattttgaatttccgccgtggttttctccggaagcgaggaggttgatttcgaaactcctcgttgtagatccagatcgacggatctcgattccggcgattatgagaacgccttggctccggaaaaacttcactccgccgttagctttcaaaatcgacgaaccgatttgttctcaaagcagcaaaaacaacgaagaagaagaagaagacggagattgtgaaaatcaaacagagccgatatcgccgaaattcttcaacgctttcgaattcatatcctcgatgtcttccggatttgacttatcgagcttgttcgagagcaagaggaaagtgcaatcggtgtttacgtcacggtcgtcggcgacggaggtaatggagaagatagaaacggttacgaaggagatgaacatgaaagtgaagagaacgaaggattttaaagtgaagatggaagggaaaacggaagggagaaaaggacggttgtcgatgacggcggaagtgtttgaagtagcgccggagatatcggtggtggagttttgcaaatcggcgggagatactttggagtacgataggttatacgaagaagaagtacggccggcgttaaacgacatcgtctggtcatggcacggtgataataataacacttcttccgaggattgttgaatcagtagtttttggttctgatttaaccggttatcggttaacgtagtataactaagaactgttacattgaacccaaattttctttggtttaataaaattttggttttactt

SEQ ID NO: 47152 - protein, 445 aa, Arabidopsis thaliana
  peptide (1)..(445): Ceres Seq. ID no. 13593529
MEEERRVLFGKYEMGRLLGKGTFAKVYYGKEIIGGECVAIKVINKDQVMKRPGMMEQIKREISIMKLVRHPNIVELKEVMATKTKIFFVMEFVKGGELFCKISKGKLHEDAARRYFQQLISAVDYCHSRGVSHRDLKPENLLLDENGDLKISDFGLSALPEQILQDGLLHTQCGTPAYVAPEVLKKKGYDGAKADIWSCGVVLYVLLAGCLPFQDENLMNMYRKIFRADFEFPPWFSPEARRLISKLLVVDPDRRISIPAIMRTPWLRKNFTPPLAFKIDEPICSQSSKNNEEEEEDGDCENQTEPISPKFFNAFEFISSMSSGFDLSSLFESKRKVQSVFTSRSSATEVMEKIETVTKEMNMKVKRTKDFKVKMEGKTEGRKGRLSMTAEVFEVAPEISVVEFCKSAGDTLEYDRLYEEEVRPALNDIVWSWHGDNNNTSSEDC

SEQ ID NO: 47153 - protein, 432 aa, Arabidopsis thaliana
  peptide (1)..(432): Ceres Seq. ID no. 13593530
MGRLLGKGTFAKVYYGKEIIGGECVAIKVINKDQVMKRPGMMEQIKREISIMKLVRHPNIVELKEVMATKTKIFFVMEFVKGGELFCKISKGKLHEDAARRYFQQLISAVDYCHSRGVSHRDLKPENLLLDENGDLKISDFGLSALPEQILQDGLLHTQCGTPAYVAPEVLKKKGYDGAKADIWSCGVVLYVLLAGCLPFQDENLMNMYRKIFRADFEFPPWFSPEARRLISKLLVVDPDRRISIPAIMRTPWLRKNFTPPLAFKIDEPICSQSSKNNEEEEEDGDCENQTEPISPKFFNAFEFISSMSSGFDLSSLFESKRKVQSVFTSRSSATEVMEKIETVTKEMNMKVKRTKDFKVKMEGKTEGRKGRLSMTAEVFEVAPEISVVEFCKSAGDTLEYDRLYEEEVRPALNDIVWSWHGDNNNTSSEDC

SEQ ID NO: 47154 - protein, 397 aa, Arabidopsis thaliana
  peptide (1)..(397): Ceres Seq. ID no. 13593531
MKRPGMMEQIKREISIMKLVRHPNIVELKEVMATKTKIFFVMEFVKGGELFCKISKGKLHEDAARRYFQQLISAVDYCHSRGVSHRDLKPENLLLDENGDLKISDFGLSALPEQILQDGLLHTQCGTPAYVAPEVLKKKGYDGAKADIWSCGVVLYVLLAGCLPFQDENLMNMYRKIFRADFEFPPWFSPEARRLISKLLVVDPDRRISIPAIMRTPWLRKNFTPPLAFKIDEPICSQSSKNNEEEEEDGDCENQTEPISPKFFNAFEFISSMSSGFDLSSLFESKRKVQSVFTSRSSATEVMEKIETVTKEMNMKVKRTKDFKVKMEGKTEGRKGRLSMTAEVFEVAPEISVVEFCKSAGDTLEYDRLYEEEVRPALNDIVWSWHGDNNNTSSEDC

SEQ ID NO: 47155 - DNA, 1710 bp, Arabidopsis thaliana
  misc_feature (1)..(1710): Ceres Seq. ID no. 13592321
  misc_feature (1)..(1710): Ortholog of  Ceres SEQ ID NO 15171476 as cited in SEQ ID NO 55569
  misc_feature (1)..(1710): Ortholog of  Ceres SEQ ID NO 14312069 as cited in SEQ ID NO 59191
gtctctctcacacactaacagaaagcacaaaaaacagagacaaaagaatggcgcgaaaatccctaattttcccggtgattttgctcgccgttcttctcttctctccgccgatttactccgccggtcacgattaccgcgacgctctccgtaaaagcattctcttcttcgaaggtcaacgttccggtaaactccctccagatcaacgcttaaaatggcgccgtgactcagcattacgcgacggttcctccgccggcgttgacttatccggtggttactacgacgccggagacaacatcaagttcggttttccgatggcgttcacaacaacgatgctttcatggagtataatcgatttcggtaaaaccatgggacctgagcttagaaacgccgtgaaagctgttaaatggggaacagattacctccttaaagcgacggcgattcccggagtagtcttcgtccaagtcggagacgcttactccgatcataactgttgggaaaggcctgaagatatggacactctccgtactgtttacaaaatcgatagagctcatcctggttctgacgtcgctggtgaaaccgcagccgctttagccgccgcttcaatcgtttttagaaaacgcgatcctgcttattccagacttctacttgaccgtgccactagggtattcgcgtttgctaacagatatcgcggcgcgtatagtaacagtctctaccacgcggtttgtcctttttactgtgatttcaacggttaccaggatgagttactgtggggagcggcatggctacacaaagcctcgaggaaacgagcgtacagagaattcattgtgaagaacgaggtcattcttaaggctggagataccattaatgagtttggttgggacaataagcatgctgggattaatgtcttaatctccaaggaagtgttaatgggaaaagcagagtattttgagtctttcaagcagaacgcagatgggtttatctgttctatattgcctggaatttctcacccccaagtccaatactctcgaggagggctactagtgaagactggagggagtaacatgcaacatgtaacatcactatctttcctcctattggcttactctaattatctgagccatgccaaaaaggttgtgccttgtggcgaattaactgcttccccatctctcctccgtcaaatcgccaagcgtcaggtggattacattctcggagacaacccgatgggactgtcttacatggttggatacggtcaaaagtttccacgtaggattcatcaccgtggtagctcggttccttcggtttcagcccatccaagccacatagggtgcaaagaaggctctcgctatttcctaagcccaaatcctaacccaaaccttttggttggtgctgtagtcggtggacctaatgtcactgatgcttttccggattcaagaccttactttcagcagtctgagcccacgacttatatcaatgcaccactagtgggccttctcggttacttctccgcccattctacttggcgatgagggagggccttattacttattactctctatcctattagaggtgtgctggaaactttaggccaccctaaaacccttttttttcttttttaatgttattgccactctttattttctactacttaaccaattgtattgtaagcccgtaattagtgaagaagagaaagagttatgtcggtgtctaaac

SEQ ID NO: 47156 - protein, 507 aa, Arabidopsis thaliana
  peptide (1)..(507): Ceres Seq. ID no. 13592322
LSHTLTESTKNRDKRMARKSLIFPVILLAVLLFSPPIYSAGHDYRDALRKSILFFEGQRSGKLPPDQRLKWRRDSALRDGSSAGVDLSGGYYDAGDNIKFGFPMAFTTTMLSWSIIDFGKTMGPELRNAVKAVKWGTDYLLKATAIPGVVFVQVGDAYSDHNCWERPEDMDTLRTVYKIDRAHPGSDVAGETAAALAAASIVFRKRDPAYSRLLLDRATRVFAFANRYRGAYSNSLYHAVCPFYCDFNGYQDELLWGAAWLHKASRKRAYREFIVKNEVILKAGDTINEFGWDNKHAGINVLISKEVLMGKAEYFESFKQNADGFICSILPGISHPQVQYSRGGLLVKTGGSNMQHVTSLSFLLLAYSNYLSHAKKVVPCGELTASPSLLRQIAKRQVDYILGDNPMGLSYMVGYGQKFPRRIHHRGSSVPSVSAHPSHIGCKEGSRYFLSPNPNPNLLVGAVVGGPNVTDAFPDSRPYFQQSEPTTYINAPLVGLLGYFSAHSTWR

SEQ ID NO: 47157 - protein, 492 aa, Arabidopsis thaliana
  peptide (1)..(492): Ceres Seq. ID no. 13592323
MARKSLIFPVILLAVLLFSPPIYSAGHDYRDALRKSILFFEGQRSGKLPPDQRLKWRRDSALRDGSSAGVDLSGGYYDAGDNIKFGFPMAFTTTMLSWSIIDFGKTMGPELRNAVKAVKWGTDYLLKATAIPGVVFVQVGDAYSDHNCWERPEDMDTLRTVYKIDRAHPGSDVAGETAAALAAASIVFRKRDPAYSRLLLDRATRVFAFANRYRGAYSNSLYHAVCPFYCDFNGYQDELLWGAAWLHKASRKRAYREFIVKNEVILKAGDTINEFGWDNKHAGINVLISKEVLMGKAEYFESFKQNADGFICSILPGISHPQVQYSRGGLLVKTGGSNMQHVTSLSFLLLAYSNYLSHAKKVVPCGELTASPSLLRQIAKRQVDYILGDNPMGLSYMVGYGQKFPRRIHHRGSSVPSVSAHPSHIGCKEGSRYFLSPNPNPNLLVGAVVGGPNVTDAFPDSRPYFQQSEPTTYINAPLVGLLGYFSAHSTWR

SEQ ID NO: 47158 - protein, 404 aa, Arabidopsis thaliana
  peptide (1)..(404): Ceres Seq. ID no. 13592324
MAFTTTMLSWSIIDFGKTMGPELRNAVKAVKWGTDYLLKATAIPGVVFVQVGDAYSDHNCWERPEDMDTLRTVYKIDRAHPGSDVAGETAAALAAASIVFRKRDPAYSRLLLDRATRVFAFANRYRGAYSNSLYHAVCPFYCDFNGYQDELLWGAAWLHKASRKRAYREFIVKNEVILKAGDTINEFGWDNKHAGINVLISKEVLMGKAEYFESFKQNADGFICSILPGISHPQVQYSRGGLLVKTGGSNMQHVTSLSFLLLAYSNYLSHAKKVVPCGELTASPSLLRQIAKRQVDYILGDNPMGLSYMVGYGQKFPRRIHHRGSSVPSVSAHPSHIGCKEGSRYFLSPNPNPNLLVGAVVGGPNVTDAFPDSRPYFQQSEPTTYINAPLVGLLGYFSAHSTWR

SEQ ID NO: 47159 - DNA, 1778 bp, Arabidopsis thaliana
  misc_feature (1)..(1778): Ceres Seq. ID no. 12739220
  misc_feature (1)..(1778): Ortholog of  Ceres SEQ ID NO 14314896 as cited in SEQ ID NO 54010
atttatttctctacttgtccacttttctacagccgcatcatccttctcccttgtgcgatatcgtttgcgtgagatttgtctgaaaagtagctaaccatgggtaaagagaagtttcacatcaacattgtggtcattggccacgtcgattctggaaagtcgacaaccactggacacttgatctacaagttgggtggtattgacaagcgtgtgatcgagaggttcgagaaggaggctgctgagatgaacaagaggtccttcaagtacgcatgggtgttggacaaacttaaggctgagcgtgagcgtggtatcaccattgacattgctctctggaagttcgagaccaccaagtactactgcactgtcattgatgctcctggtcatcgtgatttcatcaagaacatgatcactggtacctcccaggctgattgtgctgtccttatcattgactccaccactggtggttttgaggctggtatctccaaggatggtcagacccgtgagcacgctctccttgctttcacccttggtgtcaagcagatgatctgctgttgtaacaagatggatgccactacccccaagtactccaaggccaggtacgatgaaatcatcaaggaggtgtcttcctacttgaagaaggttggttacaaccccgacaaaatcccatttgtgcccatctctggatttgagggtgacaacatgattgagaggtccaccaaccttgactggtacaagggaccaactctccttgaggctcttgaccagatcaacgagcccaagaggccgtcagacaagccccttcgtctcccacttcaggatgtctacaagattggtggtattggaacggtgccagtgggacgtgttgagactggtatgatcaagcctggtatggttgtgacctttgctcccacaggattgaccactgaggtcaagtctgttgagatgcaccacgagtctcttcttgaggcacttccaggtgacaacgttgggttcaatgttaagaatgttgccgtgaaggatcttaagagagggtacgtcgcctccaactccaaggatgaccctgccaagggtgctgctaacttcacctcccaggtcatcatcatgaaccaccctggtcagattggtaacggttacgccccagtcttggattgccacacctctcacattgcagtcaagttctctgagatcttgaccaagattgacaggcgttctggtaaggagattgagaaggagcccaaattcttgaagaatggtgatgctggtatggtgaagatgactccaaccaagcccatggttgtggagaccttctctgagtacccaccacttggacgtttcgctgttagggacatgaggcagactgttgcagtcggtgttatcaagagtgttgacaagaaggacccaaccggagccaaggttaccaaggctgcagttaagaagggtgcaaagtgaactcgaatcctcaaaactctatccgcagatgaatcaaaaaacaatattagtttctttactttagtttggtatttggtcgcgtgttatagcttcgtttcttctccatcggaactctgttcccggaactgggttcttgatcggaggtggcggagctactttgcacctattttgcttttgaattgttatcaattttgaacctatttggagattcggttatatgatgtgattttccgaggatattctctctttttttgttgcgtgtatcacattcgaattcagtctcttggataacttgtggaaaaacttataacttcaagaaaaaccttataaac

SEQ ID NO: 47160 - protein, 449 aa, Arabidopsis thaliana; identical to SEQ ID NO: 27284
  peptide (1)..(449): Ceres Seq. ID no. 12739221

SEQ ID NO: 47161 - protein, 401 aa, Arabidopsis thaliana; identical to SEQ ID NO: 21437
  peptide (1)..(401): Ceres Seq. ID no. 12739222

SEQ ID NO: 47162 - protein, 348 aa, Arabidopsis thaliana; identical to SEQ ID NO: 21438
  peptide (1)..(348): Ceres Seq. ID no. 12739223

SEQ ID NO: 47163 - DNA, 1921 bp, Arabidopsis thaliana; identical to SEQ ID NO: 44980
  misc_feature (1)..(1921): Ceres Seq. ID no. 12559858
  misc_feature (1)..(1921): Ortholog of  Ceres SEQ ID NO 15169623 as cited in SEQ ID NO 67523
  misc_feature (1)..(1921): Ortholog of  Ceres SEQ ID NO 12614670 as cited in SEQ ID NO 68565

SEQ ID NO: 47164 - protein, 580 aa, Arabidopsis thaliana; identical to SEQ ID NO: 44981
  peptide (1)..(580): Ceres Seq. ID no. 12559859

SEQ ID NO: 47165 - protein, 576 aa, Arabidopsis thaliana; identical to SEQ ID NO: 44982
  peptide (1)..(576): Ceres Seq. ID no. 12559860

SEQ ID NO: 47166 - protein, 497 aa, Arabidopsis thaliana; identical to SEQ ID NO: 44983
  peptide (1)..(497): Ceres Seq. ID no. 12559861

SEQ ID NO: 47167 - DNA, 1163 bp, Arabidopsis thaliana
  misc_feature (1)..(1163): Ceres Seq. ID no. 13647718
  misc_feature (1)..(1163): Ortholog of  Ceres SEQ ID NO 15170911 as cited in SEQ ID NO 55290
gaccgtacacacatccccatacgaacactcacaatcgttaaaaagaagagaagagaagagagagaaagcttaaatcggaaaaaatggtttcgtggatgatgacaaccaaggcggtgctaatctcaagcggcgtcgccaccgtggctctgttactgaaactctctgttccggtagctgttgatttctccgtgtcacgagctccgatcttgtggagctccttgttgtcatggctgaaaccaccgtatctttacgttgttaccaacggaattatcatcactatcgttgcttcttctaagtattaccgaagtcaccatgaccgtgatgaagaagatgagatcgtcgtgtacggtggtggaggttataagatccagacggaggagccgattgtgaatcaacatcaagcttctccgaggattctggaggttaaggatttggatactggtgcgcattttggtttcgttgtggcgaatctggaggctgaggaactggaatcagaggcggttacggcggttgtgtttgacgatgaggaggaggagaagaagattatagatagcgcggcgacggcggaggatgaaattgaagaggagcttaagagtgtgattatggttgagaattcagatctggttgaatccgatgtcataccgccgccgatgatgatcgaatcggagaatcttcctccgattgagaagcctctcgttacttcaaggttcggtcaccggaaattgatgaaagcaagtcaagaaggtggaagagctttgagagtgacgaagccgaagaagaacgagacgttggagaatacgtggaagatgataacggaagggaaatcaacgccgttgactagacagttataccggagatctgacacgtttggacgtggagattccgggggagttgacggtgaggtgaaaccggtttataagaagtcggatacgtttagggacaggactaattattatcagttggcggagacggcgaaggtgaggaaagagccgtcgctgagtcaggaagagttgaatcggcgagttgaggcgtttataaagaagtttaatgaggagatgaagttgcagagaatggagtctctcagacagtacaaagagataactagccgtggggtttagttaactgtttttattttctggttaaaatttttttattggcttttt

SEQ ID NO: 47168 - protein, 344 aa, Arabidopsis thaliana
  peptide (1)..(344): Ceres Seq. ID no. 15219468
MVSWMMTTKAVLISSGVATVALLLKLSVPVAVDFSVSRAPILWSSLLSWLKPPYLYVVTNGIIITIVASSKYYRSHHDRDEEDEIVVYGGGGYKIQTEEPIVNQHQASPRILEVKDLDTGAHFGFVVANLEAEELESEAVTAVVFDDEEEEKKIIDSAATAEDEIEEELKSVIMVENSDLVESDVIPPPMMIESENLPPIEKPLVTSRFGHRKLMKASQEGGRALRVTKPKKNETLENTWKMITEGKSTPLTRQLYRRSDTFGRGDSGGVDGEVKPVYKKSDTFRDRTNYYQLAETAKVRKEPSLSQEELNRRVEAFIKKFNEEMKLQRMESLRQYKEITSRGV

SEQ ID NO: 47169 - protein, 340 aa, Arabidopsis thaliana
  peptide (1)..(340): Ceres Seq. ID no. 15219469
MMTTKAVLISSGVATVALLLKLSVPVAVDFSVSRAPILWSSLLSWLKPPYLYVVTNGIIITIVASSKYYRSHHDRDEEDEIVVYGGGGYKIQTEEPIVNQHQASPRILEVKDLDTGAHFGFVVANLEAEELESEAVTAVVFDDEEEEKKIIDSAATAEDEIEEELKSVIMVENSDLVESDVIPPPMMIESENLPPIEKPLVTSRFGHRKLMKASQEGGRALRVTKPKKNETLENTWKMITEGKSTPLTRQLYRRSDTFGRGDSGGVDGEVKPVYKKSDTFRDRTNYYQLAETAKVRKEPSLSQEELNRRVEAFIKKFNEEMKLQRMESLRQYKEITSRGV

SEQ ID NO: 47170 - protein, 339 aa, Arabidopsis thaliana
  peptide (1)..(339): Ceres Seq. ID no. 15219470
MTTKAVLISSGVATVALLLKLSVPVAVDFSVSRAPILWSSLLSWLKPPYLYVVTNGIIITIVASSKYYRSHHDRDEEDEIVVYGGGGYKIQTEEPIVNQHQASPRILEVKDLDTGAHFGFVVANLEAEELESEAVTAVVFDDEEEEKKIIDSAATAEDEIEEELKSVIMVENSDLVESDVIPPPMMIESENLPPIEKPLVTSRFGHRKLMKASQEGGRALRVTKPKKNETLENTWKMITEGKSTPLTRQLYRRSDTFGRGDSGGVDGEVKPVYKKSDTFRDRTNYYQLAETAKVRKEPSLSQEELNRRVEAFIKKFNEEMKLQRMESLRQYKEITSRGV

SEQ ID NO: 47171 - DNA, 946 bp, Arabidopsis thaliana; identical to SEQ ID NO: 35423
  misc_feature (1)..(946): Ceres Seq. ID no. 13592449
  misc_feature (1)..(946): Ortholog of  Ceres SEQ ID NO 14301707 as cited in SEQ ID NO 67211

SEQ ID NO: 47172 - protein, 209 aa, Arabidopsis thaliana; identical to SEQ ID NO: 35424
  peptide (1)..(209): Ceres Seq. ID no. 13592450

SEQ ID NO: 47173 - protein, 202 aa, Arabidopsis thaliana; identical to SEQ ID NO: 35425
  peptide (1)..(202): Ceres Seq. ID no. 13592451

SEQ ID NO: 47174 - protein, 144 aa, Arabidopsis thaliana; identical to SEQ ID NO: 35426
  peptide (1)..(144): Ceres Seq. ID no. 13592452

SEQ ID NO: 47175 - DNA, 1754 bp, Arabidopsis thaliana
  misc_feature (1)..(1754): Ceres Seq. ID no. 13592461
  misc_feature (1)..(1754): Ortholog of  Ceres SEQ ID NO 14303770 as cited in SEQ ID NO 53890
gatgatctttgtgaatgtgggcaacgattgtaagcagagggaaggcgaagaattatgataacctctcatcaacgataagacaaaatccataaactagtaatatcatccaatcctctcacttcttccttattccctcactttcactctcactatctgttgacttcacatggcttccaccgccgcaactgcagctctttcgatcatcaaatccaccggtggcgccgccgttacacgctcctcccgcgcctcctttggacacattccctccacatctgtctccgcacgtcgccttggcttctccgccgtcgttgactctcgtttctcggtccacgtggcgtccaaggtccactccgtgcgcggaaagggcgccaggggagtgattacgatggcgaagaagagtgttggagatctgaattctgtagatttgaaggggaagaaggtgtttgttagagctgatctcaatgtacctctcgatgacaaccagaatatcactgacgacactagaatcagagccgccattcccaccatcaagtttttgattgagaatggtgctaaggtcatcctctccactcatttgggaaggccaaagggtgtcactccaaagttcagcttggctcctcttgttcccagattatcagagctccttggtattgaggtcgtgaaagctgatgattgtattggtccagaagtggaaaccttggtggcttcccttcctgaaggtggagttttgcttcttgagaacgtgaggttttacaaggaggaagagaagaacgaacctgattttgctaagaagcttgcttctctagctgacctttatgtcaacgatgcgttcgggactgctcacagagcccatgcttcaacagagggagtcactaagttcttgaagccatcagttgctggtttccttttgcaaaaggagttggactaccttgttggtgcggtttcaaacccaaagagaccatttgctgccattgtgggaggttccaaggtctcatctaagattggagttatcgaatcgcttcttgagaaatgtgacatccttctgcttggtggtggaatgatctttacattctacaaggcgcaaggtctttccgttggctcctcccttgttgaagaagacaagcttgaattggctacaacactccttgccaaggctaaggccagaggagtctctctgttgttaccaacagatgttgtgattgctgacaagttcgctcctgatgccaacagcaagattgtgccagcatcagccattcctgatgggtggatgggattggacatcggtccagactcggtgaaaacattcaacgaagctctggataccacgcagacagtcatttggaatggaccaatgggagttttcgagtttgaaaagtttgcaaaaggaactgaggcggtagcgaataaactagcagagctaagcaaaaagggagtgacaacgataataggaggaggagactcggtggcagcagtggagaaagtgggagtagcaggagtcatgagtcacatctccacaggtggtggtgccagtttggagctcttggaaggcaaagtgcttcccggtgtcgtcgctcttgatgaagcaacgccagtcactgtttaacaacatctctttattacacctgaagggacccccctaaatgagtttcttcttcttattctgttgtaaatcaaagtctttgttgtaccatcaaatccatagagaggagggactctttttgtctcaaataaaatcaaatacagtgacattcgtt

SEQ ID NO: 47176 - protein, 478 aa, Arabidopsis thaliana
  peptide (1)..(478): Ceres Seq. ID no. 13592462
MASTAATAALSIIKSTGGAAVTRSSRASFGHIPSTSVSARRLGFSAVVDSRFSVHVASKVHSVRGKGARGVITMAKKSVGDLNSVDLKGKKVFVRADLNVPLDDNQNITDDTRIRAAIPTIKFLIENGAKVILSTHLGRPKGVTPKFSLAPLVPRLSELLGIEVVKADDCIGPEVETLVASLPEGGVLLLENVRFYKEEEKNEPDFAKKLASLADLYVNDAFGTAHRAHASTEGVTKFLKPSVAGFLLQKELDYLVGAVSNPKRPFAAIVGGSKVSSKIGVIESLLEKCDILLLGGGMIFTFYKAQGLSVGSSLVEEDKLELATTLLAKAKARGVSLLLPTDVVIADKFAPDANSKIVPASAIPDGWMGLDIGPDSVKTFNEALDTTQTVIWNGPMGVFEFEKFAKGTEAVANKLAELSKKGVTTIIGGGDSVAAVEKVGVAGVMSHISTGGGASLELLEGKVLPGVVALDEATPVTV

SEQ ID NO: 47177 - protein, 405 aa, Arabidopsis thaliana
  peptide (1)..(405): Ceres Seq. ID no. 13592463
MAKKSVGDLNSVDLKGKKVFVRADLNVPLDDNQNITDDTRIRAAIPTIKFLIENGAKVILSTHLGRPKGVTPKFSLAPLVPRLSELLGIEVVKADDCIGPEVETLVASLPEGGVLLLENVRFYKEEEKNEPDFAKKLASLADLYVNDAFGTAHRAHASTEGVTKFLKPSVAGFLLQKELDYLVGAVSNPKRPFAAIVGGSKVSSKIGVIESLLEKCDILLLGGGMIFTFYKAQGLSVGSSLVEEDKLELATTLLAKAKARGVSLLLPTDVVIADKFAPDANSKIVPASAIPDGWMGLDIGPDSVKTFNEALDTTQTVIWNGPMGVFEFEKFAKGTEAVANKLAELSKKGVTTIIGGGDSVAAVEKVGVAGVMSHISTGGGASLELLEGKVLPGVVALDEATPVTV

SEQ ID NO: 47178 - DNA, 2367 bp, Arabidopsis thaliana; identical to SEQ ID NO: 45792
  misc_feature (1)..(2367): Ceres Seq. ID no. 13600852
  misc_feature (1)..(2367): Ortholog of  Ceres SEQ ID NO 12465083 as cited in SEQ ID NO 68239

SEQ ID NO: 47179 - protein, 682 aa, Arabidopsis thaliana; identical to SEQ ID NO: 45793
  peptide (1)..(682): Ceres Seq. ID no. 13600853

SEQ ID NO: 47180 - protein, 666 aa, Arabidopsis thaliana; identical to SEQ ID NO: 45794
  peptide (1)..(666): Ceres Seq. ID no. 13600854

SEQ ID NO: 47181 - protein, 649 aa, Arabidopsis thaliana; identical to SEQ ID NO: 45795
  peptide (1)..(649): Ceres Seq. ID no. 13600855

SEQ ID NO: 47182 - DNA, 2842 bp, Arabidopsis thaliana
  misc_feature (1)..(2842): Ceres Seq. ID no. 13593295
  misc_feature (1)..(2842): Ortholog of  Ceres SEQ ID NO 13663426 as cited in SEQ ID NO 66312
atgggtgtgggaggcaatttctgggatttgctgagaccatatgctcagcaacaaggctttgattttctcagaaacaaacgagtcgctgttgatctctccttctggatcgttcagcatgaaaccgctgttaagggtttcgtccttaaacctcacctccgactcactttcttccgtactatcaacctcttctcaaagtttggagcgtacccggtttttgtggttgatggaacaccatcacctttgaaatctcaggcgagaatctccaggtttttccgttcttctggaattgatacttgtaatctacctgtgattaaagatggtgtctcggttgagagaaacaagctgttttctgaatgggttagggaatgtgtggagctactcgaattgctcggtattccggtgctgaaagctaatggtgaggctgaagctctctgtgcacagttaaacagccaaggttttgtggatgcttgcattactcctgatagtgatgctttcctttttggtgctatgtgcgtgatcaaagacatcaagcctaattcaagagaaccttttgaatgctaccatatgtcacatatcgagtctggcctcggtttgaagcggaaacacttgattgctatttctctattggtgggaaacgattatgattcaggcggtgttcttgggattggtgtggataaagcactgcgcattgttcgtgagttttctgaagaccaagtacttgaaagactacaggacattggaaatgggttgcaacctgcagttcctggtggaatcaaatccggggatgatggtgaagaattccgctcagagatgaaaaaaagatctcctcactgttcccgttgtggacacctgggcagcaagagaactcattttaagtcctcttgtgagcactgcggttgtgatagtggttgcattaaaaaaccattagggtttagatgtgaatgctccttttgttccaaggatcgagatttaagggaacaaaagaaaaccaatgattggtggatcaaagtctgcgataagattgctctagcgccagagtttcccaacagaaagattattgaactttatctatccgatggtttgatgacaggagatggatcgtcaatgtcttggggaactcctgatactggaatgctagtggatctcatggtgcaaaatgataatggtgactgcttcttgctaactgatgaatgcataggacttgttcagtctgctttccctgatgaaacagagcattttctacatgagaagaaactgagagagtcgaaaaagaagaatgtttctgaagaagaaacagcaacaccaagagcaacaacaatgggtgtacaaagaagcattaccgatttctaccgttcagcgaagaaagcagcagcaggtcaaagtatagagacaggcgggagttcaaaagcttctgcggaaaagaagagacaggcaacttctactagtagtagtaaccttacaaagtcggtcaggcgtcgtctcttagagagcagaagaagtttattggtcttatcggaaatgatgaatgcggtaataacatcagccaccatcaactgcaactctctgtcgccgtcatggacatgcggagacaattcgccgtcaaagcttctgttgggggaaatatctgccgcgttatcacgacggaggaccgtgaaggtgtcatgcggcaagagcagcccagatgattaccactcaaccctcaaatcactcaattctcgtggtcggtttcccagaaagtccctcggccagcattacatgttgaattcggacatcaacgaccagctagcctctgcggctgatgtgaaagaaggagattttgtattagagattggtcctgggactggttctttaaccaatgtccttatcaatttaggtgctacagttcttgccatcgaaaaggatcctcatatggttgatttggtgagcgaacgatttgctggttctgacaagttcaaggttttgcaagaggattttgtcaagtgtcacatccgttctcacatgctctccattttagagactagaaggttatcacatccagattctgctcttgcaaaggttgtttccaatttacctttcaatataagtactgatgttgtgaagcttctacttcctatgggtgatatcttctcaaaagttgttctcttactccaggacgaggcagcattgcgattggttgaaccagcactgcgaacatctgaataccgtcccatcaacattttgatcaacttctattctgaaccggaatacaatttcagagttcctagggaaaacttcttccctcagcccaaggttgatgctgctgtcgtaacattcaagctgaagcatccgagggactatcctgatgtttcctccaccaaaaatttcttctctttggtgaattctgcattcaatgggaagaggaaaatgttgagaaagtccctccagcacatatcatcatctcctgatatcgaaaaagcactaggagttgctggtcttccagccacttcaaggcctgaagagcttaccttggatgactttgtcaagttgcataacgtaatcgccagagaataagaccaacgagaaggaccatcagtatccatgttttgtcggctttagagttatacgaagccacctgaaaacagaacagtgacggcaacaagacgaggaagatacaacgttgcagtgcaagctgttgattgccgaaagacgaatgtgaccaatatccatacagtcaggaatcagggagtaagtagaatacagtcccaatctggtttgttattgttagaatttttctgtctatgagatgatctttgtaaattgttgattttgtaataccaaaccgacaaatagtctttacaatcac

SEQ ID NO: 47183 - protein, 849 aa, Arabidopsis thaliana
  peptide (1)..(849): Ceres Seq. ID no. 13593296
MGVGGNFWDLLRPYAQQQGFDFLRNKRVAVDLSFWIVQHETAVKGFVLKPHLRLTFFRTINLFSKFGAYPVFVVDGTPSPLKSQARISRFFRSSGIDTCNLPVIKDGVSVERNKLFSEWVRECVELLELLGIPVLKANGEAEALCAQLNSQGFVDACITPDSDAFLFGAMCVIKDIKPNSREPFECYHMSHIESGLGLKRKHLIAISLLVGNDYDSGGVLGIGVDKALRIVREFSEDQVLERLQDIGNGLQPAVPGGIKSGDDGEEFRSEMKKRSPHCSRCGHLGSKRTHFKSSCEHCGCDSGCIKKPLGFRCECSFCSKDRDLREQKKTNDWWIKVCDKIALAPEFPNRKIIELYLSDGLMTGDGSSMSWGTPDTGMLVDLMVQNDNGDCFLLTDECIGLVQSAFPDETEHFLHEKKLRESKKKNVSEEETATPRATTMGVQRSITDFYRSAKKAAAGQSIETGGSSKASAEKKRQATSTSSSNLTKSVRRRLLESRRSLLVLSEMMNAVITSATINCNSLSPSWTCGDNSPSKLLLGEISAALSRRRTVKVSCGKSSPDDYHSTLKSLNSRGRFPRKSLGQHYMLNSDINDQLASAADVKEGDFVLEIGPGTGSLTNVLINLGATVLAIEKDPHMVDLVSERFAGSDKFKVLQEDFVKCHIRSHMLSILETRRLSHPDSALAKVVSNLPFNISTDVVKLLLPMGDIFSKVVLLLQDEAALRLVEPALRTSEYRPINILINFYSEPEYNFRVPRENFFPQPKVDAAVVTFKLKHPRDYPDVSSTKNFFSLVNSAFNGKRKMLRKSLQHISSSPDIEKALGVAGLPATSRPEELTLDDFVKLHNVIARE

SEQ ID NO: 47184 - protein, 680 aa, Arabidopsis thaliana
  peptide (1)..(680): Ceres Seq. ID no. 13593297
MCVIKDIKPNSREPFECYHMSHIESGLGLKRKHLIAISLLVGNDYDSGGVLGIGVDKALRIVREFSEDQVLERLQDIGNGLQPAVPGGIKSGDDGEEFRSEMKKRSPHCSRCGHLGSKRTHFKSSCEHCGCDSGCIKKPLGFRCECSFCSKDRDLREQKKTNDWWIKVCDKIALAPEFPNRKIIELYLSDGLMTGDGSSMSWGTPDTGMLVDLMVQNDNGDCFLLTDECIGLVQSAFPDETEHFLHEKKLRESKKKNVSEEETATPRATTMGVQRSITDFYRSAKKAAAGQSIETGGSSKASAEKKRQATSTSSSNLTKSVRRRLLESRRSLLVLSEMMNAVITSATINCNSLSPSWTCGDNSPSKLLLGEISAALSRRRTVKVSCGKSSPDDYHSTLKSLNSRGRFPRKSLGQHYMLNSDINDQLASAADVKEGDFVLEIGPGTGSLTNVLINLGATVLAIEKDPHMVDLVSERFAGSDKFKVLQEDFVKCHIRSHMLSILETRRLSHPDSALAKVVSNLPFNISTDVVKLLLPMGDIFSKVVLLLQDEAALRLVEPALRTSEYRPINILINFYSEPEYNFRVPRENFFPQPKVDAAVVTFKLKHPRDYPDVSSTKNFFSLVNSAFNGKRKMLRKSLQHISSSPDIEKALGVAGLPATSRPEELTLDDFVKLHNVIARE

SEQ ID NO: 47185 - protein, 661 aa, Arabidopsis thaliana
  peptide (1)..(661): Ceres Seq. ID no. 13593298
MSHIESGLGLKRKHLIAISLLVGNDYDSGGVLGIGVDKALRIVREFSEDQVLERLQDIGNGLQPAVPGGIKSGDDGEEFRSEMKKRSPHCSRCGHLGSKRTHFKSSCEHCGCDSGCIKKPLGFRCECSFCSKDRDLREQKKTNDWWIKVCDKIALAPEFPNRKIIELYLSDGLMTGDGSSMSWGTPDTGMLVDLMVQNDNGDCFLLTDECIGLVQSAFPDETEHFLHEKKLRESKKKNVSEEETATPRATTMGVQRSITDFYRSAKKAAAGQSIETGGSSKASAEKKRQATSTSSSNLTKSVRRRLLESRRSLLVLSEMMNAVITSATINCNSLSPSWTCGDNSPSKLLLGEISAALSRRRTVKVSCGKSSPDDYHSTLKSLNSRGRFPRKSLGQHYMLNSDINDQLASAADVKEGDFVLEIGPGTGSLTNVLINLGATVLAIEKDPHMVDLVSERFAGSDKFKVLQEDFVKCHIRSHMLSILETRRLSHPDSALAKVVSNLPFNISTDVVKLLLPMGDIFSKVVLLLQDEAALRLVEPALRTSEYRPINILINFYSEPEYNFRVPRENFFPQPKVDAAVVTFKLKHPRDYPDVSSTKNFFSLVNSAFNGKRKMLRKSLQHISSSPDIEKALGVAGLPATSRPEELTLDDFVKLHNVIARE

SEQ ID NO: 47186 - DNA, 1064 bp, Arabidopsis thaliana
  misc_feature (1)..(1064): Ceres Seq. ID no. 13588510
  misc_feature (1)..(1064): Ortholog of  Ceres SEQ ID NO 15175949 as cited in SEQ ID NO 58819
  misc_feature (1)..(1064): Ortholog of  Ceres SEQ ID NO 13596660 as cited in SEQ ID NO 63180
ggagatatttcacatccttttctctcttatttgtttctgagattctcttcttgttgttgtagccatggacaacgaaggcataggtctttacccgcttcatcgttgcaaaaccattcacctggtgagacatgctcaagggattcataatgtggctggtgaaaaagatcacagtgcttactcttcggaggattactttgatgctcatcttacccctcttggttggcaacaggttgataatctaaggaaccatgttcgtgcagctcaactcttaaacaaggttgaacttgtcattgtttcccctatgcttagaactatacaaacagctgttggtgcttttggaggagaagaagatactaatggagcggatgcaacaccgttaatggtggctaatgctgggagcagcgatcgtcctgcgatttctagcttaaatagtcctcctttccttgctgttgagctttgcagggaaactatgggtgatcatccttgtgacaggcgaagaagcgtcactgagtacaaggctctctttcccgctattgatttctcaattattgaaaccgacaatgatgttctgtggaagccgagtccaagagagagccttgaagaagttgcagccagaggtgtagagttcatcaaatggatatggacaaggaaagagaaggagatcgcaattgtatctcacagtggcttcttgcacggtctcttgagttctttcgggaaggattgttgcgatgacctaaagaaagagttgtctatacatttgagcaactgtgagcttcgctcaatggttatcgtggatcgagggaacctggggactgactctgcagagaccacaaactatcctgggaaggttcctgaaggacttgataatcctagtggctaaatggctgaagagtaagagagagaattctgagatagtttttctttctaaaataaataaattacatgatgtttccattggactagaatctggcattttcagttatttgatgaacattagtgttggtatgtagccatgtaggttgactctgctgctacatgaatttattgtatgattgttattatcc

SEQ ID NO: 47187 - protein, 271 aa, Arabidopsis thaliana
  peptide (1)..(271): Ceres Seq. ID no. 13588511
MDNEGIGLYPLHRCKTIHLVRHAQGIHNVAGEKDHSAYSSEDYFDAHLTPLGWQQVDNLRNHVRAAQLLNKVELVIVSPMLRTIQTAVGAFGGEEDTNGADATPLMVANAGSSDRPAISSLNSPPFLAVELCRETMGDHPCDRRRSVTEYKALFPAIDFSIIETDNDVLWKPSPRESLEEVAARGVEFIKWIWTRKEKEIAIVSHSGFLHGLLSSFGKDCCDDLKKELSIHLSNCELRSMVIVDRGNLGTDSAETTNYPGKVPEGLDNPSG

SEQ ID NO: 47188 - protein, 192 aa, Arabidopsis thaliana
  peptide (1)..(192): Ceres Seq. ID no. 13588512
MLRTIQTAVGAFGGEEDTNGADATPLMVANAGSSDRPAISSLNSPPFLAVELCRETMGDHPCDRRRSVTEYKALFPAIDFSIIETDNDVLWKPSPRESLEEVAARGVEFIKWIWTRKEKEIAIVSHSGFLHGLLSSFGKDCCDDLKKELSIHLSNCELRSMVIVDRGNLGTDSAETTNYPGKVPEGLDNPSG

SEQ ID NO: 47189 - protein, 166 aa, Arabidopsis thaliana
  peptide (1)..(166): Ceres Seq. ID no. 13588513
MVANAGSSDRPAISSLNSPPFLAVELCRETMGDHPCDRRRSVTEYKALFPAIDFSIIETDNDVLWKPSPRESLEEVAARGVEFIKWIWTRKEKEIAIVSHSGFLHGLLSSFGKDCCDDLKKELSIHLSNCELRSMVIVDRGNLGTDSAETTNYPGKVPEGLDNPSG

SEQ ID NO: 47190 - DNA, 1509 bp, Arabidopsis thaliana; identical to SEQ ID NO: 36168
  misc_feature (1)..(1509): Ceres Seq. ID no. 12602368
  misc_feature (1)..(1509): Ortholog of  Ceres SEQ ID NO 14308586 as cited in SEQ ID NO 55143
  misc_feature (1)..(1509): Ortholog of  Ceres SEQ ID NO 14314308 as cited in SEQ ID NO 57259
  misc_feature (1)..(1509): Ortholog of  Ceres SEQ ID NO 15226216 as cited in SEQ ID NO 62291

SEQ ID NO: 47191 - protein, 341 aa, Arabidopsis thaliana; identical to SEQ ID NO: 36169
  peptide (1)..(341): Ceres Seq. ID no. 12602369

SEQ ID NO: 47192 - protein, 326 aa, Arabidopsis thaliana; identical to SEQ ID NO: 36170
  peptide (1)..(326): Ceres Seq. ID no. 12602370

SEQ ID NO: 47193 - protein, 286 aa, Arabidopsis thaliana; identical to SEQ ID NO: 36171
  peptide (1)..(286): Ceres Seq. ID no. 12602371

SEQ ID NO: 47194 - DNA, 6117 bp, Arabidopsis thaliana; identical to SEQ ID NO: 40078
  misc_feature (1)..(6117): Ceres Seq. ID no. 12639310
  misc_feature (1)..(6117): Ortholog of  Ceres SEQ ID NO 15174712 as cited in SEQ ID NO 52965
  misc_feature (1)..(6117): Ortholog of  Ceres SEQ ID NO 15175476 as cited in SEQ ID NO 53735

SEQ ID NO: 47195 - protein, 1916 aa, Arabidopsis thaliana; identical to SEQ ID NO: 40079
  peptide (1)..(1916): Ceres Seq. ID no. 12639311

SEQ ID NO: 47196 - protein, 1859 aa, Arabidopsis thaliana; identical to SEQ ID NO: 40080
  peptide (1)..(1859): Ceres Seq. ID no. 12639312

SEQ ID NO: 47197 - protein, 1850 aa, Arabidopsis thaliana; identical to SEQ ID NO: 40081
  peptide (1)..(1850): Ceres Seq. ID no. 12639313

SEQ ID NO: 47198 - DNA, 2070 bp, Arabidopsis thaliana; identical to SEQ ID NO: 44648
  misc_feature (1)..(2070): Ceres Seq. ID no. 12455389
  misc_feature (1)..(2070): Ortholog of  Ceres SEQ ID NO 15179739 as cited in SEQ ID NO 62016

SEQ ID NO: 47199 - protein, 525 aa, Arabidopsis thaliana; identical to SEQ ID NO: 44649
  peptide (1)..(525): Ceres Seq. ID no. 12455390

SEQ ID NO: 47200 - protein, 442 aa, Arabidopsis thaliana; identical to SEQ ID NO: 44650
  peptide (1)..(442): Ceres Seq. ID no. 12455391

SEQ ID NO: 47201 - protein, 298 aa, Arabidopsis thaliana; identical to SEQ ID NO: 44651
  peptide (1)..(298): Ceres Seq. ID no. 12455392

SEQ ID NO: 47202 - DNA, 1071 bp, Arabidopsis thaliana
  misc_feature (1)..(1071): Ceres Seq. ID no. 12591607
  misc_feature (1)..(1071): Ortholog of  Ceres SEQ ID NO 13582619 as cited in SEQ ID NO 56520
  misc_feature (1)..(1071): Ortholog of  Ceres SEQ ID NO 13660872 as cited in SEQ ID NO 60830
atggggaaaactaacttggcacctggttttcggtttcatccgactgatgttgaacttgtgagatactacttgaagaggaaagttatgggaaaaaagttccaagttgatgccattgctgaggtcgacatttacaagttcgaacctcctgatttacccgacaaatcatgtctagggactggagatcttaagtggtacttcttctgtccaagagaaaagaagtatcccaaaggcggtaaggcaaaccgctctactgaatgtggttactggaagaccacagggagagacagagatgtttcttataatgacgaagtcactgggaagataagaactctgatttatcactacgggaaaatacctcgcggtgatcggactgattgggtcatacatgaatatagacttgaagacaaagtactggctcaaaagaatgttcctcaggatacttatgtgctttgcgttctctttaagaaaaatggacttggaccaagacatggatctcaatatggtgctccatttaaggaagaggattggagtgataaggaagaagaatatactcagaatcatcttgtagctggtcctagtaaagaaaccagtctagctgctaaggcctcacactcgtacgctcctaaggatggtttgacaggagtgatctcagaatcttgcgtctctgatgtgccgccactaactgccacagtgcttccacctctaacaagtgatgttatagcttacaatcccttttcttcttcacctcttcttgaggttcctcaagtatctctcgatggtggcgagttaaattcgatgcttgatctcttttctgttgacaatgacgactgtttacttttcgacgatttcgactaccataatgaggtaagacatcctgatggttttgtaaacaaggaagctccggtgttcttaggagatggcaatttcagtggaatgtttgacctgagcaatgaccaagtcgtagagctacaggatctgatacagtcacccactcctcatcctccttctcctccagctcaagctagtattcctgatgactcaagaagcaacggtcagactaaggacgattaa

SEQ ID NO: 47203 - protein, 356 aa, Arabidopsis thaliana
  peptide (1)..(356): Ceres Seq. ID no. 12591608
MGKTNLAPGFRFHPTDVELVRYYLKRKVMGKKFQVDAIAEVDIYKFEPPDLPDKSCLGTGDLKWYFFCPREKKYPKGGKANRSTECGYWKTTGRDRDVSYNDEVTGKIRTLIYHYGKIPRGDRTDWVIHEYRLEDKVLAQKNVPQDTYVLCVLFKKNGLGPRHGSQYGAPFKEEDWSDKEEEYTQNHLVAGPSKETSLAAKASHSYAPKDGLTGVISESCVSDVPPLTATVLPPLTSDVIAYNPFSSSPLLEVPQVSLDGGELNSMLDLFSVDNDDCLLFDDFDYHNEVRHPDGFVNKEAPVFLGDGNFSGMFDLSNDQVVELQDLIQSPTPHPPSPPAQASIPDDSRSNGQTKDD

SEQ ID NO: 47204 - protein, 328 aa, Arabidopsis thaliana
  peptide (1)..(328): Ceres Seq. ID no. 12591609
MGKKFQVDAIAEVDIYKFEPPDLPDKSCLGTGDLKWYFFCPREKKYPKGGKANRSTECGYWKTTGRDRDVSYNDEVTGKIRTLIYHYGKIPRGDRTDWVIHEYRLEDKVLAQKNVPQDTYVLCVLFKKNGLGPRHGSQYGAPFKEEDWSDKEEEYTQNHLVAGPSKETSLAAKASHSYAPKDGLTGVISESCVSDVPPLTATVLPPLTSDVIAYNPFSSSPLLEVPQVSLDGGELNSMLDLFSVDNDDCLLFDDFDYHNEVRHPDGFVNKEAPVFLGDGNFSGMFDLSNDQVVELQDLIQSPTPHPPSPPAQASIPDDSRSNGQTKDD

SEQ ID NO: 47205 - DNA, 1389 bp, Arabidopsis thaliana
  misc_feature (1)..(1389): Ceres Seq. ID no. 13592556
  misc_feature (1)..(1389): Ortholog of  Ceres SEQ ID NO 15177270 as cited in SEQ ID NO 51703
agacacagagagataagagagagtctgtgtaatcctctcaaagacaaagaagaagattatgttaccctcaagaaaaactaagagagtcttctcctgtgactttactccgggaagaaaacgccgacgatgtgttgttgttccttcctctgtttctccggtaccggaaaacacaaccggagccgatttgctagattcaattccagacgatcttgttatctctatactttgtaaacttggctctacttctcgatgtcctgctgatttcatcaacgttttgctgacatgtaagagattaaaaggattagctatgaatcctattgtgttgtcgagattatctcctaaagctatcgctgttaaagctcataattggtcggaatattctcaccggtttttaaaaaggtgtgtcgacgccggaagtctcgaagcttgttacactctaggaatgattcggttttattgtttacaaaacagaggaaacggcgcgtcgttaatggctaaagccgcgattagttctcacgcgccggcgttatattccttagcagtgattcagttcaacggaagcggtggttcaaagaatgataaagatcttagagccggtgtggctttatgcgcgcgtgccgcttttcttggacacgtcgacgcgctacgtgagctaggtcactgtcttcaagatggttatggagttcctcaaaacgtctctgaaggtaggaggtttttagttcaagccaacgctcgtgaactcgccgccgttttatcttccggtatacaagctaggtcaacgtggctttctttatcacagccaccacctccggttgttcctaaccatggtcaacaaacttgtcctttgcttagtgattttggatgtaatgtaccggcaccggaaacacatcccgcgaataggtttttagcggattggttcgctgttcgcggcggagattgtcccggagatgggttgagattgtgttcacacgctggttgtggacgaccggagacgaggaagcatgagtttaggagatgttcggtttgtggcgttgttaattattgttcacgcgcttgtcaagctttagattggaaactccggcataaaatggattgtgctccggtgcaacggtggctagaggaaggtgacggtggtgaaggtaacgttcagattgacggaaatggtaacggtgataatgttttgcttccaatgagttaacggcaatgtaacggctgctttgaatagtaaaaaaaaacgacgagagatgaggtaaacggaagctagtttcgtttttttttttttgctattagtagaaaagattaggataaaaaattactatcgagtagagtaatttttgtaattccaatctattgtaaagaagagttataaaatgaacggcttttattttt

SEQ ID NO: 47206 - protein, 379 aa, Arabidopsis thaliana
  peptide (1)..(379): Ceres Seq. ID no. 15221119
MLPSRKTKRVFSCDFTPGRKRRRCVVVPSSVSPVPENTTGADLLDSIPDDLVISILCKLGSTSRCPADFINVLLTCKRLKGLAMNPIVLSRLSPKAIAVKAHNWSEYSHRFLKRCVDAGSLEACYTLGMIRFYCLQNRGNGASLMAKAAISSHAPALYSLAVIQFNGSGGSKNDKDLRAGVALCARAAFLGHVDALRELGHCLQDGYGVPQNVSEGRRFLVQANARELAAVLSSGIQARSTWLSLSQPPPPVVPNHGQQTCPLLSDFGCNVPAPETHPANRFLADWFAVRGGDCPGDGLRLCSHAGCGRPETRKHEFRRCSVCGVVNYCSRACQALDWKLRHKMDCAPVQRWLEEGDGGEGNVQIDGNGNGDNVLLPMS

SEQ ID NO: 47207 - protein, 296 aa, Arabidopsis thaliana
  peptide (1)..(296): Ceres Seq. ID no. 15221120
MNPIVLSRLSPKAIAVKAHNWSEYSHRFLKRCVDAGSLEACYTLGMIRFYCLQNRGNGASLMAKAAISSHAPALYSLAVIQFNGSGGSKNDKDLRAGVALCARAAFLGHVDALRELGHCLQDGYGVPQNVSEGRRFLVQANARELAAVLSSGIQARSTWLSLSQPPPPVVPNHGQQTCPLLSDFGCNVPAPETHPANRFLADWFAVRGGDCPGDGLRLCSHAGCGRPETRKHEFRRCSVCGVVNYCSRACQALDWKLRHKMDCAPVQRWLEEGDGGEGNVQIDGNGNGDNVLLPMS

SEQ ID NO: 47208 - protein, 251 aa, Arabidopsis thaliana
  peptide (1)..(251): Ceres Seq. ID no. 15221121
MIRFYCLQNRGNGASLMAKAAISSHAPALYSLAVIQFNGSGGSKNDKDLRAGVALCARAAFLGHVDALRELGHCLQDGYGVPQNVSEGRRFLVQANARELAAVLSSGIQARSTWLSLSQPPPPVVPNHGQQTCPLLSDFGCNVPAPETHPANRFLADWFAVRGGDCPGDGLRLCSHAGCGRPETRKHEFRRCSVCGVVNYCSRACQALDWKLRHKMDCAPVQRWLEEGDGGEGNVQIDGNGNGDNVLLPMS

SEQ ID NO: 47209 - DNA, 743 bp, Arabidopsis thaliana; identical to SEQ ID NO: 36037
  misc_feature (1)..(743): Ceres Seq. ID no. 13592706
  misc_feature (1)..(743): Ortholog of  Ceres SEQ ID NO 15179194 as cited in SEQ ID NO 0

SEQ ID NO: 47210 - protein, 198 aa, Arabidopsis thaliana; identical to SEQ ID NO: 36038
  peptide (1)..(198): Ceres Seq. ID no. 13592707

SEQ ID NO: 47211 - protein, 181 aa, Arabidopsis thaliana; identical to SEQ ID NO: 36039
  peptide (1)..(181): Ceres Seq. ID no. 13592708

SEQ ID NO: 47212 - protein, 177 aa, Arabidopsis thaliana; identical to SEQ ID NO: 36040
  peptide (1)..(177): Ceres Seq. ID no. 13592709

SEQ ID NO: 47213 - DNA, 2281 bp, Arabidopsis thaliana
  misc_feature (1)..(2281): Ceres Seq. ID no. 12591614
  misc_feature (1)..(2281): Ortholog of  Ceres SEQ ID NO 14303276 as cited in SEQ ID NO 1264
  misc_feature (1)..(2281): Ortholog of  Ceres SEQ ID NO 15170536 as cited in SEQ ID NO 52791
  misc_feature (1)..(2281): Ortholog of  Ceres SEQ ID NO 15171813 as cited in SEQ ID NO 57309
  misc_feature (1)..(2281): Ortholog of  Ceres SEQ ID NO 14314378 as cited in SEQ ID NO 57601
  misc_feature (1)..(2281): Ortholog of  Ceres SEQ ID NO 12465083 as cited in SEQ ID NO 68239
cacacaatcataaacacaacaacactcacaaattctcttaaagctcacagacgaattctttctatttttaatctttccggcgaacaattctgatctctaataatggcgggtaaaggtgaaggtccagctatcggtatcgatctcggtacaacctactcttgcgtcggtgtttggcaacatgaccgcgtcgaaatcatcgccaacgatcaaggcaaccgcaccactccttcctacgttgctttcactgacagcgagcgtctcatcggggatgctgccaagaatcaagtcgccatgaaccctaccaacaccgtcttcgatgctaagcgtctaatcggaagaagatacagtgatccctctgttcaagcggataagagtcactggccttttaaggttgtttccggtccaggtgagaagcctatgattgtggttaaccacaagggagaggagaaacagttctctgctgaggaaatctcgtcgatggttcttattaagatgcgggagattgcagaagctttccttggttctcctgttaagaacgctgtcgttacagttcctgcttatttcaacgactctcagcgtcaagcgactaaggacgctggagttatctctggtctcaacgtgatgcgtatcatcaatgagccaactgctgctgctattgcttacggtcttgacaagaaggcgtcgagtgttggcgagaagaatgttttgatctttgatttgggaggtggtacttttgatgtgtctttgcttacgattgaggaaggtatctttgaagtcaaggcaactgctggtgacacgcatcttggtggtgaggacttcgacaacaggatggttaatcattttgttcaggagtttaagaggaagaacaagaaggatattactgggaacccgagagctttgaggaggcttaggacagcttgtgagcgggcgaagagaactctttcttcgactgctcagacgactatagagattgactctctttttgagggtattgatttctacactaccatcactcgtgctaggttcgaggagctcaacatggatttgtttaggaagtgtatggagccagtggagaagtgtttgagggatgctaagatggacaagagcagtgttcatgatgttgttcttgttggtggctctacaaggattcccaaagtgcagcagcttttgcaagacttcttcaatgggaaagagctctgtaaaagcattaacccggacgaggctgttgcttacggagcagctgtgcaagctgcaatcttgagcggtgaagggaatgagaaggtccaggacttgttacttcttgatgtcactcctctgtccttgggtttggaaactgccggtggtgttatgactgttttgattccgaggaacaccacaattccgaccaagaaagagcagatattctctacctattcagacaaccagcccggtgtactgatccaggtctacgaaggagagagggcacgaacaaaggacaacaaccttttgggaaagttcgagctcagtggtataccacctgctccacgaggtgtaccgcagattactgtctgtttcgacatcgacgccaatggtatcctgaatgtgtcggctgaggacaagacgactggtcagaagaacaagatcacaatcacaaacgacaagggaaggttatcaaaggaagagatcgagaagatggtacaagaggcagagaagtacaaggctgaggatgaagaacacaagaagaaggtggatgcaaagaacgctctcgagaactatgcatacaacatgaggaacacgatcaaggacgagaagatcgcatctaagcttgacgcagctgacaagaagaagattgaggatgcaatcgaccaagctattgaatggttagatgggaatcaactggctgaggcagatgagttcgaggataagatgaaggagctcgagtctctttgcaaccctattattgcaagaatgtaccaaggagctgggcctgatatgggtggtgcaggaggaatggatgacgacacacctgctggtggtagcggcggtgctggcccaaagattgaagaagttgattaagccttttggcttttgtttactctgtttgcttgagattctagttggtttcttgttcttagttttatctttctatgtcactctgaaactggtgtgtgatcattttgatgctttaagaatttagctttaccgtttttaaaactcgctctgacctatgaaagacgactgggcataatactctacacgaaatatagtagacaaagtgaaagaagttaagttcatggtttaa

SEQ ID NO: 47214 - protein, 650 aa, Arabidopsis thaliana
  peptide (1)..(650): Ceres Seq. ID no. 12591615
MAGKGEGPAIGIDLGTTYSCVGVWQHDRVEIIANDQGNRTTPSYVAFTDSERLIGDAAKNQVAMNPTNTVFDAKRLIGRRYSDPSVQADKSHWPFKVVSGPGEKPMIVVNHKGEEKQFSAEEISSMVLIKMREIAEAFLGSPVKNAVVTVPAYFNDSQRQATKDAGVISGLNVMRIINEPTAAAIAYGLDKKASSVGEKNVLIFDLGGGTFDVSLLTIEEGIFEVKATAGDTHLGGEDFDNRMVNHFVQEFKRKNKKDITGNPRALRRLRTACERAKRTLSSTAQTTIEIDSLFEGIDFYTTITRARFEELNMDLFRKCMEPVEKCLRDAKMDKSSVHDVVLVGGSTRIPKVQQLLQDFFNGKELCKSINPDEAVAYGAAVQAAILSGEGNEKVQDLLLLDVTPLSLGLETAGGVMTVLIPRNTTIPTKKEQIFSTYSDNQPGVLIQVYEGERARTKDNNLLGKFELSGIPPAPRGVPQITVCFDIDANGILNVSAEDKTTGQKNKITITNDKGRLSKEEIEKMVQEAEKYKAEDEEHKKKVDAKNALENYAYNMRNTIKDEKIASKLDAADKKKIEDAIDQAIEWLDGNQLAEADEFEDKMKELESLCNPIIARMYQGAGPDMGGAGGMDDDTPAGGSGGAGPKIEEVD

SEQ ID NO: 47215 - protein, 587 aa, Arabidopsis thaliana
  peptide (1)..(587): Ceres Seq. ID no. 12591616
MNPTNTVFDAKRLIGRRYSDPSVQADKSHWPFKVVSGPGEKPMIVVNHKGEEKQFSAEEISSMVLIKMREIAEAFLGSPVKNAVVTVPAYFNDSQRQATKDAGVISGLNVMRIINEPTAAAIAYGLDKKASSVGEKNVLIFDLGGGTFDVSLLTIEEGIFEVKATAGDTHLGGEDFDNRMVNHFVQEFKRKNKKDITGNPRALRRLRTACERAKRTLSSTAQTTIEIDSLFEGIDFYTTITRARFEELNMDLFRKCMEPVEKCLRDAKMDKSSVHDVVLVGGSTRIPKVQQLLQDFFNGKELCKSINPDEAVAYGAAVQAAILSGEGNEKVQDLLLLDVTPLSLGLETAGGVMTVLIPRNTTIPTKKEQIFSTYSDNQPGVLIQVYEGERARTKDNNLLGKFELSGIPPAPRGVPQITVCFDIDANGILNVSAEDKTTGQKNKITITNDKGRLSKEEIEKMVQEAEKYKAEDEEHKKKVDAKNALENYAYNMRNTIKDEKIASKLDAADKKKIEDAIDQAIEWLDGNQLAEADEFEDKMKELESLCNPIIARMYQGAGPDMGGAGGMDDDTPAGGSGGAGPKIEEVD

SEQ ID NO: 47216 - protein, 545 aa, Arabidopsis thaliana
  peptide (1)..(545): Ceres Seq. ID no. 12591617
MIVVNHKGEEKQFSAEEISSMVLIKMREIAEAFLGSPVKNAVVTVPAYFNDSQRQATKDAGVISGLNVMRIINEPTAAAIAYGLDKKASSVGEKNVLIFDLGGGTFDVSLLTIEEGIFEVKATAGDTHLGGEDFDNRMVNHFVQEFKRKNKKDITGNPRALRRLRTACERAKRTLSSTAQTTIEIDSLFEGIDFYTTITRARFEELNMDLFRKCMEPVEKCLRDAKMDKSSVHDVVLVGGSTRIPKVQQLLQDFFNGKELCKSINPDEAVAYGAAVQAAILSGEGNEKVQDLLLLDVTPLSLGLETAGGVMTVLIPRNTTIPTKKEQIFSTYSDNQPGVLIQVYEGERARTKDNNLLGKFELSGIPPAPRGVPQITVCFDIDANGILNVSAEDKTTGQKNKITITNDKGRLSKEEIEKMVQEAEKYKAEDEEHKKKVDAKNALENYAYNMRNTIKDEKIASKLDAADKKKIEDAIDQAIEWLDGNQLAEADEFEDKMKELESLCNPIIARMYQGAGPDMGGAGGMDDDTPAGGSGGAGPKIEEVD

SEQ ID NO: 47217 - DNA, 2078 bp, Arabidopsis thaliana
  misc_feature (1)..(2078): Ceres Seq. ID no. 12601002
  misc_feature (1)..(2078): Ortholog of  Ceres SEQ ID NO 13579556 as cited in SEQ ID NO 53743
atcatcaaaaaacacctcaaagaattattcattcaggcatcttctcaaatttttgtttgtgaaaaaaacccacatcaaaagatctctcatttattcgtttcgtttctgctgttttgagtgtcgggttcgttttagctgtaatctttttttccggcgttcgatttgaaaaaatccggggaacaggtgatcggaatcacggctatacacgggatatcacggggtgttagctcacatgtccatattgtccgacagaagggttgtttaatcgaaactaatcctttgccgcacggaggacgtggagctctgccgtctgaaggcggcagcccttccgatctcctctttctcgccggtggcggttccagctttaacttcttttcctttaggttttaggagttagggtttgttagtgttttttccttcttctttttttggtgctcttgaatcgcttttttcttgggggaagttttttcttttgctcttcgaaatttgtcttttttgagaatgttgaaaatcaaaagagttccgaccgttgtttcgaactaccagaaggacgatggagcggaggatcccgtcggctgtggacggaattgcctcggcgcttgttgccttaacggggctaggcttccattgtatgcatgtaagaatctggtaaaatccggagagaagcttgtaatcagtcatgaggctatagagcctcctgtagcttttctcgagtcccttgttctcggagagtgggaggataggttccaaagaggactttttcgctatgatgtcactgcctgcgaaaccaaagttatcccggggaagtatggtttcgttgctcagcttaacgagggtcgtcacttgaagaagaggccaactgagttccgtgtagataaggtgttgcagtcttttgatggcagcaaattcaacttcactaaagttggccaagaagagttgctcttccagtttgaagctggtgaagatgcccaagttcagttcttcccttgcatgcctattgaccctgagaattctcccagtgttgttgccatcaatgttagtccgatagagtatggccatgtgctgctgattcctcgtgttcttgactgcttgcctcaaaggatcgatcacaaaagccttttgcttgcagttcacatggctgctgaggctgctaatccatacttcagactcggttacaacagcttgggtgcttttgccactatcaatcatctccactttcaggcttattacttggccatgcctttcccactggagaaagctcctaccaagaagataactaccactgttagtggtgtcaaaatctcagagcttctaagttaccctgtgagaagtcttctctttgaaggtggaagctctatgcaagaactatctgatactgtttcagactgctgtgtttgccttcaaaacaacaacattcctttcaacattctcatctctgattgtggaaggcagatcttcttaatgccacagtgttacgcagagaaacaggctctaggtgaagtgagcccggaggtattggaaacacaagtgaacccagccgtgtgggagataagtggtcacatggtactgaagaggaaagaggattacgaaggtgcttcagaggataacgcgtggaggctccttgcggaagcttctctgtcggaggaaaggtttaaggaggttactgctctcgcctttgaagccataggttgtagtaaccaagaggaggatcttgaaggaaccatagttcatcagcaaaactctagtggcaatgttaaccagaaaagcaacagaacccatggaggtccgatcacaaatgggacggccgccgagtgccttgtccttcagtgaacaatatggtgacttggtggtttgtatgtataattaaaagcctaaataagcaaactctctttgtagttgcatttgaagcttcttggtttatgtatgatggttgtgggcattttgtgcctagacttctggttctttgttttttgttatgagttggtgtttatgaattatatatgttcttcactaatatgattattatttgtatagatttgattattcaaaggatatgtcttaagaaggggttcaggttc

SEQ ID NO: 47218 - protein, 442 aa, Arabidopsis thaliana
  peptide (1)..(442): Ceres Seq. ID no. 12601003
MLKIKRVPTVVSNYQKDDGAEDPVGCGRNCLGACCLNGARLPLYACKNLVKSGEKLVISHEAIEPPVAFLESLVLGEWEDRFQRGLFRYDVTACETKVIPGKYGFVAQLNEGRHLKKRPTEFRVDKVLQSFDGSKFNFTKVGQEELLFQFEAGEDAQVQFFPCMPIDPENSPSVVAINVSPIEYGHVLLIPRVLDCLPQRIDHKSLLLAVHMAAEAANPYFRLGYNSLGAFATINHLHFQAYYLAMPFPLEKAPTKKITTTVSGVKISELLSYPVRSLLFEGGSSMQELSDTVSDCCVCLQNNNIPFNILISDCGRQIFLMPQCYAEKQALGEVSPEVLETQVNPAVWEISGHMVLKRKEDYEGASEDNAWRLLAEASLSEERFKEVTALAFEAIGCSNQEEDLEGTIVHQQNSSGNVNQKSNRTHGGPITNGTAAECLVLQ

SEQ ID NO: 47219 - protein, 279 aa, Arabidopsis thaliana
  peptide (1)..(279): Ceres Seq. ID no. 12601004
MPIDPENSPSVVAINVSPIEYGHVLLIPRVLDCLPQRIDHKSLLLAVHMAAEAANPYFRLGYNSLGAFATINHLHFQAYYLAMPFPLEKAPTKKITTTVSGVKISELLSYPVRSLLFEGGSSMQELSDTVSDCCVCLQNNNIPFNILISDCGRQIFLMPQCYAEKQALGEVSPEVLETQVNPAVWEISGHMVLKRKEDYEGASEDNAWRLLAEASLSEERFKEVTALAFEAIGCSNQEEDLEGTIVHQQNSSGNVNQKSNRTHGGPITNGTAAECLVLQ

SEQ ID NO: 47220 - protein, 231 aa, Arabidopsis thaliana
  peptide (1)..(231): Ceres Seq. ID no. 12601005
MAAEAANPYFRLGYNSLGAFATINHLHFQAYYLAMPFPLEKAPTKKITTTVSGVKISELLSYPVRSLLFEGGSSMQELSDTVSDCCVCLQNNNIPFNILISDCGRQIFLMPQCYAEKQALGEVSPEVLETQVNPAVWEISGHMVLKRKEDYEGASEDNAWRLLAEASLSEERFKEVTALAFEAIGCSNQEEDLEGTIVHQQNSSGNVNQKSNRTHGGPITNGTAAECLVLQ

SEQ ID NO: 47221 - DNA, 1184 bp, Arabidopsis thaliana; identical to SEQ ID NO: 35315
  misc_feature (1)..(1184): Ceres Seq. ID no. 13488582
  misc_feature (1)..(1184): Ortholog of  Ceres SEQ ID NO 14314371 as cited in SEQ ID NO 52260

SEQ ID NO: 47222 - protein, 246 aa, Arabidopsis thaliana; identical to SEQ ID NO: 35316
  peptide (1)..(246): Ceres Seq. ID no. 13488583

SEQ ID NO: 47223 - protein, 191 aa, Arabidopsis thaliana; identical to SEQ ID NO: 35317
  peptide (1)..(191): Ceres Seq. ID no. 13488584

SEQ ID NO: 47224 - protein, 147 aa, Arabidopsis thaliana; identical to SEQ ID NO: 35318
  peptide (1)..(147): Ceres Seq. ID no. 13488585

SEQ ID NO: 47225 - DNA, 1585 bp, Arabidopsis thaliana
  misc_feature (1)..(1585): Ceres Seq. ID no. 12591622
  misc_feature (1)..(1585): Ortholog of  Ceres SEQ ID NO 13599900 as cited in SEQ ID NO 531
  misc_feature (1)..(1585): Ortholog of  Ceres SEQ ID NO 13659971 as cited in SEQ ID NO 67565
  misc_feature (1)..(1585): Ortholog of  Ceres SEQ ID NO 13500385 as cited in SEQ ID NO 67583
gtcttgcttcttctttacccttttcttgtttccaatcaaatcctctaaagtttcgttctttgttctaagttttctgaaggagtgatatttgtttgtggtgtggttagagaaatgaatcggagacagcaagtgaaacgtagagtaggtaaatatgaagttggaagaacaattggagaaggaacgtttgctaaagttaagtttgctagaaactctgaaactggagaacctgttgctctcaagattcttgataaagagaaagttctcaagcataaaatggctgaacagattagaagagagatagctactatgaagttgataaaacatccaaatgttgttcaattatatgaggtgatggcaagtaagacgaaaatatttatcatcttggagtatgttacaggaggagaactctttgataagattgtaaatgatgggcggatgaaagaagatgaggcgcggagatatttccaacagcttatacatgctgtggactactgtcatagcagaggggtctaccatagagacctcaagcctgaaaatttactattggactcctatggaaacctcaagatctcagattttggattaagtgctttgtcccaacaagtcagggatgatggactcttgcatacatcgtgtggaacaccaaactacgttgctcctgaggttctcaatgatagaggctatgatggagcaacagctgacatgtggtcatgcggtgttgtactctatgtcctgcttgcaggttacttaccttttgatgattctaatctaatgaatctttataaaaaaatatcatctggtgaattcaactgtcctccgtggctctcactcggtgccatgaaactcatcactagaatcttagatccgaatccgatgactcgtgtaacaccgcaagaggttttcgaagatgaatggttcaagaaagattacaagccacctgttttcgaggagagggatgattcaaacatggacgatattgatgctgttttcaaggactctgaggaacatcttgttactgagaagagagaagaacagccagcggcgatcaatgccttcgagatcatttcaatgtcaaggggacttaacctagagaatctgtttgatccagaacaggaatttaagagggaaacaaggataacattgagaggaggcgcgaatgagatcatcgagaagatagaagaagctgcaaagcctctcggtttcgatgttcaaaagaagaactacaagatgaggcttgagaatgtgaaggctggaagaaaggggaatctcaatgtagcgacagagatattccaagtagcgccaagtcttcatatggttcaagtatcgaagtcgaaaggagacactctcgaatttcacaagttctataagaagctctctaattctctggagcaagtagtctggacgaataacgaagttaagaaagaaacagcaaagtgatgtatgagagttttcttttgggacaattcttgctttctttgtgtataagagcttttttgctttaccggctactttgtgtggatgatgagaaagggagtgggattggttttgtgtaaaagaaaggtgtaaatatgaactgcattactcg

SEQ ID NO: 47226 - protein, 441 aa, Arabidopsis thaliana
  peptide (1)..(441): Ceres Seq. ID no. 12591623
MNRRQQVKRRVGKYEVGRTIGEGTFAKVKFARNSETGEPVALKILDKEKVLKHKMAEQIRREIATMKLIKHPNVVQLYEVMASKTKIFIILEYVTGGELFDKIVNDGRMKEDEARRYFQQLIHAVDYCHSRGVYHRDLKPENLLLDSYGNLKISDFGLSALSQQVRDDGLLHTSCGTPNYVAPEVLNDRGYDGATADMWSCGVVLYVLLAGYLPFDDSNLMNLYKKISSGEFNCPPWLSLGAMKLITRILDPNPMTRVTPQEVFEDEWFKKDYKPPVFEERDDSNMDDIDAVFKDSEEHLVTEKREEQPAAINAFEIISMSRGLNLENLFDPEQEFKRETRITLRGGANEIIEKIEEAAKPLGFDVQKKNYKMRLENVKAGRKGNLNVATEIFQVAPSLHMVQVSKSKGDTLEFHKFYKKLSNSLEQVVWTNNEVKKETAK

SEQ ID NO: 47227 - protein, 387 aa, Arabidopsis thaliana
  peptide (1)..(387): Ceres Seq. ID no. 12591624
MAEQIRREIATMKLIKHPNVVQLYEVMASKTKIFIILEYVTGGELFDKIVNDGRMKEDEARRYFQQLIHAVDYCHSRGVYHRDLKPENLLLDSYGNLKISDFGLSALSQQVRDDGLLHTSCGTPNYVAPEVLNDRGYDGATADMWSCGVVLYVLLAGYLPFDDSNLMNLYKKISSGEFNCPPWLSLGAMKLITRILDPNPMTRVTPQEVFEDEWFKKDYKPPVFEERDDSNMDDIDAVFKDSEEHLVTEKREEQPAAINAFEIISMSRGLNLENLFDPEQEFKRETRITLRGGANEIIEKIEEAAKPLGFDVQKKNYKMRLENVKAGRKGNLNVATEIFQVAPSLHMVQVSKSKGDTLEFHKFYKKLSNSLEQVVWTNNEVKKETAK

SEQ ID NO: 47228 - protein, 376 aa, Arabidopsis thaliana
  peptide (1)..(376): Ceres Seq. ID no. 12591625
MKLIKHPNVVQLYEVMASKTKIFIILEYVTGGELFDKIVNDGRMKEDEARRYFQQLIHAVDYCHSRGVYHRDLKPENLLLDSYGNLKISDFGLSALSQQVRDDGLLHTSCGTPNYVAPEVLNDRGYDGATADMWSCGVVLYVLLAGYLPFDDSNLMNLYKKISSGEFNCPPWLSLGAMKLITRILDPNPMTRVTPQEVFEDEWFKKDYKPPVFEERDDSNMDDIDAVFKDSEEHLVTEKREEQPAAINAFEIISMSRGLNLENLFDPEQEFKRETRITLRGGANEIIEKIEEAAKPLGFDVQKKNYKMRLENVKAGRKGNLNVATEIFQVAPSLHMVQVSKSKGDTLEFHKFYKKLSNSLEQVVWTNNEVKKETAK

SEQ ID NO: 47229 - DNA, 1565 bp, Arabidopsis thaliana
  misc_feature (1)..(1565): Ceres Seq. ID no. 13588273
  misc_feature (1)..(1565): Ortholog of  Ceres SEQ ID NO 14304000 as cited in SEQ ID NO 53798
  misc_feature (1)..(1565): Ortholog of  Ceres SEQ ID NO 14314782 as cited in SEQ ID NO 56830
  misc_feature (1)..(1565): Ortholog of  Ceres SEQ ID NO 14303568 as cited in SEQ ID NO 65364
tcgattggccaaatcggccctcgagagacttgtgagagatccccaaaaaaatggcatggcttgctagatccattgcgaattctctgaagatcgatgaggaagaatatgatcaaaaggaaacgattaagaccaattcgattgaaaattccggctcagatcaaccgtcttcgccatcggtgttgcaaacacagtctccacgaggcgtgaaggaagacatctctgaactcaccaagaccttaagaagtcagctacggggcgttgcttctttcctcgcgccacctccttcttcttccgatacggcggatcatgtggatgaggagactcggaagtcatcggatctcgcggaaggtgatgaggatctgattgctggaatcaggaacgatttcgttgagatcggaggtagatttaagactgggatctcgaaactctctggaaacttaccggtatcgaagtttacaaatatggcttcgaatttcttgcaattgggatcggaaggtgtggattcgaagaaccgtgatgttgcgattggaaatgcaattggtgtgacggaggaagtagttttgtttgctagagatcttgctctgcatcctgagacttggcttgattttccttttcctgacgaggatgataactttgatgactttgaaatgactgatgcccaatatgagcatgcgttggctgtggagaatcttgcatcgagtctggctgctttgaggattgagctttgtcctgcgtacatgagcgagtattgcttctggaggatttactttgtacttgtgcatcctatattcagcaaacatgatgccttgactctctcaactcctcaggtacttgaatcaagagcactattatctcacgagctgttgcgtaagagaaacaaagatacagtagtggtgccagagagtagtgatagaggagctgatagtgaaaatgtggaacctctttttcaacctactaatccttcacccaaatcagaaccagaacctgtgaaaacgatcactgtcgaaacaatacattcggctgagagatctgagtttgagacagagaagcacacagtcgagaccaaggaggtacaagttgttgataagcctgtcatcgaagaaagaccagcaccagcgtaccatgacaagccggtgcagagcctagtcactggttcttcacctagagttattgatgttcaagtggatgatgatgctgatgattggttgaaggatgaagataatgcaggaactgttagtgccaccaccaaccatcttgtgcaggatgttgatgaagatgtgtcgttcagtgatcttgaagaagacgacgatgatgtgcctgtaagttacaagaaataattcctgattccaaaagacctcaccattactccaaaaggctggctctggaagaataatgtcccacggctggtcaggtaagcgagacgaagatagaaatcaaacgatgggcttgaatgttgatgacgaacatggatgctatatttgtgatcctatacgttaattaaatttatgtttgtgaataccttttgtaaacgcttgccttttcaaaagatgcatggtttgttttgt

SEQ ID NO: 47230 - protein, 428 aa, Arabidopsis thaliana
  peptide (1)..(428): Ceres Seq. ID no. 13588274
MAWLARSIANSLKIDEEEYDQKETIKTNSIENSGSDQPSSPSVLQTQSPRGVKEDISELTKTLRSQLRGVASFLAPPPSSSDTADHVDEETRKSSDLAEGDEDLIAGIRNDFVEIGGRFKTGISKLSGNLPVSKFTNMASNFLQLGSEGVDSKNRDVAIGNAIGVTEEVVLFARDLALHPETWLDFPFPDEDDNFDDFEMTDAQYEHALAVENLASSLAALRIELCPAYMSEYCFWRIYFVLVHPIFSKHDALTLSTPQVLESRALLSHELLRKRNKDTVVVPESSDRGADSENVEPLFQPTNPSPKSEPEPVKTITVETIHSAERSEFETEKHTVETKEVQVVDKPVIEERPAPAYHDKPVQSLVTGSSPRVIDVQVDDDADDWLKDEDNAGTVSATTNHLVQDVDEDVSFSDLEEDDDDVPVSYKK

SEQ ID NO: 47231 - protein, 291 aa, Arabidopsis thaliana
  peptide (1)..(291): Ceres Seq. ID no. 13588275
MASNFLQLGSEGVDSKNRDVAIGNAIGVTEEVVLFARDLALHPETWLDFPFPDEDDNFDDFEMTDAQYEHALAVENLASSLAALRIELCPAYMSEYCFWRIYFVLVHPIFSKHDALTLSTPQVLESRALLSHELLRKRNKDTVVVPESSDRGADSENVEPLFQPTNPSPKSEPEPVKTITVETIHSAERSEFETEKHTVETKEVQVVDKPVIEERPAPAYHDKPVQSLVTGSSPRVIDVQVDDDADDWLKDEDNAGTVSATTNHLVQDVDEDVSFSDLEEDDDDVPVSYKK

SEQ ID NO: 47232 - protein, 229 aa, Arabidopsis thaliana
  peptide (1)..(229): Ceres Seq. ID no. 13588276
MTDAQYEHALAVENLASSLAALRIELCPAYMSEYCFWRIYFVLVHPIFSKHDALTLSTPQVLESRALLSHELLRKRNKDTVVVPESSDRGADSENVEPLFQPTNPSPKSEPEPVKTITVETIHSAERSEFETEKHTVETKEVQVVDKPVIEERPAPAYHDKPVQSLVTGSSPRVIDVQVDDDADDWLKDEDNAGTVSATTNHLVQDVDEDVSFSDLEEDDDDVPVSYKK

SEQ ID NO: 47233 - DNA, 1290 bp, Arabidopsis thaliana
  misc_feature (1)..(1290): Ceres Seq. ID no. 14307597
  misc_feature (1)..(1290): Ortholog of  Ceres SEQ ID NO 14310784 as cited in SEQ ID NO 58503
  misc_feature (1)..(1290): Ortholog of  Ceres SEQ ID NO 14312180 as cited in SEQ ID NO 59480
atgttaaacgttatgggaaccaaaagattaccgtttcccggttctgtttttgaccttatccattgtgctcgttgtagagtcccttggcatattgaaggtggtaaacttcttttggaattgaaccgtgctttgaggccgggtggtttctttgtctggtcagcgactccagtctatagaaagaacgaggaagattctggtatatggaaagcaatgtcggaactcacaaaggcaatgtgctggaagctggtgacaattaagaaagacaaactgaatgaggttggtgccgccatataccaaaagccaacttcaaataaatgttacaacaaaagacctcaaaatgagccacctctctgcaaggattccgatgatcaaaatgcagcctggaatgttccacttgaggcatgtatgcataaagtgacagaagattcatcaaagcgaggagcagtgtggccaaacatgtggccagagagggttgaaactgcgcctgagtggttggattcgcaggaaggtgtttatggaaaacctgcaccagaagatttcacagcagaccaagagaagtggaaaactattgtctcaaaggcataccttaatgacatgggaatcgattggtctaatgtgagaaacgtgatggacatgagagcagtctatggaggatttgctgctgcgttgaaggatttgaagttatgggtgatgaacgtggttcctgtggatgcgccagatacacttcccatcatatatgaacgtggtttatttggaatctatcatgactggtgtgaatcattcaacacttatcccagaacttacgaccttctccatgccgatcatcttttctctaccctgaggaagaggtgcaatttggtgtcggtaatggctgagattgatcggattcttaggccacaaggaactttcatcataagggatgacatggaaacattaggagaagttgagaaaatggtgaaatctatgaaatggaaggttaaaatgacgcagtccaaagacaatgaaggcttgctttcaattgaaaagtcatggtggcgtcctgaagaaactgagacaatcaaatcggcaatcgcttaaacaagtcagaaaagaaaagaaaagcatcacttgaatatagttcagtaaaaaagttggttctttcacgcctttaaggcttgcttatcaaattcatttgaccttgtttcttagtagtatttgtatcttttggctttgagaaaagttgtatacataaattctggaatcataccgttagctctcaaaatgtatacaagatgagttttgttttgttct

SEQ ID NO: 47234 - protein, 358 aa, Arabidopsis thaliana
  peptide (1)..(358): Ceres Seq. ID no. 14307598
MLNVMGTKRLPFPGSVFDLIHCARCRVPWHIEGGKLLLELNRALRPGGFFVWSATPVYRKNEEDSGIWKAMSELTKAMCWKLVTIKKDKLNEVGAAIYQKPTSNKCYNKRPQNEPPLCKDSDDQNAAWNVPLEACMHKVTEDSSKRGAVWPNMWPERVETAPEWLDSQEGVYGKPAPEDFTADQEKWKTIVSKAYLNDMGIDWSNVRNVMDMRAVYGGFAAALKDLKLWVMNVVPVDAPDTLPIIYERGLFGIYHDWCESFNTYPRTYDLLHADHLFSTLRKRCNLVSVMAEIDRILRPQGTFIIRDDMETLGEVEKMVKSMKWKVKMTQSKDNEGLLSIEKSWWRPEETETIKSAIA

SEQ ID NO: 47235 - protein, 354 aa, Arabidopsis thaliana
  peptide (1)..(354): Ceres Seq. ID no. 14307599
MGTKRLPFPGSVFDLIHCARCRVPWHIEGGKLLLELNRALRPGGFFVWSATPVYRKNEEDSGIWKAMSELTKAMCWKLVTIKKDKLNEVGAAIYQKPTSNKCYNKRPQNEPPLCKDSDDQNAAWNVPLEACMHKVTEDSSKRGAVWPNMWPERVETAPEWLDSQEGVYGKPAPEDFTADQEKWKTIVSKAYLNDMGIDWSNVRNVMDMRAVYGGFAAALKDLKLWVMNVVPVDAPDTLPIIYERGLFGIYHDWCESFNTYPRTYDLLHADHLFSTLRKRCNLVSVMAEIDRILRPQGTFIIRDDMETLGEVEKMVKSMKWKVKMTQSKDNEGLLSIEKSWWRPEETETIKSAIA

SEQ ID NO: 47236 - protein, 288 aa, Arabidopsis thaliana
  peptide (1)..(288): Ceres Seq. ID no. 14307600
MSELTKAMCWKLVTIKKDKLNEVGAAIYQKPTSNKCYNKRPQNEPPLCKDSDDQNAAWNVPLEACMHKVTEDSSKRGAVWPNMWPERVETAPEWLDSQEGVYGKPAPEDFTADQEKWKTIVSKAYLNDMGIDWSNVRNVMDMRAVYGGFAAALKDLKLWVMNVVPVDAPDTLPIIYERGLFGIYHDWCESFNTYPRTYDLLHADHLFSTLRKRCNLVSVMAEIDRILRPQGTFIIRDDMETLGEVEKMVKSMKWKVKMTQSKDNEGLLSIEKSWWRPEETETIKSAIA

SEQ ID NO: 47237 - DNA, 1532 bp, Arabidopsis thaliana
  misc_feature (1)..(1532): Ceres Seq. ID no. 13588277
  misc_feature (1)..(1532): Ortholog of  Ceres SEQ ID NO 13594345 as cited in SEQ ID NO 58043
  misc_feature (1)..(1532): Ortholog of  Ceres SEQ ID NO 13662880 as cited in SEQ ID NO 65422
  misc_feature (1)..(1532): Ortholog of  Ceres SEQ ID NO 12779098 as cited in SEQ ID NO 67698
  misc_feature (1)..(1532): Ortholog of  Ceres SEQ ID NO 13596180 as cited in SEQ ID NO 67941
  misc_feature (1)..(1532): Ortholog of  Ceres SEQ ID NO 13591190 as cited in SEQ ID NO 68044
  misc_feature (1)..(1532): Ortholog of  Ceres SEQ ID NO 13596089 as cited in SEQ ID NO 68373
gagtcctcacttctctcacccacaaagtcacagtaaccagaaacacgttccacatcctatgaatccaatcaaacctcagccactcggagtccgccacgtggtggccatgccttggccaggaagaggccacatcaacccaatgttaaacctctgcaaaagcctcgtccggcgagacccaaacctcaccgtcacattcgtcgtcaccgaagaatggctcgggttcatcgggtccgacccgaaacctaaccggatccatttcgccactctccccaacatcattccctccgagctcgtccgagccaacgacttcatcgccttcatcgacgccgtcctcaccagattagaagagccgttcgaacagctacttgaccgtctaaactctcctcccaccgcaatcatcgccgatacttacatcatttgggcagtacgtgtaggcacaaaaaggaatattccggtggcttctttctggactacgtcagccacgattctctccctcttcattaactccgatcttctcgcaagtcacggccattttccgatcgaaccatcagaatcaaaactagacgagattgttgattacatccccggtttatctccgacaagactcagtgacttacagatcttacacggctatagtcatcaagtcttcaatatattcaaaaagtctttcggtgagctttataaagctaagtatcttctcttcccttctgcttatgagctcgaaccaaaagccattgactttttcacttccaagtttgatttcccggtttactccactggtccgttaatacccttggaagaactatccgttggaaatgagaatagagaacttgattactttaagtggcttgatgagcaacctgaaagctctgttctttacatatctcaagggagttttctttcagtctccgaagctcagatggaggagattgttgtaggagttagagaggctggagttaagttcttttgggtggctcgtgggggtgagttaaagcttaaggaggctcttgaaggtagcttgggtgttgtggtgagctggtgtgatcagctacgtgttttgtgtcatgcggctataggcgggttttggacgcattgcgggtataactcgacattggaagggatatgttcgggagtaccgttgcttacatttcctgttttttgggatcagtttctgaatgctaagatgattgttgaggagtggagagttggaatggggatcgagaggaagaagcagatggagttgttgatagtgagtgatgagatcaaggaattggtaaaaaggtttatggatggagagagtgaagaagggaaagagatgagaagaaggacttgtgatctcagtgagatatgtcgtggagcggttgcgaaaggtggttcttctgatgctaacatcgatgctttcattaaagatattactaagatcgtgtgagttctattgttgttaatgattcaagtctatattagtatttgtataagtttgttaaagattcaaactttgtagagatttaagattgtttgtaaaactgttattt

SEQ ID NO: 47238 - protein, 475 aa, Arabidopsis thaliana
  peptide (1)..(475): Ceres Seq. ID no. 13588278
SPHFSHPQSHSNQKHVPHPMNPIKPQPLGVRHVVAMPWPGRGHINPMLNLCKSLVRRDPNLTVTFVVTEEWLGFIGSDPKPNRIHFATLPNIIPSELVRANDFIAFIDAVLTRLEEPFEQLLDRLNSPPTAIIADTYIIWAVRVGTKRNIPVASFWTTSATILSLFINSDLLASHGHFPIEPSESKLDEIVDYIPGLSPTRLSDLQILHGYSHQVFNIFKKSFGELYKAKYLLFPSAYELEPKAIDFFTSKFDFPVYSTGPLIPLEELSVGNENRELDYFKWLDEQPESSVLYISQGSFLSVSEAQMEEIVVGVREAGVKFFWVARGGELKLKEALEGSLGVVVSWCDQLRVLCHAAIGGFWTHCGYNSTLEGICSGVPLLTFPVFWDQFLNAKMIVEEWRVGMGIERKKQMELLIVSDEIKELVKRFMDGESEEGKEMRRRTCDLSEICRGAVAKGGSSDANIDAFIKDITKIV

SEQ ID NO: 47239 - protein, 456 aa, Arabidopsis thaliana
  peptide (1)..(456): Ceres Seq. ID no. 13588279
MNPIKPQPLGVRHVVAMPWPGRGHINPMLNLCKSLVRRDPNLTVTFVVTEEWLGFIGSDPKPNRIHFATLPNIIPSELVRANDFIAFIDAVLTRLEEPFEQLLDRLNSPPTAIIADTYIIWAVRVGTKRNIPVASFWTTSATILSLFINSDLLASHGHFPIEPSESKLDEIVDYIPGLSPTRLSDLQILHGYSHQVFNIFKKSFGELYKAKYLLFPSAYELEPKAIDFFTSKFDFPVYSTGPLIPLEELSVGNENRELDYFKWLDEQPESSVLYISQGSFLSVSEAQMEEIVVGVREAGVKFFWVARGGELKLKEALEGSLGVVVSWCDQLRVLCHAAIGGFWTHCGYNSTLEGICSGVPLLTFPVFWDQFLNAKMIVEEWRVGMGIERKKQMELLIVSDEIKELVKRFMDGESEEGKEMRRRTCDLSEICRGAVAKGGSSDANIDAFIKDITKIV

SEQ ID NO: 47240 - protein, 440 aa, Arabidopsis thaliana
  peptide (1)..(440): Ceres Seq. ID no. 13588280
MPWPGRGHINPMLNLCKSLVRRDPNLTVTFVVTEEWLGFIGSDPKPNRIHFATLPNIIPSELVRANDFIAFIDAVLTRLEEPFEQLLDRLNSPPTAIIADTYIIWAVRVGTKRNIPVASFWTTSATILSLFINSDLLASHGHFPIEPSESKLDEIVDYIPGLSPTRLSDLQILHGYSHQVFNIFKKSFGELYKAKYLLFPSAYELEPKAIDFFTSKFDFPVYSTGPLIPLEELSVGNENRELDYFKWLDEQPESSVLYISQGSFLSVSEAQMEEIVVGVREAGVKFFWVARGGELKLKEALEGSLGVVVSWCDQLRVLCHAAIGGFWTHCGYNSTLEGICSGVPLLTFPVFWDQFLNAKMIVEEWRVGMGIERKKQMELLIVSDEIKELVKRFMDGESEEGKEMRRRTCDLSEICRGAVAKGGSSDANIDAFIKDITKIV

SEQ ID NO: 47241 - DNA, 1697 bp, Arabidopsis thaliana
  misc_feature (1)..(1697): Ceres Seq. ID no. 15168757
  misc_feature (1)..(1697): Ortholog of  Ceres SEQ ID NO 13596021 as cited in SEQ ID NO 62020
gttcttctcttctctcttcttcttttcgcttcgttgctgctctcttctccgctccgccggaaagtcgtgaaatctctgcgacttcatcaatgaagaaatcgtctcatctctctactgaagctacgcagacctaaaatatctctgtataatccttctttaagattgatttcgtacgatcttcgtgtctttttttctttaagagatgcggtccaaggacaaaatctcctacttttacgatggggatgtggggagtgtctattttggtccgaatcacccgatgaaacctcacaggctttgtatgacccatcatcttatccttgcatatggcctgcatagcaagatggaagtttatcgtccacacaaagcatatcctattgagatggctcagttccattctcctgactatgtagagttcctgcaacgaattaatccagaaaaccagaacttgttccccaatgaaatggctagatataatctgggagaggattgtcctgtctttgaagatttgtttgaattttgtcaaatttacgccggcggaacaatagatgctgcacgcaggttaaacaacaaactctgtgacattgctataaattgggcgggcgggttgcaccatgccaaaaaatgtgatgcatctgggttttgttacatcaacgatctcgtgctaggaattcttgagttgttaaaacaccatccccgtgttctatacatagatatagatgttcatcatggtgatggggttgaagaagctttttacttcactgacagagtaatgactgttagctttcataagtttggggataagttctttccagggacaggcgatgttaaggaaataggagaaagagaagggaaattttacgccattaatgtgccgctgaaggatggtatcgatgacagtagtttcaaccgtctgttcaggactataatatccaaggttgttgagatatatcaaccgggtgcaattgttcttcaatgcggggcagattcactagccagggatcgactaggatgctttaatctctctattgatggacatgctgaatgtgttaaattcgtgaagaagttcaatcttcccttactggttacaggaggtggaggatacacaaaggagaatgtagctcgttgttggaccgttgagactggcattcttttggacacagaacttcctaatgagattcctgaaaacgactacataaagtattttgcgccggatttttctttgaagataccgggtggtcacattgagaatcttaataccaaatcatacatcagttccatcaaagtgcagattttggagaatttgcgatacattcaacacgctccaagcgtacagatgcaggaggttccaccggatttctacataccggattttgatgaagacgaacaaaacccggatgtacgtgtggatcagcgttcacgggataagcagatccagagggatgatgaatatttcgatggcgacaacgataacgatgcgtcgtaaaacatcgattcttagaaattgttggttaatttttttgtttagttatgagatttgtaatgatatcaacactttaacggctactggggcaccaaaaccacttctgattgattccatcttcttcatcttttcgtcttggtgtatatgaatgaagctttttggttcactttctcatcattgtgacttatatagtgatcaaattcgttatatattgtac

SEQ ID NO: 47242 - protein, 426 aa, Arabidopsis thaliana
  peptide (1)..(426): Ceres Seq. ID no. 15168758
MRSKDKISYFYDGDVGSVYFGPNHPMKPHRLCMTHHLILAYGLHSKMEVYRPHKAYPIEMAQFHSPDYVEFLQRINPENQNLFPNEMARYNLGEDCPVFEDLFEFCQIYAGGTIDAARRLNNKLCDIAINWAGGLHHAKKCDASGFCYINDLVLGILELLKHHPRVLYIDIDVHHGDGVEEAFYFTDRVMTVSFHKFGDKFFPGTGDVKEIGEREGKFYAINVPLKDGIDDSSFNRLFRTIISKVVEIYQPGAIVLQCGADSLARDRLGCFNLSIDGHAECVKFVKKFNLPLLVTGGGGYTKENVARCWTVETGILLDTELPNEIPENDYIKYFAPDFSLKIPGGHIENLNTKSYISSIKVQILENLRYIQHAPSVQMQEVPPDFYIPDFDEDEQNPDVRVDQRSRDKQIQRDDEYFDGDNDNDAS

SEQ ID NO: 47243 - protein, 401 aa, Arabidopsis thaliana
  peptide (1)..(401): Ceres Seq. ID no. 15168759
MKPHRLCMTHHLILAYGLHSKMEVYRPHKAYPIEMAQFHSPDYVEFLQRINPENQNLFPNEMARYNLGEDCPVFEDLFEFCQIYAGGTIDAARRLNNKLCDIAINWAGGLHHAKKCDASGFCYINDLVLGILELLKHHPRVLYIDIDVHHGDGVEEAFYFTDRVMTVSFHKFGDKFFPGTGDVKEIGEREGKFYAINVPLKDGIDDSSFNRLFRTIISKVVEIYQPGAIVLQCGADSLARDRLGCFNLSIDGHAECVKFVKKFNLPLLVTGGGGYTKENVARCWTVETGILLDTELPNEIPENDYIKYFAPDFSLKIPGGHIENLNTKSYISSIKVQILENLRYIQHAPSVQMQEVPPDFYIPDFDEDEQNPDVRVDQRSRDKQIQRDDEYFDGDNDNDAS

SEQ ID NO: 47244 - protein, 394 aa, Arabidopsis thaliana
  peptide (1)..(394): Ceres Seq. ID no. 15168760
MTHHLILAYGLHSKMEVYRPHKAYPIEMAQFHSPDYVEFLQRINPENQNLFPNEMARYNLGEDCPVFEDLFEFCQIYAGGTIDAARRLNNKLCDIAINWAGGLHHAKKCDASGFCYINDLVLGILELLKHHPRVLYIDIDVHHGDGVEEAFYFTDRVMTVSFHKFGDKFFPGTGDVKEIGEREGKFYAINVPLKDGIDDSSFNRLFRTIISKVVEIYQPGAIVLQCGADSLARDRLGCFNLSIDGHAECVKFVKKFNLPLLVTGGGGYTKENVARCWTVETGILLDTELPNEIPENDYIKYFAPDFSLKIPGGHIENLNTKSYISSIKVQILENLRYIQHAPSVQMQEVPPDFYIPDFDEDEQNPDVRVDQRSRDKQIQRDDEYFDGDNDNDAS

SEQ ID NO: 47245 - DNA, 682 bp, Arabidopsis thaliana
  misc_feature (1)..(682): Ceres Seq. ID no. 12601843
  misc_feature (1)..(682): Ortholog of  Ceres SEQ ID NO 15179194 as cited in SEQ ID NO 0
gaagtaagtaagagaaaaaccaaaagaagaagagaaacaacaagaagaagtaatggcttcctctatgctctcctccaccgctgtggttacctccccggctcaagccaccatggtcgctccattcaccggcttgaagtcatccgcttctttcccggtcacccgcaaggccaacaacgacattacttccatcacaagcaacggaggaagagttagctgcatgaaggtgtggccaccaatcggaaagaagaagtttgagactctatcttacctccctgaccttagtgacgttgaattggctaaggaagttgactaccttctccgcaacaagtggattccttgtgttgaattcgagttggagcacggatttgtgtaccgtgagcacggaaacactcccggatactatgatggacggtactggacaatgtggaagcttccattgttcggatgcaccgactccgctcaagtgttgaaggaagttgaagaatgcaagaaggagtaccctggcgccttcattaggatcatcggattcgacaacacccgtcaagtccaatgcatcagtttcattgcctacaagcccccaagcttcaccgaagcttaatcccctttctggaatattcagcgttgattattctggaacccatttctatgtggtcaatgcaaatttaagaaattatttgccgac

SEQ ID NO: 47246 - protein, 181 aa, Arabidopsis thaliana
  peptide (1)..(181): Ceres Seq. ID no. 12601844
MASSMLSSTAVVTSPAQATMVAPFTGLKSSASFPVTRKANNDITSITSNGGRVSCMKVWPPIGKKKFETLSYLPDLSDVELAKEVDYLLRNKWIPCVEFELEHGFVYREHGNTPGYYDGRYWTMWKLPLFGCTDSAQVLKEVEECKKEYPGAFIRIIGFDNTRQVQCISFIAYKPPSFTEA

SEQ ID NO: 47247 - protein, 177 aa, Arabidopsis thaliana
  peptide (1)..(177): Ceres Seq. ID no. 12601845
MLSSTAVVTSPAQATMVAPFTGLKSSASFPVTRKANNDITSITSNGGRVSCMKVWPPIGKKKFETLSYLPDLSDVELAKEVDYLLRNKWIPCVEFELEHGFVYREHGNTPGYYDGRYWTMWKLPLFGCTDSAQVLKEVEECKKEYPGAFIRIIGFDNTRQVQCISFIAYKPPSFTEA

SEQ ID NO: 47248 - protein, 162 aa, Arabidopsis thaliana
  peptide (1)..(162): Ceres Seq. ID no. 12601846
MVAPFTGLKSSASFPVTRKANNDITSITSNGGRVSCMKVWPPIGKKKFETLSYLPDLSDVELAKEVDYLLRNKWIPCVEFELEHGFVYREHGNTPGYYDGRYWTMWKLPLFGCTDSAQVLKEVEECKKEYPGAFIRIIGFDNTRQVQCISFIAYKPPSFTEA

SEQ ID NO: 47249 - DNA, 1605 bp, Arabidopsis thaliana
  misc_feature (1)..(1605): Ceres Seq. ID no. 13647999
  misc_feature (1)..(1605): Ortholog of  Ceres SEQ ID NO 14311938 as cited in SEQ ID NO 51615
  misc_feature (1)..(1605): Ortholog of  Ceres SEQ ID NO 14302059 as cited in SEQ ID NO 68322
aacccacccaaaatatcacaagcaccgactaaaacaattcggatctaaacccgacccggtaaaaccaatcccaaattttactccgttgtgaacgcatcaaacccagaaaatttcttcctccgatctcgcattctccacttccataatccccaaaattgtttcgttgatttttcgacaagatgaagctaacggacaacgaagagatcaccatgaacggaactcgagaaatggagacgacagagcaagagacatcgtcgccgtgttcgttagtaatcgaagcttttccggtgaagaaatccattattgtaggttacgctcttacatcaaagaagattaagagctttttacaaccaaaactcgaaggtttagctaggaataaggggatattaattgtggcaatagatcagaataagccactttcagagcagggtccgtttgatattgtgttgcataagcaaattggaaaagaatggcgtcgaattctcgaggaatttaggctagcacatccagatgtcacagttcttgatcctccagatgcaatactacatctccgtaatcgtcagtcaatgcttcagtgtgttgcggacatgaatctgtctgatagtaatggacgcgttggtgtgcccaagcaattggtaattaaaaaggatgcatcttcaattccggaggctgtcaataatgctggtctgagactacctcttgttgcaaagccattggttgctgatggaagtgcaaagtcacatgagctttcgctggcttacgatcaacactcccttctgaagctcgagcctcctcttgttcttcaggagtttgttaaccatggaggtgttcttttcaaggtttacattgttggggaggctattagagttgtccggcgcttctccctacctgatgtctctagacgagaactccccaaatcagctggtgtattccgcttcccacgggtctcttgtgctgcagcttcagctgatgatgcagatctggacccgagcattgccgagcttccaccacgtcctctgttggagagactggcaaaggaactccgtcgtggattgggtctaaggctgttcaatttagacataattagagagcacgggacaagagatcggttttatgtgatcgacatcaactatttcccagggtacgggaaaatgccagagtatgagcatgtattcactgatttcttactgagtgtggtacaaagccaatgtaagaaacgagctttggcagatcaatactaaactcaacggagagaccattgttcctccccaaagaaaaaaagaagattagtagtctatgcaatttatttctgtacaggacaaagcaccgatttccctcgatgttgttctttagcttcattgtgctgtacaaaagaacaatggaagattgcatttaaaagaaaatccttgggacctttagagatttaaggatagagaattgtctgaatctcactacaatgtcaccatatcaaaaagtgaatagaccttatgtcacacactactcatatgggcatggcttcactttgtgactgcttctatcttttgatttggttggctttgtaaaaaaaaaaaaaaaaaaaactcgagggggggcccggtacccaat

SEQ ID NO: 47250 - protein, 353 aa, Arabidopsis thaliana
  peptide (1)..(353): Ceres Seq. ID no. 15219520
MKLTDNEEITMNGTREMETTEQETSSPCSLVIEAFPVKKSIIVGYALTSKKIKSFLQPKLEGLARNKGILIVAIDQNKPLSEQGPFDIVLHKQIGKEWRRILEEFRLAHPDVTVLDPPDAILHLRNRQSMLQCVADMNLSDSNGRVGVPKQLVIKKDASSIPEAVNNAGLRLPLVAKPLVADGSAKSHELSLAYDQHSLLKLEPPLVLQEFVNHGGVLFKVYIVGEAIRVVRRFSLPDVSRRELPKSAGVFRFPRVSCAAASADDADLDPSIAELPPRPLLERLAKELRRGLGLRLFNLDIIREHGTRDRFYVIDINYFPGYGKMPEYEHVFTDFLLSVVQSQCKKRALADQY

SEQ ID NO: 47251 - protein, 343 aa, Arabidopsis thaliana
  peptide (1)..(343): Ceres Seq. ID no. 15219521
MNGTREMETTEQETSSPCSLVIEAFPVKKSIIVGYALTSKKIKSFLQPKLEGLARNKGILIVAIDQNKPLSEQGPFDIVLHKQIGKEWRRILEEFRLAHPDVTVLDPPDAILHLRNRQSMLQCVADMNLSDSNGRVGVPKQLVIKKDASSIPEAVNNAGLRLPLVAKPLVADGSAKSHELSLAYDQHSLLKLEPPLVLQEFVNHGGVLFKVYIVGEAIRVVRRFSLPDVSRRELPKSAGVFRFPRVSCAAASADDADLDPSIAELPPRPLLERLAKELRRGLGLRLFNLDIIREHGTRDRFYVIDINYFPGYGKMPEYEHVFTDFLLSVVQSQCKKRALADQY

SEQ ID NO: 47252 - protein, 337 aa, Arabidopsis thaliana
  peptide (1)..(337): Ceres Seq. ID no. 15219522
METTEQETSSPCSLVIEAFPVKKSIIVGYALTSKKIKSFLQPKLEGLARNKGILIVAIDQNKPLSEQGPFDIVLHKQIGKEWRRILEEFRLAHPDVTVLDPPDAILHLRNRQSMLQCVADMNLSDSNGRVGVPKQLVIKKDASSIPEAVNNAGLRLPLVAKPLVADGSAKSHELSLAYDQHSLLKLEPPLVLQEFVNHGGVLFKVYIVGEAIRVVRRFSLPDVSRRELPKSAGVFRFPRVSCAAASADDADLDPSIAELPPRPLLERLAKELRRGLGLRLFNLDIIREHGTRDRFYVIDINYFPGYGKMPEYEHVFTDFLLSVVQSQCKKRALADQY

SEQ ID NO: 47253 - DNA, 1177 bp, Arabidopsis thaliana
  misc_feature (1)..(1177): Ceres Seq. ID no. 13588287
  misc_feature (1)..(1177): Ortholog of  Ceres SEQ ID NO 13638897 as cited in SEQ ID NO 55839
  misc_feature (1)..(1177): Ortholog of  Ceres SEQ ID NO 14302561 as cited in SEQ ID NO 56543
  misc_feature (1)..(1177): Ortholog of  Ceres SEQ ID NO 15177758 as cited in SEQ ID NO 57504
  misc_feature (1)..(1177): Ortholog of  Ceres SEQ ID NO 13596958 as cited in SEQ ID NO 63319
  misc_feature (1)..(1177): Ortholog of  Ceres SEQ ID NO 12614573 as cited in SEQ ID NO 68344
  misc_feature (1)..(1177): Ortholog of  Ceres SEQ ID NO 12614814 as cited in SEQ ID NO 68816
  misc_feature (1)..(1177): Ortholog of  Ceres SEQ ID NO 13624040 as cited in SEQ ID NO 0
gctgttactgctaccgacaagcttagctttttttcctttgtccttaattcagaaaacagtttcttctctctctaccagtatctatctttattctcctttaacttggataaaacactcagcttcctcgaagcctctcatcttcatcatcagcagcttctctatatctctcctctctttcaaggataataaccaaaagcttttctttttatcttctcctgcaattcttgaagaaatggatgagtttgttaacctcaaggaaacagagctgaggctgggattaccgggaacagataatgtatgtgaagcaaaagagagagtttcttgctgtaataacaacaataagagagtactatcaactgatactgagaaggagattgaatcatcatcaaggaaaactgaaacatcccctcctcgaaaggctcagattgttggatggccaccagttagatcttacaggaagaacaacattcagagtaagaagaatgaatctgagcatgagggtcaaggaatctatgtgaaagtaagtatggatggtgcaccatacttgaggaaaatagatctgagttgttacaaaggatactcagagttgcttaaagctttagaagtgatgttcaaattctctgtgggagagtactttgagagagatggatataaaggttcagactttgtgcctacttatgaagacaaagatggtgattggatgctcattggtgatgttccatgggagatgttcatatgtacgtgcaagagactaaggatcatgaaaggatcagaagccaaaggtttaggctgtggtgtatgagatatatcttcaagaaatctaacagagacacaaaagaacttgaagaaaaatagagtttcttttggttcagagaaatctctgtctgtgcttgggttgtcgggtttctcgggcaagatctatgttcattggattgaatccaattcatagcctttatttacctcatcggtaaaattcaaatgtaaacatgcttaatggtcttaagcatatgaaactggaacctaattacattttgtttcagaaacagggcaaaaggttgtccttaaatctttggttatgtgtattacattaattaaagtgttatgaagattgaagagttgtttttatatttgtagcaattctgttttgcgttctcattgatcaaagagattttcaagc

SEQ ID NO: 47254 - protein, 266 aa, Arabidopsis thaliana
  peptide (1)..(266): Ceres Seq. ID no. 13588288
LLLLPTSLAFFPLSLIQKTVSSLSTSIYLYSPLTWIKHSASSKPLIFIISSFSISLLSFKDNNQKLFFLSSPAILEEMDEFVNLKETELRLGLPGTDNVCEAKERVSCCNNNNKRVLSTDTEKEIESSSRKTETSPPRKAQIVGWPPVRSYRKNNIQSKKNESEHEGQGIYVKVSMDGAPYLRKIDLSCYKGYSELLKALEVMFKFSVGEYFERDGYKGSDFVPTYEDKDGDWMLIGDVPWEMFICTCKRLRIMKGSEAKGLGCGV

SEQ ID NO: 47255 - protein, 189 aa, Arabidopsis thaliana
  peptide (1)..(189): Ceres Seq. ID no. 13588289
MDEFVNLKETELRLGLPGTDNVCEAKERVSCCNNNNKRVLSTDTEKEIESSSRKTETSPPRKAQIVGWPPVRSYRKNNIQSKKNESEHEGQGIYVKVSMDGAPYLRKIDLSCYKGYSELLKALEVMFKFSVGEYFERDGYKGSDFVPTYEDKDGDWMLIGDVPWEMFICTCKRLRIMKGSEAKGLGCGV

SEQ ID NO: 47256 - DNA, 970 bp, Arabidopsis thaliana; identical to SEQ ID NO: 28292
  misc_feature (1)..(970): Ceres Seq. ID no. 13592472
  misc_feature (1)..(970): Ortholog of  Ceres SEQ ID NO 14313662 as cited in SEQ ID NO 54162
  misc_feature (1)..(970): Ortholog of  Ceres SEQ ID NO 14302123 as cited in SEQ ID NO 0
  misc_feature (1)..(970): Ortholog of  Ceres SEQ ID NO 15179452 as cited in SEQ ID NO 0

SEQ ID NO: 47257 - protein, 249 aa, Arabidopsis thaliana; identical to SEQ ID NO: 28293
  peptide (1)..(249): Ceres Seq. ID no. 13592473

SEQ ID NO: 47258 - protein, 206 aa, Arabidopsis thaliana; identical to SEQ ID NO: 28294
  peptide (1)..(206): Ceres Seq. ID no. 13592474

SEQ ID NO: 47259 - DNA, 1480 bp, Arabidopsis thaliana; identical to SEQ ID NO: 45927
  misc_feature (1)..(1480): Ceres Seq. ID no. 13591502
  misc_feature (1)..(1480): Ortholog of  Ceres SEQ ID NO 15176851 as cited in SEQ ID NO 61348

SEQ ID NO: 47260 - protein, 396 aa, Arabidopsis thaliana; identical to SEQ ID NO: 45928
  peptide (1)..(396): Ceres Seq. ID no. 13591503

SEQ ID NO: 47261 - protein, 350 aa, Arabidopsis thaliana; identical to SEQ ID NO: 45929
  peptide (1)..(350): Ceres Seq. ID no. 13591504

SEQ ID NO: 47262 - DNA, 2025 bp, Arabidopsis thaliana
  misc_feature (1)..(2025): Ceres Seq. ID no. 12601957
  misc_feature (1)..(2025): Ortholog of  Ceres SEQ ID NO 13595900 as cited in SEQ ID NO 69289
cccttcccttttgggatattttcgccgcgtggattgatatgacgactctctttcgccggaagtcaatcggaatccgcgacaacttcttccttcaatccctttgatttttttttggctctacttatcccaaacccttcaaatcttcaggtccaatctcttcttctatttgttttttaattaaaaaaatccggcgaaaggtgaagctcttggattcgagtggtggctagtaatcgatttcggtagtttagaagtagtttataggttttatcagctttcgatttgatggagccgcgagtcggaaacaagtttcggctcggaaggaagatcggcggtggatcattcggagagatctatcttggtaccaatatccagacgaatgaagaagtggctattaaacttgaaaatgtgaaaactaagcatcctcagttgctgtatgaatcaaagttgtacaaagtattacaaggaggaactggcgttccaaacgttaaatggtatggtgttgaaggggactataatgtcctcgtgatagacttgttggggcctagccttgaagatctattcaatttctgtagtaggaaactctcactaaagactgtactaatgcttgcagatcaaatgatcaatcgcattgagtttgtacatcagaagtcatttctacatcgggacatcaagcctgacaactttctgatgggtcttggaaggcgtgcaaatcaggtatacgtcatcgactttggtctggcaaagaagtacagagactcaaatcatcagcatattccatatagggaaaacaaaaacttgactggaactgctagatacgctagcatgaacactcaccttggcattgaacaaagtcgtagagatgatttggagtcacttggattcgttctcatgtacttcttaaaaggaagtcttccttggcaaggactgaaagctggcaataagaagcaaaagtatgagaaaatcagtgaaaagaaagtatcgacatctattgaggctttatgccgaggttatccatctgaatttgcatcttatttccattattgccgttctctgagatttgacgacaagccagactatgcctacctgaaacggcttttccgcgacctgtttattcgtgaaggcttccagtttgattatgtatttgattggacgatcttgaagtatcagcaatcacagatttctactcctcctcctcgtcatcatggtcctgtagttgggccaagctctgccctcccccctgccattaccagtgctgagaggccatcaggtggcgacgaagctagaccttctggctggtcatcaggaatccctagacgaaattctggacaaatttttaactcaggaagcttagctaaacaaaaagcaccagtttcaagtgatcctgcaatatctaaagatgtagtgttatcaagctctagctttctccgcgcaactgggtcatcaagacgtgctgctgtatccagtagtcgcgaagctgcagttctgggaactgattctgagccatcaaaccctcaaatcgttgaagctggatcaggctccaattcaaagatccctgttagtcgaaactcacctatcgtctcatctgagatcaacaagctatcatcaccttcaagggcgactacttcagtcatgaagaactatgaggctaatcttaaagggatcgagagtctgcatttttagtcgttggggccagtgaatgatcttgaaaccccgggacaagtgtaaattaaaagacaaagatgacctctcttaggccctcctcatgttttacgtgcatttgtgtttacagggagggagacttgtgcctctaagcacacactctaataacatagataaggaaaagactctgaagaagtgattttcagagaaagacaaactcaaaagagggcgagactaaaaagtcaaaagacttttaacacttttattccccatttggttttacactgtttatgttgtgtttgtcttgtttggtactgcaacagctaaaatcgtttgtgcttcaaaaaggttttaagttcttagaac

SEQ ID NO: 47263 - protein, 465 aa, Arabidopsis thaliana
  peptide (1)..(465): Ceres Seq. ID no. 12601958
MEPRVGNKFRLGRKIGGGSFGEIYLGTNIQTNEEVAIKLENVKTKHPQLLYESKLYKVLQGGTGVPNVKWYGVEGDYNVLVIDLLGPSLEDLFNFCSRKLSLKTVLMLADQMINRIEFVHQKSFLHRDIKPDNFLMGLGRRANQVYVIDFGLAKKYRDSNHQHIPYRENKNLTGTARYASMNTHLGIEQSRRDDLESLGFVLMYFLKGSLPWQGLKAGNKKQKYEKISEKKVSTSIEALCRGYPSEFASYFHYCRSLRFDDKPDYAYLKRLFRDLFIREGFQFDYVFDWTILKYQQSQISTPPPRHHGPVVGPSSALPPAITSAERPSGGDEARPSGWSSGIPRRNSGQIFNSGSLAKQKAPVSSDPAISKDVVLSSSSFLRATGSSRRAAVSSSREAAVLGTDSEPSNPQIVEAGSGSNSKIPVSRNSPIVSSEINKLSSPSRATTSVMKNYEANLKGIESLHF

SEQ ID NO: 47264 - protein, 359 aa, Arabidopsis thaliana
  peptide (1)..(359): Ceres Seq. ID no. 12601959
MLADQMINRIEFVHQKSFLHRDIKPDNFLMGLGRRANQVYVIDFGLAKKYRDSNHQHIPYRENKNLTGTARYASMNTHLGIEQSRRDDLESLGFVLMYFLKGSLPWQGLKAGNKKQKYEKISEKKVSTSIEALCRGYPSEFASYFHYCRSLRFDDKPDYAYLKRLFRDLFIREGFQFDYVFDWTILKYQQSQISTPPPRHHGPVVGPSSALPPAITSAERPSGGDEARPSGWSSGIPRRNSGQIFNSGSLAKQKAPVSSDPAISKDVVLSSSSFLRATGSSRRAAVSSSREAAVLGTDSEPSNPQIVEAGSGSNSKIPVSRNSPIVSSEINKLSSPSRATTSVMKNYEANLKGIESLHF

SEQ ID NO: 47265 - protein, 354 aa, Arabidopsis thaliana
  peptide (1)..(354): Ceres Seq. ID no. 12601960
MINRIEFVHQKSFLHRDIKPDNFLMGLGRRANQVYVIDFGLAKKYRDSNHQHIPYRENKNLTGTARYASMNTHLGIEQSRRDDLESLGFVLMYFLKGSLPWQGLKAGNKKQKYEKISEKKVSTSIEALCRGYPSEFASYFHYCRSLRFDDKPDYAYLKRLFRDLFIREGFQFDYVFDWTILKYQQSQISTPPPRHHGPVVGPSSALPPAITSAERPSGGDEARPSGWSSGIPRRNSGQIFNSGSLAKQKAPVSSDPAISKDVVLSSSSFLRATGSSRRAAVSSSREAAVLGTDSEPSNPQIVEAGSGSNSKIPVSRNSPIVSSEINKLSSPSRATTSVMKNYEANLKGIESLHF

SEQ ID NO: 47266 - DNA, 1568 bp, Arabidopsis thaliana
  misc_feature (1)..(1568): Ceres Seq. ID no. 12591434
  misc_feature (1)..(1568): Ortholog of  Ceres SEQ ID NO 13597041 as cited in SEQ ID NO 63502
ctcgttgctgatgtgtcgctctgcttgagagagtcagagagtcaagagagaaaaggggtcgagaatggcggtcgcaatatctgggagtagtttgatatcgtcgactcttcagcattataataatcggatttatatccgagattatccgattccgtgtcactcttctaatccaatttgcaattcttttaatttcaaaagacgttcgttctctccttcttcccccaaatttaacgaccatgtcgttaacccttcctcttcttatttatcctccaagctttctccaattcgaacccattcctctttcgctgcgtgtggctgctcctggattcaagacaattcaatggttcatgattatgctacaacaactaatgggacgtccaagcgttgctcggcgttaccaacaacaaacacagtggatgtctcttcggtgtcagatctttttgaattcatatgctcgggtcctctcgtaaacaagattggtatcactcctcaaagagttggccagtctattgacaaatggttactctacggctcacaactttgtagactgtttcagcttaatgagcttaagcttacaattcctcagaaagctaggctataccactactacatacccgtttttatttggtgcgaagatcagattgctttgcataattccaagtttaaagatggagatgatgtacctcctttagtgattggatttagcgctcctcaaggatgtggcaagactacacttgtgtttgcacttgattatcttttcaagacaacaaaaaagaagtcagcgacgatatccgtagacgatttttacttgactgcagaaggccaggctgaattgagaaaaaagaatccaggaaatgcacttctagagtatcgtggaaatgcaggaagtcatgatctgaaactttctgttgaaacactagaagccctgtcgaaactgaccaaagaaggcttaaagatgaaggtacctaggtacaataagtctgcctgtagtgggagaggtgacagagccgattcatcaacatggcctgaagttgaaggacctctatcggttattctctttgagggatggatgcttggttttaagcctcttccagctgacgttgttaaagcagttgacccacagctggaggttgtgaataagaaccttgaagcgtattacgacgcatgggacaagtacatcgatgcttgggtcgtcatcaaaatccaggacccaagttatgtataccggtggcgtcttcaggcggaaatcgccatgaggcaggatggccaagctgggatgtcggatgaggaggtgaatgactttgtgtcgcggtatttgccggcgtataaggcctatcttccaactctttacgcggaagggccaagcggctcagacccagaccgtgtccttgcgatagatatcgatgaagaaaggaacccgatactcgcaaactaatgcgatgctgtctccattgcctttatagtatatcatcattgtatgtaaaagagagtaacattacgttcttcttccttctatttgacattctttttcctacactatactttcacataaatacatattcttttct

SEQ ID NO: 47267 - protein, 456 aa, Arabidopsis thaliana
  peptide (1)..(456): Ceres Seq. ID no. 12591435
MAVAISGSSLISSTLQHYNNRIYIRDYPIPCHSSNPICNSFNFKRRSFSPSSPKFNDHVVNPSSSYLSSKLSPIRTHSSFAACGCSWIQDNSMVHDYATTTNGTSKRCSALPTTNTVDVSSVSDLFEFICSGPLVNKIGITPQRVGQSIDKWLLYGSQLCRLFQLNELKLTIPQKARLYHYYIPVFIWCEDQIALHNSKFKDGDDVPPLVIGFSAPQGCGKTTLVFALDYLFKTTKKKSATISVDDFYLTAEGQAELRKKNPGNALLEYRGNAGSHDLKLSVETLEALSKLTKEGLKMKVPRYNKSACSGRGDRADSSTWPEVEGPLSVILFEGWMLGFKPLPADVVKAVDPQLEVVNKNLEAYYDAWDKYIDAWVVIKIQDPSYVYRWRLQAEIAMRQDGQAGMSDEEVNDFVSRYLPAYKAYLPTLYAEGPSGSDPDRVLAIDIDEERNPILAN

SEQ ID NO: 47268 - protein, 364 aa, Arabidopsis thaliana
  peptide (1)..(364): Ceres Seq. ID no. 12591436
MVHDYATTTNGTSKRCSALPTTNTVDVSSVSDLFEFICSGPLVNKIGITPQRVGQSIDKWLLYGSQLCRLFQLNELKLTIPQKARLYHYYIPVFIWCEDQIALHNSKFKDGDDVPPLVIGFSAPQGCGKTTLVFALDYLFKTTKKKSATISVDDFYLTAEGQAELRKKNPGNALLEYRGNAGSHDLKLSVETLEALSKLTKEGLKMKVPRYNKSACSGRGDRADSSTWPEVEGPLSVILFEGWMLGFKPLPADVVKAVDPQLEVVNKNLEAYYDAWDKYIDAWVVIKIQDPSYVYRWRLQAEIAMRQDGQAGMSDEEVNDFVSRYLPAYKAYLPTLYAEGPSGSDPDRVLAIDIDEERNPILAN

SEQ ID NO: 47269 - DNA, 2435 bp, Arabidopsis thaliana
  misc_feature (1)..(2435): Ceres Seq. ID no. 12591646
  misc_feature (1)..(2435): Ortholog of  Ceres SEQ ID NO 15179055 as cited in SEQ ID NO 0
gtcgctcctttttgttggtctgtttccacttcagttcttctccctccggaaaagctacaaccccaatctaaaaccctaacggccatttctaccatcggagctccgaaaatgccgggtatgtcttcggaatctggcggtggagaattggttctgttttcgaccaaggaaaaaactccggtgttgtatcctctaagctatggcctcaagtctccggttcacaggctctccatctcctggggttgcggaaacaacctacgcgtcacggttttaaggaatccagagttacgcgatgatgacgacggagaagttggtggtaaggtcgtaaacgttaggcttagcggcgaggatggcgaaatcagtgacccacagtggcgaaggatcgcttatggatcggtatctccgttcgcgcttttgcagagcagaagaaactcaatttccagtttgtctaagatggatatgagttcctctctgtatcagactgcgtggtgggagtacgtaatggaatacagcagagatattaaatctctccttagtaatacaatatctttgcccgctcctttgattgaagacccgagatcagttataaagaatgctgaggaaccaacttctttaaaggctgcgtgggagttgatggaattattttatgcagataagacatgtctgtcttggttgccagaacggctcgttgattggttatctgaatacgatatactcctttctagctcacatccaacaatctactcaaagctccaggatttccaaaaggaacttgttggcctgcaggccatcgaggatgatccaagatactgggaagtgatggcttctgctttatcagttggttggctagaaatagtggtgaagttgttacacctacatggttcttatcaactagaccagctgggacatcgtgagacagaaaatggtttggtagaagcggttgctgttctcatttcaaaaatgccacgaatgcggccacaactagaagatgggaaatttggtgaatgctctgcagcaaagcctgactttatgaagacacgagaaagatggcagtctcagataactaaactagagtgcagtgccttctgggttcaatgtgctcaccatcagacccgtgagggcttgagaaatatgttgaagatcatgataggaaatgctgattgcctcagagctgcgacatgtaactggatggagctttttgtttcacatcttctttatctcaggccatttacgaagggattagatggcatgcatagcctagcccagaagtgtgttcagtcaaagccagttaacacttcccataagcttctaagactgcttattggaattcttggagaaaatactgaggttgttctggcagagtgttccaaagaatttggctcctggatggttgcacatgccatggaattattgacagctggaagcgaagaaggagaagttcttgtacatgaggaacagcgtaagttgggtggaattaacatggaagagctccatagacttgtttatgctcaagttctttcttctcatgctttgacttggcagatagctcctatttatctagcatcgtgcgagaaacagggattaggcttattagagctgttgttctacaggcagcctgttcaagagaatcagatgcttattaagagcctagagatttgccgtctctatgaactcagtaatgtcagtgctaaactaatgaagatttctggagtgcatcattggaaacatgggaggaaaggctcagggattttctggctccagcaagctcgggacgaaaattgtctcagcgtgattgctcaacagctgtttgattctgttggaaaatcattgtctgatgaaagtctcaagcaatgggaaggcctagtcgagttgctgggttcggaatcacagatctctggtggtctcgattttcttcacaagtatagagatttcaagagatcgctgaaggtagtccatgatggaaaaactatagatgcagctcatgaagccgtagagagacttgtatcgctaatgaagagcccttctactcctcaacgcttctggcttcctcttctgcatgattcattgaagctgttgaattggcccgaacgttcgctgttgaatgtaacacagaccaacctgatgttgaacaaattacaagagctatcaatagcaaggttaagaccaggcttcatagaatctgagttgtctgctcaagctgtgggttcagtgagacttgctctagcaacaaatctcggacgtgcttttctcgaagaatgttagcgcgggttgaggctaataaatccatagctcgatatctatttgtgtgtatgggtttcgtactacatttagtctgtatttttccatatcaaaatagactgatagcactccagtttccatctttcactagtttgtaagctgattgcaaaagtaaagcagaaaagagaggtgttctgact

SEQ ID NO: 47270 - protein, 752 aa, Arabidopsis thaliana
  peptide (1)..(752): Ceres Seq. ID no. 12591647
VAPFCWSVSTSVLLPPEKLQPQSKTLTAISTIGAPKMPGMSSESGGGELVLFSTKEKTPVLYPLSYGLKSPVHRLSISWGCGNNLRVTVLRNPELRDDDDGEVGGKVVNVRLSGEDGEISDPQWRRIAYGSVSPFALLQSRRNSISSLSKMDMSSSLYQTAWWEYVMEYSRDIKSLLSNTISLPAPLIEDPRSVIKNAEEPTSLKAAWELMELFYADKTCLSWLPERLVDWLSEYDILLSSSHPTIYSKLQDFQKELVGLQAIEDDPRYWEVMASALSVGWLEIVVKLLHLHGSYQLDQLGHRETENGLVEAVAVLISKMPRMRPQLEDGKFGECSAAKPDFMKTRERWQSQITKLECSAFWVQCAHHQTREGLRNMLKIMIGNADCLRAATCNWMELFVSHLLYLRPFTKGLDGMHSLAQKCVQSKPVNTSHKLLRLLIGILGENTEVVLAECSKEFGSWMVAHAMELLTAGSEEGEVLVHEEQRKLGGINMEELHRLVYAQVLSSHALTWQIAPIYLASCEKQGLGLLELLFYRQPVQENQMLIKSLEICRLYELSNVSAKLMKISGVHHWKHGRKGSGIFWLQQARDENCLSVIAQQLFDSVGKSLSDESLKQWEGLVELLGSESQISGGLDFLHKYRDFKRSLKVVHDGKTIDAAHEAVERLVSLMKSPSTPQRFWLPLLHDSLKLLNWPERSLLNVTQTNLMLNKLQELSIARLRPGFIESELSAQAVGSVRLALATNLGRAFLEEC

SEQ ID NO: 47271 - protein, 716 aa, Arabidopsis thaliana
  peptide (1)..(716): Ceres Seq. ID no. 12591648
MPGMSSESGGGELVLFSTKEKTPVLYPLSYGLKSPVHRLSISWGCGNNLRVTVLRNPELRDDDDGEVGGKVVNVRLSGEDGEISDPQWRRIAYGSVSPFALLQSRRNSISSLSKMDMSSSLYQTAWWEYVMEYSRDIKSLLSNTISLPAPLIEDPRSVIKNAEEPTSLKAAWELMELFYADKTCLSWLPERLVDWLSEYDILLSSSHPTIYSKLQDFQKELVGLQAIEDDPRYWEVMASALSVGWLEIVVKLLHLHGSYQLDQLGHRETENGLVEAVAVLISKMPRMRPQLEDGKFGECSAAKPDFMKTRERWQSQITKLECSAFWVQCAHHQTREGLRNMLKIMIGNADCLRAATCNWMELFVSHLLYLRPFTKGLDGMHSLAQKCVQSKPVNTSHKLLRLLIGILGENTEVVLAECSKEFGSWMVAHAMELLTAGSEEGEVLVHEEQRKLGGINMEELHRLVYAQVLSSHALTWQIAPIYLASCEKQGLGLLELLFYRQPVQENQMLIKSLEICRLYELSNVSAKLMKISGVHHWKHGRKGSGIFWLQQARDENCLSVIAQQLFDSVGKSLSDESLKQWEGLVELLGSESQISGGLDFLHKYRDFKRSLKVVHDGKTIDAAHEAVERLVSLMKSPSTPQRFWLPLLHDSLKLLNWPERSLLNVTQTNLMLNKLQELSIARLRPGFIESELSAQAVGSVRLALATNLGRAFLEEC

SEQ ID NO: 47272 - protein, 713 aa, Arabidopsis thaliana
  peptide (1)..(713): Ceres Seq. ID no. 12591649
MSSESGGGELVLFSTKEKTPVLYPLSYGLKSPVHRLSISWGCGNNLRVTVLRNPELRDDDDGEVGGKVVNVRLSGEDGEISDPQWRRIAYGSVSPFALLQSRRNSISSLSKMDMSSSLYQTAWWEYVMEYSRDIKSLLSNTISLPAPLIEDPRSVIKNAEEPTSLKAAWELMELFYADKTCLSWLPERLVDWLSEYDILLSSSHPTIYSKLQDFQKELVGLQAIEDDPRYWEVMASALSVGWLEIVVKLLHLHGSYQLDQLGHRETENGLVEAVAVLISKMPRMRPQLEDGKFGECSAAKPDFMKTRERWQSQITKLECSAFWVQCAHHQTREGLRNMLKIMIGNADCLRAATCNWMELFVSHLLYLRPFTKGLDGMHSLAQKCVQSKPVNTSHKLLRLLIGILGENTEVVLAECSKEFGSWMVAHAMELLTAGSEEGEVLVHEEQRKLGGINMEELHRLVYAQVLSSHALTWQIAPIYLASCEKQGLGLLELLFYRQPVQENQMLIKSLEICRLYELSNVSAKLMKISGVHHWKHGRKGSGIFWLQQARDENCLSVIAQQLFDSVGKSLSDESLKQWEGLVELLGSESQISGGLDFLHKYRDFKRSLKVVHDGKTIDAAHEAVERLVSLMKSPSTPQRFWLPLLHDSLKLLNWPERSLLNVTQTNLMLNKLQELSIARLRPGFIESELSAQAVGSVRLALATNLGRAFLEEC

SEQ ID NO: 47273 - DNA, 894 bp, Arabidopsis thaliana
  misc_feature (1)..(894): Ceres Seq. ID no. 13588533
  misc_feature (1)..(894): Ortholog of  Ceres SEQ ID NO 15170341 as cited in SEQ ID NO 57901
gaaaaataccaaattcttgaaaacaaaaaaaaaaatgaataatcaaaatgaagacacagaaggtggtcgaaactgttgtacttgctgcttaagcttcatcttcacagctggtctcacctctcttttcttatggcttagtctccgtgcggacaaacccaaatgctcaatccaaaactttttcattcctgccctcggaaaagacccaaattcacgagacaataccactctaaatttcatggttcgttgtgacaatccaaatagagaccaaggaatctactacgacgatgtccaccttaatttttccaccatcaacacgaccaagatcaattcatctgctcttgtcttagttggtaactacacagtgcctaagttctatcaaggacacaagaagaaggccaagaagtggggtcaagtaaagccgctaaacaaccagacggttttacgagcggttttgcctaatggatcggctgttttcaggttggatctcaagactcaagttagattcaagattgttttttggaaaactaagaggtatggggttgaagttggagctgatgttgaagtcaacggtgatggagttaaagctcagaagaaaggaattaagatgaagaaatctgattcttcttttccattaagaagctcttttccgattagtgttttgatgaatttactcgtattctttgctattcgttaacttcattaatggtgttgattttcaggtttttcatttcttggttttgttgattttgattattgactatttcatgagttttgttgtgatccttagttccattttcttcattgcataatttatcccttattttttttgttttaactatgtattagtttccatcaacaaaattctatttgaaaatcattttatccattttttat

SEQ ID NO: 47274 - protein, 230 aa, Arabidopsis thaliana
  peptide (1)..(230): Ceres Seq. ID no. 13588534
KNTKFLKTKKKMNNQNEDTEGGRNCCTCCLSFIFTAGLTSLFLWLSLRADKPKCSIQNFFIPALGKDPNSRDNTTLNFMVRCDNPNRDQGIYYDDVHLNFSTINTTKINSSALVLVGNYTVPKFYQGHKKKAKKWGQVKPLNNQTVLRAVLPNGSAVFRLDLKTQVRFKIVFWKTKRYGVEVGADVEVNGDGVKAQKKGIKMKKSDSSFPLRSSFPISVLMNLLVFFAIR

SEQ ID NO: 47275 - protein, 219 aa, Arabidopsis thaliana
  peptide (1)..(219): Ceres Seq. ID no. 13588535
MNNQNEDTEGGRNCCTCCLSFIFTAGLTSLFLWLSLRADKPKCSIQNFFIPALGKDPNSRDNTTLNFMVRCDNPNRDQGIYYDDVHLNFSTINTTKINSSALVLVGNYTVPKFYQGHKKKAKKWGQVKPLNNQTVLRAVLPNGSAVFRLDLKTQVRFKIVFWKTKRYGVEVGADVEVNGDGVKAQKKGIKMKKSDSSFPLRSSFPISVLMNLLVFFAIR

SEQ ID NO: 47276 - protein, 152 aa, Arabidopsis thaliana
  peptide (1)..(152): Ceres Seq. ID no. 13588536
MVRCDNPNRDQGIYYDDVHLNFSTINTTKINSSALVLVGNYTVPKFYQGHKKKAKKWGQVKPLNNQTVLRAVLPNGSAVFRLDLKTQVRFKIVFWKTKRYGVEVGADVEVNGDGVKAQKKGIKMKKSDSSFPLRSSFPISVLMNLLVFFAIR

SEQ ID NO: 47277 - DNA, 1291 bp, Arabidopsis thaliana
  misc_feature (1)..(1291): Ceres Seq. ID no. 12602394
  misc_feature (1)..(1291): Ortholog of  Ceres SEQ ID NO 13502952 as cited in SEQ ID NO 62271
  misc_feature (1)..(1291): Ortholog of  Ceres SEQ ID NO 13502973 as cited in SEQ ID NO 68052
  misc_feature (1)..(1291): Ortholog of  Ceres SEQ ID NO 13596000 as cited in SEQ ID NO 68188
atgggtagtgcaaaatcagccatgctgatcctcttagtagcaatggtcatcgcatcatgtgccacggccattgatatgtccgtggtttcctacgacgataacaaccgtctccatagcgttttcgatgctgaggcctcgttaatcttcgagtcatggatggtcaaacatgggaaagtgtacgggtccgttgccgagaaggaacggcgtttgacgatttttgaggacaacctccgttttatcaataaccggaacgctgagaatctcagttatcggcttggtttgaccgggtttgcggatttatctcttcatgagtataaagaagtttgccacggggctgatccaagacctcctaggaaccacgtctttatgactagtagcgaccgatacaagactagtgctgatgatgtgcttcctaagtcagttgattggagaaacgaaggagcagtgactgaagtcaaagatcaaggccattgcaggagttgttgggctttctcgactgtgggagcagtggaaggcttaaacaagatcgtgacgggagagttagtcactttgtctgagcaagatttgatcaattgtaacaaagaaaacaatggttgcggaggaggcaaactcgagactgcctatgagttcatcatgaaaaatggtggtcttggtaccgacaacgattatccttacaaagctgttaacggagtctgtgatggccgcctcaaggaaaacaacaagaatgttatgattgatgggtatgaaaatttgcccgcaaacgacgaatctgctctcatgaaagcggttgctcaccagcctgtgactgccgttatcgattccagtagccgagagtttcagctttatgaatcgggagtgtttgatggctcgtgtggaacaaacctaaaccatggagttgttgtggtcgggtatggaactgagaatggtcgtgactactggctcgtgaaaaactctaggggcattacatggggagaagctggctacatgaagatggctcgaaacattgccaatccaagaggcttatgtggcattgcaatgcgagcttcataccctctaaagaactccttttctaccgataaaagctccatcgcctaataaaatgagctaaatgtatgttatgcaaaggatccagtgagccagcaacctattcgattgtgaaatgaaaaataatgtagtcgatgggttttgttttgtaatatattttggatttgtatggagggcaatgtttgaagtttgtataatatttatggatatttcgttaggctctaattatgaatgccttctttttagg

SEQ ID NO: 47278 - protein, 364 aa, Arabidopsis thaliana
  peptide (1)..(364): Ceres Seq. ID no. 12602395
MGSAKSAMLILLVAMVIASCATAIDMSVVSYDDNNRLHSVFDAEASLIFESWMVKHGKVYGSVAEKERRLTIFEDNLRFINNRNAENLSYRLGLTGFADLSLHEYKEVCHGADPRPPRNHVFMTSSDRYKTSADDVLPKSVDWRNEGAVTEVKDQGHCRSCWAFSTVGAVEGLNKIVTGELVTLSEQDLINCNKENNGCGGGKLETAYEFIMKNGGLGTDNDYPYKAVNGVCDGRLKENNKNVMIDGYENLPANDESALMKAVAHQPVTAVIDSSSREFQLYESGVFDGSCGTNLNHGVVVVGYGTENGRDYWLVKNSRGITWGEAGYMKMARNIANPRGLCGIAMRASYPLKNSFSTDKSSIA

SEQ ID NO: 47279 - protein, 357 aa, Arabidopsis thaliana
  peptide (1)..(357): Ceres Seq. ID no. 12602396
MLILLVAMVIASCATAIDMSVVSYDDNNRLHSVFDAEASLIFESWMVKHGKVYGSVAEKERRLTIFEDNLRFINNRNAENLSYRLGLTGFADLSLHEYKEVCHGADPRPPRNHVFMTSSDRYKTSADDVLPKSVDWRNEGAVTEVKDQGHCRSCWAFSTVGAVEGLNKIVTGELVTLSEQDLINCNKENNGCGGGKLETAYEFIMKNGGLGTDNDYPYKAVNGVCDGRLKENNKNVMIDGYENLPANDESALMKAVAHQPVTAVIDSSSREFQLYESGVFDGSCGTNLNHGVVVVGYGTENGRDYWLVKNSRGITWGEAGYMKMARNIANPRGLCGIAMRASYPLKNSFSTDKSSIA

SEQ ID NO: 47280 - protein, 350 aa, Arabidopsis thaliana
  peptide (1)..(350): Ceres Seq. ID no. 12602397
MVIASCATAIDMSVVSYDDNNRLHSVFDAEASLIFESWMVKHGKVYGSVAEKERRLTIFEDNLRFINNRNAENLSYRLGLTGFADLSLHEYKEVCHGADPRPPRNHVFMTSSDRYKTSADDVLPKSVDWRNEGAVTEVKDQGHCRSCWAFSTVGAVEGLNKIVTGELVTLSEQDLINCNKENNGCGGGKLETAYEFIMKNGGLGTDNDYPYKAVNGVCDGRLKENNKNVMIDGYENLPANDESALMKAVAHQPVTAVIDSSSREFQLYESGVFDGSCGTNLNHGVVVVGYGTENGRDYWLVKNSRGITWGEAGYMKMARNIANPRGLCGIAMRASYPLKNSFSTDKSSIA

SEQ ID NO: 47281 - DNA, 1382 bp, Arabidopsis thaliana
  misc_feature (1)..(1382): Ceres Seq. ID no. 13600777
  misc_feature (1)..(1382): Ortholog of  Ceres SEQ ID NO 13582534 as cited in SEQ ID NO 57409
gataagaaagaaagtcgtgaagatgagaggcgtaacaccaaactattaccattcttacactttcttcttcttcttcttcgttgtcttattagctctgtttcttcatgttttctcgataaacactttgtcatctacagaaactctaacaatctcaagcaaccgaaccattgtgtctcccggtaacatcttcgagctaggtttcttcaaaactacaacaagctctcgaaatggtgatcattggtatcttgggatttggtacaagtcaatctctgagagaacttatgtatgggttgccaacagagataaccctctttccaagtctatcggaacattaaagatctcttacgctaacctcgtccttcttgatcattctggtactcttgtttggtcaacgaatctaacgagaacggtgaaatctccagtggtggcagagctgctcgataacggcaacttcgtgcttagagactccaaaggcaactatcaaaaccgattcttgtggcaaagctttgattatccggtggacacattactcccggagatgaaaattggtcgggatctcaaaacaggacacgagactttcctcagttcttggagaagcccttatgatccctcaagcggagacttctcgttcaaactcggaactcaagggctacctgagttttatcttttcaagaaagagtttctattgtaccgatccggtccgtggaatggagtcgggtttagtggcataccgacgatgcaaaactggagctactttgacgttgttaacaacttcatagagaacagaggggaagttgcttatagtttcaaagtcaccgaccatagcatgcactacgtgagatttacactgactaccgaaagattattacagatatccagatgggatacgacatcatcggaatggaacttgtttggcgttttaccgaccgagaaatgcgatttgtaccaaatatgtggtcgtgatagttattgtgacacgaaaacatcaccgacgtgtaactgtatcaaaggctttgttccaaagaatgtgacggcttgggctttgggagatacatttgagggatgtgtgaggaagtcacgactgaactgccacagagatgggttttttcttttgatgaagaggatgaagctgcctggtacaagcacagcaattgtggacaagacaattgggttgaatgaatgtaaggagaggtgttctaaggattgtaattgtaccgggtttgcgaataaggatatccaaaatggtgggtcgggttgtgtgatttggaccggaggagctcatggatatgaggaattacgtcgtcggaggtcaagatctatatgtcaaaataggcctctataattagacatgaaaattggatatcttgatatatttttagaat

SEQ ID NO: 47282 - protein, 446 aa, Arabidopsis thaliana
  peptide (1)..(446): Ceres Seq. ID no. 13600778
IRKKVVKMRGVTPNYYHSYTFFFFFFVVLLALFLHVFSINTLSSTETLTISSNRTIVSPGNIFELGFFKTTTSSRNGDHWYLGIWYKSISERTYVWVANRDNPLSKSIGTLKISYANLVLLDHSGTLVWSTNLTRTVKSPVVAELLDNGNFVLRDSKGNYQNRFLWQSFDYPVDTLLPEMKIGRDLKTGHETFLSSWRSPYDPSSGDFSFKLGTQGLPEFYLFKKEFLLYRSGPWNGVGFSGIPTMQNWSYFDVVNNFIENRGEVAYSFKVTDHSMHYVRFTLTTERLLQISRWDTTSSEWNLFGVLPTEKCDLYQICGRDSYCDTKTSPTCNCIKGFVPKNVTAWALGDTFEGCVRKSRLNCHRDGFFLLMKRMKLPGTSTAIVDKTIGLNECKERCSKDCNCTGFANKDIQNGGSGCVIWTGGAHGYEELRRRRSRSICQNRPL

SEQ ID NO: 47283 - protein, 439 aa, Arabidopsis thaliana
  peptide (1)..(439): Ceres Seq. ID no. 13600779
MRGVTPNYYHSYTFFFFFFVVLLALFLHVFSINTLSSTETLTISSNRTIVSPGNIFELGFFKTTTSSRNGDHWYLGIWYKSISERTYVWVANRDNPLSKSIGTLKISYANLVLLDHSGTLVWSTNLTRTVKSPVVAELLDNGNFVLRDSKGNYQNRFLWQSFDYPVDTLLPEMKIGRDLKTGHETFLSSWRSPYDPSSGDFSFKLGTQGLPEFYLFKKEFLLYRSGPWNGVGFSGIPTMQNWSYFDVVNNFIENRGEVAYSFKVTDHSMHYVRFTLTTERLLQISRWDTTSSEWNLFGVLPTEKCDLYQICGRDSYCDTKTSPTCNCIKGFVPKNVTAWALGDTFEGCVRKSRLNCHRDGFFLLMKRMKLPGTSTAIVDKTIGLNECKERCSKDCNCTGFANKDIQNGGSGCVIWTGGAHGYEELRRRRSRSICQNRPL

SEQ ID NO: 47284 - protein, 267 aa, Arabidopsis thaliana
  peptide (1)..(267): Ceres Seq. ID no. 13600780
MKIGRDLKTGHETFLSSWRSPYDPSSGDFSFKLGTQGLPEFYLFKKEFLLYRSGPWNGVGFSGIPTMQNWSYFDVVNNFIENRGEVAYSFKVTDHSMHYVRFTLTTERLLQISRWDTTSSEWNLFGVLPTEKCDLYQICGRDSYCDTKTSPTCNCIKGFVPKNVTAWALGDTFEGCVRKSRLNCHRDGFFLLMKRMKLPGTSTAIVDKTIGLNECKERCSKDCNCTGFANKDIQNGGSGCVIWTGGAHGYEELRRRRSRSICQNRPL

SEQ ID NO: 47285 - DNA, 1669 bp, Arabidopsis thaliana
  misc_feature (1)..(1669): Ceres Seq. ID no. 13588613
  misc_feature (1)..(1669): Ortholog of  Ceres SEQ ID NO 14308803 as cited in SEQ ID NO 55038
  misc_feature (1)..(1669): Ortholog of  Ceres SEQ ID NO 13595437 as cited in SEQ ID NO 56562
gaagaaagaaagagagagaaccctagaaaacttttttttttcttcaccattgttgattgatggatgagaaagcttattcacacttcatttctttgcttttggtgagagaatgaaacagagaagaagagatgaagaaaactaaagttctttccttttctcttttggatctaatttcatcttgagattttctcatagcttgatactaaagctacataaaaaaacaattaggggaaatgaaagtttgtgtgttttgataagttttcagagattttcggttgcatgttgttatcttgctcttgaagtctatcgaacccttttagattctgattttgttctcttcttatccctcctcctataagttagccatttagggtccccatcgaattttactaagttaaagtcagagtctttttggttaagctatggatcgaagagacgcaatggcgttatccgggtcgggttcttactatatccaaagaggaatccccggttctggtcctcctcctcctcaaactcaaccaacgtttcacggatcacaaggatttcatcatttcaccaattccatctctccttttgggtcaaacccaaacccaaatccaaaccctggaggtgtctctactggattcgtgtctcctcctttacccgttgactcttctccggctgattcgtcagcggcggcggcgggagctttggttgctcctccttcaggtgacacgtctgtgaagcggaagagaggacggcctagaaaatatggacaagatggtggttctgtttcgttggcattgtctccttctatctccaacgtttccccgaactctaacaaacgtggccgtggaagacctcctggctccggcaagaagcaacggctatcttccattggtgaaatgatgccttcatcaactgggatgagcttcacaccgcatgtaatcgtagtttccattggtgaagacattgcttcaaaggttatatcgttctcgcatcaaggtccacgagcgatatgtgtcttatccgcaagtggtgctgtctctactgcaactcttcttcagccagcaccttctcatggaactattatatacgagggtctattcgagctcatatctctctcaacttcttatctgaacacaactgacaatgactacccaaaccgcactggaagtctagcggtctcacttgctagccccgatggtcgtgtcattggtggtggaattggaggtcctctaatagcagcaagccaagtccaggtcattgttggcagcttcatttgggcaattccgaaagggaagattaaaaaacgtgaagaaacttctgaagatgtccaagatactgatgctttggaaaacaacaacgataacacagcagcaacgtcacctcctgttcctcagcaaagtcagaacattgttcagactcctgtaggcatttggtcaactggttcaaggtcaatggatatgcatcacccccatatggacattgatctaatgcgtggatgattcatgtatatataagcattgaatctaggagaagaagaagaaacttgagctaacctccctgaaacaaagtagtctattggtattgtttaggaaagaaaaagacaattagtaagtttaggaatttctgcgtgttttcgagctttcagttagttgatttggtctcttgacttgttatgaatggg

SEQ ID NO: 47286 - protein, 354 aa, Arabidopsis thaliana
  peptide (1)..(354): Ceres Seq. ID no. 13588614
MDRRDAMALSGSGSYYIQRGIPGSGPPPPQTQPTFHGSQGFHHFTNSISPFGSNPNPNPNPGGVSTGFVSPPLPVDSSPADSSAAAAGALVAPPSGDTSVKRKRGRPRKYGQDGGSVSLALSPSISNVSPNSNKRGRGRPPGSGKKQRLSSIGEMMPSSTGMSFTPHVIVVSIGEDIASKVISFSHQGPRAICVLSASGAVSTATLLQPAPSHGTIIYEGLFELISLSTSYLNTTDNDYPNRTGSLAVSLASPDGRVIGGGIGGPLIAASQVQVIVGSFIWAIPKGKIKKREETSEDVQDTDALENNNDNTAATSPPVPQQSQNIVQTPVGIWSTGSRSMDMHHPHMDIDLMRG

SEQ ID NO: 47287 - protein, 348 aa, Arabidopsis thaliana
  peptide (1)..(348): Ceres Seq. ID no. 13588615
MALSGSGSYYIQRGIPGSGPPPPQTQPTFHGSQGFHHFTNSISPFGSNPNPNPNPGGVSTGFVSPPLPVDSSPADSSAAAAGALVAPPSGDTSVKRKRGRPRKYGQDGGSVSLALSPSISNVSPNSNKRGRGRPPGSGKKQRLSSIGEMMPSSTGMSFTPHVIVVSIGEDIASKVISFSHQGPRAICVLSASGAVSTATLLQPAPSHGTIIYEGLFELISLSTSYLNTTDNDYPNRTGSLAVSLASPDGRVIGGGIGGPLIAASQVQVIVGSFIWAIPKGKIKKREETSEDVQDTDALENNNDNTAATSPPVPQQSQNIVQTPVGIWSTGSRSMDMHHPHMDIDLMRG

SEQ ID NO: 47288 - protein, 200 aa, Arabidopsis thaliana
  peptide (1)..(200): Ceres Seq. ID no. 13588616
MMPSSTGMSFTPHVIVVSIGEDIASKVISFSHQGPRAICVLSASGAVSTATLLQPAPSHGTIIYEGLFELISLSTSYLNTTDNDYPNRTGSLAVSLASPDGRVIGGGIGGPLIAASQVQVIVGSFIWAIPKGKIKKREETSEDVQDTDALENNNDNTAATSPPVPQQSQNIVQTPVGIWSTGSRSMDMHHPHMDIDLMRG

SEQ ID NO: 47289 - DNA, 1074 bp, Arabidopsis thaliana
  misc_feature (1)..(1074): Ceres Seq. ID no. 13648295
  misc_feature (1)..(1074): Ortholog of  Ceres SEQ ID NO 14312572 as cited in SEQ ID NO 55151
agagagagagagagagagctcactagtcccccccccccccgatctacgtctctgtctctctccaatctctctgcgccacagaattctgcgatttacgaaaatctctgaaacctccgatcgttaacggcgaccgccgattttcccggtaaaaatgaacgacggagatgtatcgaggcagatccagcagatggtgagatttatccgccaagaagcggaagagaaagcaaacgagatctcggtttctgctgaagaagaattcaacattgagaaactccagcttgttgaggcggagaagaagaagatcaggcaagattatgagaagaaggagaagcaagctgatgttcgcaagaagattgattactctatgcagctaaatgcatcaaggatcaaagttcttcaagcgcaggacgatattgtcaatgccatgaaagaccaagcagctaaggatcttctgaacgttagtcgcgatgagtatgcctacaaacagctcctcaaggatctaattgttcagtgtttgcttcggttgaaagaaccttctgtgttgttgcgttgtcgtgaagaggacttgggtttagtcgaagctgtacttgatgacgcaaaggaggaatatgctggtaaagcaaaggttcatgccccagaggttgctgttgacacaaaaatattccttccccctcctcctaaatctaatgatcctcatggtctccactgctctggaggtgttgtgttagcttctcgtgatgggaaaatcgtgtgcgagaacacacttgatgcgcgtcttgatgtggcattccgtatgaaactcccagtgatccgtaagtcgttgttcggccaagttactgcctgatgaaagaaaggaaaagaggaaagagatgattcaaaccggtttgcgtttggttatttacctattttgggagagatttctctttgttgtgattctttgtattttgcaaaatcttacttttgtgccaaacccatcgaacgcttctttttttcgaattcctttttttcattcctcctcgaatgtgtgttatcatggctatacaaataaataaaatgaaagacttcttttcttwc

SEQ ID NO: 47290 - protein, 230 aa, Arabidopsis thaliana
  peptide (1)..(230): Ceres Seq. ID no. 15219535
MNDGDVSRQIQQMVRFIRQEAEEKANEISVSAEEEFNIEKLQLVEAEKKKIRQDYEKKEKQADVRKKIDYSMQLNASRIKVLQAQDDIVNAMKDQAAKDLLNVSRDEYAYKQLLKDLIVQCLLRLKEPSVLLRCREEDLGLVEAVLDDAKEEYAGKAKVHAPEVAVDTKIFLPPPPKSNDPHGLHCSGGVVLASRDGKIVCENTLDARLDVAFRMKLPVIRKSLFGQVTA

SEQ ID NO: 47291 - protein, 218 aa, Arabidopsis thaliana
  peptide (1)..(218): Ceres Seq. ID no. 15219536
MVRFIRQEAEEKANEISVSAEEEFNIEKLQLVEAEKKKIRQDYEKKEKQADVRKKIDYSMQLNASRIKVLQAQDDIVNAMKDQAAKDLLNVSRDEYAYKQLLKDLIVQCLLRLKEPSVLLRCREEDLGLVEAVLDDAKEEYAGKAKVHAPEVAVDTKIFLPPPPKSNDPHGLHCSGGVVLASRDGKIVCENTLDARLDVAFRMKLPVIRKSLFGQVTA

SEQ ID NO: 47292 - protein, 159 aa, Arabidopsis thaliana
  peptide (1)..(159): Ceres Seq. ID no. 15219537
MQLNASRIKVLQAQDDIVNAMKDQAAKDLLNVSRDEYAYKQLLKDLIVQCLLRLKEPSVLLRCREEDLGLVEAVLDDAKEEYAGKAKVHAPEVAVDTKIFLPPPPKSNDPHGLHCSGGVVLASRDGKIVCENTLDARLDVAFRMKLPVIRKSLFGQVTA

SEQ ID NO: 47293 - DNA, 714 bp, Arabidopsis thaliana
  misc_feature (1)..(714): Ceres Seq. ID no. 13588298
  misc_feature (1)..(714): Ortholog of  Ceres SEQ ID NO 13661617 as cited in SEQ ID NO 61132
aacacttctcacatttcataaaaagtgagacaaattaaagacagagagagatccaagaacatgaactacacggtggatgatcagaacatggcttttatctctcaactgtaccctgatgtctacactcagatagtacaaccagtaggagaagtgaagcagccgaagcggaggaggaagaagaccaaaggatccgtggcttccgcagatggaggcaacggtttgtttagaaagaggaagctgaccgatgaacaagtgaacatgttggagatgagttttggggatgaacacaaacttgagtcggagaggaaagatagacttgcggcagagctagggcttgaccctcgtcaagttgccgtttggtttcagaaccgtcgcgcacggtggaagaacaaaaggctcgaggaagagtacaataaactcaagaactcacatgataacgtcgttgtcgacaagtgccgacttgaatctgaggttattcagctcaaagaacaactctatgatgcagagagggaaatccaaagattagcagaaagagtagaaggaggctcaagcaacagtccaatttcgtcttccgtttccgtcgaagctaatgaaacgccattttttggagactataaagtcggagatgatggcgatgactatgatcacttgttttatccggtgccggaaaatagttacatcgatgaagcggaatggatgagtctatacatataa

SEQ ID NO: 47294 - protein, 217 aa, Arabidopsis thaliana
  peptide (1)..(217): Ceres Seq. ID no. 13588299
MNYTVDDQNMAFISQLYPDVYTQIVQPVGEVKQPKRRRKKTKGSVASADGGNGLFRKRKLTDEQVNMLEMSFGDEHKLESERKDRLAAELGLDPRQVAVWFQNRRARWKNKRLEEEYNKLKNSHDNVVVDKCRLESEVIQLKEQLYDAEREIQRLAERVEGGSSNSPISSSVSVEANETPFFGDYKVGDDGDDYDHLFYPVPENSYIDEAEWMSLYI

SEQ ID NO: 47295 - protein, 208 aa, Arabidopsis thaliana
  peptide (1)..(208): Ceres Seq. ID no. 13588300
MAFISQLYPDVYTQIVQPVGEVKQPKRRRKKTKGSVASADGGNGLFRKRKLTDEQVNMLEMSFGDEHKLESERKDRLAAELGLDPRQVAVWFQNRRARWKNKRLEEEYNKLKNSHDNVVVDKCRLESEVIQLKEQLYDAEREIQRLAERVEGGSSNSPISSSVSVEANETPFFGDYKVGDDGDDYDHLFYPVPENSYIDEAEWMSLYI

SEQ ID NO: 47296 - protein, 151 aa, Arabidopsis thaliana
  peptide (1)..(151): Ceres Seq. ID no. 13588301
MLEMSFGDEHKLESERKDRLAAELGLDPRQVAVWFQNRRARWKNKRLEEEYNKLKNSHDNVVVDKCRLESEVIQLKEQLYDAEREIQRLAERVEGGSSNSPISSSVSVEANETPFFGDYKVGDDGDDYDHLFYPVPENSYIDEAEWMSLYI

SEQ ID NO: 47297 - DNA, 1701 bp, Arabidopsis thaliana
  misc_feature (1)..(1701): Ceres Seq. ID no. 13592655
  misc_feature (1)..(1701): Ortholog of  Ceres SEQ ID NO 15176911 as cited in SEQ ID NO 54868
  misc_feature (1)..(1701): Ortholog of  Ceres SEQ ID NO 13596433 as cited in SEQ ID NO 68721
  misc_feature (1)..(1701): Ortholog of  Ceres SEQ ID NO 13599169 as cited in SEQ ID NO 0
gactctctcgttcaaggtccgactcagttcccggcgagttcgactcggtgattgatttttttctagaaaataaaaattcttcttaacgattgatcgattttggttttctatctttcgattctagatctagaactcaatttgtgaggtttggagatggcgagcgagctgatcaatcggcgacacgagacggatcaaccaaccgccgatgcttattacccgaaaccaatcaaaccatggttcacggtgactcgtccgatgcgttacatgctccgtgaacagagacttatcttcgttctcgttggcattgcaatcgctactttggttttcacaattttccctcgctccacacaatcaaccccttactcggatcctttctccggttacggaatccgacccgacgaatcgtacgttccggctatacaagctcagaggaaacctagcctcgagtacctgaaccggatcggagcaacaggcgggaaaatcccactgggattgaaacgcaaagggctaagagtggttgtgaccggtggtgctggattcgttggatcgcatctcgtggatcgtttgatggctagaggagatactgtgattgttgttgataatttcttcactggaaggaaagagaacgttatgcaccatttcagtaaccctaactttgagatgatccgtcacgatgtggttgagccgattcttcttgaggttgatcagatctaccatttggcttgccctgcttctcctgttcattacaaattcaatcccgtcaagactatcaagacgaatgtggttggaacattgaacatgcttggtttggctaagcgagttggggctagatttcttctgacgagtaccagtgaggtttatggtgatcctctgcagcatcctcaggttgagacttactggggcaacgttaatcccattggtgttcgtagttgctacgatgaaggaaaacgtacggcagagacgttgaccatggactatcaccgaggtgccaatgttgaggtcagaattgctaggatcttcaacacctatggtccaagaatgtgtatagatgatgggcgtgttgttagtaacttcgttgcacaggcactaaggaaagagccattgactgtttacggtgatgggaagcagacaaggagtttccaatttgtttctgatctggttgaaggtttgatgagactgatggaaggagaacatgtcggcccattcaacctcggtaaccctggtgaattcacgatgctcgagctcgctaaggtggtccaagagacaattgatccgaatgcaaacatagagttcagaccaaacacagaagacgaccctcacaagagaaagcctgacatcacaaaggccaaagagcttttaggttgggaaccaaaggtctctcttcgtcagggactgcctctcatggtcaaagatttccgtcaacgtgtctttggtgaccagaaggaaggctcctccgcagctgcaaccaccaccaagacaacttcagcttgagcaaatgcagaatctgagtagcagccactgcggctggtagtgggtttataacaaaattgcaagagcgtcgtttctttaaatttatttcgcttttgatttctgttttgataatcgtgtaaacgtagagtaagaatttggtacctttacttactactattcatggacctcactacagttttaaaagaaaaaagaacttctcttttgataaag

SEQ ID NO: 47298 - protein, 445 aa, Arabidopsis thaliana
  peptide (1)..(445): Ceres Seq. ID no. 13592656
MASELINRRHETDQPTADAYYPKPIKPWFTVTRPMRYMLREQRLIFVLVGIAIATLVFTIFPRSTQSTPYSDPFSGYGIRPDESYVPAIQAQRKPSLEYLNRIGATGGKIPLGLKRKGLRVVVTGGAGFVGSHLVDRLMARGDTVIVVDNFFTGRKENVMHHFSNPNFEMIRHDVVEPILLEVDQIYHLACPASPVHYKFNPVKTIKTNVVGTLNMLGLAKRVGARFLLTSTSEVYGDPLQHPQVETYWGNVNPIGVRSCYDEGKRTAETLTMDYHRGANVEVRIARIFNTYGPRMCIDDGRVVSNFVAQALRKEPLTVYGDGKQTRSFQFVSDLVEGLMRLMEGEHVGPFNLGNPGEFTMLELAKVVQETIDPNANIEFRPNTEDDPHKRKPDITKAKELLGWEPKVSLRQGLPLMVKDFRQRVFGDQKEGSSAAATTTKTTSA

SEQ ID NO: 47299 - protein, 411 aa, Arabidopsis thaliana
  peptide (1)..(411): Ceres Seq. ID no. 13592657
MRYMLREQRLIFVLVGIAIATLVFTIFPRSTQSTPYSDPFSGYGIRPDESYVPAIQAQRKPSLEYLNRIGATGGKIPLGLKRKGLRVVVTGGAGFVGSHLVDRLMARGDTVIVVDNFFTGRKENVMHHFSNPNFEMIRHDVVEPILLEVDQIYHLACPASPVHYKFNPVKTIKTNVVGTLNMLGLAKRVGARFLLTSTSEVYGDPLQHPQVETYWGNVNPIGVRSCYDEGKRTAETLTMDYHRGANVEVRIARIFNTYGPRMCIDDGRVVSNFVAQALRKEPLTVYGDGKQTRSFQFVSDLVEGLMRLMEGEHVGPFNLGNPGEFTMLELAKVVQETIDPNANIEFRPNTEDDPHKRKPDITKAKELLGWEPKVSLRQGLPLMVKDFRQRVFGDQKEGSSAAATTTKTTSA

SEQ ID NO: 47300 - protein, 408 aa, Arabidopsis thaliana
  peptide (1)..(408): Ceres Seq. ID no. 13592658
MLREQRLIFVLVGIAIATLVFTIFPRSTQSTPYSDPFSGYGIRPDESYVPAIQAQRKPSLEYLNRIGATGGKIPLGLKRKGLRVVVTGGAGFVGSHLVDRLMARGDTVIVVDNFFTGRKENVMHHFSNPNFEMIRHDVVEPILLEVDQIYHLACPASPVHYKFNPVKTIKTNVVGTLNMLGLAKRVGARFLLTSTSEVYGDPLQHPQVETYWGNVNPIGVRSCYDEGKRTAETLTMDYHRGANVEVRIARIFNTYGPRMCIDDGRVVSNFVAQALRKEPLTVYGDGKQTRSFQFVSDLVEGLMRLMEGEHVGPFNLGNPGEFTMLELAKVVQETIDPNANIEFRPNTEDDPHKRKPDITKAKELLGWEPKVSLRQGLPLMVKDFRQRVFGDQKEGSSAAATTTKTTSA

SEQ ID NO: 47301 - DNA, 549 bp, Arabidopsis thaliana
  misc_feature (1)..(549): Ceres Seq. ID no. 11406331
  misc_feature (1)..(549): Ortholog of  Ceres SEQ ID NO 13593889 as cited in SEQ ID NO 53305
  misc_feature (1)..(549): Ortholog of  Ceres SEQ ID NO 13581959 as cited in SEQ ID NO 56156
tgaggtaacatattacttgtattcaggctcgtggaatgaactatttgcacagctgtaatccgatgattgtccatcgcgatcttaagtccccaaaccttctagttgacaaaaactgggtcgtgaaggtgtgtgattttggattgtctaggatgaaacacagtacatacctctcttcaaagtcaacagcagggacggctgaatggatggctccagaagtgctaagaaacgaacctgctgatgagaagtgcgatgtttacagctacggtgtgatcttatgggaactctttacgttacaacaaccgtggggaaagatgaacccgatgcaagtagttggggcagttgggtttcagcatcgacgtcttgacattcccgactttgtagatccagcaattgcagatctcatcagtaaatgctggcagacggattcaaagttaaggccaagttttgcagagataatggcgtctctaaagcggctacagaaacctgtaacaggttctaacatcccaagaccagtccccagttcctcttcattaccaactgaacatgaac

SEQ ID NO: 47302 - protein, 171 aa, Arabidopsis thaliana
  peptide (1)..(171): Ceres Seq. ID no. 11406332
MNYLHSCNPMIVHRDLKSPNLLVDKNWVVKVCDFGLSRMKHSTYLSSKSTAGTAEWMAPEVLRNEPADEKCDVYSYGVILWELFTLQQPWGKMNPMQVVGAVGFQHRRLDIPDFVDPAIADLISKCWQTDSKLRPSFAEIMASLKRLQKPVTGSNIPRPVPSSSSLPTEHE

SEQ ID NO: 47303 - protein, 162 aa, Arabidopsis thaliana
  peptide (1)..(162): Ceres Seq. ID no. 11406333
MIVHRDLKSPNLLVDKNWVVKVCDFGLSRMKHSTYLSSKSTAGTAEWMAPEVLRNEPADEKCDVYSYGVILWELFTLQQPWGKMNPMQVVGAVGFQHRRLDIPDFVDPAIADLISKCWQTDSKLRPSFAEIMASLKRLQKPVTGSNIPRPVPSSSSLPTEHE

SEQ ID NO: 47304 - protein, 133 aa, Arabidopsis thaliana
  peptide (1)..(133): Ceres Seq. ID no. 11406334
MKHSTYLSSKSTAGTAEWMAPEVLRNEPADEKCDVYSYGVILWELFTLQQPWGKMNPMQVVGAVGFQHRRLDIPDFVDPAIADLISKCWQTDSKLRPSFAEIMASLKRLQKPVTGSNIPRPVPSSSSLPTEHE

SEQ ID NO: 47305 - DNA, 2665 bp, Arabidopsis thaliana; identical to SEQ ID NO: 45772
  misc_feature (1)..(2665): Ceres Seq. ID no. 12561126
  misc_feature (1)..(2665): Ortholog of  Ceres SEQ ID NO 13600595 as cited in SEQ ID NO 629
  misc_feature (1)..(2665): Ortholog of  Ceres SEQ ID NO 13593379 as cited in SEQ ID NO 20573

SEQ ID NO: 47306 - protein, 824 aa, Arabidopsis thaliana; identical to SEQ ID NO: 45773
  peptide (1)..(824): Ceres Seq. ID no. 12561127

SEQ ID NO: 47307 - protein, 769 aa, Arabidopsis thaliana; identical to SEQ ID NO: 45774
  peptide (1)..(769): Ceres Seq. ID no. 12561128

SEQ ID NO: 47308 - protein, 691 aa, Arabidopsis thaliana; identical to SEQ ID NO: 45775
  peptide (1)..(691): Ceres Seq. ID no. 12561129

SEQ ID NO: 47309 - DNA, 1440 bp, Arabidopsis thaliana
  misc_feature (1)..(1440): Ceres Seq. ID no. 13593642
  misc_feature (1)..(1440): Ortholog of  Ceres SEQ ID NO 12583425 as cited in SEQ ID NO 56517
gagtcccaccaatgaccaaaaagtgctccaatgcatgattattacgttggagcctcttcgatagagagatttttgctttctcaatttattattttttgtgtctctctctcgcccgatttggagtttttagggtttgatttttgtaatgtgagaaaggtttcgttatgttaaagaggcactctatcgccattctctccagaatcgcaagcttcgattcccataaaacccttatgtcttcctttaccgatcccctttttctgcgatcgctttactctcctcgatccatcgccatcagatttcatggagattttgctcatagactctacaatcccattcaaatttacaacaacaacaacaacaacagtggctcttgtaatggtttgttcaaggttaaaggtggaggaggaaagccgaaaggattcaccttgcgaagttgttttgattctcataagaaacctgatcaaaaggctcgagctttaactcaacatcgccgctttctccatgatctgggatctgggcctagtgaagaacgcgccgctgccggaactaccgaccttgccgatggccgtggtgcatatctgcgtacgaggtttcaaggaaatgataagattgttgtggctgttgacatagatgaggttcttggaaactttgtctcggcccttaacagattcattgcggaccgctatttgtcgaaccattcagtctcagaataccatgtctatgagttcttcaagatatggaactgctctcgcaacgaagccgacttacgtgttcatgaattctttaagacatcatatttcaagaaagggatccatcctcttccaggtgcccataagactcttcacaagctatcaaaatattgcgacatgtcagttgtgacgtcccggcagaatgcgataaaggagcacacacttgagtggatcgagatacatttcccgggactatttaaacagattcattttgggaaccattttgctcttcatggagagtctagaccaaagtctgaaatctgcagatcatttggagcagagatattgattgacgataacccaagatatgccgaggaatgcgctaacattggaatgaaggttctcctctttgactatgaaaattcatacccttggtctaagacagagtctgtggatcggcatcctttggtgactagagttcataattgggaagaggtggagcagcagattctctcattggcagtgtcaaagtgttaaatattttctgcaacaagaaatgttattttgccagtgcagaattatagtattgtacaaacttgatgggagaaataagtagcaaacagagatggaattagctttaattgtccctttttagcatcatttcaatctatttttttttataatttagttttgttgttgcaaatacatttgatctgatgtatataaattaaataaagtttttatttcaaat

SEQ ID NO: 47310 - protein, 353 aa, Arabidopsis thaliana
  peptide (1)..(353): Ceres Seq. ID no. 13593643
MLKRHSIAILSRIASFDSHKTLMSSFTDPLFLRSLYSPRSIAIRFHGDFAHRLYNPIQIYNNNNNNSGSCNGLFKVKGGGGKPKGFTLRSCFDSHKKPDQKARALTQHRRFLHDLGSGPSEERAAAGTTDLADGRGAYLRTRFQGNDKIVVAVDIDEVLGNFVSALNRFIADRYLSNHSVSEYHVYEFFKIWNCSRNEADLRVHEFFKTSYFKKGIHPLPGAHKTLHKLSKYCDMSVVTSRQNAIKEHTLEWIEIHFPGLFKQIHFGNHFALHGESRPKSEICRSFGAEILIDDNPRYAEECANIGMKVLLFDYENSYPWSKTESVDRHPLVTRVHNWEEVEQQILSLAVSKC

SEQ ID NO: 47311 - protein, 331 aa, Arabidopsis thaliana
  peptide (1)..(331): Ceres Seq. ID no. 13593644
MSSFTDPLFLRSLYSPRSIAIRFHGDFAHRLYNPIQIYNNNNNNSGSCNGLFKVKGGGGKPKGFTLRSCFDSHKKPDQKARALTQHRRFLHDLGSGPSEERAAAGTTDLADGRGAYLRTRFQGNDKIVVAVDIDEVLGNFVSALNRFIADRYLSNHSVSEYHVYEFFKIWNCSRNEADLRVHEFFKTSYFKKGIHPLPGAHKTLHKLSKYCDMSVVTSRQNAIKEHTLEWIEIHFPGLFKQIHFGNHFALHGESRPKSEICRSFGAEILIDDNPRYAEECANIGMKVLLFDYENSYPWSKTESVDRHPLVTRVHNWEEVEQQILSLAVSKC

SEQ ID NO: 47312 - DNA, 1726 bp, Arabidopsis thaliana
  misc_feature (1)..(1726): Ceres Seq. ID no. 13588307
  misc_feature (1)..(1726): Ortholog of  Ceres SEQ ID NO 12586556 as cited in SEQ ID NO 64667
  misc_feature (1)..(1726): Ortholog of  Ceres SEQ ID NO 13660894 as cited in SEQ ID NO 67475
atgttgcatatgattttatctcaaagagtaatccttttacgaaaatatcactcttctgcaaatgcccttgttaccaaatcaccaaattctatccccgagttggttaaacatattgattcggatctgatacgtaatgcacataaggtgttcgacgaaattcctgagttagatgtcatttctgctacagcggtgattggtcgctttgtgaaggaaagcagacatgtggaagcaagtcaagccttcaaaaggttgttgtgtttaggcataaggccaaatgagttcacgtttggcacggtcattgggtcttctacaacttcgagagatgtcaaattgggtaagcagcttcattgttatgcgttaaagatgggacttgcgtcgaatgtgtttgttggtagtgcggttttgaactgttatgtgaaactgagtacgttgacagatgctcgtagatgttttgatgacactagagacccaaacgtagtttctattaccaatttgattagtgggtaccttaagaaacatgaatttgaagaagctctttcgttgtttagagcaatgcctgagagaagtgttgttacttggaatgcagttattggagggtttagccagacggggcggaacgaagaggctgtgaatacttttgtggatatgttaagggaaggtgtggtgatacctaacgaatcaaccttcccttgtgctataacagccatatctaatatagcttctcatggtgctggtaagagtattcacgcctgcgctataaagttcttggggaagcgattcaatgtctttgtttggaactctctgatcagtttttactcaaaatgtgggaacatggaagatagtcttctggctttcaacaagctcgaagaagaacaacggaacattgtatcttggaactctatgatatggggttatgcgcacaacggaagaggagaagaagctgtagccatgtttgagaaaatggttaaagacacaaacctgagaccaaacaacgtgacaatccttggagtattatttgcgtgtaaccatgcgggcctaatacaagaagggtacatgtattttaacaaagctgtgaatgattatgatgatccaaacctactagaaccggagcactatgcttgtatggtggatatgctttctaggtccggccgtttcaaagaagcagaagagcttattaaaagtatgcctcttgacccaggaatcgggttttggaaggcattgcttgggggatgccagattcactcaaacaagcgtctggctaaattagcggcgtcaaaaatcttggaattggatcctagagatgtttcatcatacgtaatgctttcaaatgcttattctgctatggaaaactggcagaatgtgtcgctgatacggaggaaaatgaaggagactggtttaaagcgttttacgggatgtagttggattgaagttagagaccaaattcgtgtctttgtgaatgctgacaagaacaacgaacttaaggatgaagtctataggatgttggcacttgtttctcaacatcttgaagaaaatgaatgttggaaagacttgtgaatacaacacatcatgttttttctcttctgctgttcttaaaaaggaagaagtaaatcgcatagtaatttgtatcactgcagcaatcaaacagtatcaaaacgataccatcactatttattgatataagatatatcaataagcctgtgacttgcatagtcattacttcattact

SEQ ID NO: 47313 - protein, 517 aa, Arabidopsis thaliana
  peptide (1)..(517): Ceres Seq. ID no. 13588308
MLHMILSQRVILLRKYHSSANALVTKSPNSIPELVKHIDSDLIRNAHKVFDEIPELDVISATAVIGRFVKESRHVEASQAFKRLLCLGIRPNEFTFGTVIGSSTTSRDVKLGKQLHCYALKMGLASNVFVGSAVLNCYVKLSTLTDARRCFDDTRDPNVVSITNLISGYLKKHEFEEALSLFRAMPERSVVTWNAVIGGFSQTGRNEEAVNTFVDMLREGVVIPNESTFPCAITAISNIASHGAGKSIHACAIKFLGKRFNVFVWNSLISFYSKCGNMEDSLLAFNKLEEEQRNIVSWNSMIWGYAHNGRGEEAVAMFEKMVKDTNLRPNNVTILGVLFACNHAGLIQEGYMYFNKAVNDYDDPNLLEPEHYACMVDMLSRSGRFKEAEELIKSMPLDPGIGFWKALLGGCQIHSNKRLAKLAASKILELDPRDVSSYVMLSNAYSAMENWQNVSLIRRKMKETGLKRFTGCSWIEVRDQIRVFVNADKNNELKDEVYRMLALVSQHLEENECWKDL

SEQ ID NO: 47314 - protein, 514 aa, Arabidopsis thaliana
  peptide (1)..(514): Ceres Seq. ID no. 13588309
MILSQRVILLRKYHSSANALVTKSPNSIPELVKHIDSDLIRNAHKVFDEIPELDVISATAVIGRFVKESRHVEASQAFKRLLCLGIRPNEFTFGTVIGSSTTSRDVKLGKQLHCYALKMGLASNVFVGSAVLNCYVKLSTLTDARRCFDDTRDPNVVSITNLISGYLKKHEFEEALSLFRAMPERSVVTWNAVIGGFSQTGRNEEAVNTFVDMLREGVVIPNESTFPCAITAISNIASHGAGKSIHACAIKFLGKRFNVFVWNSLISFYSKCGNMEDSLLAFNKLEEEQRNIVSWNSMIWGYAHNGRGEEAVAMFEKMVKDTNLRPNNVTILGVLFACNHAGLIQEGYMYFNKAVNDYDDPNLLEPEHYACMVDMLSRSGRFKEAEELIKSMPLDPGIGFWKALLGGCQIHSNKRLAKLAASKILELDPRDVSSYVMLSNAYSAMENWQNVSLIRRKMKETGLKRFTGCSWIEVRDQIRVFVNADKNNELKDEVYRMLALVSQHLEENECWKDL

SEQ ID NO: 47315 - protein, 396 aa, Arabidopsis thaliana
  peptide (1)..(396): Ceres Seq. ID no. 13588310
MGLASNVFVGSAVLNCYVKLSTLTDARRCFDDTRDPNVVSITNLISGYLKKHEFEEALSLFRAMPERSVVTWNAVIGGFSQTGRNEEAVNTFVDMLREGVVIPNESTFPCAITAISNIASHGAGKSIHACAIKFLGKRFNVFVWNSLISFYSKCGNMEDSLLAFNKLEEEQRNIVSWNSMIWGYAHNGRGEEAVAMFEKMVKDTNLRPNNVTILGVLFACNHAGLIQEGYMYFNKAVNDYDDPNLLEPEHYACMVDMLSRSGRFKEAEELIKSMPLDPGIGFWKALLGGCQIHSNKRLAKLAASKILELDPRDVSSYVMLSNAYSAMENWQNVSLIRRKMKETGLKRFTGCSWIEVRDQIRVFVNADKNNELKDEVYRMLALVSQHLEENECWKDL

SEQ ID NO: 47316 - DNA, 1585 bp, Arabidopsis thaliana
  misc_feature (1)..(1585): Ceres Seq. ID no. 12602251
  misc_feature (1)..(1585): Ortholog of  Ceres SEQ ID NO 12778054 as cited in SEQ ID NO 63215
  misc_feature (1)..(1585): Ortholog of  Ceres SEQ ID NO 14303185 as cited in SEQ ID NO 67203
gcttcgattttttgttggccaaactttgctctttcctttttagaatttttctttctttttaaaaacatttcttttatttcttcttactttaaaacgtgtgagagatcgctttgctccgaaatttcaacccctggttgctttgtttgatccctagattttcgccgtgttatagaagaatctcattttttgccgtctgaatcgaaatttcgtgtcgagaactcctccactcctccacttctcgttttctctttttaatttattttactctattgtgaccattttgagcgttattgagaactcaaagctcaagaatgcgtgcaccatctttgcttgcacaatgcttgccgggtttgctgcctcaagaccgaggcggtgtgtctgcattatcagagaaggatttgcagcttccaacaccagctgttgagatcataccttctaagacagtagctcatcacaggtattcaggggagaatctagatgcgctcggtttacaagttttcaagggaaaagtaagtgttgctgatatcattgggctctctgggtcagaaactgctcctttaaaaaatgaaggttctttgaaaagttgggaaagctctgttgttcttgttaatgtccttaaaaacgagatccgtgatggacagcttagcttcaggggcaaaagggtcctcgagctaggttgcaactttggagttcctgggatatttgcctgtttgaaaggtgcttcctcagtccactttcaagacctcagcgcagaaacgataagatgcacaaccatcccaaacgttcttgcaaacctggagcaagcacgagacaggcaaagccgtcagccagaaagcccactcacaccatcaagacaagctatctctgcatctgtccgtttctatgcaggagaatgggaagagctctctaccgttctatccatcattagaacagatgtccttgaaccatctatccccgcaatgaacttgagcttttcagaggaagatttcatggatggatgtagcagccaagacggaagcattacaggacagccagatttctcctcgaggcgatcaaggaagctctcaggaagcagagcgtgggaaagagccaacgagactggtcaagaaggagaatatggatatgatgttatactaatgaccgaaatcccttactctattacttctctgaagaaactatattctctcataaagaagtgcctgagaccgccatacggtgtaatgtatttggcggcgaagaagcaatacgtaggattcaacagtggagcgaaacatttgaggaacttggtggatgaagaaactatcttaggagctcatttggtgaaggaaactacagacagagatatttggaagttcttcctcaagtaggtgtgtagaagaagaactcattcataaccaaatacattctgcagccaacaacataagctaaaaaaagatgtcaaatacaaaacttttttgcgtaatgtagtattgcaatgcaatgatgaaattgaagtttccatcttcatttctctttttaattattatcttgatggttcattttttttttgtatgaatacaaaattagattaaaaaaaaatttggcc

SEQ ID NO: 47317 - protein, 351 aa, Arabidopsis thaliana
  peptide (1)..(351): Ceres Seq. ID no. 12602252
MRAPSLLAQCLPGLLPQDRGGVSALSEKDLQLPTPAVEIIPSKTVAHHRYSGENLDALGLQVFKGKVSVADIIGLSGSETAPLKNEGSLKSWESSVVLVNVLKNEIRDGQLSFRGKRVLELGCNFGVPGIFACLKGASSVHFQDLSAETIRCTTIPNVLANLEQARDRQSRQPESPLTPSRQAISASVRFYAGEWEELSTVLSIIRTDVLEPSIPAMNLSFSEEDFMDGCSSQDGSITGQPDFSSRRSRKLSGSRAWERANETGQEGEYGYDVILMTEIPYSITSLKKLYSLIKKCLRPPYGVMYLAAKKQYVGFNSGAKHLRNLVDEETILGAHLVKETTDRDIWKFFLK

SEQ ID NO: 47318 - DNA, 1076 bp, Arabidopsis thaliana; identical to SEQ ID NO: 22642
  misc_feature (1)..(1076): Ceres Seq. ID no. 13588829
  misc_feature (1)..(1076): Ortholog of  Ceres SEQ ID NO 14313662 as cited in SEQ ID NO 54162
  misc_feature (1)..(1076): Ortholog of  Ceres SEQ ID NO 14302123 as cited in SEQ ID NO 0
  misc_feature (1)..(1076): Ortholog of  Ceres SEQ ID NO 15179452 as cited in SEQ ID NO 0

SEQ ID NO: 47319 - protein, 250 aa, Arabidopsis thaliana [sequence omitted]

SEQ ID NO: 47320 - protein, 207 aa, Arabidopsis thaliana; identical to SEQ ID NO: 22644
  peptide (1)..(207): Ceres Seq. ID no. 15220913

SEQ ID NO: 47321 - DNA, 1744 bp, Arabidopsis thaliana
  misc_feature (1)..(1744): Ceres Seq. ID no. 13648298
  misc_feature (1)..(1744): Ortholog of  Ceres SEQ ID NO 15170354 as cited in SEQ ID NO 54190
  misc_feature (1)..(1744): Ortholog of  Ceres SEQ ID NO 14307253 as cited in SEQ ID NO 54783
  misc_feature (1)..(1744): Ortholog of  Ceres SEQ ID NO 15225226 as cited in SEQ ID NO 58693
  misc_feature (1)..(1744): Ortholog of  Ceres SEQ ID NO 13654989 as cited in SEQ ID NO 63117
  misc_feature (1)..(1744): Ortholog of  Ceres SEQ ID NO 13584744 as cited in SEQ ID NO 69137
  misc_feature (1)..(1744): Ortholog of  Ceres SEQ ID NO 13624708 as cited in SEQ ID NO 0
gaagtggcaaactcatttttgtttgttccttctttcttttgaggccaaaagagaccagattcatttttggtttcttcaaaggccaaaccttattttcttattttctcagacaaacccttttgccatattacaaaataaaatttattcgtctgagaattatcttgatcccttttggattcgaggttcaagaacattcatgaacttcgagtaaatcaatcatcttcttgtagtaataatccaggaagatacattatcaacacacataaaacagaatgaaaatcaattgcttgttctgttgtatgtcccacagacgatttaacagacgatcatcatcgagacaaagcatcaaagactgcattgatgcaaagaacaatataactacatttgacaacatctcttttaaaacagatagcagtaggcgaagatacatatccgaggagatagcaaaactcggtaaagggaacatcagtgctcatatttttacattcagagagctttgcgtcgctaccaagaacttcaaccccgataatcagctcggtgaaggcgggtttggaagggtttacaaagggcagatagaaaccccggaacaagttgttgcggttaagcagctagacaggaatggttaccaagggaacagagagtttcttgtggaagtcatgatgttgagtctcttacatcatcaaaaccttgtcaatttggtcggatattgcgcagacggtgatcaacggattcttgtctatgaatacatgcaaaatggctctttagaggatcatcttctagaattggcgcggaacaagaagaagccgttggattgggacacaagaatgaaagttgcggcaggagcagctagagggcttgagtatctacacgaaacagcagatcctcctgttatctacagagacttcaaggcctcaaatatattacttgacgaagaattcaacccaaagctttcggatttcggtttagctaaggttggtccgaccggtggagagactcatgtgtcaacgagagtgatgggaacatacggctattgtgcgcctgagtatgctctcacaggacagctcactgtgaaatccgatgtatacagcttcggagtcgtgttcttggagatgatcacaggaagacgagtcattgacacaacaaaaccaactgaagaacagaacttagtcacttgggcgagtccattgttcaaagataggagaaagttcacgttaatggcagatccattgcttgaaggaaagtatccaataaaaggattgtatcaagcgcttgcagtagcagcaatgtgtcttcaagaagaagcagcaacgagaccaatgatgagtgatgtagtcactgcgcttgagtacttagccgtgaccaaaaccgaagaagatggacaaactgtagaaggagaagaagaagaagaagaagaagacgaaagatccaaactttgagcaaatttttttgtttgttttcgtttgtaattttcaaatgatcggttttaggaaatttgataactttacgaattcaccaatgaaaaaagaagattaaatgagagttttcgtgttycccmatcgaacattttaaaggatttgctgagaattttgtaaaaaaaaaaaaaaaaaaaaaaaaaaaaaaaaaaaaaaaaaaaaaaaaaaaaagaaaaaaaaaaaaaaaaaaacctcgrgggggggcccggaacccawttcccccaawagggagccgaataacaattcatgggccgccgtttaacaacgccggg

SEQ ID NO: 47322 - protein, 387 aa, Arabidopsis thaliana
  peptide (1)..(387): Ceres Seq. ID no. 15219538
MKINCLFCCMSHRRFNRRSSSRQSIKDCIDAKNNITTFDNISFKTDSSRRRYISEEIAKLGKGNISAHIFTFRELCVATKNFNPDNQLGEGGFGRVYKGQIETPEQVVAVKQLDRNGYQGNREFLVEVMMLSLLHHQNLVNLVGYCADGDQRILVYEYMQNGSLEDHLLELARNKKKPLDWDTRMKVAAGAARGLEYLHETADPPVIYRDFKASNILLDEEFNPKLSDFGLAKVGPTGGETHVSTRVMGTYGYCAPEYALTGQLTVKSDVYSFGVVFLEMITGRRVIDTTKPTEEQNLVTWASPLFKDRRKFTLMADPLLEGKYPIKGLYQALAVAAMCLQEEAATRPMMSDVVTALEYLAVTKTEEDGQTVEGEEEEEEEDERSKL

SEQ ID NO: 47323 - protein, 378 aa, Arabidopsis thaliana
  peptide (1)..(378): Ceres Seq. ID no. 15219539
MSHRRFNRRSSSRQSIKDCIDAKNNITTFDNISFKTDSSRRRYISEEIAKLGKGNISAHIFTFRELCVATKNFNPDNQLGEGGFGRVYKGQIETPEQVVAVKQLDRNGYQGNREFLVEVMMLSLLHHQNLVNLVGYCADGDQRILVYEYMQNGSLEDHLLELARNKKKPLDWDTRMKVAAGAARGLEYLHETADPPVIYRDFKASNILLDEEFNPKLSDFGLAKVGPTGGETHVSTRVMGTYGYCAPEYALTGQLTVKSDVYSFGVVFLEMITGRRVIDTTKPTEEQNLVTWASPLFKDRRKFTLMADPLLEGKYPIKGLYQALAVAAMCLQEEAATRPMMSDVVTALEYLAVTKTEEDGQTVEGEEEEEEEDERSKL

SEQ ID NO: 47324 - protein, 259 aa, Arabidopsis thaliana
  peptide (1)..(259): Ceres Seq. ID no. 15219540
MMLSLLHHQNLVNLVGYCADGDQRILVYEYMQNGSLEDHLLELARNKKKPLDWDTRMKVAAGAARGLEYLHETADPPVIYRDFKASNILLDEEFNPKLSDFGLAKVGPTGGETHVSTRVMGTYGYCAPEYALTGQLTVKSDVYSFGVVFLEMITGRRVIDTTKPTEEQNLVTWASPLFKDRRKFTLMADPLLEGKYPIKGLYQALAVAAMCLQEEAATRPMMSDVVTALEYLAVTKTEEDGQTVEGEEEEEEEDERSKL

SEQ ID NO: 47325 - DNA, 2036 bp, Arabidopsis thaliana
  misc_feature (1)..(2036): Ceres Seq. ID no. 13592107
  misc_feature (1)..(2036): Ortholog of  Ceres SEQ ID NO 12780298 as cited in SEQ ID NO 65880
  misc_feature (1)..(2036): Ortholog of  Ceres SEQ ID NO 13654539 as cited in SEQ ID NO 68015
aagctagttcgaagactggtccgaaaaatctgacaaggatgaagcaatcaagtgtcgtcgatctgttacttcttctcctggcgatcgctcttcttgcgacgccggcgttctccgatctggttttatccaaagtcgaacgtcgtatcgatgtgacttcacagattgctcgtgttactaagacccttaaggttgtaaattctggctctgaatcagtttctgagtttgctttgacattcccaaagtttcttggtaacaacttggcttatctatcggttgctcctagtgagggaaaggggaaatctaaacgaactttagtgaatctctctgtgagagaagctgatcagaaaggtttacctgattcaattagtgtttactcagttgcattacccaaaccactgagtaaaggcgatactttgacgctggaggtagttgctgcattcaccaatgtacttcagccatttcctgaaaagataactcagggtgaaatccatcttgttatgctccaagaaagcgcacaatatctctctccttacgcggttgagtctcagtcattgtctatcaaactaccgaatgccagaatcgaatcttacaccaaattcgagaatacaaagctccagggatcagagctcaaatatggtccttacaagaatctccagtcgtattcatactctccaattgttgtccactttgaaagcaaggctgcatttgctgtggctgagaagcttgtgcgagagatagaagtgtctcattgggggaatgtgcaggtcacggagaattacaatgttgtccaccgtggggctcaactcaagggcgagttttcaaggttagattttcaagccagacctaatccccgtggagcatctgcctttaggcatttacttgctagattaccccccagagcccattccatatattacagggatgatattggaaatatctccacgtctgagatgaaaagtgattcgaaaaagacagagctactaattgagcctaggtttcctttgtttggtgggtggaaaacttttttcacgataggttatggtttgccacttaccgacttcttgtttgcttcggaaggaaagcgattccttaatatctcctttggctcccctatacttgaccttgtcactgaaaaacttattgtacaggtggttttacctgaggggtcaaaggatatatcagttaccactccattcgccgtcaagcagtctcaagagatcaaatattcacatttagatatagctggtagaccagttgttgtgctcgaaaagaacaacgttgtccctgatcacaatcagcatatccaggtctactataagttcagcaacatcaatctgctgagtgagccattgatgttaatctctggatttttcattttgttcatcacttgcatcatatacacacgggctgacatctcaatctccaagtcctctccgagttatttggcgaaacttcaatgggatgaggtcctagcaacactccaggaagtccaaagcatcgtccaaaaatgcttagccacacatgataagcttgaagcatcgctgcgtgatctctcaagaactggtgacattcaaacctgcaaagcagctcgcaaatccactgacagtttactgaaagatctttcgaaagaactgaaaccgttgctgggtttcttacagtctttcccatcagcctctcacatatctccaaaggtcgaggagctagttgtgaaagagaaagaacttcaagagaagttaatggccaaacataccactgttgttgaagggtacgaaaagaaatcctcagggcgtgatatcgaaaaccggatcgcttctcagcagcaaaagatcatagctttgaggcaagaaattgaagatcttctagaattcattgatgagatctagaaaagttaaatgtagcaaatcctcttacgcttaaataccagacttttgaactcactcccattagaaaaattttgttcctcaatgagcagtgtttatcaactttgaaagacagctctagtttctctgagtttaacaaatgaatcatattatctt

SEQ ID NO: 47326 - protein, 626 aa, Arabidopsis thaliana
  peptide (1)..(626): Ceres Seq. ID no. 13592108
ASSKTGPKNLTRMKQSSVVDLLLLLLAIALLATPAFSDLVLSKVERRIDVTSQIARVTKTLKVVNSGSESVSEFALTFPKFLGNNLAYLSVAPSEGKGKSKRTLVNLSVREADQKGLPDSISVYSVALPKPLSKGDTLTLEVVAAFTNVLQPFPEKITQGEIHLVMLQESAQYLSPYAVESQSLSIKLPNARIESYTKFENTKLQGSELKYGPYKNLQSYSYSPIVVHFESKAAFAVAEKLVREIEVSHWGNVQVTENYNVVHRGAQLKGEFSRLDFQARPNPRGASAFRHLLARLPPRAHSIYYRDDIGNISTSEMKSDSKKTELLIEPRFPLFGGWKTFFTIGYGLPLTDFLFASEGKRFLNISFGSPILDLVTEKLIVQVVLPEGSKDISVTTPFAVKQSQEIKYSHLDIAGRPVVVLEKNNVVPDHNQHIQVYYKFSNINLLSEPLMLISGFFILFITCIIYTRADISISKSSPSYLAKLQWDEVLATLQEVQSIVQKCLATHDKLEASLRDLSRTGDIQTCKAARKSTDSLLKDLSKELKPLLGFLQSFPSASHISPKVEELVVKEKELQEKLMAKHTTVVEGYEKKSSGRDIENRIASQQQKIIALRQEIEDLLEFIDEI

SEQ ID NO: 47327 - protein, 614 aa, Arabidopsis thaliana
  peptide (1)..(614): Ceres Seq. ID no. 13592109
MKQSSVVDLLLLLLAIALLATPAFSDLVLSKVERRIDVTSQIARVTKTLKVVNSGSESVSEFALTFPKFLGNNLAYLSVAPSEGKGKSKRTLVNLSVREADQKGLPDSISVYSVALPKPLSKGDTLTLEVVAAFTNVLQPFPEKITQGEIHLVMLQESAQYLSPYAVESQSLSIKLPNARIESYTKFENTKLQGSELKYGPYKNLQSYSYSPIVVHFESKAAFAVAEKLVREIEVSHWGNVQVTENYNVVHRGAQLKGEFSRLDFQARPNPRGASAFRHLLARLPPRAHSIYYRDDIGNISTSEMKSDSKKTELLIEPRFPLFGGWKTFFTIGYGLPLTDFLFASEGKRFLNISFGSPILDLVTEKLIVQVVLPEGSKDISVTTPFAVKQSQEIKYSHLDIAGRPVVVLEKNNVVPDHNQHIQVYYKFSNINLLSEPLMLISGFFILFITCIIYTRADISISKSSPSYLAKLQWDEVLATLQEVQSIVQKCLATHDKLEASLRDLSRTGDIQTCKAARKSTDSLLKDLSKELKPLLGFLQSFPSASHISPKVEELVVKEKELQEKLMAKHTTVVEGYEKKSSGRDIENRIASQQQKIIALRQEIEDLLEFIDEI

SEQ ID NO: 47328 - protein, 461 aa, Arabidopsis thaliana
  peptide (1)..(461): Ceres Seq. ID no. 13592110
MLQESAQYLSPYAVESQSLSIKLPNARIESYTKFENTKLQGSELKYGPYKNLQSYSYSPIVVHFESKAAFAVAEKLVREIEVSHWGNVQVTENYNVVHRGAQLKGEFSRLDFQARPNPRGASAFRHLLARLPPRAHSIYYRDDIGNISTSEMKSDSKKTELLIEPRFPLFGGWKTFFTIGYGLPLTDFLFASEGKRFLNISFGSPILDLVTEKLIVQVVLPEGSKDISVTTPFAVKQSQEIKYSHLDIAGRPVVVLEKNNVVPDHNQHIQVYYKFSNINLLSEPLMLISGFFILFITCIIYTRADISISKSSPSYLAKLQWDEVLATLQEVQSIVQKCLATHDKLEASLRDLSRTGDIQTCKAARKSTDSLLKDLSKELKPLLGFLQSFPSASHISPKVEELVVKEKELQEKLMAKHTTVVEGYEKKSSGRDIENRIASQQQKIIALRQEIEDLLEFIDEI

SEQ ID NO: 47329 - DNA, 1185 bp, Arabidopsis thaliana
  misc_feature (1)..(1185): Ceres Seq. ID no. 13588319
  misc_feature (1)..(1185): Ortholog of  Ceres SEQ ID NO 13598353 as cited in SEQ ID NO 68742
atgaagcgattcttcaagcccatagagaaggagaattctccggcggctaagaaaccctgcctttcgccggaaaagcgtgacggagacggagatggagttgaagaagagaagaaccagaacgagccgtccaagtttatgacgtggaacgctaatagcttcctccttcgggtgaaaaatgactggtctcagttctctaagttcgtctccgattttgaccccgatgtcatcgccatacaggaagtaaggatgcctgctgctggtggaaagggaaaacctaaaaaccatgaagagttgagtgatgacacgaaagttttgcgtgaggaaaaacagaatgcgggagccacttatggagtaacaaactctcttgttgtttggataacattcaagcttgatattagttctgggaaacttaacttgcagattttgacacgggctctctcaagtccaccatttggaaattatggggtttggtggtctctcgcggactcgaagtatgcagggacagctttgttagtgaaaaaatgtttcaagcctcgaaaagtttactttaacttggacaaattagcatctaaacatgaacctgatggtcgtgttatcttagctgaatttgagacatttcgtcttttgaatacgtattcgcctaacaatggttggaaagatgaagagaatgcgtttcagaggagaagaaaatgggacaagaggattgttgaattcctcaacaaaacatctgataaaccgctaatatggtgtggcgacttaaatgtcagtcatgaggagatagatgttagccacccagaattttttgctacagcaaagcttaatggttatgttcctccaaacaaagaggactgcggacagcctggatttacaccatctgagagaggacgcttcggggcaactataaaagaaggaaggcttgttgatgcataccggtatctacacaaggagcaagaaatggaaagtggcttctcatggtcggggaatcccattggaaagtaccggggaaagaggatgaggatcgactattttctggtctctgaacaactcaaagaccgtatagtttcttgtaagatgcacggtcgtgggatagaacttgaaggtttccatgggagtgatcattgtccggttacactcgagctttcgaagccatcttcagaaatggaacagaaccaggtgtcaaactaa

SEQ ID NO: 47330 - protein, 394 aa, Arabidopsis thaliana
  peptide (1)..(394): Ceres Seq. ID no. 13588320
MKRFFKPIEKENSPAAKKPCLSPEKRDGDGDGVEEEKNQNEPSKFMTWNANSFLLRVKNDWSQFSKFVSDFDPDVIAIQEVRMPAAGGKGKPKNHEELSDDTKVLREEKQNAGATYGVTNSLVVWITFKLDISSGKLNLQILTRALSSPPFGNYGVWWSLADSKYAGTALLVKKCFKPRKVYFNLDKLASKHEPDGRVILAEFETFRLLNTYSPNNGWKDEENAFQRRRKWDKRIVEFLNKTSDKPLIWCGDLNVSHEEIDVSHPEFFATAKLNGYVPPNKEDCGQPGFTPSERGRFGATIKEGRLVDAYRYLHKEQEMESGFSWSGNPIGKYRGKRMRIDYFLVSEQLKDRIVSCKMHGRGIELEGFHGSDHCPVTLELSKPSSEMEQNQVSN

SEQ ID NO: 47331 - protein, 349 aa, Arabidopsis thaliana
  peptide (1)..(349): Ceres Seq. ID no. 13588321
MTWNANSFLLRVKNDWSQFSKFVSDFDPDVIAIQEVRMPAAGGKGKPKNHEELSDDTKVLREEKQNAGATYGVTNSLVVWITFKLDISSGKLNLQILTRALSSPPFGNYGVWWSLADSKYAGTALLVKKCFKPRKVYFNLDKLASKHEPDGRVILAEFETFRLLNTYSPNNGWKDEENAFQRRRKWDKRIVEFLNKTSDKPLIWCGDLNVSHEEIDVSHPEFFATAKLNGYVPPNKEDCGQPGFTPSERGRFGATIKEGRLVDAYRYLHKEQEMESGFSWSGNPIGKYRGKRMRIDYFLVSEQLKDRIVSCKMHGRGIELEGFHGSDHCPVTLELSKPSSEMEQNQVSN

SEQ ID NO: 47332 - protein, 312 aa, Arabidopsis thaliana
  peptide (1)..(312): Ceres Seq. ID no. 13588322
MPAAGGKGKPKNHEELSDDTKVLREEKQNAGATYGVTNSLVVWITFKLDISSGKLNLQILTRALSSPPFGNYGVWWSLADSKYAGTALLVKKCFKPRKVYFNLDKLASKHEPDGRVILAEFETFRLLNTYSPNNGWKDEENAFQRRRKWDKRIVEFLNKTSDKPLIWCGDLNVSHEEIDVSHPEFFATAKLNGYVPPNKEDCGQPGFTPSERGRFGATIKEGRLVDAYRYLHKEQEMESGFSWSGNPIGKYRGKRMRIDYFLVSEQLKDRIVSCKMHGRGIELEGFHGSDHCPVTLELSKPSSEMEQNQVSN

SEQ ID NO: 47333 - DNA, 1722 bp, Arabidopsis thaliana
  misc_feature (1)..(1722): Ceres Seq. ID no. 13648313
  misc_feature (1)..(1722): Ortholog of  Ceres SEQ ID NO 15170167 as cited in SEQ ID NO 66224
  misc_feature (1)..(1722): Ortholog of  Ceres SEQ ID NO 13502874 as cited in SEQ ID NO 66298
  misc_feature (1)..(1722): Ortholog of  Ceres SEQ ID NO 12614124 as cited in SEQ ID NO 68392
gaggcactctccaatttcattaaacaaggagagtagaacctaaagaaaaaagtggtcgtccaatggacctctcactaattcaaggcatgtctctgcctctctattttctcttaacaatattctttttcttctttgctaccgcaaaaacgcggagaagctctagcaccggcacgcttccaccgggtcctccgatactgccattggtcggaaacatattccaactcggattcaatcctcaccgttcacttgctgccttttcgaaaacgtacggacctataatgagtttgaagcttggaaggttaaccgcagtggttatatcttcaccagaagcagctaaagaggcacttagaacacacgaccatgtcatgtccgctcgaacctttaacgacgctcttcgagcctttgatcaccataaacattctattgtctggattcccccctctgctcgttggaggtttctgaagaaaacaataacaaaatatttgttatcaccgcaaaacttagatgctattcaatctttaagaatgagaaaggtggaggaactagtgagtttagtaaatgaatttcgcgagagaggagaagctattgacctggctcgtgcttccttcgtcacatctttcaatatcatctcaaatgctctgttttcagtagatttagcgacgtatgactctaactcctcgtcttacgaatttcacaacacggtggttcacctgacggagatcgccggtatacccaacgtaggagactatttccagtatatgaggtttcttgatttgcaaggtacccggaaaaaagcggtgctctgcatagagaaattgtttagggtttttcaagaattcattgatgctcgattagccaaaagattttctcggacagagaaagagcctaaagaggcttcaagcatcgatatgctagactcccttctggatctcacacagcaaaacgaagcagaattaacaatgaatgatctcaaacacttgcttctcgatgtgtttgttgctggcacagacacaaactctagtacaatggaatgggcaatgacggagttattccgtagcacggagaagatggtcaaagcacagagtgagatacggcaagtgattggtcaaaacggtttcgttcaagaatctgatatcccgagtctgccttacttacaagcaattgtgaaagagactcttcgtttgcatcctgcagctcctttgatccctagaaaatcagaatccgatgttcagattatgggtttccttgttcctataaacacccaggttgttgtgaacgtatgggcgataggacgagacgcgagcgtgtgggaaaatccaatgaagttcgagccagagaggttcttgttacgagaaaccgatgtaaaaggcagagatttcgagttgataccgtttggatcaggaagaaggatgtgtccgggaatctcgatggctcttaagacaatgcatatggtgcttgcctctcttctctattcctttgactggaagcttcaaaacggtgtcgtccccggaaacattgacatgagcgagactttcggtcttaccttacacaaggccaaatctctttgtgccgtacccgtcaagaaacctacaatatcgtcttcttattaataatcgtatcaatataaagttcgtgtacggatcaatattaataattgaagagaatgaaattataaaaaaaaaagaaaaaaaaaaaaaaaaaaaactcgagggggggcccggt

SEQ ID NO: 47334 - protein, 515 aa, Arabidopsis thaliana
  peptide (1)..(515): Ceres Seq. ID no. 13648314
MDLSLIQGMSLPLYFLLTIFFFFFATAKTRRSSSTGTLPPGPPILPLVGNIFQLGFNPHRSLAAFSKTYGPIMSLKLGRLTAVVISSPEAAKEALRTHDHVMSARTFNDALRAFDHHKHSIVWIPPSARWRFLKKTITKYLLSPQNLDAIQSLRMRKVEELVSLVNEFRERGEAIDLARASFVTSFNIISNALFSVDLATYDSNSSSYEFHNTVVHLTEIAGIPNVGDYFQYMRFLDLQGTRKKAVLCIEKLFRVFQEFIDARLAKRFSRTEKEPKEASSIDMLDSLLDLTQQNEAELTMNDLKHLLLDVFVAGTDTNSSTMEWAMTELFRSTEKMVKAQSEIRQVIGQNGFVQESDIPSLPYLQAIVKETLRLHPAAPLIPRKSESDVQIMGFLVPINTQVVVNVWAIGRDASVWENPMKFEPERFLLRETDVKGRDFELIPFGSGRRMCPGISMALKTMHMVLASLLYSFDWKLQNGVVPGNIDMSETFGLTLHKAKSLCAVPVKKPTISSSY

SEQ ID NO: 47335 - protein, 507 aa, Arabidopsis thaliana
  peptide (1)..(507): Ceres Seq. ID no. 13648315
MSLPLYFLLTIFFFFFATAKTRRSSSTGTLPPGPPILPLVGNIFQLGFNPHRSLAAFSKTYGPIMSLKLGRLTAVVISSPEAAKEALRTHDHVMSARTFNDALRAFDHHKHSIVWIPPSARWRFLKKTITKYLLSPQNLDAIQSLRMRKVEELVSLVNEFRERGEAIDLARASFVTSFNIISNALFSVDLATYDSNSSSYEFHNTVVHLTEIAGIPNVGDYFQYMRFLDLQGTRKKAVLCIEKLFRVFQEFIDARLAKRFSRTEKEPKEASSIDMLDSLLDLTQQNEAELTMNDLKHLLLDVFVAGTDTNSSTMEWAMTELFRSTEKMVKAQSEIRQVIGQNGFVQESDIPSLPYLQAIVKETLRLHPAAPLIPRKSESDVQIMGFLVPINTQVVVNVWAIGRDASVWENPMKFEPERFLLRETDVKGRDFELIPFGSGRRMCPGISMALKTMHMVLASLLYSFDWKLQNGVVPGNIDMSETFGLTLHKAKSLCAVPVKKPTISSSY

SEQ ID NO: 47336 - protein, 443 aa, Arabidopsis thaliana
  peptide (1)..(443): Ceres Seq. ID no. 13648316
MSLKLGRLTAVVISSPEAAKEALRTHDHVMSARTFNDALRAFDHHKHSIVWIPPSARWRFLKKTITKYLLSPQNLDAIQSLRMRKVEELVSLVNEFRERGEAIDLARASFVTSFNIISNALFSVDLATYDSNSSSYEFHNTVVHLTEIAGIPNVGDYFQYMRFLDLQGTRKKAVLCIEKLFRVFQEFIDARLAKRFSRTEKEPKEASSIDMLDSLLDLTQQNEAELTMNDLKHLLLDVFVAGTDTNSSTMEWAMTELFRSTEKMVKAQSEIRQVIGQNGFVQESDIPSLPYLQAIVKETLRLHPAAPLIPRKSESDVQIMGFLVPINTQVVVNVWAIGRDASVWENPMKFEPERFLLRETDVKGRDFELIPFGSGRRMCPGISMALKTMHMVLASLLYSFDWKLQNGVVPGNIDMSETFGLTLHKAKSLCAVPVKKPTISSSY

SEQ ID NO: 47337 - DNA, 1964 bp, Arabidopsis thaliana
  misc_feature (1)..(1964): Ceres Seq. ID no. 13588303
  misc_feature (1)..(1964): Ortholog of  Ceres SEQ ID NO 13654989 as cited in SEQ ID NO 63117
  misc_feature (1)..(1964): Ortholog of  Ceres SEQ ID NO 14313228 as cited in SEQ ID NO 67057
acctctattttttcaagtctgcagctttttgaagctatatttttcagatctttcactctctctctagctacttctttttgtctttaagttttcaaattttattaaatttttatattctactgcctcctcagcttctctcacaaagcacaaatccaagccccaaatcaaatcccaccattgttttattacctcaatccaagaacactagacacaacaaaaatctctgtttcttatccaaatttctgatctttgtggagaacaatattttgattggatgtgagacaaatgggttgtttacattccaaaactgctaatcttccttcttctgatgatccatcagctccaaacaaaccagaatcagtaaatggggaccaagtggatcaggaaatccaaaatttcaaagaatttgaactaaatgagttgaggaaagctaccaatgggtttagtcctagctgcattgtctctgaaggtggagagaaagctcctaatgtcgtttacagagggaagcttgaagggaatcatcttgtagctatcaagcgattctctaggcaatcttggcctgatgctcaacagtttgtggtggaagcgactggtgttgggaagcttagaaacaagagaatagttagtttgatcggttgctgtgctgaaggagatgagaggttgttggtggcagagtatatgcccaatgatactctctcaaagcatctcttccactgggaaaagcagccacttccatgggatatgcgtgttcgaatcgcagactatattgcagaagcacttgattactgcaatattgagaaccgaaaaatctatcatgacctcaatgcatacagaatcctcttcgacgaggaaggtgatcctcgtctatctacttttggtcttatgaagaacagtagagatggcaaaagctatagcacaaacttagcttatactccacctgagtttttacggacaggtagagtcattcctgaaagtgtgatattcagttatggaactattcttttagatcttttaagcggcaaacacattccacctagccatgcccttgatatcataagagggaaaaatgctttgcttcttatggattcatctcttgaagggcaatatgcgaatgatgatgcgactaaattagttgatcttgcttcaaaatgccttcaatcagaggcaaaggatcgaccagataccaaatttcttctctctgcagtagcaccactacaaaagcaagaagaggttgcttctcatgtcttaatgggcttaccaaagaacacagtaatattaccaactatgctttctcctcttggaaaggcctgtgcaaagatggaccttgcgacatttcacgacattttgcttaaaaccggttacagagatgaagaaggtgcagaaaatgagctttcatttcaagaatggacacaacaagtgcaggagatgcttaacacaaaaaagttcggggacattgctttcagagacaaggatttcaagaactcaattgaatactactccaagttggtggggatgatgccggttccttctgcaacagttttcgctagacgggctttctcctacttaatgacagaccaacaggagcttgcactgagagatgcaatgcaggcacaggtgtgcataccagaatggccaacagctttttacttgcaggctttagcgctctcaaagctcggaatggagactgatgctcaagatatgctcaacgatggcgctgcatatgatgctaagcgacagaatagctggcgctgctaagctattagaggaagtcccaaatatttatgggtcttttcagactgtaactgaaaggtgtgtatgcatgtaagagagagatggaatgtgttgtttacttttgtgaaatgagagcttctttttttgcatgaatctttatgaaaagtcaaatcttttggggaaagagagaataagactgcaaataactaatttgattccttcttccttatggc

SEQ ID NO: 47338 - protein, 489 aa, Arabidopsis thaliana
  peptide (1)..(489): Ceres Seq. ID no. 13588304
MGCLHSKTANLPSSDDPSAPNKPESVNGDQVDQEIQNFKEFELNELRKATNGFSPSCIVSEGGEKAPNVVYRGKLEGNHLVAIKRFSRQSWPDAQQFVVEATGVGKLRNKRIVSLIGCCAEGDERLLVAEYMPNDTLSKHLFHWEKQPLPWDMRVRIADYIAEALDYCNIENRKIYHDLNAYRILFDEEGDPRLSTFGLMKNSRDGKSYSTNLAYTPPEFLRTGRVIPESVIFSYGTILLDLLSGKHIPPSHALDIIRGKNALLLMDSSLEGQYANDDATKLVDLASKCLQSEAKDRPDTKFLLSAVAPLQKQEEVASHVLMGLPKNTVILPTMLSPLGKACAKMDLATFHDILLKTGYRDEEGAENELSFQEWTQQVQEMLNTKKFGDIAFRDKDFKNSIEYYSKLVGMMPVPSATVFARRAFSYLMTDQQELALRDAMQAQVCIPEWPTAFYLQALALSKLGMETDAQDMLNDGAAYDAKRQNSWRC

SEQ ID NO: 47339 - protein, 358 aa, Arabidopsis thaliana
  peptide (1)..(358): Ceres Seq. ID no. 13588305
MPNDTLSKHLFHWEKQPLPWDMRVRIADYIAEALDYCNIENRKIYHDLNAYRILFDEEGDPRLSTFGLMKNSRDGKSYSTNLAYTPPEFLRTGRVIPESVIFSYGTILLDLLSGKHIPPSHALDIIRGKNALLLMDSSLEGQYANDDATKLVDLASKCLQSEAKDRPDTKFLLSAVAPLQKQEEVASHVLMGLPKNTVILPTMLSPLGKACAKMDLATFHDILLKTGYRDEEGAENELSFQEWTQQVQEMLNTKKFGDIAFRDKDFKNSIEYYSKLVGMMPVPSATVFARRAFSYLMTDQQELALRDAMQAQVCIPEWPTAFYLQALALSKLGMETDAQDMLNDGAAYDAKRQNSWRC

SEQ ID NO: 47340 - protein, 337 aa, Arabidopsis thaliana
  peptide (1)..(337): Ceres Seq. ID no. 13588306
MRVRIADYIAEALDYCNIENRKIYHDLNAYRILFDEEGDPRLSTFGLMKNSRDGKSYSTNLAYTPPEFLRTGRVIPESVIFSYGTILLDLLSGKHIPPSHALDIIRGKNALLLMDSSLEGQYANDDATKLVDLASKCLQSEAKDRPDTKFLLSAVAPLQKQEEVASHVLMGLPKNTVILPTMLSPLGKACAKMDLATFHDILLKTGYRDEEGAENELSFQEWTQQVQEMLNTKKFGDIAFRDKDFKNSIEYYSKLVGMMPVPSATVFARRAFSYLMTDQQELALRDAMQAQVCIPEWPTAFYLQALALSKLGMETDAQDMLNDGAAYDAKRQNSWRC

SEQ ID NO: 47341 - DNA, 408 bp, Arabidopsis thaliana
  misc_feature (1)..(408): Ceres Seq. ID no. 11406364
  misc_feature (1)..(408): Ortholog of  Ceres SEQ ID NO 13495070 as cited in SEQ ID NO 53216
  misc_feature (1)..(408): Ortholog of  Ceres SEQ ID NO 13661333 as cited in SEQ ID NO 61620
  misc_feature (1)..(408): Ortholog of  Ceres SEQ ID NO 13623021 as cited in SEQ ID NO 0
acaaagtcatcatatgattgccgatattgcatttacgatttcgactttgtcactgcggagaactgccagaagagcaagatcttcttcattgcatggtctccggacactgccaaagtgagagacaagatgatttacgcgagctctaaagataggttcaagagagaactagatggaattcaagtggaacttcaagctactgatccaacagaaatgggtcttgatgttttcaaaagccgcaccaactaagtaaaacaaaaccctgtaagggcatttgaataagtttggtttctggagtgaatatgtttcctctgactgttatgaaaactttttaacaccttcaacttcattctacttggtattattgtatgtctttgatgtgttatgtgtgccttgtgatggttttcaatt

SEQ ID NO: 47342 - protein, 81 aa, Arabidopsis thaliana
  peptide (1)..(81): Ceres Seq. ID no. 11406365
TKSSYDCRYCIYDFDFVTAENCQKSKIFFIAWSPDTAKVRDKMIYASSKDRFKRELDGIQVELQATDPTEMGLDVFKSRTN

SEQ ID NO: 47343 - DNA, 2225 bp, Arabidopsis thaliana
  misc_feature (1)..(2225): Ceres Seq. ID no. 12591279
  misc_feature (1)..(2225): Ortholog of  Ceres SEQ ID NO 13657460 as cited in SEQ ID NO 66115
  misc_feature (1)..(2225): Ortholog of  Ceres SEQ ID NO 13659394 as cited in SEQ ID NO 67049
aaagcttgagatcccgccgtttctctctggtcatcatcctcttcttcagtgaccgcaaatctgcatgtttggcagtggtttttatagaccgccgggagggttagatctaggcgttaagaatggcttacatgtgcactgatagtggcaatctaatggctattgctcaacaagtcatcaaacagaagcagcaacaagaacaacaacagcagcaacatcatcaagaccatcagatttttggtattaatcctttgtctcttaacccatggcccaatacttccctcgggtttgggctttcaggttcggcttttcccgacccgtttcaagttaccggcggcggagattccaacgatcctggctttccttttcctaacttagaccaccaccacgccacaaccaccggcggtgggttcaggttatctgatttcggcggtggaaccggcggcggcgagtttgagtccgacgagtggatggagactcttatcagcggtggagactccgttgcagacggtcctgattgtgacacctggcatgataatcccgattacgtaatctacggtcctgatccattcgatacttacccgagtcgactcagtgtccaaccgtcagatctaaaccgagtcattgacacgtcgagtccgcttcctccgccgaccttgtggcctccttcttcgccattatcgattcctccgcttactcatgagtcaccaaccaaagaagatccagagactaacgactccgaagacgatgacttcgacctagaaccacctctcctcaaagctatatacgactgtgcacggatctcagactctgaccctaacgaagcttccaagacgcttcttcagatccgagaatctgtatcggagctaggtgatccgacggagcgagttgcattttacttcacggaagctctctccaacagactgtctcctaattcgccggcgacgtcgtcttcttcttcatctacggaggatttaatcttatcttataaaaccctaaacgacgcttgtccttactccaaattcgcacatttgacggcgaatcaagcgattctagaagcgacggagaagtcgaacaagattcacatcgtcgattttggaatcgttcaaggtatacaatggcctgctcttcttcaagctctagctactcgtacttctggtaaacccactcaaatccgggtctcgggtatacccgctccatctctcggtgaatctccggaaccgtcgttaatcgccaccggaaaccgcctccgtgatttcgccaaggttctggatctgaatttcgatttcatcccaattctcactcccatacatttacttaacgggtcaagtttccgggtcgacccggatgaagtactggccgtgaatttcatgctccagctctacaaattactcgacgagacgccgacgatagttgacaccgcactacggctcgccaaatcgttgaacccgagggtcgtcactctcggagaatacgaagtgagcttaaaccgggtcggtttcgctaaccgggtaaagaacgcgcttcaattctattccgcggttttcgaatcccttgaaccgaacttggggcgtgattcggaggagagagtgagagttgagcgagagttgttcggccggagaatctcgggtttgattggaccggagaaaaccggaattcatagagaaagaatggaagagaaagagcaatggcgggtattaatggagaatgccggttttgaatcggttaagctgagtaattacgcagtgagccaagcgaagattctattgtggaattacaattacagcaatttgtattcaattgttgaatctaagcctggcttcatctctttggcctggaacgatttacctctcctcactctttcttcctggcgataaccaaaccaaaccgatccggtattcttagttttgttttgttttcaatgttatttttggttagacaaatattcaattgttaatatactccgtggtcagagtgttttgtttttcttttagttcgaacgttgaattaattcaggggtaggttttgaattctctgaaccttatgtgttttttggtaacatcatttggatttgtgaactaggtttaaaaactggtcttagtcttgttgttttctcattagataatttaaactggtttgcttctttatttttggttggataaagtgaccggttctggtcatctgtttgagatgtaattactatttcataaaattaggaagttgaaagc

SEQ ID NO: 47344 - protein, 584 aa, Arabidopsis thaliana
  peptide (1)..(584): Ceres Seq. ID no. 12591280
MAYMCTDSGNLMAIAQQVIKQKQQQEQQQQQHHQDHQIFGINPLSLNPWPNTSLGFGLSGSAFPDPFQVTGGGDSNDPGFPFPNLDHHHATTTGGGFRLSDFGGGTGGGEFESDEWMETLISGGDSVADGPDCDTWHDNPDYVIYGPDPFDTYPSRLSVQPSDLNRVIDTSSPLPPPTLWPPSSPLSIPPLTHESPTKEDPETNDSEDDDFDLEPPLLKAIYDCARISDSDPNEASKTLLQIRESVSELGDPTERVAFYFTEALSNRLSPNSPATSSSSSSTEDLILSYKTLNDACPYSKFAHLTANQAILEATEKSNKIHIVDFGIVQGIQWPALLQALATRTSGKPTQIRVSGIPAPSLGESPEPSLIATGNRLRDFAKVLDLNFDFIPILTPIHLLNGSSFRVDPDEVLAVNFMLQLYKLLDETPTIVDTALRLAKSLNPRVVTLGEYEVSLNRVGFANRVKNALQFYSAVFESLEPNLGRDSEERVRVERELFGRRISGLIGPEKTGIHRERMEEKEQWRVLMENAGFESVKLSNYAVSQAKILLWNYNYSNLYSIVESKPGFISLAWNDLPLLTLSSWR

SEQ ID NO: 47345 - protein, 581 aa, Arabidopsis thaliana
  peptide (1)..(581): Ceres Seq. ID no. 12591281
MCTDSGNLMAIAQQVIKQKQQQEQQQQQHHQDHQIFGINPLSLNPWPNTSLGFGLSGSAFPDPFQVTGGGDSNDPGFPFPNLDHHHATTTGGGFRLSDFGGGTGGGEFESDEWMETLISGGDSVADGPDCDTWHDNPDYVIYGPDPFDTYPSRLSVQPSDLNRVIDTSSPLPPPTLWPPSSPLSIPPLTHESPTKEDPETNDSEDDDFDLEPPLLKAIYDCARISDSDPNEASKTLLQIRESVSELGDPTERVAFYFTEALSNRLSPNSPATSSSSSSTEDLILSYKTLNDACPYSKFAHLTANQAILEATEKSNKIHIVDFGIVQGIQWPALLQALATRTSGKPTQIRVSGIPAPSLGESPEPSLIATGNRLRDFAKVLDLNFDFIPILTPIHLLNGSSFRVDPDEVLAVNFMLQLYKLLDETPTIVDTALRLAKSLNPRVVTLGEYEVSLNRVGFANRVKNALQFYSAVFESLEPNLGRDSEERVRVERELFGRRISGLIGPEKTGIHRERMEEKEQWRVLMENAGFESVKLSNYAVSQAKILLWNYNYSNLYSIVESKPGFISLAWNDLPLLTLSSWR

SEQ ID NO: 47346 - protein, 573 aa, Arabidopsis thaliana
  peptide (1)..(573): Ceres Seq. ID no. 12591282
MAIAQQVIKQKQQQEQQQQQHHQDHQIFGINPLSLNPWPNTSLGFGLSGSAFPDPFQVTGGGDSNDPGFPFPNLDHHHATTTGGGFRLSDFGGGTGGGEFESDEWMETLISGGDSVADGPDCDTWHDNPDYVIYGPDPFDTYPSRLSVQPSDLNRVIDTSSPLPPPTLWPPSSPLSIPPLTHESPTKEDPETNDSEDDDFDLEPPLLKAIYDCARISDSDPNEASKTLLQIRESVSELGDPTERVAFYFTEALSNRLSPNSPATSSSSSSTEDLILSYKTLNDACPYSKFAHLTANQAILEATEKSNKIHIVDFGIVQGIQWPALLQALATRTSGKPTQIRVSGIPAPSLGESPEPSLIATGNRLRDFAKVLDLNFDFIPILTPIHLLNGSSFRVDPDEVLAVNFMLQLYKLLDETPTIVDTALRLAKSLNPRVVTLGEYEVSLNRVGFANRVKNALQFYSAVFESLEPNLGRDSEERVRVERELFGRRISGLIGPEKTGIHRERMEEKEQWRVLMENAGFESVKLSNYAVSQAKILLWNYNYSNLYSIVESKPGFISLAWNDLPLLTLSSWR

SEQ ID NO: 47347 - DNA, 1845 bp, Arabidopsis thaliana
  misc_feature (1)..(1845): Ceres Seq. ID no. 12605213
  misc_feature (1)..(1845): Ortholog of  Ceres SEQ ID NO 15176016 as cited in SEQ ID NO 56593
  misc_feature (1)..(1845): Ortholog of  Ceres SEQ ID NO 13660260 as cited in SEQ ID NO 67494
ggagaagagagagagagagagacctaccagtcccattttccgtgttcagagagcgaagtggaaggtggttcacgttttcgtctaatctccgactatcactgagattggaccatttggtttctgggtttcttttggtcagataaagttacaagcttgagaattctcgatctgtggtttttgtttctgtttcttatgaacttcgagttttgaagatggatctatcttctcaacgacaatccccaaatggttctaggggttttcgtcttcaagctccattggtggattctgtatcttgttattgtagagtagattccggtcttaagactgttgtagaagcaaggaagtttgttcctggttcaaagctttgtattcaacctgatatcaatcccaatgctcatagacgtaagaattctaagagggagaggactagaattcaacctccgcttctccctggcctccctgacgatctagctgtcgcttgccttatccgtgttcctcgtgcagaacatagaaaactcaggctcgtgtgtaagagatggtataggcttgcttctgggaacttcttttactctcaaaggaagttacttgggatgtctgaagaatgggtttatgtttttaaaagagatcgtgatgggaagatctcgtggaatacgtttgatcctatctctcagctttggcagccgcttccacctgttccaagggaatattcagaggctgttgggtttggttgcgctgttttaagcggttgtcatctttatttgtttggaggtaaggatcctttaagagggtcaatgaggagggtcattttctataatgcaaggacgaataagtggcacagagcaccggatatgcttaggaagcggcatttttttggttgttgtgttataaacaattgtttatatgtagcgggtggggagtgtgaaggaattcaaaggacacttcgctcagctgaggtttatgatccaaacaagaacaggtggagttttattgctgatatgagtacagcaatggtgcctctgatcggtgtggtttatgacaaaaagtggtttctcaagggtcttgggtctcaccaactagtaatgagtgaagcttatgacccagaagttaattcatggagcccggttagtgacgggatggttgctggttggcgtaatccgtgtacttctctaaacggtcgtctttacggattggattgtagggacggatgcaaactcagggtatttgatgaatccacggattcatggaacaaattcatggacagtaaagctcatttgggaaactcgaagtcgcttgaagctgcagctcttgttcctctacacaataagctttgtataatccggaacaacatgagcatgagtctggttgatgtctcgaatcctgacaaaaacaaccctcgactgtgggaaaacattgccgtaaaaggacagtccaagagcattctcagtaatatatggtcgagtattgcagggagagctttgaagagccatatagtgcattgtcaagtgcttcaagcgtgacaaaaatgttctgaaactcaacaatggagccaatgttcagaagaaatcagccaccttgagcttccaagaaggatacatatctgactcaagaactgtttcagtctttcagagtcatgcaaaggagaactcacgtctggcctttaacagatcacaggcgagacgaagagagagcaagacagtgaggtgggttacatttgttcaccatttcttctggtgttaaaatctgtgttagtatttataggaatcgctttaatggttttggcaatttgttatagcattttgttgacattttcttctgtgatttgtaaatcttaaatctttcttctct

SEQ ID NO: 47348 - protein, 434 aa, Arabidopsis thaliana
  peptide (1)..(434): Ceres Seq. ID no. 12605214
MDLSSQRQSPNGSRGFRLQAPLVDSVSCYCRVDSGLKTVVEARKFVPGSKLCIQPDINPNAHRRKNSKRERTRIQPPLLPGLPDDLAVACLIRVPRAEHRKLRLVCKRWYRLASGNFFYSQRKLLGMSEEWVYVFKRDRDGKISWNTFDPISQLWQPLPPVPREYSEAVGFGCAVLSGCHLYLFGGKDPLRGSMRRVIFYNARTNKWHRAPDMLRKRHFFGCCVINNCLYVAGGECEGIQRTLRSAEVYDPNKNRWSFIADMSTAMVPLIGVVYDKKWFLKGLGSHQLVMSEAYDPEVNSWSPVSDGMVAGWRNPCTSLNGRLYGLDCRDGCKLRVFDESTDSWNKFMDSKAHLGNSKSLEAAALVPLHNKLCIIRNNMSMSLVDVSNPDKNNPRLWENIAVKGQSKSILSNIWSSIAGRALKSHIVHCQVLQA

SEQ ID NO: 47349 - protein, 308 aa, Arabidopsis thaliana
  peptide (1)..(308): Ceres Seq. ID no. 12605215
MSEEWVYVFKRDRDGKISWNTFDPISQLWQPLPPVPREYSEAVGFGCAVLSGCHLYLFGGKDPLRGSMRRVIFYNARTNKWHRAPDMLRKRHFFGCCVINNCLYVAGGECEGIQRTLRSAEVYDPNKNRWSFIADMSTAMVPLIGVVYDKKWFLKGLGSHQLVMSEAYDPEVNSWSPVSDGMVAGWRNPCTSLNGRLYGLDCRDGCKLRVFDESTDSWNKFMDSKAHLGNSKSLEAAALVPLHNKLCIIRNNMSMSLVDVSNPDKNNPRLWENIAVKGQSKSILSNIWSSIAGRALKSHIVHCQVLQA

SEQ ID NO: 47350 - protein, 241 aa, Arabidopsis thaliana
  peptide (1)..(241): Ceres Seq. ID no. 12605216
MRRVIFYNARTNKWHRAPDMLRKRHFFGCCVINNCLYVAGGECEGIQRTLRSAEVYDPNKNRWSFIADMSTAMVPLIGVVYDKKWFLKGLGSHQLVMSEAYDPEVNSWSPVSDGMVAGWRNPCTSLNGRLYGLDCRDGCKLRVFDESTDSWNKFMDSKAHLGNSKSLEAAALVPLHNKLCIIRNNMSMSLVDVSNPDKNNPRLWENIAVKGQSKSILSNIWSSIAGRALKSHIVHCQVLQA

SEQ ID NO: 47351 - DNA, 1485 bp, Arabidopsis thaliana
  misc_feature (1)..(1485): Ceres Seq. ID no. 12604670
  misc_feature (1)..(1485): Ortholog of  Ceres SEQ ID NO 13656849 as cited in SEQ ID NO 65764
gctgaataagagttaaaaaaagacattaatggccttaaggccttgtactggattcacaatctcctctcttcgcaacgcttccgccgccaacaacaatctcttctctctcctctccttctcttcgtcgtctccggcgaagaggaatcttcttctctcttcgctccaggacaatctccgtcgtttcgcatccagcgcttctctttaccgtcaacatctccggaatcaacaacaacaacatcagcaacaacagcaatcgcgcgtgaaagaaaaatcagaaacgctggctcagaagatcggtaaatctatccggcgtgccggtgcgccgtcgaaagctagggtttacgctgatgtcaacgttgttagacctaaggactattgggattacgagtcccttgctgttcaatggggtgtacaggatgattatgaggtggtgaggaaggtaggaaggggaaaatacagtgaggtctttgaaggcattcatgctactgataacgagaaatgtgttatcaagattttgaagcctgtgaagaagaagaagattaagagagagattaagattctgcagaacctctgcggtgggcctaatattgtaaaattgctcgacattgttagagatcagcagtctaagacgcccagcttgatatttgaacatgtgaacaataaagatttcaaagttctctatccaactctctcagactatgatgttcgatattacatttttgaacttctaaaggcgttggatttctgccattcacgtggaatcatgcacagagatgtgaaaccacataatgtcatgattgatcacgagcagcgaaaacttcgtttaattgactggggtttggcagaattctatcatcctgggaaagaatacaatgtccgtgttgcttcaaggtactttaagggtccagagctgctggtggatttacaggactatgattattccttagacctatggagtcttgggtgtatgtttgctggaatgatattccgcaaggagccgttcttttatggccatgacaactatgatcaattggtcaaaattgcgaaggtgcttggcacagatgaactcaacgcctacctaaacaaataccgtatagagttggaccctaatctaacatccctcgtgggcagacatagccggaagccatggacaaagttcatcaattctgaaaaccagcacttagcagttcctgaggctgttgattttgtggacaagttgctgagatatgatcaccaagaaaggccaacagctaaagaagcaatggcgcatccatatttctatccgattagaaatgcagagagcagccgtacgccgcgcagccagtgatctcgaaaacatttgcttgttcaatcttctgatttttcatttctttacggattcaaatttgttataaatcgatctgtcattgtttcattctctcaagtgtgcgtgtgttactgttttgctctttctcagtgtttcattcaactcatttgaattttatt

SEQ ID NO: 47352 - protein, 432 aa, Arabidopsis thaliana
  peptide (1)..(432): Ceres Seq. ID no. 12604671
MALRPCTGFTISSLRNASAANNNLFSLLSFSSSSPAKRNLLLSSLQDNLRRFASSASLYRQHLRNQQQQHQQQQQSRVKEKSETLAQKIGKSIRRAGAPSKARVYADVNVVRPKDYWDYESLAVQWGVQDDYEVVRKVGRGKYSEVFEGIHATDNEKCVIKILKPVKKKKIKREIKILQNLCGGPNIVKLLDIVRDQQSKTPSLIFEHVNNKDFKVLYPTLSDYDVRYYIFELLKALDFCHSRGIMHRDVKPHNVMIDHEQRKLRLIDWGLAEFYHPGKEYNVRVASRYFKGPELLVDLQDYDYSLDLWSLGCMFAGMIFRKEPFFYGHDNYDQLVKIAKVLGTDELNAYLNKYRIELDPNLTSLVGRHSRKPWTKFINSENQHLAVPEAVDFVDKLLRYDHQERPTAKEAMAHPYFYPIRNAESSRTPRSQ

SEQ ID NO: 47353 - DNA, 1724 bp, Arabidopsis thaliana; identical to SEQ ID NO: 39285
  misc_feature (1)..(1724): Ceres Seq. ID no. 13592997
  misc_feature (1)..(1724): Ortholog of  Ceres SEQ ID NO 14306707 as cited in SEQ ID NO 53331

SEQ ID NO: 47354 - protein, 446 aa, Arabidopsis thaliana; identical to SEQ ID NO: 39286
  peptide (1)..(446): Ceres Seq. ID no. 13592998

SEQ ID NO: 47355 - DNA, 1240 bp, Arabidopsis thaliana
  misc_feature (1)..(1240): Ceres Seq. ID no. 12606147
  misc_feature (1)..(1240): Ortholog of  Ceres SEQ ID NO 15178472 as cited in SEQ ID NO 65628
gctcggagcttgacacggtgaagtcatggcggcggagacggaggcagaatcacagtaccttaatgtactctctgctttcctcgccatcgaaccggtggactccgtcatcactctcgctagagggtgcactggaggatcaattactgagaacgcccagagatttttctgggaaatttgcgttgaagctgctgcgaatggtaacggatcatacgcgaagaagttactgaagaaactcataaatgaagttgagttagagaatggtgaagtattggatgaagtgtatgaagagtatgctctttacatgttaacttctaaggaagatatattggtgaaagaaaacataaggataaccaaattcatttcttttcttttccctgaaggttcgtacaaacacccgagttgtccaaggtcgaggaaattagttattccgctgcattgttcgttgaacatgcttgaaggagataccgggtgttccatctggccatcgagtctgtttctctcagaatttgttttgtcatttccagagttattcgccaataaagcctgttttgaggttggttctggagttggtatggtcgggatttgccttgcacatgtaaaggccaaagaggtgatactaacagacggagatcttttaactttgtctaacatgaagcttaatttggagagaaatcacttaaactatgatgacgagtttctcaaacgacccggagaagctcagagtacacgagttaaatgcactcatcttccatgggaaactgcatcggaaagtgaactaagccaatatcgtccagatattgttctaggcgcagatgtaatctatgatccgtcatgtctccctcatctacttcgggtgctagtagcccttttaaagaacccacccaaaagaggaaatggctctctcgagactgaagacagagacacgacacaagaagaacacagtcctgcggtggcttatatcgcatctgtgatccgcaatgtagacacttttaatgtgttcttgacacttgcagaccaaatggacctttccatcacagacgtgaccgcagaacttacgcctcgctttgagcttttaccatatatgcattcgtatgaccgctcaaccgttcggctcttctccatatcctccagataatgtaattctttcagaagcaatttagtttctttacaattgaaatcaaatattcctggaccgttatttcgaaacatattccaagatggttgttggttggctcaggtc

SEQ ID NO: 47356 - protein, 369 aa, Arabidopsis thaliana
  peptide (1)..(369): Ceres Seq. ID no. 12606148
MAAETEAESQYLNVLSAFLAIEPVDSVITLARGCTGGSITENAQRFFWEICVEAAANGNGSYAKKLLKKLINEVELENGEVLDEVYEEYALYMLTSKEDILVKENIRITKFISFLFPEGSYKHPSCPRSRKLVIPLHCSLNMLEGDTGCSIWPSSLFLSEFVLSFPELFANKACFEVGSGVGMVGICLAHVKAKEVILTDGDLLTLSNMKLNLERNHLNYDDEFLKRPGEAQSTRVKCTHLPWETASESELSQYRPDIVLGADVIYDPSCLPHLLRVLVALLKNPPKRGNGSLETEDRDTTQEEHSPAVAYIASVIRNVDTFNVFLTLADQMDLSITDVTAELTPRFELLPYMHSYDRSTVRLFSISSR

SEQ ID NO: 47357 - protein, 277 aa, Arabidopsis thaliana
  peptide (1)..(277): Ceres Seq. ID no. 12606149
MLTSKEDILVKENIRITKFISFLFPEGSYKHPSCPRSRKLVIPLHCSLNMLEGDTGCSIWPSSLFLSEFVLSFPELFANKACFEVGSGVGMVGICLAHVKAKEVILTDGDLLTLSNMKLNLERNHLNYDDEFLKRPGEAQSTRVKCTHLPWETASESELSQYRPDIVLGADVIYDPSCLPHLLRVLVALLKNPPKRGNGSLETEDRDTTQEEHSPAVAYIASVIRNVDTFNVFLTLADQMDLSITDVTAELTPRFELLPYMHSYDRSTVRLFSISSR

SEQ ID NO: 47358 - protein, 228 aa, Arabidopsis thaliana
  peptide (1)..(228): Ceres Seq. ID no. 12606150
MLEGDTGCSIWPSSLFLSEFVLSFPELFANKACFEVGSGVGMVGICLAHVKAKEVILTDGDLLTLSNMKLNLERNHLNYDDEFLKRPGEAQSTRVKCTHLPWETASESELSQYRPDIVLGADVIYDPSCLPHLLRVLVALLKNPPKRGNGSLETEDRDTTQEEHSPAVAYIASVIRNVDTFNVFLTLADQMDLSITDVTAELTPRFELLPYMHSYDRSTVRLFSISSR

SEQ ID NO: 47359 - DNA, 1451 bp, Arabidopsis thaliana
  misc_feature (1)..(1451): Ceres Seq. ID no. 14307623
  misc_feature (1)..(1451): Ortholog of  Ceres SEQ ID NO 13596465 as cited in SEQ ID NO 62133
gaaattcgtttaccagtcatcaccaccacaacctccggcgaaaatggacgtgcgtgaatcaatctcactgcaaaaccaagtctccatgaatctcgcaaaacacgtaatcaccaccgtctctcaaaactccaacgtcatcttctcaccggcttcaatcaacgtcgtactcagtataatcgccgctggatccgccggcgctaccaaagatcagatcctctcgtttctcaaattctcttccactgatcaacttaattcattctcttccgaaatcgtctccgctgttctcgctgacggtagtgctaacggtggtcctaagctctcggtggctaatggcgcctggatcgataagtctctctcctttaaaccttcctttaaacagctcttggaagattcgtataaagctgcttcgaatcaagctgattttcaatcgaaggctgtggaggtgattgctgaagtgaattcatgggctgaaaaggagacaaatggtctcatcactgaggttcttccagaaggatcagctgatagtatgaccaaactgatatttgcaaatgcattgtacttcaagggaacatggaacgagaaattcgatgagtcgttaacacaagaaggcgagtttcaccttcttgacggtaacaaagtgactgcaccattcatgaccagcaagaagaaacaatacgtaagtgcttacgatggtttcaaagttttgggacttccttacgtacaaggacaggataagcgacaattctccatgtacttttatcttcccgatgcaaacaacggactgtctgatcttctggacaaaatagtttccactcctgggttcttagacaaccacatcccacgcagacaagttaaagtccgcgaattcaagattccaaagtttaaattctctttcgggttcgatgcttcaaatgttttaaaaggattgggactgacttcgcctttcagcggtgaagaaggtttaactgagatggttgaatctcctgagatggggaagaatctatgcgtatcgaacattttccataaagcgtgtatcgaagtgaatgaagaaggaacagaagctgcagctgcatcagctggagttataaagctaagaggattgcttatggaggaagatgaaatagattttgttgcagaccatccgtttctattggtggtcacagagaacataacaggagtggttctgttcattggccaagttgttgatccgttgcattaatctaaagctaatgtggaagtttttggttttacttaaaataaatgagtcattggttttgaggactcatctttatgtaacatcctttgtcttgactctttgatgtgtgtaagaataatagtgatacataacagcttttcttctgtatttgggtcacatgtactgaactgatagacatacatacatgtgatgcatcttaatgattcactgtattgggtcattcatggttacatac

SEQ ID NO: 47360 - protein, 405 aa, Arabidopsis thaliana
  peptide (1)..(405): Ceres Seq. ID no. 14307624
KFVYQSSPPQPPAKMDVRESISLQNQVSMNLAKHVITTVSQNSNVIFSPASINVVLSIIAAGSAGATKDQILSFLKFSSTDQLNSFSSEIVSAVLADGSANGGPKLSVANGAWIDKSLSFKPSFKQLLEDSYKAASNQADFQSKAVEVIAEVNSWAEKETNGLITEVLPEGSADSMTKLIFANALYFKGTWNEKFDESLTQEGEFHLLDGNKVTAPFMTSKKKQYVSAYDGFKVLGLPYVQGQDKRQFSMYFYLPDANNGLSDLLDKIVSTPGFLDNHIPRRQVKVREFKIPKFKFSFGFDASNVLKGLGLTSPFSGEEGLTEMVESPEMGKNLCVSNIFHKACIEVNEEGTEAAAASAGVIKLRGLLMEEDEIDFVADHPFLLVVTENITGVVLFIGQVVDPLH

SEQ ID NO: 47361 - protein, 391 aa, Arabidopsis thaliana
  peptide (1)..(391): Ceres Seq. ID no. 14307625
MDVRESISLQNQVSMNLAKHVITTVSQNSNVIFSPASINVVLSIIAAGSAGATKDQILSFLKFSSTDQLNSFSSEIVSAVLADGSANGGPKLSVANGAWIDKSLSFKPSFKQLLEDSYKAASNQADFQSKAVEVIAEVNSWAEKETNGLITEVLPEGSADSMTKLIFANALYFKGTWNEKFDESLTQEGEFHLLDGNKVTAPFMTSKKKQYVSAYDGFKVLGLPYVQGQDKRQFSMYFYLPDANNGLSDLLDKIVSTPGFLDNHIPRRQVKVREFKIPKFKFSFGFDASNVLKGLGLTSPFSGEEGLTEMVESPEMGKNLCVSNIFHKACIEVNEEGTEAAAASAGVIKLRGLLMEEDEIDFVADHPFLLVVTENITGVVLFIGQVVDPLH

SEQ ID NO: 47362 - protein, 377 aa, Arabidopsis thaliana
  peptide (1)..(377): Ceres Seq. ID no. 14307626
MNLAKHVITTVSQNSNVIFSPASINVVLSIIAAGSAGATKDQILSFLKFSSTDQLNSFSSEIVSAVLADGSANGGPKLSVANGAWIDKSLSFKPSFKQLLEDSYKAASNQADFQSKAVEVIAEVNSWAEKETNGLITEVLPEGSADSMTKLIFANALYFKGTWNEKFDESLTQEGEFHLLDGNKVTAPFMTSKKKQYVSAYDGFKVLGLPYVQGQDKRQFSMYFYLPDANNGLSDLLDKIVSTPGFLDNHIPRRQVKVREFKIPKFKFSFGFDASNVLKGLGLTSPFSGEEGLTEMVESPEMGKNLCVSNIFHKACIEVNEEGTEAAAASAGVIKLRGLLMEEDEIDFVADHPFLLVVTENITGVVLFIGQVVDPLH

SEQ ID NO: 47363 - DNA, 2022 bp, Arabidopsis thaliana
  misc_feature (1)..(2022): Ceres Seq. ID no. 12592460
  misc_feature (1)..(2022): Ortholog of  Ceres SEQ ID NO 15169072 as cited in SEQ ID NO 53955
  misc_feature (1)..(2022): Ortholog of  Ceres SEQ ID NO 15224912 as cited in SEQ ID NO 63475
  misc_feature (1)..(2022): Ortholog of  Ceres SEQ ID NO 13659394 as cited in SEQ ID NO 67049
aagctgattcttgagtatgcaaggaaaacttctcttttgtccccttgtcaacaaaaatctcccattcaacaaaatttcttcagcttctctccttcaaaaggtttttattctccttggtttgaacaagttacactgtagagagtgatttggctaaaagaagattgattcaggagctgtgtagtgtattgctggggtttttccaatgcaaacgtctcagaaacatcacagtgcggctggactgcacatgctgtatcctcaagtctactgttcacctcagtttcaagcgaaagacaacaaaggcttctctgatatcccgtccaaagaaaacttttttaccctcgaatcctccactgcttctggtagtcttccttcgtatgactctccttctgtgagcattacatctggccggagcccgtttctcctcagggctctcagtcttgcatctcggatctccatcattcccctgacaacgtctatggatcacctttgagtggggtgtcatctcttgcctatgatgaagctggagtcaagagtaagattcgggaacttgaggtctcgctgctgagtggtgatacaaaagttgaagaattctcaggttttagccccgctgctgggaagtcgtggaactgggatgaacttttggctttgactccacagttggacttgaaagaggtgctggtggaggctgctcgggcagtcgctgatggggatttcgctacagcgtatggattccttgatgtcttggaacagatggtgtcagtctcaggcagtccgatccaacggctaggcacttacatggcagaagggcttagagcgaggcttgaggggtctgggagcaatatatacaaatccttgaaatgcaatgaaccaacgggaagggaactgatgtcttacatgagtgttctctatgaaatctgcccctactggaaattcgcgtacacaactgcgaatgttgagatcttggaagcaatagctggggaaaccagagtccacattatcgattttcagattgcacagggatcacaatacatgtttttgattcaggagcttgcgaaacgccctggtgggccgccgttgctgcgtgtgacgggtgtggatgattcacagtccacctatgctcgtgggggaggactcagcttggtaggtgagaggcttgcaactttggcgcagtcatgtggtgtcccgtttgagtttcacgatgccatcatgtctgggtgcaaggtgcagcgggaacatctcgggttggaacctggctttgctgttgttgtgaacttcccatatgtattacaccacatgccagacgagagcgtaagtgttgaaaatcacagagacaggctgctgcatctgatcaagagcctctccccaaaactggttactctagtagagcaagaatccaacacaaacacctcgccattcctgtcacggtttgtggaaacactggattactacacagcgatgtttgagtcgatagatgcagcacggccacgggatgataagcagagaatcagcgcagaacaacactgtgtagcaagagacatagtgaacatgatagcatgtgaggagtcagagagagtagagagacacgaggtactgggaaatggagggtcagaatgatgatggctgggttcacgggttggccggtcagcacatctgcagcgtttgcagcgagtgagatgctgaaagcttatgacaaaaactacaaactgggaggccatgaaggagcgctctacctcttctggaagagacgacccatggctacatgttccgtgtggaagccaaacccaaactagattgggtaagttatagtgatgatggttacttgagtggataaagaagagcacaacaaaaacacatctgtcgctgtaaattttttaggatgtgcaatgatgttttaagttgtaacacaacctaagttatatatgtatacaaaccaaacctggtggttgtttttctcttgtaaattgtcatgtggttgtgggtgggttgctagtaatgaaatataaccaaaacattgattaggtc

SEQ ID NO: 47364 - protein, 287 aa, Arabidopsis thaliana
  peptide (1)..(287): Ceres Seq. ID no. 12592461
MVSVSGSPIQRLGTYMAEGLRARLEGSGSNIYKSLKCNEPTGRELMSYMSVLYEICPYWKFAYTTANVEILEAIAGETRVHIIDFQIAQGSQYMFLIQELAKRPGGPPLLRVTGVDDSQSTYARGGGLSLVGERLATLAQSCGVPFEFHDAIMSGCKVQREHLGLEPGFAVVVNFPYVLHHMPDESVSVENHRDRLLHLIKSLSPKLVTLVEQESNTNTSPFLSRFVETLDYYTAMFESIDAARPRDDKQRISAEQHCVARDIVNMIACEESERVERHEVLGNGGSE

SEQ ID NO: 47365 - protein, 272 aa, Arabidopsis thaliana
  peptide (1)..(272): Ceres Seq. ID no. 12592462
MAEGLRARLEGSGSNIYKSLKCNEPTGRELMSYMSVLYEICPYWKFAYTTANVEILEAIAGETRVHIIDFQIAQGSQYMFLIQELAKRPGGPPLLRVTGVDDSQSTYARGGGLSLVGERLATLAQSCGVPFEFHDAIMSGCKVQREHLGLEPGFAVVVNFPYVLHHMPDESVSVENHRDRLLHLIKSLSPKLVTLVEQESNTNTSPFLSRFVETLDYYTAMFESIDAARPRDDKQRISAEQHCVARDIVNMIACEESERVERHEVLGNGGSE

SEQ ID NO: 47366 - protein, 242 aa, Arabidopsis thaliana
  peptide (1)..(242): Ceres Seq. ID no. 12592463
MSYMSVLYEICPYWKFAYTTANVEILEAIAGETRVHIIDFQIAQGSQYMFLIQELAKRPGGPPLLRVTGVDDSQSTYARGGGLSLVGERLATLAQSCGVPFEFHDAIMSGCKVQREHLGLEPGFAVVVNFPYVLHHMPDESVSVENHRDRLLHLIKSLSPKLVTLVEQESNTNTSPFLSRFVETLDYYTAMFESIDAARPRDDKQRISAEQHCVARDIVNMIACEESERVERHEVLGNGGSE

SEQ ID NO: 47367 - DNA, 2051 bp, Arabidopsis thaliana; identical to SEQ ID NO: 46700
  misc_feature (1)..(2051): Ceres Seq. ID no. 12575552
  misc_feature (1)..(2051): Ortholog of  Ceres SEQ ID NO 13597407 as cited in SEQ ID NO 64106

SEQ ID NO: 47368 - protein, 258 aa, Arabidopsis thaliana; identical to SEQ ID NO: 46701
  peptide (1)..(258): Ceres Seq. ID no. 12575553

SEQ ID NO: 47369 - protein, 256 aa, Arabidopsis thaliana; identical to SEQ ID NO: 46702
  peptide (1)..(256): Ceres Seq. ID no. 12575554

SEQ ID NO: 47370 - protein, 211 aa, Arabidopsis thaliana; identical to SEQ ID NO: 46703
  peptide (1)..(211): Ceres Seq. ID no. 12575555

SEQ ID NO: 47371 - DNA, 1485 bp, Arabidopsis thaliana
  misc_feature (1)..(1485): Ceres Seq. ID no. 13588364
  misc_feature (1)..(1485): Ortholog of  Ceres SEQ ID NO 14307156 as cited in SEQ ID NO 54069
  misc_feature (1)..(1485): Ortholog of  Ceres SEQ ID NO 15169651 as cited in SEQ ID NO 64156
  misc_feature (1)..(1485): Ortholog of  Ceres SEQ ID NO 13599044 as cited in SEQ ID NO 0
atgcatctgattaatgcggtggcggcggcgaggattttatccggaatcggacaatctaacggtaataacggaggagaagcgattccgtttggatcgtttgagtggatcacttacgccggaatatcttgtttcctcgtactcttcgccgggattatgtctggtcttactttgggacttatgtctcttggtcttgtcgagcttgagattcttcaacgtagtggtactcctaatgagaagaaacaagccgctgcgatttttccggttgttcagaaacagcatcagcttttagtgacactgcttctgtgtaatgctatggctatggaggggcttcctatatatttggataagttattcaatgaatacgttgcgattattctttctgtcacattcgttcttgcttacggtgaggttattcctcaagcgatatgcactaggtatggactcgcggttggagcgaattttgtctggcttgtccgcattttaatgactctctgctatccgattgcctttcccattggcaagattttagatttggtgctgggacacaatgatgctttatttaggcgggctcagttgaaagctcttgtatccattcacagccaagaggctggtaagggaggtgagcttacacatgatgagacgacaatcattagtggagctcttgatttgactgagaagactgcacaagaagccatgacaccaattgagtctaccttctccttggatgtaaattcaaaattggattgggaagctatggggaagattctggcacgaggccatagccgcgttcctgtctactctgggaatccgaaaaacgttatcggacttctcttggtgaagagtcttcttacagttcgccctgaaacagagacccttgtcagcgcagtttgtatacgccggattccaagggttccagctgatatgcctctctatgatatactgaatgagtttcaaaagggaagcagtcacatggctgcagttgtgaaggttaaggggaaaagcaaagtcccaccttcaactttgcttgaagaacacactgatgaaagcaatgactccgacttgactgcacctttgttactaaaacgagagggaaaccatgacaatgtcattgtcacaatcgacaaggctaatggacaatctttctttcaaaacaacgagagtggacctcacgggttttcacatacttcagaggctatcgaggatggtgaggtaattggtatcatcactttagaagatgtctttgaagaacttttgcaagaagagattgtggatgaaactgatgaatatgttgacgtacataaaaggattcgagtagcagcagcagcggctgcttcatcaatagcgagagctccttcaagccggaagttgcttgcgcaaaagggaactggaggacaaaataagcaagggcagacgaataaagttcctggtcaggaacaagataaaatgcttggaactattaccgagccgattcgaagaaacaactga

SEQ ID NO: 47372 - protein, 494 aa, Arabidopsis thaliana
  peptide (1)..(494): Ceres Seq. ID no. 13588365
MHLINAVAAARILSGIGQSNGNNGGEAIPFGSFEWITYAGISCFLVLFAGIMSGLTLGLMSLGLVELEILQRSGTPNEKKQAAAIFPVVQKQHQLLVTLLLCNAMAMEGLPIYLDKLFNEYVAIILSVTFVLAYGEVIPQAICTRYGLAVGANFVWLVRILMTLCYPIAFPIGKILDLVLGHNDALFRRAQLKALVSIHSQEAGKGGELTHDETTIISGALDLTEKTAQEAMTPIESTFSLDVNSKLDWEAMGKILARGHSRVPVYSGNPKNVIGLLLVKSLLTVRPETETLVSAVCIRRIPRVPADMPLYDILNEFQKGSSHMAAVVKVKGKSKVPPSTLLEEHTDESNDSDLTAPLLLKREGNHDNVIVTIDKANGQSFFQNNESGPHGFSHTSEAIEDGEVIGIITLEDVFEELLQEEIVDETDEYVDVHKRIRVAAAAAASSIARAPSSRKLLAQKGTGGQNKQGQTNKVPGQEQDKMLGTITEPIRRNN

SEQ ID NO: 47373 - protein, 443 aa, Arabidopsis thaliana
  peptide (1)..(443): Ceres Seq. ID no. 13588366
MSGLTLGLMSLGLVELEILQRSGTPNEKKQAAAIFPVVQKQHQLLVTLLLCNAMAMEGLPIYLDKLFNEYVAIILSVTFVLAYGEVIPQAICTRYGLAVGANFVWLVRILMTLCYPIAFPIGKILDLVLGHNDALFRRAQLKALVSIHSQEAGKGGELTHDETTIISGALDLTEKTAQEAMTPIESTFSLDVNSKLDWEAMGKILARGHSRVPVYSGNPKNVIGLLLVKSLLTVRPETETLVSAVCIRRIPRVPADMPLYDILNEFQKGSSHMAAVVKVKGKSKVPPSTLLEEHTDESNDSDLTAPLLLKREGNHDNVIVTIDKANGQSFFQNNESGPHGFSHTSEAIEDGEVIGIITLEDVFEELLQEEIVDETDEYVDVHKRIRVAAAAAASSIARAPSSRKLLAQKGTGGQNKQGQTNKVPGQEQDKMLGTITEPIRRNN

SEQ ID NO: 47374 - protein, 435 aa, Arabidopsis thaliana
  peptide (1)..(435): Ceres Seq. ID no. 13588367
MSLGLVELEILQRSGTPNEKKQAAAIFPVVQKQHQLLVTLLLCNAMAMEGLPIYLDKLFNEYVAIILSVTFVLAYGEVIPQAICTRYGLAVGANFVWLVRILMTLCYPIAFPIGKILDLVLGHNDALFRRAQLKALVSIHSQEAGKGGELTHDETTIISGALDLTEKTAQEAMTPIESTFSLDVNSKLDWEAMGKILARGHSRVPVYSGNPKNVIGLLLVKSLLTVRPETETLVSAVCIRRIPRVPADMPLYDILNEFQKGSSHMAAVVKVKGKSKVPPSTLLEEHTDESNDSDLTAPLLLKREGNHDNVIVTIDKANGQSFFQNNESGPHGFSHTSEAIEDGEVIGIITLEDVFEELLQEEIVDETDEYVDVHKRIRVAAAAAASSIARAPSSRKLLAQKGTGGQNKQGQTNKVPGQEQDKMLGTITEPIRRNN

SEQ ID NO: 47375 - DNA, 1572 bp, Arabidopsis thaliana
  misc_feature (1)..(1572): Ceres Seq. ID no. 13588853
  misc_feature (1)..(1572): Ortholog of  Ceres SEQ ID NO 15175957 as cited in SEQ ID NO 20615
  misc_feature (1)..(1572): Ortholog of  Ceres SEQ ID NO 14301490 as cited in SEQ ID NO 66234
tttttttctgctttcatctgttgggattgtagtttcgttaagctttagaaatgggatgctttgcatcaaggccgaatgatactggtggaaacagaagaaagccaacgagcatcggagatgtttcagtatatgtacctggtttaaggatacctaagcccgtggagttttctcagtcactgggtgatcaattgccaaagactctagtggagcgcttgacagctttaagaacgagaatagttgtgatggcaaatcaagaaggaccaactataacaagaaccaggaggaagacacagcatggaggttctacgctcgcagatctccatcacgctttggaagattatctaccggttctcttaggattaactaaagatggtagccatttacaattcaaagtacagtttaattgggtaaatcaggaagatgaagaagaggaaacagccatgtcaaatgtttggtatgaaatattgtcggttttgcatctaatggcaatgttacaaatgtcacaagccaatttactgcttcttcctagaggttccagtgatggctatcatccaaaaatatcagaagaaaataggcgagcttcaatcgatatcttcttaaaagcagctggatacctggactgtgctgtgaagcatgttcttcctcatttttcaaccgagcagaggagaagtttaccaattgacctagcagaaggagctttacgtgcactttgcttgcaagcattaggccagggtgttgatatccaacttgggatggcgattgatagtgcaaaagccactcttgccgtgaagcgaagactttcatgtgaaatggtgaaatactggcagcaggcacaagataacttaatgaatcttccattagcaaacgggtggggcgaaaagcatatgctctttgttaagtggaagtatgttgaagctaaggctgcagcttactactaccacggtctgattcttgatgaaggaaatacagagaaatcacatggcatggcggttgctgctttacaggctgcagatgagtgtttgaaagaaagtaagaaagcaagtgaggcgtttaacacctcttcacccacgtcaaggactccttcacttttcgggacaatgaaatatctatcagagaaaataccaaaagaaacttcaagtaaagtcaggataaaccgtgatctatactcttatgaaaagatcatggagacagcaccaacgcttcctgattttgccttggcattgaaacccgatgagtaccaacttccttctgttgatgcgtcatggtctgaagccagtctacggactaaaaacacatcaaatcacatatagggcaaccaaagatagagcagtgaatagaatgcatatcaacaccttatagagttacaatgccaatggccgccatagaaacacaaatggtatagctctataactaccctagtgattctccaaatgtcaaataatatatgggtgtgaaaaaagtaccgaattggattagttttcaggtaaaaatatgggaagatgtcgtctgttttctctgtatgttgttgtaattttgtatgtttagtgcaataaaattcgattctttctgttc

SEQ ID NO: 47376 - protein, 419 aa, Arabidopsis thaliana
  peptide (1)..(419): Ceres Seq. ID no. 13588854
MGCFASRPNDTGGNRRKPTSIGDVSVYVPGLRIPKPVEFSQSLGDQLPKTLVERLTALRTRIVVMANQEGPTITRTRRKTQHGGSTLADLHHALEDYLPVLLGLTKDGSHLQFKVQFNWVNQEDEEEETAMSNVWYEILSVLHLMAMLQMSQANLLLLPRGSSDGYHPKISEENRRASIDIFLKAAGYLDCAVKHVLPHFSTEQRRSLPIDLAEGALRALCLQALGQGVDIQLGMAIDSAKATLAVKRRLSCEMVKYWQQAQDNLMNLPLANGWGEKHMLFVKWKYVEAKAAAYYYHGLILDEGNTEKSHGMAVAALQAADECLKESKKASEAFNTSSPTSRTPSLFGTMKYLSEKIPKETSSKVRINRDLYSYEKIMETAPTLPDFALALKPDEYQLPSVDASWSEASLRTKNTSNHI

SEQ ID NO: 47377 - protein, 355 aa, Arabidopsis thaliana
  peptide (1)..(355): Ceres Seq. ID no. 13588855
MANQEGPTITRTRRKTQHGGSTLADLHHALEDYLPVLLGLTKDGSHLQFKVQFNWVNQEDEEEETAMSNVWYEILSVLHLMAMLQMSQANLLLLPRGSSDGYHPKISEENRRASIDIFLKAAGYLDCAVKHVLPHFSTEQRRSLPIDLAEGALRALCLQALGQGVDIQLGMAIDSAKATLAVKRRLSCEMVKYWQQAQDNLMNLPLANGWGEKHMLFVKWKYVEAKAAAYYYHGLILDEGNTEKSHGMAVAALQAADECLKESKKASEAFNTSSPTSRTPSLFGTMKYLSEKIPKETSSKVRINRDLYSYEKIMETAPTLPDFALALKPDEYQLPSVDASWSEASLRTKNTSNHI

SEQ ID NO: 47378 - protein, 289 aa, Arabidopsis thaliana
  peptide (1)..(289): Ceres Seq. ID no. 13588856
MSNVWYEILSVLHLMAMLQMSQANLLLLPRGSSDGYHPKISEENRRASIDIFLKAAGYLDCAVKHVLPHFSTEQRRSLPIDLAEGALRALCLQALGQGVDIQLGMAIDSAKATLAVKRRLSCEMVKYWQQAQDNLMNLPLANGWGEKHMLFVKWKYVEAKAAAYYYHGLILDEGNTEKSHGMAVAALQAADECLKESKKASEAFNTSSPTSRTPSLFGTMKYLSEKIPKETSSKVRINRDLYSYEKIMETAPTLPDFALALKPDEYQLPSVDASWSEASLRTKNTSNHI

SEQ ID NO: 47379 - DNA, 1856 bp, Arabidopsis thaliana; identical to SEQ ID NO: 42665
  misc_feature (1)..(1856): Ceres Seq. ID no. 12605224
  misc_feature (1)..(1856): Ortholog of  Ceres SEQ ID NO 15179924 as cited in SEQ ID NO 57437
  misc_feature (1)..(1856): Ortholog of  Ceres SEQ ID NO 15171286 as cited in SEQ ID NO 58206
  misc_feature (1)..(1856): Ortholog of  Ceres SEQ ID NO 14302451 as cited in SEQ ID NO 66180

SEQ ID NO: 47380 - protein, 491 aa, Arabidopsis thaliana; identical to SEQ ID NO: 42666
  peptide (1)..(491): Ceres Seq. ID no. 12605225

SEQ ID NO: 47381 - protein, 430 aa, Arabidopsis thaliana; identical to SEQ ID NO: 42667
  peptide (1)..(430): Ceres Seq. ID no. 12605226

SEQ ID NO: 47382 - protein, 255 aa, Arabidopsis thaliana; identical to SEQ ID NO: 42668
  peptide (1)..(255): Ceres Seq. ID no. 12605227

SEQ ID NO: 47383 - DNA, 1581 bp, Arabidopsis thaliana
  misc_feature (1)..(1581): Ceres Seq. ID no. 13592659
  misc_feature (1)..(1581): Ortholog of  Ceres SEQ ID NO 13600220 as cited in SEQ ID NO 0
aaaaaaaagcaaaatgaaactttactctctactttccgttttcttggtcatcctcttggcaacaagcgacagtgatgcctttaccagaaacaattttccaaaggatttcctctttggagccgccacttctgcttatcagtgggaaggagctgttgctgaagatggaagaactcctagcgtctgggatactttctcacacacttacaatagaggtaatttaggtaatggagatataacatccgatgggtatcacaaatacaaggaagatgttaagctgatggcagaaatgggcttagaatcattcagattctctatctcctggtcaagacttatacctaatggaaggggactcattaacccaaaaggtctactgttttacaagaacctcatcaaagaactaataagccatggaatcgaaccacatgttacactttaccactatgatcttcctcagtctcttgaagatgagtatggaggctggatcaaccgcaaaatcatagaagacttcactgcttatgcagatgtatgtttcagagagtttggggaggatgtgaagttatggactacaataaacgaagctacaattttcgccattggttcttatgaccaaggaatctcgccccctggacattgttctcctaacaaattcatcaattgtactagtggaaattcttctacagaaccatatcttgcaggccataacatattgctagctcatgcctctgcttcaaagttgtataaactaaagtacaagagtacgcagaaaggatccatagggcttagtatatttgcattcgggttatctccatatacaaactccaaggatgatgaaatcgcaactcaaagagctaaagctttcttctatggctggatgttgaagcctttggtatttggagactatccggatgaaatgaagagaactgttggatcgagattaccggtgttttcggaggaagagtcagagcaacttaaaggatcatctgactttataggaattattcactacacgacattttatgtcacaaacaaaccctcaccttctatctttcccagcatgaatgaaggcttctttaaagacatgggagtatatatgatttccgctgcgaattcttcatttcttctgtgggaggctactccatggggtcttgaaggtattcttgagtatataaagcagagctataacaatcctccaatctatattcttgaaaatggtatgccgatgggacgcgactcgacattacaagacacacaaagaattgaattcattcaagcttacattggtgctatgctcaatgccatcaagaatggatcggacacgagaggttactttgtatggtcgatgattgatttgtatgagttactgagtggatatacgaccagcttcggaatgtactatgtgaatttcagcgatcctggtcgcaagaggactccaaagctctctgcttcttggtacactggtttcctcaatggtacaattgatgttgctactcaagatactattcagttgcagagcaacatctctggctcttcttcattgtaatatatttaaccaaaggatccttatttggtttatttcatcta

SEQ ID NO: 47384 - protein, 512 aa, Arabidopsis thaliana
  peptide (1)..(512): Ceres Seq. ID no. 13592660
KKSKMKLYSLLSVFLVILLATSDSDAFTRNNFPKDFLFGAATSAYQWEGAVAEDGRTPSVWDTFSHTYNRGNLGNGDITSDGYHKYKEDVKLMAEMGLESFRFSISWSRLIPNGRGLINPKGLLFYKNLIKELISHGIEPHVTLYHYDLPQSLEDEYGGWINRKIIEDFTAYADVCFREFGEDVKLWTTINEATIFAIGSYDQGISPPGHCSPNKFINCTSGNSSTEPYLAGHNILLAHASASKLYKLKYKSTQKGSIGLSIFAFGLSPYTNSKDDEIATQRAKAFFYGWMLKPLVFGDYPDEMKRTVGSRLPVFSEEESEQLKGSSDFIGIIHYTTFYVTNKPSPSIFPSMNEGFFKDMGVYMISAANSSFLLWEATPWGLEGILEYIKQSYNNPPIYILENGMPMGRDSTLQDTQRIEFIQAYIGAMLNAIKNGSDTRGYFVWSMIDLYELLSGYTTSFGMYYVNFSDPGRKRTPKLSASWYTGFLNGTIDVATQDTIQLQSNISGSSSL

SEQ ID NO: 47385 - protein, 508 aa, Arabidopsis thaliana
  peptide (1)..(508): Ceres Seq. ID no. 13592661
MKLYSLLSVFLVILLATSDSDAFTRNNFPKDFLFGAATSAYQWEGAVAEDGRTPSVWDTFSHTYNRGNLGNGDITSDGYHKYKEDVKLMAEMGLESFRFSISWSRLIPNGRGLINPKGLLFYKNLIKELISHGIEPHVTLYHYDLPQSLEDEYGGWINRKIIEDFTAYADVCFREFGEDVKLWTTINEATIFAIGSYDQGISPPGHCSPNKFINCTSGNSSTEPYLAGHNILLAHASASKLYKLKYKSTQKGSIGLSIFAFGLSPYTNSKDDEIATQRAKAFFYGWMLKPLVFGDYPDEMKRTVGSRLPVFSEEESEQLKGSSDFIGIIHYTTFYVTNKPSPSIFPSMNEGFFKDMGVYMISAANSSFLLWEATPWGLEGILEYIKQSYNNPPIYILENGMPMGRDSTLQDTQRIEFIQAYIGAMLNAIKNGSDTRGYFVWSMIDLYELLSGYTTSFGMYYVNFSDPGRKRTPKLSASWYTGFLNGTIDVATQDTIQLQSNISGSSSL

SEQ ID NO: 47386 - protein, 420 aa, Arabidopsis thaliana
  peptide (1)..(420): Ceres Seq. ID no. 13592662
MAEMGLESFRFSISWSRLIPNGRGLINPKGLLFYKNLIKELISHGIEPHVTLYHYDLPQSLEDEYGGWINRKIIEDFTAYADVCFREFGEDVKLWTTINEATIFAIGSYDQGISPPGHCSPNKFINCTSGNSSTEPYLAGHNILLAHASASKLYKLKYKSTQKGSIGLSIFAFGLSPYTNSKDDEIATQRAKAFFYGWMLKPLVFGDYPDEMKRTVGSRLPVFSEEESEQLKGSSDFIGIIHYTTFYVTNKPSPSIFPSMNEGFFKDMGVYMISAANSSFLLWEATPWGLEGILEYIKQSYNNPPIYILENGMPMGRDSTLQDTQRIEFIQAYIGAMLNAIKNGSDTRGYFVWSMIDLYELLSGYTTSFGMYYVNFSDPGRKRTPKLSASWYTGFLNGTIDVATQDTIQLQSNISGSSSL

SEQ ID NO: 47387 - DNA, 1081 bp, Arabidopsis thaliana
  misc_feature (1)..(1081): Ceres Seq. ID no. 13647806
  misc_feature (1)..(1081): Ortholog of  Ceres SEQ ID NO 13598416 as cited in SEQ ID NO 63371
  misc_feature (1)..(1081): Ortholog of  Ceres SEQ ID NO 13584271 as cited in SEQ ID NO 63893
gagaaggaaaaaaaattctggaactttcgagcttctgttttgcggtgctctcaaagcttatatcggatctcgaatcttgaatcggactcagaacctcggatcttcgaaaatcgacgaacatgtcttctcctggcgaattctataactcacttccacctataaccaaggcttatggtacgttgtgctttttcactacagtagccacgcagcttggcttagttgctcccgttcacattgctttaattcctgaacttgtacttaagcagttccagatctggaggctgataacaaacttgtttttcctcggtggtttctctatcaattttggaatacgtcttttgatgatagcaagatatggagttcaactcgagaaagggccatttgaaaggcggacagcagactttttgtggatgatgatctttggatccttcactctattggtattatcagtcataccatttttctggacaccgtttcttggtgtttcacttgtgttcatgcttctttatctctggagccgagaatttccaaatgccaacatcagcctatacggtcttgtcactcttaaggctttctacctcccatgggcaatgctagcacttgatgttatcttcggttctccgatcatgccagatcttcttggcatcatagctggacatctatactacttcctaacagtccttcatcctcttgctaccggaaaaaactacctgaaaaccccaaaatgggttaataaaatcgtagcaagatggcgaattggagctccagttgcaagtgttcgacaagcaggtggtgtaggagcagcaggacccggagctggaggaggagtaggaggaggaggagcttattcaagcgctcgtgccccacccgagagttcaaacacagcattcagaggtcgatcatatcgtctcaccgactgaaatagaaatcttctcgagtttctttgttttcatcatatcaaatctttttcaaacaatgccactaactaatcccaggtagctttgtgttttcgaacagtacagtttttgaatatatgactctgtaggaagaatctttgaggttttaatacaatgttcttttc

SEQ ID NO: 47388 - protein, 266 aa, Arabidopsis thaliana
  peptide (1)..(266): Ceres Seq. ID no. 13647807
MSSPGEFYNSLPPITKAYGTLCFFTTVATQLGLVAPVHIALIPELVLKQFQIWRLITNLFFLGGFSINFGIRLLMIARYGVQLEKGPFERRTADFLWMMIFGSFTLLVLSVIPFFWTPFLGVSLVFMLLYLWSREFPNANISLYGLVTLKAFYLPWAMLALDVIFGSPIMPDLLGIIAGHLYYFLTVLHPLATGKNYLKTPKWVNKIVARWRIGAPVASVRQAGGVGAAGPGAGGGVGGGGAYSSARAPPESSNTAFRGRSYRLTD

SEQ ID NO: 47389 - protein, 192 aa, Arabidopsis thaliana
  peptide (1)..(192): Ceres Seq. ID no. 13647808
MIARYGVQLEKGPFERRTADFLWMMIFGSFTLLVLSVIPFFWTPFLGVSLVFMLLYLWSREFPNANISLYGLVTLKAFYLPWAMLALDVIFGSPIMPDLLGIIAGHLYYFLTVLHPLATGKNYLKTPKWVNKIVARWRIGAPVASVRQAGGVGAAGPGAGGGVGGGGAYSSARAPPESSNTAFRGRSYRLTD

SEQ ID NO: 47390 - protein, 169 aa, Arabidopsis thaliana
  peptide (1)..(169): Ceres Seq. ID no. 13647809
MMIFGSFTLLVLSVIPFFWTPFLGVSLVFMLLYLWSREFPNANISLYGLVTLKAFYLPWAMLALDVIFGSPIMPDLLGIIAGHLYYFLTVLHPLATGKNYLKTPKWVNKIVARWRIGAPVASVRQAGGVGAAGPGAGGGVGGGGAYSSARAPPESSNTAFRGRSYRLTD

SEQ ID NO: 47391 - DNA, 1824 bp, Arabidopsis thaliana
  misc_feature (1)..(1824): Ceres Seq. ID no. 13647846
  misc_feature (1)..(1824): Ortholog of  Ceres SEQ ID NO 14313216 as cited in SEQ ID NO 66103
gaaaaagcaaaaacctcatcgacataaaaagaaaaatggcgtttgcgatatcaaagcgaaacgcaaccttgtttcttgtaacgctactactaatctccgttccattgtcttcctccacgctacaacaagatttcgtgaagtgccttgtcgacaactccgacgtctccttccccataacggcgtcgtttttctcaccggaccaaaacgctactttgtttaaagaggagcttgaatcaacggcacagaatctccgttacttgacgccgtcaaacccgaagcccgtgttcatattcgagcctttgtacgagacgcatgtccaagcagcggtcgtgtgtgccaagaagcttcagcttcacctccggctacgtagcggtggtcacgactacgaagggctctcgtttgttgccgaggacgaaacgccgtttgtgatcgttgatttgtcgaagcttagacaggttgacgttgatttggacagtaacagtgcgtgggctcatgctggtgctaccatcggagaggtttattacaggatccaagagaaaagccaaacccatggttttccggccggtttatgctcaagccttggcatcggtggccacttagtcggtggagcgtacggttccatgatgaggaagttcggtctcggcgctgacaatgtcctcgacgccagaatcgtcgacgccaacggccaaatcctcgatcgcgcggcaatgggagaagacgtcttctgggcgattcgcggcggcggcggtggtagcttcggcgtgatattggcctggaagattaagctcgtccccgttccggcgaccgttacggtattcacagtcacgaagacgcttgagcaagacggaactaaagttttatacaaatgggaacaaatcgctgataagcttgacgatgatctcttcattcgcgtcattatttcaccggccagtaaaaccaccaaaccgggaaatcgaaccatctcgatgtcgtaccaagctcagtttctcggagactccaatcggctcttgcaggtgatgcagaagagtttccctgagttaggactgacgaagaaggactgcacagaaatgagctggatcaaatcagtgatgtacattgcaggttttccaaacagtgcagcaccggaagctttactagccggaaaatcattgttcaagaatcacttcaaagccaagtcagactttgtgaaagagccaattccagtagaaggtttagaaggattatgggaaaggtttctagaagaagattcaccgttaacgatatggaacccttacggaggaatgatgtcgaggatctccgagtcagagatacctttccctcataggaacgggacattgttcaagattcagtggctaagcacgtggcaagatgggaaagtgagcgaggaaaggcatatgaagtggattagggagatgtatagttacatggagcagtatgtgtcgaagaacccgagacaggcgtatgtgaattacagggatcttgatttggggactaatgaaggagagactgatgctagagagtggggtgctaagtattacaaagggaatttcgagaggttggtgaagattaagggtgagtttgatcctgataatttcttcaggcatgaacagagtgttccgacaaagattggttgatggatttggagttccttgttcaatgggtttttaaattctaataaagaaaatatatacacaagatagaaataatatgtatttgtgttttgtcatagggagaattctgcattttgtatttctatttttgatatataacaatctttacttaaagaaaaaaaaaaaaaaaaaaactcgagggggggcccggtac

SEQ ID NO: 47392 - protein, 543 aa, Arabidopsis thaliana
  peptide (1)..(543): Ceres Seq. ID no. 15219499
KSKNLIDIKRKMAFAISKRNATLFLVTLLLISVPLSSSTLQQDFVKCLVDNSDVSFPITASFFSPDQNATLFKEELESTAQNLRYLTPSNPKPVFIFEPLYETHVQAAVVCAKKLQLHLRLRSGGHDYEGLSFVAEDETPFVIVDLSKLRQVDVDLDSNSAWAHAGATIGEVYYRIQEKSQTHGFPAGLCSSLGIGGHLVGGAYGSMMRKFGLGADNVLDARIVDANGQILDRAAMGEDVFWAIRGGGGGSFGVILAWKIKLVPVPATVTVFTVTKTLEQDGTKVLYKWEQIADKLDDDLFIRVIISPASKTTKPGNRTISMSYQAQFLGDSNRLLQVMQKSFPELGLTKKDCTEMSWIKSVMYIAGFPNSAAPEALLAGKSLFKNHFKAKSDFVKEPIPVEGLEGLWERFLEEDSPLTIWNPYGGMMSRISESEIPFPHRNGTLFKIQWLSTWQDGKVSEERHMKWIREMYSYMEQYVSKNPRQAYVNYRDLDLGTNEGETDAREWGAKYYKGNFERLVKIKGEFDPDNFFRHEQSVPTKIG

SEQ ID NO: 47393 - protein, 532 aa, Arabidopsis thaliana
  peptide (1)..(532): Ceres Seq. ID no. 15219500
MAFAISKRNATLFLVTLLLISVPLSSSTLQQDFVKCLVDNSDVSFPITASFFSPDQNATLFKEELESTAQNLRYLTPSNPKPVFIFEPLYETHVQAAVVCAKKLQLHLRLRSGGHDYEGLSFVAEDETPFVIVDLSKLRQVDVDLDSNSAWAHAGATIGEVYYRIQEKSQTHGFPAGLCSSLGIGGHLVGGAYGSMMRKFGLGADNVLDARIVDANGQILDRAAMGEDVFWAIRGGGGGSFGVILAWKIKLVPVPATVTVFTVTKTLEQDGTKVLYKWEQIADKLDDDLFIRVIISPASKTTKPGNRTISMSYQAQFLGDSNRLLQVMQKSFPELGLTKKDCTEMSWIKSVMYIAGFPNSAAPEALLAGKSLFKNHFKAKSDFVKEPIPVEGLEGLWERFLEEDSPLTIWNPYGGMMSRISESEIPFPHRNGTLFKIQWLSTWQDGKVSEERHMKWIREMYSYMEQYVSKNPRQAYVNYRDLDLGTNEGETDAREWGAKYYKGNFERLVKIKGEFDPDNFFRHEQSVPTKIG

SEQ ID NO: 47394 - protein, 337 aa, Arabidopsis thaliana
  peptide (1)..(337): Ceres Seq. ID no. 15219501
MMRKFGLGADNVLDARIVDANGQILDRAAMGEDVFWAIRGGGGGSFGVILAWKIKLVPVPATVTVFTVTKTLEQDGTKVLYKWEQIADKLDDDLFIRVIISPASKTTKPGNRTISMSYQAQFLGDSNRLLQVMQKSFPELGLTKKDCTEMSWIKSVMYIAGFPNSAAPEALLAGKSLFKNHFKAKSDFVKEPIPVEGLEGLWERFLEEDSPLTIWNPYGGMMSRISESEIPFPHRNGTLFKIQWLSTWQDGKVSEERHMKWIREMYSYMEQYVSKNPRQAYVNYRDLDLGTNEGETDAREWGAKYYKGNFERLVKIKGEFDPDNFFRHEQSVPTKIG

SEQ ID NO: 47395 - DNA, 1740 bp, Arabidopsis thaliana
  misc_feature (1)..(1740): Ceres Seq. ID no. 13593561
  misc_feature (1)..(1740): Ortholog of  Ceres SEQ ID NO 15178131 as cited in SEQ ID NO 52639
  misc_feature (1)..(1740): Ortholog of  Ceres SEQ ID NO 13598582 as cited in SEQ ID NO 65294
  misc_feature (1)..(1740): Ortholog of  Ceres SEQ ID NO 15176114 as cited in SEQ ID NO 67627
  misc_feature (1)..(1740): Ortholog of  Ceres SEQ ID NO 14312605 as cited in SEQ ID NO 0
gattttccaaagtctgtttatttttttaatctctctctcttctctctcacccaatttcacaaacccgaaaccctaattttctcgggacactgaaatttttacagcttctttcctcttcttcaccggggagatttgtcggtactaaatctagggtttttgggtatcaccggagggttgaagagagagaaaaaaactcacaatggaatcagatcagggaaagctatttatcggcgggatttcatgggataccgacgagaatcttctgagagagtacttcagcaatttcggcgaggttttgcaggtcactgttatgcgagagaaagctactggtcgtcctagaggattcggattcgtcgcattctcggatcctgctgttattgatagggttcttcaggacaagcaccatattgataatagagatgttgatgtgaagagagcaatgtctagagaggagcagagtcctgctgggagatcagggacttttaatgcttctaggaattttgatagtggagctaacgtgaggactaagaagatattcgtgggaggtttgcctcctgcattaacatcagatgaatttcgggcttactttgagacttatggtcctgtgagtgatgcagtcattatgattgatcagactacacagcgtcctcgaggatttgggtttgtttcttttgattctgaagattcggttgaccttgttttacataagactttccacgatttgaatggtaaacaagtcgaagttaaaagagctcttcctaaagatgctaaccctggaatagccagtggtggtggtcgtggcagtggtggagctggagggtttccgggctatggtggttctggtggaagtggctatgagggtcgtgtggattctaatagatacatgcagccgcaaaacactggaagtggttatcctccttatggtggttctgggtatggtactggttatggttatggaagcaatggtgtaggttatgggggttttggtgggtatggcaatccagctggtgcgccttatgggaatcctagtgtccctggagctgggtttggaagtggtccaagaagttcatggggcgctcaagcaccatcgggttatgggaatgtgggatatggaaatgcagctccgtggggtggttctggtggtcctggttcagcagtaatgggtcaagctggtgcatctgcaggttatggcagtcaaggttatggctatggtggaaatgattcctcttacgggactccatctgcctatggtgcagtaggggggcgatctgggaatatgcctaacaaccatggtggcggtggctatgcggatgctttagatggctctggaggctatgggaatcaccaagggaacaacgggcaagctggttatggtggaggttatggaagtggtaggcaagctcaacaacagtgattgaagaagaaatactactagaatgtggttttatcgctgaccttgaaacctcctgctttccgccttaaccatgtcacgtctttggcggttagaccaggaggtggacctacgctggattatctcttttgttagtttctcaataagttgttttcaggcaattccggatactatttcctatcaagttgtagtttttaagtttgcgtgcttatttatatttgtcgctttggaatggttttctttctctgttatcctctagtgtttgtgtttaacgatacatcctccagattatcattattcatctcccttttggttcattcatttttgtt

SEQ ID NO: 47396 - protein, 404 aa, Arabidopsis thaliana
  peptide (1)..(404): Ceres Seq. ID no. 13593562
MESDQGKLFIGGISWDTDENLLREYFSNFGEVLQVTVMREKATGRPRGFGFVAFSDPAVIDRVLQDKHHIDNRDVDVKRAMSREEQSPAGRSGTFNASRNFDSGANVRTKKIFVGGLPPALTSDEFRAYFETYGPVSDAVIMIDQTTQRPRGFGFVSFDSEDSVDLVLHKTFHDLNGKQVEVKRALPKDANPGIASGGGRGSGGAGGFPGYGGSGGSGYEGRVDSNRYMQPQNTGSGYPPYGGSGYGTGYGYGSNGVGYGGFGGYGNPAGAPYGNPSVPGAGFGSGPRSSWGAQAPSGYGNVGYGNAAPWGGSGGPGSAVMGQAGASAGYGSQGYGYGGNDSSYGTPSAYGAVGGRSGNMPNNHGGGGYADALDGSGGYGNHQGNNGQAGYGGGYGSGRQAQQQ

SEQ ID NO: 47397 - protein, 367 aa, Arabidopsis thaliana
  peptide (1)..(367): Ceres Seq. ID no. 13593563
MREKATGRPRGFGFVAFSDPAVIDRVLQDKHHIDNRDVDVKRAMSREEQSPAGRSGTFNASRNFDSGANVRTKKIFVGGLPPALTSDEFRAYFETYGPVSDAVIMIDQTTQRPRGFGFVSFDSEDSVDLVLHKTFHDLNGKQVEVKRALPKDANPGIASGGGRGSGGAGGFPGYGGSGGSGYEGRVDSNRYMQPQNTGSGYPPYGGSGYGTGYGYGSNGVGYGGFGGYGNPAGAPYGNPSVPGAGFGSGPRSSWGAQAPSGYGNVGYGNAAPWGGSGGPGSAVMGQAGASAGYGSQGYGYGGNDSSYGTPSAYGAVGGRSGNMPNNHGGGGYADALDGSGGYGNHQGNNGQAGYGGGYGSGRQAQQQ

SEQ ID NO: 47398 - protein, 324 aa, Arabidopsis thaliana
  peptide (1)..(324): Ceres Seq. ID no. 13593564
MSREEQSPAGRSGTFNASRNFDSGANVRTKKIFVGGLPPALTSDEFRAYFETYGPVSDAVIMIDQTTQRPRGFGFVSFDSEDSVDLVLHKTFHDLNGKQVEVKRALPKDANPGIASGGGRGSGGAGGFPGYGGSGGSGYEGRVDSNRYMQPQNTGSGYPPYGGSGYGTGYGYGSNGVGYGGFGGYGNPAGAPYGNPSVPGAGFGSGPRSSWGAQAPSGYGNVGYGNAAPWGGSGGPGSAVMGQAGASAGYGSQGYGYGGNDSSYGTPSAYGAVGGRSGNMPNNHGGGGYADALDGSGGYGNHQGNNGQAGYGGGYGSGRQAQQQ

SEQ ID NO: 47399 - DNA, 738 bp, Arabidopsis thaliana; identical to SEQ ID NO: 37407
  misc_feature (1)..(738): Ceres Seq. ID no. 13592500
  misc_feature (1)..(738): Ortholog of  Ceres SEQ ID NO 12557607 as cited in SEQ ID NO 8
  misc_feature (1)..(738): Ortholog of  Ceres SEQ ID NO 12611808 as cited in SEQ ID NO 59894
  misc_feature (1)..(738): Ortholog of  Ceres SEQ ID NO 13600599 as cited in SEQ ID NO 0

SEQ ID NO: 47400 - protein, 171 aa, Arabidopsis thaliana; identical to SEQ ID NO: 37408
  peptide (1)..(171): Ceres Seq. ID no. 13592501

SEQ ID NO: 47401 - protein, 168 aa, Arabidopsis thaliana; identical to SEQ ID NO: 37409
  peptide (1)..(168): Ceres Seq. ID no. 13592502

SEQ ID NO: 47402 - protein, 130 aa, Arabidopsis thaliana; identical to SEQ ID NO: 37410
  peptide (1)..(130): Ceres Seq. ID no. 13592503

SEQ ID NO: 47403 - DNA, 1546 bp, Arabidopsis thaliana
  misc_feature (1)..(1546): Ceres Seq. ID no. 13592390
  misc_feature (1)..(1546): Ortholog of  Ceres SEQ ID NO 13656161 as cited in SEQ ID NO 64908
  misc_feature (1)..(1546): Ortholog of  Ceres SEQ ID NO 13597600 as cited in SEQ ID NO 65142
ggcaaagccctctccttttgcttctggtcctctcgtcccgtttcgccgctctctataggggcaagtgagaggttactgtctctttcttctttcagacactcgagacgagaaaggctcgtatctgattttaccgccaccggaccatctgtgatagacaataatgggttacataggagctcatggtgtagcagctcttcataggtacaaatacagtggagtggatcactcttatcttgccaaatacgtcctccaacctttttggactcgatttgtcaaagtcttccctctatggatgccaccaaacatgataacgcttatggggtttatgtttctagtcacttcctccctgctaggctatatatattcacctcagttggattctcctcctccacgatgggttcacttcgcacatggtttacttctcttcttgtatcagacatttgatgcggttgatgggaagcaagcaagaaggacaaattcctctagccccctaggagagctcttcgatcatggttgtgacgcgcttgcttgtgcgtttgaagccatggcatttggaagcactgcaatgtgtggaagagatactttctggttctgggttatttcagctattccattttatggagctacatgggaacactatttcaccaacacacttattcttccggttatcaatgggcctacagaggggcttgcacttatatttgtcagccacttcttcacagccatcgtcggtgctgaatggtgggctcagcagttagggcagtcaataccattgtttagttgggtgccatttgtgaatgagattcaaacttctagagcagtgctatacatgatgatcgcttttgctgttataccaaccgttgcattcaatgtaacaaatgtctacaaagtcgttcgatcaagaaacgggagcatggtgttagcgttagctatgctgtatcccttcgttgtcttacttggaggagttttgatatgggattacttgtctccaatcaatctcatagcaacatatcctcacttagttgtactcggaactggacttgcatttggatttttagtgggaagaatgattcttgctcacttgtgtgatgagcctaaaggactaaaaacaaacatgtgcatgtcactactctatcttccctttgcacttgcaaatgcgctaaccgcaagattgaatgctggggttcctctagtcgacgaattatgggttcttcttggctactgcatattcacagtgtcattatacttgcactttgcaacatcagtcatccatgagatcactgaggcccttggaatctactgctttaggatcacgcgtaaagaagcttgaaaagaaacctttgacactgcgaatggtcgatatggaccagttggatcggtgatgtatttcttcttcttattcattgttgtctgtttgatcaggataggtgaagttatgtagaactttgtataatgttcttgtttttggatttatgcattgggcaaatacgaaaactattcttgaaatgctacgaaaatgattttagaaggagcatttttttaacct

SEQ ID NO: 47404 - protein, 389 aa, Arabidopsis thaliana
  peptide (1)..(389): Ceres Seq. ID no. 13592391
MGYIGAHGVAALHRYKYSGVDHSYLAKYVLQPFWTRFVKVFPLWMPPNMITLMGFMFLVTSSLLGYIYSPQLDSPPPRWVHFAHGLLLFLYQTFDAVDGKQARRTNSSSPLGELFDHGCDALACAFEAMAFGSTAMCGRDTFWFWVISAIPFYGATWEHYFTNTLILPVINGPTEGLALIFVSHFFTAIVGAEWWAQQLGQSIPLFSWVPFVNEIQTSRAVLYMMIAFAVIPTVAFNVTNVYKVVRSRNGSMVLALAMLYPFVVLLGGVLIWDYLSPINLIATYPHLVVLGTGLAFGFLVGRMILAHLCDEPKGLKTNMCMSLLYLPFALANALTARLNAGVPLVDELWVLLGYCIFTVSLYLHFATSVIHEITEALGIYCFRITRKEA

SEQ ID NO: 47405 - protein, 345 aa, Arabidopsis thaliana
  peptide (1)..(345): Ceres Seq. ID no. 13592392
MPPNMITLMGFMFLVTSSLLGYIYSPQLDSPPPRWVHFAHGLLLFLYQTFDAVDGKQARRTNSSSPLGELFDHGCDALACAFEAMAFGSTAMCGRDTFWFWVISAIPFYGATWEHYFTNTLILPVINGPTEGLALIFVSHFFTAIVGAEWWAQQLGQSIPLFSWVPFVNEIQTSRAVLYMMIAFAVIPTVAFNVTNVYKVVRSRNGSMVLALAMLYPFVVLLGGVLIWDYLSPINLIATYPHLVVLGTGLAFGFLVGRMILAHLCDEPKGLKTNMCMSLLYLPFALANALTARLNAGVPLVDELWVLLGYCIFTVSLYLHFATSVIHEITEALGIYCFRITRKEA

SEQ ID NO: 47406 - protein, 341 aa, Arabidopsis thaliana
  peptide (1)..(341): Ceres Seq. ID no. 13592393
MITLMGFMFLVTSSLLGYIYSPQLDSPPPRWVHFAHGLLLFLYQTFDAVDGKQARRTNSSSPLGELFDHGCDALACAFEAMAFGSTAMCGRDTFWFWVISAIPFYGATWEHYFTNTLILPVINGPTEGLALIFVSHFFTAIVGAEWWAQQLGQSIPLFSWVPFVNEIQTSRAVLYMMIAFAVIPTVAFNVTNVYKVVRSRNGSMVLALAMLYPFVVLLGGVLIWDYLSPINLIATYPHLVVLGTGLAFGFLVGRMILAHLCDEPKGLKTNMCMSLLYLPFALANALTARLNAGVPLVDELWVLLGYCIFTVSLYLHFATSVIHEITEALGIYCFRITRKEA

SEQ ID NO: 47407 - DNA, 1086 bp, Arabidopsis thaliana
  misc_feature (1)..(1086): Ceres Seq. ID no. 12606073
  misc_feature (1)..(1086): Ortholog of  Ceres SEQ ID NO 12616669 as cited in SEQ ID NO 63669
acgtctctctcttaacctaaccaatccaaagttgccgctagggtcaccggaaaacttcagagttgtgtcttctattgaattctccgggaagtattagtgatggggctttctcttgtggaacaacatttcattaaaggtgggattgctcaagatcttcgaactgatggtcggaaaagattgacttaccgtcctatctacgtcgaaaccggtgttattccgcaggctaatggttcagcgagagttagaattggtggaaccgatgtgattgctagtgtaaaggctgaaattgggaggccaagttcacttcaacccgataaaggaaaggttgcagttttcattgattgcagtccaacagctgaaccgacatttggggggagaggaggtgaggaattgtcttctgagcttgctttggctcttcaaagatgtcttctgggtggcaaaagtggagcaggagctggaataaatttatcttcgcttttaatcaaagaaggaaaagtttgctgggacctttatattgatggtcttgtcattagttcggatgggaatctattggatgccctgggtgctgccattaaggctgctttaaccaacacggccatcccaaaagtcaatgtttcagctgaagtagcagatgatgagcaaccagagattgacatcagcgacgaggaatatcttcaatttgacacttccagtgtcccggtcatagtcacgttaacaaaagtgggaacgcattacatagttgatgcaacagcagaagaggagtctcagatgagctcagctgtatctatatctgtgaatcggacaggccatatatgtgggttaaccaaacgaagcgggtctggcttagacccaagcgtcatccttgacatgatctctgttgccaagcatgtgacagagactctgatgagcaaacttgattcagagatttcagccgcagaggcctgcgaagacgaatcttgactcttgagtctcagagaatcaaagtttcaagatgaaacatgttagcaagggatcaacaatatttgtatctgtggaaaatcttatacgaagtcagaacagattaagctaatcaaaatcctttttccc

SEQ ID NO: 47408 - protein, 286 aa, Arabidopsis thaliana
  peptide (1)..(286): Ceres Seq. ID no. 12606074
MGLSLVEQHFIKGGIAQDLRTDGRKRLTYRPIYVETGVIPQANGSARVRIGGTDVIASVKAEIGRPSSLQPDKGKVAVFIDCSPTAEPTFGGRGGEELSSELALALQRCLLGGKSGAGAGINLSSLLIKEGKVCWDLYIDGLVISSDGNLLDALGAAIKAALTNTAIPKVNVSAEVADDEQPEIDISDEEYLQFDTSSVPVIVTLTKVGTHYIVDATAEEESQMSSAVSISVNRTGHICGLTKRSGSGLDPSVILDMISVAKHVTETLMSKLDSEISAAEACEDES

SEQ ID NO: 47409 - DNA, 1172 bp, Arabidopsis thaliana
  misc_feature (1)..(1172): Ceres Seq. ID no. 12591785
  misc_feature (1)..(1172): Ortholog of  Ceres SEQ ID NO 13597612 as cited in SEQ ID NO 65302
actgagtgctgctgatgaacgcttactctgtttctctcgacttcactaaaccttctctattcacacgcatcactctctcttctcagattcctctaaccatggccaccactgtaaacaaaacagttcgtgtcgcagctgctcaaatgacatcggtcaatgatctaatgaccaacttcgccacttgctctcgtctcgttcaagaagcagcattggctggtgcaaagctgatttgcttccctgagaacttctcttttgtgggagataaggaaggagagagtgtgaaaattgctgaaccattagatggcccagtgatggaacggtattgctctctcgccagggattcaaatatatggttgtctcttggaggttttcaagagagatttgatgatactcatttgtgtaatacacatgttgtgatcgatgatgctggaatgatccgagacacttatcagaaaatgcatttgtttgatgttgatgttcctggtggaagctcgtacaaagaaagcagctttacagttccagggacaaagattgtttccgtagacagccctgtcgggcgcttaggccttactgtatgctacgatttgaggttccctaagatatatcagcaactgagatttgaacagaaagctcaggttttactagtaccatcagctttcaccaaggtcactggggaggcacactgggagattcttcttcgagcccgagcaattgaaactcaatgttatgtcatagctgctgctcaagcaggaaagcataatgagaaaagagaaagttatggtgacacactgatcattgatccgtggggaactgtagttggaaggttacctgatcgtgtttcgaccggcattgtcgtggcagatattgatttttcattgattgactcagtgagaacaaaaatgccaatagataagcaacgagtctcaatagatctctgatgaaaccattggtgttgtgaaatgttgccaatatagttacaagcgtagaaacatatcaccttatttgaattctacattctctgtttgcttcggtgtattgtttcatcattggttaggtgtagatgatcattgagctttagacagtagcttgtcacctatacttttagttgcacgttgttctttggtagtatttgtacacaacatttaatagattataaataagtaacgttaaag

SEQ ID NO: 47410 - protein, 307 aa, Arabidopsis thaliana
  peptide (1)..(307): Ceres Seq. ID no. 12591786
MNAYSVSLDFTKPSLFTRITLSSQIPLTMATTVNKTVRVAAAQMTSVNDLMTNFATCSRLVQEAALAGAKLICFPENFSFVGDKEGESVKIAEPLDGPVMERYCSLARDSNIWLSLGGFQERFDDTHLCNTHVVIDDAGMIRDTYQKMHLFDVDVPGGSSYKESSFTVPGTKIVSVDSPVGRLGLTVCYDLRFPKIYQQLRFEQKAQVLLVPSAFTKVTGEAHWEILLRARAIETQCYVIAAAQAGKHNEKRESYGDTLIIDPWGTVVGRLPDRVSTGIVVADIDFSLIDSVRTKMPIDKQRVSIDL

SEQ ID NO: 47411 - protein, 279 aa, Arabidopsis thaliana
  peptide (1)..(279): Ceres Seq. ID no. 12591787
MATTVNKTVRVAAAQMTSVNDLMTNFATCSRLVQEAALAGAKLICFPENFSFVGDKEGESVKIAEPLDGPVMERYCSLARDSNIWLSLGGFQERFDDTHLCNTHVVIDDAGMIRDTYQKMHLFDVDVPGGSSYKESSFTVPGTKIVSVDSPVGRLGLTVCYDLRFPKIYQQLRFEQKAQVLLVPSAFTKVTGEAHWEILLRARAIETQCYVIAAAQAGKHNEKRESYGDTLIIDPWGTVVGRLPDRVSTGIVVADIDFSLIDSVRTKMPIDKQRVSIDL

SEQ ID NO: 47412 - protein, 264 aa, Arabidopsis thaliana
  peptide (1)..(264): Ceres Seq. ID no. 12591788
MTSVNDLMTNFATCSRLVQEAALAGAKLICFPENFSFVGDKEGESVKIAEPLDGPVMERYCSLARDSNIWLSLGGFQERFDDTHLCNTHVVIDDAGMIRDTYQKMHLFDVDVPGGSSYKESSFTVPGTKIVSVDSPVGRLGLTVCYDLRFPKIYQQLRFEQKAQVLLVPSAFTKVTGEAHWEILLRARAIETQCYVIAAAQAGKHNEKRESYGDTLIIDPWGTVVGRLPDRVSTGIVVADIDFSLIDSVRTKMPIDKQRVSIDL

SEQ ID NO: 47413 - DNA, 2110 bp, Arabidopsis thaliana; identical to SEQ ID NO: 45579
  misc_feature (1)..(2110): Ceres Seq. ID no. 13646533
  misc_feature (1)..(2110): Ortholog of  Ceres SEQ ID NO 13654290 as cited in SEQ ID NO 62197
  misc_feature (1)..(2110): Ortholog of  Ceres SEQ ID NO 14301924 as cited in SEQ ID NO 67731

SEQ ID NO: 47414 - protein, 588 aa, Arabidopsis thaliana; identical to SEQ ID NO: 45580
  peptide (1)..(588): Ceres Seq. ID no. 13646534

SEQ ID NO: 47415 - protein, 536 aa, Arabidopsis thaliana; identical to SEQ ID NO: 45581
  peptide (1)..(536): Ceres Seq. ID no. 13646535

SEQ ID NO: 47416 - protein, 496 aa, Arabidopsis thaliana; identical to SEQ ID NO: 45582
  peptide (1)..(496): Ceres Seq. ID no. 13646536

SEQ ID NO: 47417 - DNA, 1634 bp, Arabidopsis thaliana
  misc_feature (1)..(1634): Ceres Seq. ID no. 12591789
  misc_feature (1)..(1634): Ortholog of  Ceres SEQ ID NO 14316107 as cited in SEQ ID NO 52454
atggagatacggagcttgattgtttctatgaaccctaatttatcttcctttgagctctctcgccctgtatctcctctcactcgctcactagttccgttccgatcgactaaactagttccccgctccatttctagggtttcggcgtcgatctccaccccgaatagtgaaactgacaagatctccgttaaacctgtttacgtcccgacgtctcccaatcgcgaactccggactcctcacagtggataccatttcgatggaacacctcggaagttcttcgagggatggtatttcagggtttccatcccagagaagagggagagtttttgttttatgtattctgtggagaatcctgcatttcggcagagtttgtcaccattggaagtggctctatatggacctagattcactggtgttggagctcagattcttggcgctaatgataaatatttatgccaatacgaacaagactctcacaatttctggggagatcgacatgagctagttttggggaatacttttagtgctgtgccaggcgcaaaggctccaaacaaggaggttccaccagaggaatttaacagaagagtgtccgaagggttccaagctactccattttggcatcaaggtcacatttgcgatgatggccgtactgactatgcggaaactgtgaaatctgctcgttgggagtatagtactcgtcccgtttacggttggggtgatgttggggccaaacagaagtcaactgcaggctggcctgcagcttttcctgtatttgagcctcattggcagatatgcatggcaggaggcctttccacagggtggatagaatggggcggtgaaaggtttgagtttcgggatgcaccttcttattcagagaagaattggggtggaggcttcccaagaaaatggttttgggtccagtgtaatgtctttgaaggggcaactggagaagttgctttaaccgcaggtggcgggttgaggcaattgcctggattgactgagacctatgaaaatgctgcactggtttgtgtacactatgatggaaaaatgtacgagtttgttccttggaatggtgttgttagatgggaaatgtctccctggggttattggtatataactgcagagaacgaaaaccatgtggtggaactagaggcaagaacaaatgaagcgggtacacctctgcgtgctcctaccacagaagttgggctagctacggcttgcagagatagttgttacggtgaattgaagttgcagatatgggaacggctatatgatggaagtaaaggcaaggtgatattagagacaaagagctcaatggcagcagtggagataggaggaggaccgtggtttgggacatggaaaggagatacgagcaacacgcccgagctactaaaacaggctcttcaggtcccattggatcttgaaagcgccttaggtttggtccctttcttcaagccaccgggtctgtaacattgatgagtgttttgtttgttgatagagacccatgtgatgaatgaagccttagtcatgtcattgctagcttcactattatgtatgtatgattttagttcgttcggtccttgtggtaaatgatacgggccagtgtaaagtctaattcaataaaagccttgagtcgc

SEQ ID NO: 47418 - protein, 488 aa, Arabidopsis thaliana
  peptide (1)..(488): Ceres Seq. ID no. 12591790
MEIRSLIVSMNPNLSSFELSRPVSPLTRSLVPFRSTKLVPRSISRVSASISTPNSETDKISVKPVYVPTSPNRELRTPHSGYHFDGTPRKFFEGWYFRVSIPEKRESFCFMYSVENPAFRQSLSPLEVALYGPRFTGVGAQILGANDKYLCQYEQDSHNFWGDRHELVLGNTFSAVPGAKAPNKEVPPEEFNRRVSEGFQATPFWHQGHICDDGRTDYAETVKSARWEYSTRPVYGWGDVGAKQKSTAGWPAAFPVFEPHWQICMAGGLSTGWIEWGGERFEFRDAPSYSEKNWGGGFPRKWFWVQCNVFEGATGEVALTAGGGLRQLPGLTETYENAALVCVHYDGKMYEFVPWNGVVRWEMSPWGYWYITAENENHVVELEARTNEAGTPLRAPTTEVGLATACRDSCYGELKLQIWERLYDGSKGKVILETKSSMAAVEIGGGPWFGTWKGDTSNTPELLKQALQVPLDLESALGLVPFFKPPGL

SEQ ID NO: 47419 - protein, 479 aa, Arabidopsis thaliana
  peptide (1)..(479): Ceres Seq. ID no. 12591791
MNPNLSSFELSRPVSPLTRSLVPFRSTKLVPRSISRVSASISTPNSETDKISVKPVYVPTSPNRELRTPHSGYHFDGTPRKFFEGWYFRVSIPEKRESFCFMYSVENPAFRQSLSPLEVALYGPRFTGVGAQILGANDKYLCQYEQDSHNFWGDRHELVLGNTFSAVPGAKAPNKEVPPEEFNRRVSEGFQATPFWHQGHICDDGRTDYAETVKSARWEYSTRPVYGWGDVGAKQKSTAGWPAAFPVFEPHWQICMAGGLSTGWIEWGGERFEFRDAPSYSEKNWGGGFPRKWFWVQCNVFEGATGEVALTAGGGLRQLPGLTETYENAALVCVHYDGKMYEFVPWNGVVRWEMSPWGYWYITAENENHVVELEARTNEAGTPLRAPTTEVGLATACRDSCYGELKLQIWERLYDGSKGKVILETKSSMAAVEIGGGPWFGTWKGDTSNTPELLKQALQVPLDLESALGLVPFFKPPGL

SEQ ID NO: 47420 - protein, 378 aa, Arabidopsis thaliana
  peptide (1)..(378): Ceres Seq. ID no. 12591792
MYSVENPAFRQSLSPLEVALYGPRFTGVGAQILGANDKYLCQYEQDSHNFWGDRHELVLGNTFSAVPGAKAPNKEVPPEEFNRRVSEGFQATPFWHQGHICDDGRTDYAETVKSARWEYSTRPVYGWGDVGAKQKSTAGWPAAFPVFEPHWQICMAGGLSTGWIEWGGERFEFRDAPSYSEKNWGGGFPRKWFWVQCNVFEGATGEVALTAGGGLRQLPGLTETYENAALVCVHYDGKMYEFVPWNGVVRWEMSPWGYWYITAENENHVVELEARTNEAGTPLRAPTTEVGLATACRDSCYGELKLQIWERLYDGSKGKVILETKSSMAAVEIGGGPWFGTWKGDTSNTPELLKQALQVPLDLESALGLVPFFKPPGL

SEQ ID NO: 47421 - DNA, 1148 bp, Arabidopsis thaliana
  misc_feature (1)..(1148): Ceres Seq. ID no. 13588370
  misc_feature (1)..(1148): Ortholog of  Ceres SEQ ID NO 13597555 as cited in SEQ ID NO 65270
  misc_feature (1)..(1148): Ortholog of  Ceres SEQ ID NO 13624277 as cited in SEQ ID NO 0
  misc_feature (1)..(1148): Ortholog of  Ceres SEQ ID NO 15175746 as cited in SEQ ID NO 0
acttttgctttcttcaacctgtcgacaacactcccgaatttttctctggcagtgtgtttaaaaaccaatggcgctagttgtgatttgtgggcaaccttgtagtggtaagtcaatagctgcagtaactttagctgaaacattgaaagagtctgaaacgaaacagagtgttaggatcatcgatgaggcttcgtttcatctagaccgcaaccaaaactatgctaacatgcctgctgagaagaatctgagaggaaagcttaggtcagatgttgatagatcagtttcgacaggcgagattgttattgtagattccttgaatagtatcaaaggttacagatatgagctatggtgtatcgctcgtgctgctgggattaggtattgtgttgtttattgtgatgtagatgaagctcattgtaggcaatggaataaggaacggagtgatagaggtgaagatggatatgacgatggtatattcgaagatctggttagaagatttgagaaacctgagagaagaaaccgatgggattcacctctctttgagctatacccttctcgtgaagttatagacaaatcctctcctgtgattttagaggctgtgacttatctaaccaagactgttgactccaaaacccaagatgtgagaattctccaaccaagtattgccactcaggctgctagattttcagaagcaaattctctttacgagttggacagagcgacacaagaaatcatcaacgcgattgtggaacaacaatcactgggcgcggctataagcagagttactcttggcaatgaactacctccgattgaaatctgcagaccgattgggctaccggagctaaggaggcttcgaagaacgtttgttaaattgatgggtcaatcgagtctaagcggtccaccgttaccaactgatgcagacagtgcaaagagacgttttgtggattacttgaacagagagtttggaggtaataacgcttgaaatttgttgggtgaaaaacatcttatttcttaaaggtttggttatgtattttcttaactcaagacttgttcttcttcatcgaaattcttttttggggctaaattgatgtgttataataggcccgttataataatgcaaacatattttggggctatagtatattttcttgtcc

SEQ ID NO: 47422 - protein, 302 aa, Arabidopsis thaliana
  peptide (1)..(302): Ceres Seq. ID no. 13588371
MALVVICGQPCSGKSIAAVTLAETLKESETKQSVRIIDEASFHLDRNQNYANMPAEKNLRGKLRSDVDRSVSTGEIVIVDSLNSIKGYRYELWCIARAAGIRYCVVYCDVDEAHCRQWNKERSDRGEDGYDDGIFEDLVRRFEKPERRNRWDSPLFELYPSREVIDKSSPVILEAVTYLTKTVDSKTQDVRILQPSIATQAARFSEANSLYELDRATQEIINAIVEQQSLGAAISRVTLGNELPPIEICRPIGLPELRRLRRTFVKLMGQSSLSGPPLPTDADSAKRRFVDYLNREFGGNNA

SEQ ID NO: 47423 - protein, 250 aa, Arabidopsis thaliana
  peptide (1)..(250): Ceres Seq. ID no. 13588372
MPAEKNLRGKLRSDVDRSVSTGEIVIVDSLNSIKGYRYELWCIARAAGIRYCVVYCDVDEAHCRQWNKERSDRGEDGYDDGIFEDLVRRFEKPERRNRWDSPLFELYPSREVIDKSSPVILEAVTYLTKTVDSKTQDVRILQPSIATQAARFSEANSLYELDRATQEIINAIVEQQSLGAAISRVTLGNELPPIEICRPIGLPELRRLRRTFVKLMGQSSLSGPPLPTDADSAKRRFVDYLNREFGGNNA

SEQ ID NO: 47424 - DNA, 2750 bp, Arabidopsis thaliana
  misc_feature (1)..(2750): Ceres Seq. ID no. 12591695
  misc_feature (1)..(2750): Ortholog of  Ceres SEQ ID NO 12638191 as cited in SEQ ID NO 674
  misc_feature (1)..(2750): Ortholog of  Ceres SEQ ID NO 14310362 as cited in SEQ ID NO 54251
  misc_feature (1)..(2750): Ortholog of  Ceres SEQ ID NO 13654989 as cited in SEQ ID NO 63117
  misc_feature (1)..(2750): Ortholog of  Ceres SEQ ID NO 14303105 as cited in SEQ ID NO 66589
  misc_feature (1)..(2750): Ortholog of  Ceres SEQ ID NO 13584744 as cited in SEQ ID NO 69137
atggtgttcacaaaatcattacttgttcttctttggttcctctcttgttacactactactacttcatcagctttgtttaatccgccagacaattacttgatctcttgtggctcatcacaaaacataactttccaaaacagaatctttgttccagattcactccactcttctcttgtactcaaaatcggaaactcttctgttgcaacatcaactacttccaacaattcaaccaattccatctaccaaaccgctcgtgttttctccagtttagcttcttacagattcaaaatcacttctttaggtcgacattggatccgtcttcatttctcacctatcaacaactctacttggaacttaacctctgcttcaatcactgtcgtaacagaagacttcgtgctcttgaacaacttctccttcaacaacttcaacggttcttacatcttcaaagagtacacagtcaatgtcacttcagagttcttgactttaagtttcattccttcaaacaattcggtggtctttgtcaacgctattgaagttgtctctgttccggataatcttatccctgatcaagctttggcgttaaacccttcaacaccatttagtggtctctctctgcttgcatttgaaacagtctacagattaaatatgggaggaccattgttgacttctcaaaacgatacattggggagacaatgggataatgatgcagagtatcttcatgtgaacagctctgttcttgttgtaacggcgaatccttcttcgattaagtactctccttctgtgactcaagaaacagctcctaacatggtttatgcaactgctgatacaatgggtgatgctaatgttgcgagtccaagttttaatgttacttgggttcttcctgttgatccagacttcaggtactttgttcgtgttcatttctgtgatattgtgagtcaagctttgaacacgcttgttttcaatctttatgtgaatgatgatcttgctcttggaagtcttgatctctctacgttgactaatggtcttaaagttccttactttaaggattttatctccaatggttctgttgaatcttccggtgttttaaccgttagcgttggacctgattcacaagctgatatcactaatgcgactatgaatgggttagaggttttgaagattagtaacgaagctaagagcttaagtggtgtttcttcggttaagtcgttacttccgggaggatcaggttctaagagcaagaagaaggcagtgatcattggttctttggttggtgcggttacattgattctgctgattgctgtttgttgctattgctgtttggttgcttcaaggaagcagaggtcgacgagtcctcaagaaggcggtaatggacatccgtggttgccattacctttatatggactctctcagactcttactaaatcaaccgcttctcacaagagtgccacagctagttgcatttcattagcttctactcatcttggacgttgctttatgtttcaagaaatcatggacgctactaataagttcgatgagagttcgttgcttggggttggtggatttggccgcgtttataaaggaactttagaagacgggactaaagtcgcggttaaaagaggtaacccgagatcagaacaaggtatggctgagttcagaacagagattgaaatgctgtcaaaactcagacatcgacatctcgtctctcttatcggttactgcgacgagaggtctgaaatgatactggtctatgagtacatggcgaatggaccgttgaggagtcatctatatggagctgatcttcctccattgtcttggaaacaaagactcgagatttgcatcggtgcagcgagaggattacattatctacacaccggtgcatcgcagagcattatacaccgtgatgttaaaaccacgaatatcttactcgacgagaatctagtcgccaaagttgcagactttggactatccaaaaccggcccttcgctcgatcaaacacacgtgagcacggcggttaaaggaagctttggttatctagacccggaatacttcaggagacagcagttaacagagaaatcagacgtttattcgtttggtgttgtactaatggaagtactctgttgtagaccggctttaaacccggtattacctagagaacaagtgaacatagcggaatgggcaatggcgtggcagaaaaagggtctgctagatcaaatcatggacagtaacttaaccgggaaggtgaaccctgcctcgttgaagaaatttggagaaaccgcagagaaatgtttagcggaatacggtgtggaccggccttctatgggagatgtattgtggaatttggagtacgcgttacagctagaagaaacatcttcggctttgatggagcctgatgacaatagtacaaaccacattccagggattccaatggcgccaatggaaccgtttgataacagtatgagtataatcgatagaggaggagtaaattcggggaccgggactgatgatgatgcggaagacgcgactactagtgcggtgttttcgcagcttgttcatcctcgtggaaggtagaagaagaacacatttggtgaaaacaacagcagagacagacattgtttgtttttgaaaaatttatagaaagaaagttatttattgaagacttttgggaacaaacaacaaaatgattcattcagcatttattttcgattttttacggtgtatttgttttgtaatatagtgagtactgatgtttt

SEQ ID NO: 47425 - protein, 855 aa, Arabidopsis thaliana
  peptide (1)..(855): Ceres Seq. ID no. 12591696
MVFTKSLLVLLWFLSCYTTTTSSALFNPPDNYLISCGSSQNITFQNRIFVPDSLHSSLVLKIGNSSVATSTTSNNSTNSIYQTARVFSSLASYRFKITSLGRHWIRLHFSPINNSTWNLTSASITVVTEDFVLLNNFSFNNFNGSYIFKEYTVNVTSEFLTLSFIPSNNSVVFVNAIEVVSVPDNLIPDQALALNPSTPFSGLSLLAFETVYRLNMGGPLLTSQNDTLGRQWDNDAEYLHVNSSVLVVTANPSSIKYSPSVTQETAPNMVYATADTMGDANVASPSFNVTWVLPVDPDFRYFVRVHFCDIVSQALNTLVFNLYVNDDLALGSLDLSTLTNGLKVPYFKDFISNGSVESSGVLTVSVGPDSQADITNATMNGLEVLKISNEAKSLSGVSSVKSLLPGGSGSKSKKKAVIIGSLVGAVTLILLIAVCCYCCLVASRKQRSTSPQEGGNGHPWLPLPLYGLSQTLTKSTASHKSATASCISLASTHLGRCFMFQEIMDATNKFDESSLLGVGGFGRVYKGTLEDGTKVAVKRGNPRSEQGMAEFRTEIEMLSKLRHRHLVSLIGYCDERSEMILVYEYMANGPLRSHLYGADLPPLSWKQRLEICIGAARGLHYLHTGASQSIIHRDVKTTNILLDENLVAKVADFGLSKTGPSLDQTHVSTAVKGSFGYLDPEYFRRQQLTEKSDVYSFGVVLMEVLCCRPALNPVLPREQVNIAEWAMAWQKKGLLDQIMDSNLTGKVNPASLKKFGETAEKCLAEYGVDRPSMGDVLWNLEYALQLEETSSALMEPDDNSTNHIPGIPMAPMEPFDNSMSIIDRGGVNSGTGTDDDAEDATTSAVFSQLVHPRGR

SEQ ID NO: 47426 - protein, 640 aa, Arabidopsis thaliana
  peptide (1)..(640): Ceres Seq. ID no. 12591697
MGGPLLTSQNDTLGRQWDNDAEYLHVNSSVLVVTANPSSIKYSPSVTQETAPNMVYATADTMGDANVASPSFNVTWVLPVDPDFRYFVRVHFCDIVSQALNTLVFNLYVNDDLALGSLDLSTLTNGLKVPYFKDFISNGSVESSGVLTVSVGPDSQADITNATMNGLEVLKISNEAKSLSGVSSVKSLLPGGSGSKSKKKAVIIGSLVGAVTLILLIAVCCYCCLVASRKQRSTSPQEGGNGHPWLPLPLYGLSQTLTKSTASHKSATASCISLASTHLGRCFMFQEIMDATNKFDESSLLGVGGFGRVYKGTLEDGTKVAVKRGNPRSEQGMAEFRTEIEMLSKLRHRHLVSLIGYCDERSEMILVYEYMANGPLRSHLYGADLPPLSWKQRLEICIGAARGLHYLHTGASQSIIHRDVKTTNILLDENLVAKVADFGLSKTGPSLDQTHVSTAVKGSFGYLDPEYFRRQQLTEKSDVYSFGVVLMEVLCCRPALNPVLPREQVNIAEWAMAWQKKGLLDQIMDSNLTGKVNPASLKKFGETAEKCLAEYGVDRPSMGDVLWNLEYALQLEETSSALMEPDDNSTNHIPGIPMAPMEPFDNSMSIIDRGGVNSGTGTDDDAEDATTSAVFSQLVHPRGR

SEQ ID NO: 47427 - protein, 587 aa, Arabidopsis thaliana
  peptide (1)..(587): Ceres Seq. ID no. 12591698
MVYATADTMGDANVASPSFNVTWVLPVDPDFRYFVRVHFCDIVSQALNTLVFNLYVNDDLALGSLDLSTLTNGLKVPYFKDFISNGSVESSGVLTVSVGPDSQADITNATMNGLEVLKISNEAKSLSGVSSVKSLLPGGSGSKSKKKAVIIGSLVGAVTLILLIAVCCYCCLVASRKQRSTSPQEGGNGHPWLPLPLYGLSQTLTKSTASHKSATASCISLASTHLGRCFMFQEIMDATNKFDESSLLGVGGFGRVYKGTLEDGTKVAVKRGNPRSEQGMAEFRTEIEMLSKLRHRHLVSLIGYCDERSEMILVYEYMANGPLRSHLYGADLPPLSWKQRLEICIGAARGLHYLHTGASQSIIHRDVKTTNILLDENLVAKVADFGLSKTGPSLDQTHVSTAVKGSFGYLDPEYFRRQQLTEKSDVYSFGVVLMEVLCCRPALNPVLPREQVNIAEWAMAWQKKGLLDQIMDSNLTGKVNPASLKKFGETAEKCLAEYGVDRPSMGDVLWNLEYALQLEETSSALMEPDDNSTNHIPGIPMAPMEPFDNSMSIIDRGGVNSGTGTDDDAEDATTSAVFSQLVHPRGR

SEQ ID NO: 47428 - DNA, 926 bp, Arabidopsis thaliana
  misc_feature (1)..(926): Ceres Seq. ID no. 14304392
  misc_feature (1)..(926): Ortholog of  Ceres SEQ ID NO 15168436 as cited in SEQ ID NO 56974
ggatttgcttctccgatgtcaatcccaccatcttcaggttcttcttcttcatcttcctcgtctcagtacacatacgcagctaattcttactattccgctccgtatcagcctccacagccttacgcggcggcgccttcgcctgctgtaccggcgcctgtggcatccattcccggagctacggtctatcctcagcctgttggaccggttcctgccgtctacgcttaccctcagtaccaacaggcacatcaattgttccaaagagatgcacagacaattacaccagaagctcttgagaatgtaaaagctgctttggcaagtagtgaaaccgaacacaaagcagaaactaaaaagagagccattcctcgtaaagctgctggacagtcttgggaggatcctactctttcagaatggccagaaaatgactatcgtctgttctgtggtgatcttgggaacgaagtgaatgatgatgttctttccaaagcatttgctagattccccaccttcaatatggccaaggtcattagagataagcggactggtaaaaccaagggttatgggtttgtgagtttcttaaatcctgcggatccagcagcagccttaaaagaaatgaatggtaagtatgttggaaatcgtccgataaaactacgaaagagtagctggaaagagagaacagatcaggaggctgctgaaagacaaaagcatcacagcaataagaagcaaaaaactgtgaagaagagcatacttcacaagtgacgatctcttttatttttgtggcttaaaatttccaaacctgttactcataaatataaatgaacaaacattatcattagttttgttgaaaacggtatggttatgtattgttgggctgctatgtttagctttagccccaacgcggtggtatttactttatgaaaacgtgtgtccac

SEQ ID NO: 47429 - protein, 250 aa, Arabidopsis thaliana
  peptide (1)..(250): Ceres Seq. ID no. 14304393
GFASPMSIPPSSGSSSSSSSSQYTYAANSYYSAPYQPPQPYAAAPSPAVPAPVASIPGATVYPQPVGPVPAVYAYPQYQQAHQLFQRDAQTITPEALENVKAALASSETEHKAETKKRAIPRKAAGQSWEDPTLSEWPENDYRLFCGDLGNEVNDDVLSKAFARFPTFNMAKVIRDKRTGKTKGYGFVSFLNPADPAAALKEMNGKYVGNRPIKLRKSSWKERTDQEAAERQKHHSNKKQKTVKKSILHK

SEQ ID NO: 47430 - protein, 245 aa, Arabidopsis thaliana
  peptide (1)..(245): Ceres Seq. ID no. 14304394
MSIPPSSGSSSSSSSSQYTYAANSYYSAPYQPPQPYAAAPSPAVPAPVASIPGATVYPQPVGPVPAVYAYPQYQQAHQLFQRDAQTITPEALENVKAALASSETEHKAETKKRAIPRKAAGQSWEDPTLSEWPENDYRLFCGDLGNEVNDDVLSKAFARFPTFNMAKVIRDKRTGKTKGYGFVSFLNPADPAAALKEMNGKYVGNRPIKLRKSSWKERTDQEAAERQKHHSNKKQKTVKKSILHK

SEQ ID NO: 47431 - DNA, 1453 bp, Arabidopsis thaliana
  misc_feature (1)..(1453): Ceres Seq. ID no. 12601489
  misc_feature (1)..(1453): Ortholog of  Ceres SEQ ID NO 14301994 as cited in SEQ ID NO 56653
  misc_feature (1)..(1453): Ortholog of  Ceres SEQ ID NO 14304120 as cited in SEQ ID NO 58862
  misc_feature (1)..(1453): Ortholog of  Ceres SEQ ID NO 13595658 as cited in SEQ ID NO 59888
  misc_feature (1)..(1453): Ortholog of  Ceres SEQ ID NO 13661330 as cited in SEQ ID NO 61614
  misc_feature (1)..(1453): Ortholog of  Ceres SEQ ID NO 13596025 as cited in SEQ ID NO 62024
  misc_feature (1)..(1453): Ortholog of  Ceres SEQ ID NO 13662324 as cited in SEQ ID NO 62162
  misc_feature (1)..(1453): Ortholog of  Ceres SEQ ID NO 12625713 as cited in SEQ ID NO 64160
  misc_feature (1)..(1453): Ortholog of  Ceres SEQ ID NO 14303564 as cited in SEQ ID NO 65360
  misc_feature (1)..(1453): Ortholog of  Ceres SEQ ID NO 15170103 as cited in SEQ ID NO 66345
  misc_feature (1)..(1453): Ortholog of  Ceres SEQ ID NO 14313495 as cited in SEQ ID NO 0
cgctctcagaatcctcttttaagtctctgtttcataaataaaactaataaagaagaagaagaaaacagagcaattaaagtccttaaatcttcttcttctccaattcaatggctcttccgttgccattgatcttccttatcttctctcatttgttcgtttctggagttagatcaacgagcttcattatggtgaacaaatgcgaatacacagtctggcctggacttttatcaaacgccggagttccaccacttccgacgaccggattcgttctccaaaaaggcgaagaacgaacaatcagcgctccaacttcatggggaggaagattctgggggagaactcaatgttccaccgacaccgacggaaaattcacttgtctcaccggagattgcggatctggtaccctcgaatgctccggatccggagcaacaccaccagcaacactagcggaattcacactagacggatctaacggactcgatttctacgacgttagtctcgtcgacggttacaacgtcccgatgctagtggctccacaaggaggctcgggtttaaactgtagcagcaccggatgcgttgtagatctgaacggttcgtgtccgtcggagcttaaagtgacgagtttagacggcagaggtaaacaatccatgggatgtaaaagcgcgtgtgaagcttttcgtacgccggagtattgttgcagcggcgcccacggtacacctgacacgtgtaaaccgtcgtcgtactcgttgatgtttaaaactgcgtgtccacgtgcttacagctacgcttacgatgatcagagtagtaccttcacatgtgctgaatctcctaattacgttatcacgttttgccctactcctaacaccagtcaaaaatcatctcaagatcagagcccagatcccaaaccgacgacaccaaccgggacgtcgtcgacaactcctgccggagatagtagtacgacgtggtcaccggtagatacatcaatgatatacgaaggagctttggatcaaaacaaaggatcaccgtccacgtgtcatctttcgttatgtggaatcacagtcacacttgcgctggccttttgtcggatgtggcggctcttttgacacctaactttgtctcccgcgtaaaacactgaagaatgtgggccctcactgacgaaagccttatctcgttccggcccatgtgaaccggttattcccgaacgacgtcggattgggtcagagttgagaaaaaaagttaacaacaccctacagttacgaaaatatccttcattcatgttcatgggagaattcttaatttgggtgaggaacacgtgggcaagaaagtgggctgctggtggagttcataaaagatgggaatgtttaattgtaaggtcagaatatttatttgatttataatgtaactaggattagaagaatattatgtacactatataaagcagtaatctatttagttt

SEQ ID NO: 47432 - protein, 330 aa, Arabidopsis thaliana
  peptide (1)..(330): Ceres Seq. ID no. 12601490
MALPLPLIFLIFSHLFVSGVRSTSFIMVNKCEYTVWPGLLSNAGVPPLPTTGFVLQKGEERTISAPTSWGGRFWGRTQCSTDTDGKFTCLTGDCGSGTLECSGSGATPPATLAEFTLDGSNGLDFYDVSLVDGYNVPMLVAPQGGSGLNCSSTGCVVDLNGSCPSELKVTSLDGRGKQSMGCKSACEAFRTPEYCCSGAHGTPDTCKPSSYSLMFKTACPRAYSYAYDDQSSTFTCAESPNYVITFCPTPNTSQKSSQDQSPDPKPTTPTGTSSTTPAGDSSTTWSPVDTSMIYEGALDQNKGSPSTCHLSLCGITVTLALAFCRMWRLF

SEQ ID NO: 47433 - protein, 304 aa, Arabidopsis thaliana
  peptide (1)..(304): Ceres Seq. ID no. 12601491
MVNKCEYTVWPGLLSNAGVPPLPTTGFVLQKGEERTISAPTSWGGRFWGRTQCSTDTDGKFTCLTGDCGSGTLECSGSGATPPATLAEFTLDGSNGLDFYDVSLVDGYNVPMLVAPQGGSGLNCSSTGCVVDLNGSCPSELKVTSLDGRGKQSMGCKSACEAFRTPEYCCSGAHGTPDTCKPSSYSLMFKTACPRAYSYAYDDQSSTFTCAESPNYVITFCPTPNTSQKSSQDQSPDPKPTTPTGTSSTTPAGDSSTTWSPVDTSMIYEGALDQNKGSPSTCHLSLCGITVTLALAFCRMWRLF

SEQ ID NO: 47434 - protein, 193 aa, Arabidopsis thaliana
  peptide (1)..(193): Ceres Seq. ID no. 12601492
MLVAPQGGSGLNCSSTGCVVDLNGSCPSELKVTSLDGRGKQSMGCKSACEAFRTPEYCCSGAHGTPDTCKPSSYSLMFKTACPRAYSYAYDDQSSTFTCAESPNYVITFCPTPNTSQKSSQDQSPDPKPTTPTGTSSTTPAGDSSTTWSPVDTSMIYEGALDQNKGSPSTCHLSLCGITVTLALAFCRMWRLF

SEQ ID NO: 47435 - DNA, 1066 bp, Arabidopsis thaliana; identical to SEQ ID NO: 47008
  misc_feature (1)..(1066): Ceres Seq. ID no. 12576107
  misc_feature (1)..(1066): Ortholog of  Ceres SEQ ID NO 14311683 as cited in SEQ ID NO 51263
  misc_feature (1)..(1066): Ortholog of  Ceres SEQ ID NO 13661430 as cited in SEQ ID NO 61258
  misc_feature (1)..(1066): Ortholog of  Ceres SEQ ID NO 13590940 as cited in SEQ ID NO 68653
  misc_feature (1)..(1066): Ortholog of  Ceres SEQ ID NO 14301982 as cited in SEQ ID NO 0
  misc_feature (1)..(1066): Ortholog of  Ceres SEQ ID NO 15179001 as cited in SEQ ID NO 0
  misc_feature (1)..(1066): Ortholog of  Ceres SEQ ID NO 15180040 as cited in SEQ ID NO 0

SEQ ID NO: 47436 - protein, 291 aa, Arabidopsis thaliana; identical to SEQ ID NO: 47009
  peptide (1)..(291): Ceres Seq. ID no. 12576108

SEQ ID NO: 47437 - protein, 289 aa, Arabidopsis thaliana; identical to SEQ ID NO: 47010
  peptide (1)..(289): Ceres Seq. ID no. 12576109

SEQ ID NO: 47438 - protein, 275 aa, Arabidopsis thaliana; identical to SEQ ID NO: 47011
  peptide (1)..(275): Ceres Seq. ID no. 12576110

SEQ ID NO: 47439 - DNA, 2066 bp, Arabidopsis thaliana; identical to SEQ ID NO: 39017
  misc_feature (1)..(2066): Ceres Seq. ID no. 13495924
  misc_feature (1)..(2066): Ortholog of  Ceres SEQ ID NO 12460981 as cited in SEQ ID NO 65146

SEQ ID NO: 47440 - protein, 573 aa, Arabidopsis thaliana; identical to SEQ ID NO: 39018
  peptide (1)..(573): Ceres Seq. ID no. 13495925

SEQ ID NO: 47441 - protein, 298 aa, Arabidopsis thaliana; identical to SEQ ID NO: 39019
  peptide (1)..(298): Ceres Seq. ID no. 13495926

SEQ ID NO: 47442 - DNA, 1038 bp, Arabidopsis thaliana
  misc_feature (1)..(1038): Ceres Seq. ID no. 13592611
  misc_feature (1)..(1038): Ortholog of  Ceres SEQ ID NO 14307583 as cited in SEQ ID NO 163
  misc_feature (1)..(1038): Ortholog of  Ceres SEQ ID NO 15224302 as cited in SEQ ID NO 53942
  misc_feature (1)..(1038): Ortholog of  Ceres SEQ ID NO 14306297 as cited in SEQ ID NO 56907
tcaagtgaagcagaatcaaagttgccacttagtccggaagactgtgattgtgattttgaatgaactcatggaacaagtttcctctagatcaagctctctcactgtcggagagcaattctgcgccgtctttatacctttctttgccattatcgatgtcctagtttcctccgtcggacaatgcttcgattgccgcagcacatcgcctcggacatgtcagcacgcggatctggaacgtcttgctcgtgaatctcaattttcagtcaatgaagttgaagctttgtatgagctattcaagaaattgagctgttcaattattgatgacggcttgattcacaaggaagagcttagactggcgctgttccaagctccatatggtgagaacctctttcttgatagggtttttgatttgttcgatgaaaagaagaatggggttattgagtttgaggaattcatccatgcactcagtgtctttcatccctatgcatcaatccaggagaagaccgattttgcatttaggctctatgatctaagacaaactggattcattgagcgagaagaggtgcaacaaatggtttctgctattctcttggaatctgatatgatgctatccgatgaacttctgaccatgattattgataaaacatttgctgatgcagattctgacaaagacggtaaaattagtaaggatgaatggaatgtctatgtgcataaacatcctagcttgttgaagaatatgactcttccttacctaaaggatgtgacgacagcattcccaagttttatattcaacactgaggttgaagactgaggcacaactgtccatgcaacaccggtcatcttttttctgcttggtcctgtaattcgagtgagattgtcatagcgcaagagcagaacgaggaaagaaggttttccttattttattttaagccaacgtagttgatgattattagctgtaagtaaaattgtcaagcactttgctttgttttgatgactttactgtaattgttccattgaaagtaatgaagcatttttcttttc

SEQ ID NO: 47443 - protein, 268 aa, Arabidopsis thaliana
  peptide (1)..(268): Ceres Seq. ID no. 13592612
QVKQNQSCHLVRKTVIVILNELMEQVSSRSSSLTVGEQFCAVFIPFFAIIDVLVSSVGQCFDCRSTSPRTCQHADLERLARESQFSVNEVEALYELFKKLSCSIIDDGLIHKEELRLALFQAPYGENLFLDRVFDLFDEKKNGVIEFEEFIHALSVFHPYASIQEKTDFAFRLYDLRQTGFIEREEVQQMVSAILLESDMMLSDELLTMIIDKTFADADSDKDGKISKDEWNVYVHKHPSLLKNMTLPYLKDVTTAFPSFIFNTEVED

SEQ ID NO: 47444 - protein, 246 aa, Arabidopsis thaliana
  peptide (1)..(246): Ceres Seq. ID no. 13592613
MEQVSSRSSSLTVGEQFCAVFIPFFAIIDVLVSSVGQCFDCRSTSPRTCQHADLERLARESQFSVNEVEALYELFKKLSCSIIDDGLIHKEELRLALFQAPYGENLFLDRVFDLFDEKKNGVIEFEEFIHALSVFHPYASIQEKTDFAFRLYDLRQTGFIEREEVQQMVSAILLESDMMLSDELLTMIIDKTFADADSDKDGKISKDEWNVYVHKHPSLLKNMTLPYLKDVTTAFPSFIFNTEVED

SEQ ID NO: 47445 - DNA, 1388 bp, Arabidopsis thaliana
  misc_feature (1)..(1388): Ceres Seq. ID no. 13648440
  misc_feature (1)..(1388): Ortholog of  Ceres SEQ ID NO 14312204 as cited in SEQ ID NO 54547
  misc_feature (1)..(1388): Ortholog of  Ceres SEQ ID NO 13597633 as cited in SEQ ID NO 65444
gtggtgacatttacgcgcagaaacgttgatactctctctctctcgacggaaaattcttcctcggagatatggtgacggagctggaagagcttgtcgaatttttgtcatctccttcaccgcctgtgaagaaagctgcggtggaaattgttagtggtttaactggttccgaggaaggtttacaatctctatcaaagtattccgagattcttcttccatcattgtctcagcttctaaatgaaagcaaggaggtatcagagccagcagctcaagctcttgttaatctttctcagaagtgtgaattggcaaagaagatgattcaaatgggtttgattaaagtggccatggacatgttgtataagccagagtcatgtattaccagattacttgttatgcttctagtgaatcttactcagttggatgatggggtttcttctttgcttcagattgacgatgagaagatgcatggactacatatcatgaagcttgttaggtcattttgcaggtcttctggtgaaactgctgatgatcagtttgagcatgttggttcgatccttgtcaacatatcaaaaacagaagatgggaggaaattgttactggagccaaagagacgactattaaaacagatcattaggcagtttgattcaacaaatcagttgcgaaagaaaggggttgctgggactattcgtaactgttgttttgaagccaaaaaccaactccagaatatactcttgatatcagagtttctttggcccgctctgctcctaccagttgcaggcagcaagacatacagtgagcaagatgtcgcaaaaatgccacctgagcttggaagtgcactgtccattgagcgagaaccagttactgatcctgacattcgcgttcagacactcgaagctatatatttgatcatcttagaggaggcaggtcgaagggcattttggtcagtcaacggcccacggattctacaattgggatacgaatatgaagaagatccgaaagcaatgagagcctatgagcaagtcggttctttgcttgttgaggaagctggaggtccggaagagtcgttggagccaacaaaagcagagtcttgaagttcattatttgttgttctccgactctagtccccattattggctgccctcgcaaagtaagttacttatcctgttatgaaagagttactactacatcttgtgcactactagttgtaacactagattcgttattgacttacgcgatcttattagtgctccattttctatttttggttgtaattttattttatattagacattatagtatgttatcttcgttagacaatatatttgtgtattcttacacacattttttgctaagaaaaaaaaaaaaaaaaaactcgagggggggcccggtac

SEQ ID NO: 47446 - protein, 339 aa, Arabidopsis thaliana
  peptide (1)..(339): Ceres Seq. ID no. 13648441
MVTELEELVEFLSSPSPPVKKAAVEIVSGLTGSEEGLQSLSKYSEILLPSLSQLLNESKEVSEPAAQALVNLSQKCELAKKMIQMGLIKVAMDMLYKPESCITRLLVMLLVNLTQLDDGVSSLLQIDDEKMHGLHIMKLVRSFCRSSGETADDQFEHVGSILVNISKTEDGRKLLLEPKRRLLKQIIRQFDSTNQLRKKGVAGTIRNCCFEAKNQLQNILLISEFLWPALLLPVAGSKTYSEQDVAKMPPELGSALSIEREPVTDPDIRVQTLEAIYLIILEEAGRRAFWSVNGPRILQLGYEYEEDPKAMRAYEQVGSLLVEEAGGPEESLEPTKAES

SEQ ID NO: 47447 - protein, 258 aa, Arabidopsis thaliana
  peptide (1)..(258): Ceres Seq. ID no. 13648442
MIQMGLIKVAMDMLYKPESCITRLLVMLLVNLTQLDDGVSSLLQIDDEKMHGLHIMKLVRSFCRSSGETADDQFEHVGSILVNISKTEDGRKLLLEPKRRLLKQIIRQFDSTNQLRKKGVAGTIRNCCFEAKNQLQNILLISEFLWPALLLPVAGSKTYSEQDVAKMPPELGSALSIEREPVTDPDIRVQTLEAIYLIILEEAGRRAFWSVNGPRILQLGYEYEEDPKAMRAYEQVGSLLVEEAGGPEESLEPTKAES

SEQ ID NO: 47448 - protein, 255 aa, Arabidopsis thaliana
  peptide (1)..(255): Ceres Seq. ID no. 13648443
MGLIKVAMDMLYKPESCITRLLVMLLVNLTQLDDGVSSLLQIDDEKMHGLHIMKLVRSFCRSSGETADDQFEHVGSILVNISKTEDGRKLLLEPKRRLLKQIIRQFDSTNQLRKKGVAGTIRNCCFEAKNQLQNILLISEFLWPALLLPVAGSKTYSEQDVAKMPPELGSALSIEREPVTDPDIRVQTLEAIYLIILEEAGRRAFWSVNGPRILQLGYEYEEDPKAMRAYEQVGSLLVEEAGGPEESLEPTKAES

SEQ ID NO: 47449 - DNA, 1205 bp, Arabidopsis thaliana; identical to SEQ ID NO: 27607
  misc_feature (1)..(1205): Ceres Seq. ID no. 12332476
  misc_feature (1)..(1205): Ortholog of  Ceres SEQ ID NO 14311596 as cited in SEQ ID NO 51728
  misc_feature (1)..(1205): Ortholog of  Ceres SEQ ID NO 15177031 as cited in SEQ ID NO 60171
  misc_feature (1)..(1205): Ortholog of  Ceres SEQ ID NO 12617197 as cited in SEQ ID NO 63406
  misc_feature (1)..(1205): Ortholog of  Ceres SEQ ID NO 13597804 as cited in SEQ ID NO 64182
  misc_feature (1)..(1205): Ortholog of  Ceres SEQ ID NO 15179788 as cited in SEQ ID NO 64818
  misc_feature (1)..(1205): Ortholog of  Ceres SEQ ID NO 14302768 as cited in SEQ ID NO 64889
  misc_feature (1)..(1205): Ortholog of  Ceres SEQ ID NO 13598565 as cited in SEQ ID NO 65250
  misc_feature (1)..(1205): Ortholog of  Ceres SEQ ID NO 13598597 as cited in SEQ ID NO 65496
  misc_feature (1)..(1205): Ortholog of  Ceres SEQ ID NO 13596284 as cited in SEQ ID NO 68273
  misc_feature (1)..(1205): Ortholog of  Ceres SEQ ID NO 15178902 as cited in SEQ ID NO 0

SEQ ID NO: 47450 - protein, 326 aa, Arabidopsis thaliana; identical to SEQ ID NO: 27608
  peptide (1)..(326): Ceres Seq. ID no. 12332477

SEQ ID NO: 47451 - protein, 196 aa, Arabidopsis thaliana; identical to SEQ ID NO: 27609
  peptide (1)..(196): Ceres Seq. ID no. 12332478

SEQ ID NO: 47452 - protein, 164 aa, Arabidopsis thaliana; identical to SEQ ID NO: 27610
  peptide (1)..(164): Ceres Seq. ID no. 12332479

SEQ ID NO: 47453 - DNA, 1658 bp, Arabidopsis thaliana
  misc_feature (1)..(1658): Ceres Seq. ID no. 13647862
  misc_feature (1)..(1658): Ortholog of  Ceres SEQ ID NO 13523550 as cited in SEQ ID NO 58816
gaattctacagttctcatgctaaaccatattttttgctctctgttccttcaaaatcatttctttctcttctttgattcccaaagatcacttctttgtctttgatttttgattttttttctctctggcgtgaaggaagaagctttatttcatggagtctctgctctctagttcttctcttgtttccgctgctggtgggttttgttggaagaagcagaatctaaagctccactctttatcagaaatccgagttctgcgttgtgattcgagtaaagttgtcgcaaaaccgaagtttaggaacaatcttgttaggcctgatggtcaaggatcttcattgttgttgtatccaaaacataagtcgagatttcgggttaatgccactgcgggtcagcccgaggctttcgactcgaatagcaaacagaagtcttttagagactcgttagatgcgttttacaggttttctaggcctcatacagttattggcacagtgcttagcattttatctgtatctttcttagcagtagagaaggtttctgatatatctcctttacttttcactggcatcttggaggctgttgttgcagctctcatgatgaacatttacatagttgggctaaatcagttgtctgatgttgaaatagataaggttaacaagccctatcttccattggcatcaggagaatattctgttaacaccggcattgcaatagtagcttccttctccatcatgagtttctggcttgggtggattgttggttcatggccattgttctgggctctttttgtgagtttcatgctcggtactgcatactctatcaatttgccacttttacggtggaaaagatttgcattggttgcagcaatgtgtatcctcgctgtccgagctattattgttcaaatcgccttttatctacatattcagacacatgtgtttggaagaccaatcttgttcactaggcctcttattttcgccactgcgtttatgagctttttctctgtcgttattgcattgtttaaggatatacctgatatcgaaggggataagatattcggaatccgatcattctctgtaactctgggtcagaaacgggtgttttggacatgtgttacactacttcaaatggcttacgctgttgcaattctagttggagccacatctccattcatatggagcaaagtcatctcggttgtgggtcatgttatactcgcaacaactttgtgggctcgagctaagtccgttgatctgagtagcaaaaccgaaataacttcatgttatatgttcatatggaagctcttttatgcagagtacttgctgttaccttttttgaagtgactgacattagaagagaagaagatggagataaaagaataagtcatcactatgcttctgtttttattacaagttcatgaaattaggtagtgaactagtgaattagagttttattctgaaacatggcagactgcaaaaatatgtcaaagatatgaatttctgttgggtaaagaagtctctgcttgggcaaaatcttaaggttcggtgtgttgatataatgctaagcgaagaaatcgattctatgtagaaatttccgaaactatgtgtaaacatgtcagaacatctccattctatatcttcttctgcaagaaagctctgtttttatcaccg

SEQ ID NO: 47454 - protein, 393 aa, Arabidopsis thaliana
  peptide (1)..(393): Ceres Seq. ID no. 13647863
MESLLSSSSLVSAAGGFCWKKQNLKLHSLSEIRVLRCDSSKVVAKPKFRNNLVRPDGQGSSLLLYPKHKSRFRVNATAGQPEAFDSNSKQKSFRDSLDAFYRFSRPHTVIGTVLSILSVSFLAVEKVSDISPLLFTGILEAVVAALMMNIYIVGLNQLSDVEIDKVNKPYLPLASGEYSVNTGIAIVASFSIMSFWLGWIVGSWPLFWALFVSFMLGTAYSINLPLLRWKRFALVAAMCILAVRAIIVQIAFYLHIQTHVFGRPILFTRPLIFATAFMSFFSVVIALFKDIPDIEGDKIFGIRSFSVTLGQKRVFWTCVTLLQMAYAVAILVGATSPFIWSKVISVVGHVILATTLWARAKSVDLSSKTEITSCYMFIWKLFYAEYLLLPFLK

SEQ ID NO: 47455 - protein, 247 aa, Arabidopsis thaliana
  peptide (1)..(247): Ceres Seq. ID no. 13647864
MMNIYIVGLNQLSDVEIDKVNKPYLPLASGEYSVNTGIAIVASFSIMSFWLGWIVGSWPLFWALFVSFMLGTAYSINLPLLRWKRFALVAAMCILAVRAIIVQIAFYLHIQTHVFGRPILFTRPLIFATAFMSFFSVVIALFKDIPDIEGDKIFGIRSFSVTLGQKRVFWTCVTLLQMAYAVAILVGATSPFIWSKVISVVGHVILATTLWARAKSVDLSSKTEITSCYMFIWKLFYAEYLLLPFLK

SEQ ID NO: 47456 - protein, 246 aa, Arabidopsis thaliana
  peptide (1)..(246): Ceres Seq. ID no. 13647865
MNIYIVGLNQLSDVEIDKVNKPYLPLASGEYSVNTGIAIVASFSIMSFWLGWIVGSWPLFWALFVSFMLGTAYSINLPLLRWKRFALVAAMCILAVRAIIVQIAFYLHIQTHVFGRPILFTRPLIFATAFMSFFSVVIALFKDIPDIEGDKIFGIRSFSVTLGQKRVFWTCVTLLQMAYAVAILVGATSPFIWSKVISVVGHVILATTLWARAKSVDLSSKTEITSCYMFIWKLFYAEYLLLPFLK

SEQ ID NO: 47457 - DNA, 1074 bp, Arabidopsis thaliana
  misc_feature (1)..(1074): Ceres Seq. ID no. 14307627
  misc_feature (1)..(1074): Ortholog of  Ceres SEQ ID NO 13594416 as cited in SEQ ID NO 51058
  misc_feature (1)..(1074): Ortholog of  Ceres SEQ ID NO 13596609 as cited in SEQ ID NO 63070
  misc_feature (1)..(1074): Ortholog of  Ceres SEQ ID NO 12616895 as cited in SEQ ID NO 63909
  misc_feature (1)..(1074): Ortholog of  Ceres SEQ ID NO 14302096 as cited in SEQ ID NO 68356
  misc_feature (1)..(1074): Ortholog of  Ceres SEQ ID NO 13598574 as cited in SEQ ID NO 69083
atctctaaccaccgacctcataagtcataagacaaaaacagagacactcctctcactctcattatttcattttctttccataaaaagcacgaatcttcaagaacaaagagagagggagagagaaaatttaatggcgttagcgaataacttaacggcgatactcaacttactagcgttactctgttccataccaataacggcgtcaggtatatggctagcttcaaagccagacaacgagtgtgtcaatctcctccgttggcccgttgtcgtcctcggcgttctcatcctcgtcgtctccgccacaggcttcatcggcgcctacaagtacaaggaaactctactggcggtttacttgtgctgtatggcgatattgatcggacttttgctggtggttttgatatttgctttcgttgtgacccgacccgacggatcgtatcgggttccgggtagaggttataaagaatataagcttgaagggttttcgaattggcttaaggagaacgttgttgattcgaagaactggggaaggctaagggcttgtttggctgatactaatgtttgtcctaaactcaaccaagaattcatcaccgccgatcagttcttctcctcctctaagatcactcctctccagtccggctgctgcaaaccaccgaccgcatgtggctacaactttgtgaacccaacactgtggctaaatccgacgaatatggctgcagacgcagactgttacttatggagcaatgaccaaagccagctttgttacaattgcaactcatgcaaagctggtttattgggaaaccttagaaaagaatggcgtaaagcaaatctcatacttatcatcacagtcgttgttctcatatgggtttatgttattgcttgtagcgcgtttaggaatgctcagactgaggatctcttccgcaaatacaaacaaggttgggtctaaaatgtgtgtttgtgtctataaatttgtttgtagtttgttgagattggagttttcggaaatagctcgtcatattatgatttctttgtgtgtggaaaaggtttttttctttttatggattttgtttctatgtt

SEQ ID NO: 47458 - protein, 313 aa, Arabidopsis thaliana
  peptide (1)..(313): Ceres Seq. ID no. 14307628
SLTTDLISHKTKTETLLSLSLFHFLSIKSTNLQEQRERERENLMALANNLTAILNLLALLCSIPITASGIWLASKPDNECVNLLRWPVVVLGVLILVVSATGFIGAYKYKETLLAVYLCCMAILIGLLLVVLIFAFVVTRPDGSYRVPGRGYKEYKLEGFSNWLKENVVDSKNWGRLRACLADTNVCPKLNQEFITADQFFSSSKITPLQSGCCKPPTACGYNFVNPTLWLNPTNMAADADCYLWSNDQSQLCYNCNSCKAGLLGNLRKEWRKANLILIITVVVLIWVYVIACSAFRNAQTEDLFRKYKQGWV

SEQ ID NO: 47459 - protein, 270 aa, Arabidopsis thaliana
  peptide (1)..(270): Ceres Seq. ID no. 14307629
MALANNLTAILNLLALLCSIPITASGIWLASKPDNECVNLLRWPVVVLGVLILVVSATGFIGAYKYKETLLAVYLCCMAILIGLLLVVLIFAFVVTRPDGSYRVPGRGYKEYKLEGFSNWLKENVVDSKNWGRLRACLADTNVCPKLNQEFITADQFFSSSKITPLQSGCCKPPTACGYNFVNPTLWLNPTNMAADADCYLWSNDQSQLCYNCNSCKAGLLGNLRKEWRKANLILIITVVVLIWVYVIACSAFRNAQTEDLFRKYKQGWV

SEQ ID NO: 47460 - protein, 193 aa, Arabidopsis thaliana
  peptide (1)..(193): Ceres Seq. ID no. 14307630
MAILIGLLLVVLIFAFVVTRPDGSYRVPGRGYKEYKLEGFSNWLKENVVDSKNWGRLRACLADTNVCPKLNQEFITADQFFSSSKITPLQSGCCKPPTACGYNFVNPTLWLNPTNMAADADCYLWSNDQSQLCYNCNSCKAGLLGNLRKEWRKANLILIITVVVLIWVYVIACSAFRNAQTEDLFRKYKQGWV

SEQ ID NO: 47461 - DNA, 1306 bp, Arabidopsis thaliana
  misc_feature (1)..(1306): Ceres Seq. ID no. 15168769
  misc_feature (1)..(1306): Ortholog of  Ceres SEQ ID NO 13596780 as cited in SEQ ID NO 62360
gaaaagcttaagtgagaagcagaaaaaaatggcgaaatctcagatctggtttggttttgcgttactcgcgttgcttctggtttcagccgtagctgacgatgtggttgttttgactgacgatagcttcgaaaaggaagttggtaaagataaaggagctctcgtcgagttttacgctccctggtgtggtcactgcaagaaacttgctccagagtatgaaaagctaggggcaagcttcaagaaggctaagtctgtgttgattgcaaaggttgattgtgatgagcaaaagagtgtctgtactaaatatggtgttagtggatacccaaccattcagtggtttcctaaaggatctcttgaacctcaaaagtatgagggtccacgcaatgctgaagctttggctgaatacgtgaacaaggaaggaggcaccaacgtaaaattagctgcagttccacaaaacgtggttgttttgacacctgacaatttcgatgagattgttctggatcaaaacaaagatgtcctagtcgaattttatgcaccatggtgtggccactgcaaatcactcgttcccacatacgaaaaggtagccacagtgtttaaacaggaagaaggtgtagtcatcgccaatttggatgctgatgcacacaaagcccttggcgagaaatatggagtgagtggattcccaacattgaaattcttcccaaaggacaacaaagctggtcacgattatgacggtggcagggatttagatgactttgtaagcttcatcaacgagaaatctgggaccagcagggacagtaaagggcagcttacttcaaaggctggtatagtcgaaagcttagatgctttggtaaaagagttagttgcagctagtgaagatgagaagaaggcagtgttgtctcgcatagaaaaggaagcaagttcccttaagggctcccccccgaggtatggaaagcttttcttgaaactcgcaaagagctacatagaaaaaggttcagactatgctagcaaagaaacggagaggcttggacgggtgcttgggaagtcgataagtccagtgaaagctgatgaactccctctcaagagaaatatcctaaccccgttcgttgcttttttttagaagtcatatagcttgaagctaagagaataggagtcgagagagtttataactgatactgttttgagattttatgtttgtcaagatcaagaacgtctgtggttatttctggttagttctgaaactcttttgaacccaagtttatctgtctctggtgaacaagcgaccccgataatcataaacttcattcgcgtt

SEQ ID NO: 47462 - protein, 370 aa, Arabidopsis thaliana
  peptide (1)..(370): Ceres Seq. ID no. 15168770
KSLSEKQKKMAKSQIWFGFALLALLLVSAVADDVVVLTDDSFEKEVGKDKGALVEFYAPWCGHCKKLAPEYEKLGASFKKAKSVLIAKVDCDEQKSVCTKYGVSGYPTIQWFPKGSLEPQKYEGPRNAEALAEYVNKEGGTNVKLAAVPQNVVVLTPDNFDEIVLDQNKDVLVEFYAPWCGHCKSLVPTYEKVATVFKQEEGVVIANLDADAHKALGEKYGVSGFPTLKFFPKDNKAGHDYDGGRDLDDFVSFINEKSGTSRDSKGQLTSKAGIVESLDALVKELVAASEDEKKAVLSRIEKEASSLKGSPPRYGKLFLKLAKSYIEKGSDYASKETERLGRVLGKSISPVKADELPLKRNILTPFVAFF

SEQ ID NO: 47463 - protein, 361 aa, Arabidopsis thaliana
  peptide (1)..(361): Ceres Seq. ID no. 15168771
MAKSQIWFGFALLALLLVSAVADDVVVLTDDSFEKEVGKDKGALVEFYAPWCGHCKKLAPEYEKLGASFKKAKSVLIAKVDCDEQKSVCTKYGVSGYPTIQWFPKGSLEPQKYEGPRNAEALAEYVNKEGGTNVKLAAVPQNVVVLTPDNFDEIVLDQNKDVLVEFYAPWCGHCKSLVPTYEKVATVFKQEEGVVIANLDADAHKALGEKYGVSGFPTLKFFPKDNKAGHDYDGGRDLDDFVSFINEKSGTSRDSKGQLTSKAGIVESLDALVKELVAASEDEKKAVLSRIEKEASSLKGSPPRYGKLFLKLAKSYIEKGSDYASKETERLGRVLGKSISPVKADELPLKRNILTPFVAFF

SEQ ID NO: 47464 - DNA, 1554 bp, Arabidopsis thaliana
  misc_feature (1)..(1554): Ceres Seq. ID no. 14313003
  misc_feature (1)..(1554): Ortholog of  Ceres SEQ ID NO 14302734 as cited in SEQ ID NO 66748
ggccacccagaaaaaaccctcaagtcttcttcttcttcctcaatctctccacctcttttcaaaccttcttcacactctctctcaatcaatcctttttcttctcaaatctttcagttttgatctctaaatttccagaaaatgagcaacgataaggacagtttcaatgtcagcgatctcacttctgctcttaaagatgaggatcgagctggtcttgtcaacgctcttaagaacaagctccagaatctagctggacaacattctgatgtgctcgagaatctgactcctaaaattagaaggcgtgttgaggttttgcgggagattcagggcaaacatgatgaaatagagacaaaattccgcgaggagagagctgctcttgaagccaagtatcaaaagttatatcagcctttgtataacaagcgttatgagattgtgaatggagctactgaagttgaaggggctccagaggatgctaagatggaccaaggagacgagaaaactgcagaagagaaaggagtccctagtttctggctgactgctctgaaaaataatgatgttatatctgaagagatcacagagcgtgatgaaggagcccttatatatcttaaagatatcaagtggtgcaagattgaagaaccaaagggattcaaacttgagtttttcttcgaccagaatccttacttcaaaaacaccctattaacaaaggcgtatcatatgattgatgaagatgagcctctgcttgagaaggctattgggacagagattgattggtatcctggaaaatgcttaactcagaagattcttaagaagaagcctaagaaaggtgcaaagaatgccaagccaattaccaaaactgaagattgtgaaagcttcttcaacttcttcaatcctccccaagttcctgatgatgatgaagacattgacgaagaaagagccgaggaacttcagaatctgatggaacaagattatgacattggttctacaatccgggagaagatcatacctcatgctgtctcatggtttactggtgaggctattgagggagaggagtttgaaatagacaatgatgatgaagatgatatcgatgaggatgaagatgaggatgaagaagatgaagacgaagatgaggaagaagacgacgaagatgaggaggaagaagtaagcaagaccaaaaagaagccatcagtcttacacaagaaaagagggagacctcaggttaccgatgatcaacaaggagagaggcctcctgaatgcaaacaacagtaaacaaaatcgaaaagtctaaacgaaaaccagtaaaaaaaaaacaaatgttttgggttttgagtgaagttccatggcctagttttttgcttccatgtaaggcaaaatgttttgaagactgctcataggaatgttgctgtaggcaaaagcgtgagtttctccatgtggagatacttgataaattatttttggtgcatttgttttttttttctttaatcactaagttgaattttggtgtgttcgtcaaaattatatccttttaccacttgaattaaagtctcttttggtttcttt

SEQ ID NO: 47465 - protein, 374 aa, Arabidopsis thaliana
  peptide (1)..(374): Ceres Seq. ID no. 14313004
MSNDKDSFNVSDLTSALKDEDRAGLVNALKNKLQNLAGQHSDVLENLTPKIRRRVEVLREIQGKHDEIETKFREERAALEAKYQKLYQPLYNKRYEIVNGATEVEGAPEDAKMDQGDEKTAEEKGVPSFWLTALKNNDVISEEITERDEGALIYLKDIKWCKIEEPKGFKLEFFFDQNPYFKNTLLTKAYHMIDEDEPLLEKAIGTEIDWYPGKCLTQKILKKKPKKGAKNAKPITKTEDCESFFNFFNPPQVPDDDEDIDEERAEELQNLMEQDYDIGSTIREKIIPHAVSWFTGEAIEGEEFEIDNDDEDDIDEDEDEDEEDEDEDEEEDDEDEEEEVSKTKKKPSVLHKKRGRPQVTDDQQGERPPECKQQ

SEQ ID NO: 47466 - protein, 262 aa, Arabidopsis thaliana
  peptide (1)..(262): Ceres Seq. ID no. 14313005
MDQGDEKTAEEKGVPSFWLTALKNNDVISEEITERDEGALIYLKDIKWCKIEEPKGFKLEFFFDQNPYFKNTLLTKAYHMIDEDEPLLEKAIGTEIDWYPGKCLTQKILKKKPKKGAKNAKPITKTEDCESFFNFFNPPQVPDDDEDIDEERAEELQNLMEQDYDIGSTIREKIIPHAVSWFTGEAIEGEEFEIDNDDEDDIDEDEDEDEEDEDEDEEEDDEDEEEEVSKTKKKPSVLHKKRGRPQVTDDQQGERPPECKQQ

SEQ ID NO: 47467 - DNA, 1966 bp, Arabidopsis thaliana; identical to SEQ ID NO: 38318
  misc_feature (1)..(1966): Ceres Seq. ID no. 13648305
  misc_feature (1)..(1966): Ortholog of  Ceres SEQ ID NO 14307940 as cited in SEQ ID NO 0
  misc_feature (1)..(1966): Ortholog of  Ceres SEQ ID NO 14308560 as cited in SEQ ID NO 0

SEQ ID NO: 47468 - protein, 566 aa, Arabidopsis thaliana; identical to SEQ ID NO: 38319
  peptide (1)..(566): Ceres Seq. ID no. 13648306

SEQ ID NO: 47469 - protein, 426 aa, Arabidopsis thaliana; identical to SEQ ID NO: 38320
  peptide (1)..(426): Ceres Seq. ID no. 13648307

SEQ ID NO: 47470 - protein, 403 aa, Arabidopsis thaliana; identical to SEQ ID NO: 38321
  peptide (1)..(403): Ceres Seq. ID no. 13648308

SEQ ID NO: 47471 - DNA, 1233 bp, Arabidopsis thaliana
  misc_feature (1)..(1233): Ceres Seq. ID no. 13588327
  misc_feature (1)..(1233): Ortholog of  Ceres SEQ ID NO 13596554 as cited in SEQ ID NO 62818
gaccaaatctgaaatccttagtttttgtgcttcgcgaacagcaagttgagctatggtgaaggagagtgagtactacgacatattaggcgtcaagattgacgcctctggtgctgagattaagaaagcttattatgttcaagcaaggcaagttcatccagacaagaaccctggtgatcctcaagctgctaaaaactttcagatactaggtgaagcttatcaagttctaggcgatccggagaagcgtacagcttatgacaaatatggaaaagaaggggttcaacaggatgcaatggttgatcctgcagctgtgtttggtatgctctttggtagcgagctctttgaggattacgttgggcaacttgcccttgcttcagcagcctcaatcgatgctgaattagaatcgtatgagcctgagattagaaaacagatgcttcaggaaaagatcaaagcgatacaaaaggacagagtagacaagctcgtcactacactgaaaatcaaacttgaaccattcgtggaaggacaaaccgatgaatttgtaaattgggccaccgcagaggcaaaacggctttcaacagctggttttggtgaggcaatgcttcacacagttggttacatttacactagaaaagctgctaaagaactcggaaaggataaacgtttcatgaaagtaccgtttttagccgaatgggttcgtgacaaaggccaccaagtaaaatctcaagtgatggctgcttctggtgcggtcaacttacttctgttgcaggatgaagtgagcaagctgaatcagggagagaacaaagaagagaatattcagaaagccattgaagctaaaaaggatgcaatgcttcaatccctttggcaaataaatgttgttgacatcgaatcaaccttatctcgtgtctgccaagcggtgcttaaagatccaagtgtttcaaaggatgttcttcgagctagagctagaggattgaggaagctgggtaacgttttccagggttctaagaaagcgtattctagagaaaacagcttgcgtcatgaagaagaaacaggagtgaaagtccacaccggagattcctcgaagccggcaacttaaaccaaggttcgaatctatcggttcgaaacagaacaatcaggttttgtgagaattcttgaatgtattgtaacgattaatattgttttattcgtatttatattcaacactaaataaatattgttatgggaagtgatggtttcgtc

SEQ ID NO: 47472 - protein, 345 aa, Arabidopsis thaliana
  peptide (1)..(345): Ceres Seq. ID no. 13588328
MVKESEYYDILGVKIDASGAEIKKAYYVQARQVHPDKNPGDPQAAKNFQILGEAYQVLGDPEKRTAYDKYGKEGVQQDAMVDPAAVFGMLFGSELFEDYVGQLALASAASIDAELESYEPEIRKQMLQEKIKAIQKDRVDKLVTTLKIKLEPFVEGQTDEFVNWATAEAKRLSTAGFGEAMLHTVGYIYTRKAAKELGKDKRFMKVPFLAEWVRDKGHQVKSQVMAASGAVNLLLLQDEVSKLNQGENKEENIQKAIEAKKDAMLQSLWQINVVDIESTLSRVCQAVLKDPSVSKDVLRARARGLRKLGNVFQGSKKAYSRENSLRHEEETGVKVHTGDSSKPAT

SEQ ID NO: 47473 - protein, 266 aa, Arabidopsis thaliana
  peptide (1)..(266): Ceres Seq. ID no. 13588329
MVDPAAVFGMLFGSELFEDYVGQLALASAASIDAELESYEPEIRKQMLQEKIKAIQKDRVDKLVTTLKIKLEPFVEGQTDEFVNWATAEAKRLSTAGFGEAMLHTVGYIYTRKAAKELGKDKRFMKVPFLAEWVRDKGHQVKSQVMAASGAVNLLLLQDEVSKLNQGENKEENIQKAIEAKKDAMLQSLWQINVVDIESTLSRVCQAVLKDPSVSKDVLRARARGLRKLGNVFQGSKKAYSRENSLRHEEETGVKVHTGDSSKPAT

SEQ ID NO: 47474 - protein, 257 aa, Arabidopsis thaliana
  peptide (1)..(257): Ceres Seq. ID no. 13588330
MLFGSELFEDYVGQLALASAASIDAELESYEPEIRKQMLQEKIKAIQKDRVDKLVTTLKIKLEPFVEGQTDEFVNWATAEAKRLSTAGFGEAMLHTVGYIYTRKAAKELGKDKRFMKVPFLAEWVRDKGHQVKSQVMAASGAVNLLLLQDEVSKLNQGENKEENIQKAIEAKKDAMLQSLWQINVVDIESTLSRVCQAVLKDPSVSKDVLRARARGLRKLGNVFQGSKKAYSRENSLRHEEETGVKVHTGDSSKPAT

SEQ ID NO: 47475 - DNA, 1754 bp, Arabidopsis thaliana
  misc_feature (1)..(1754): Ceres Seq. ID no. 13592310
  misc_feature (1)..(1754): Ortholog of  Ceres SEQ ID NO 13596509 as cited in SEQ ID NO 62004
  misc_feature (1)..(1754): Ortholog of  Ceres SEQ ID NO 13659971 as cited in SEQ ID NO 67565
  misc_feature (1)..(1754): Ortholog of  Ceres SEQ ID NO 13500385 as cited in SEQ ID NO 67583
aattcaggtcgtatacgggtacagtcaaataacccgacccgaaatgctcaacggatctgcacggacgttcgcatcgacgattcacggctttcgcgaatcgcatcacgagccttccttctctcctacgcctctttcatcaacccttctctgcgaatccaattctgataaaagtttgtaaagaatgacaaagaaaatgagaagagtgggcaagtacgaggttggtcgcacaataggtgaaggaacctttgctaaggttaagtttgcgaggaacacagacactggtgataatgtagccatcaaaattatggctaagagtacaatacttaagaacagaatggttgatcagataaaaagagagatatctataatgaagattgttcgtcacccgaacatagtgaggttgtatgaggtgttggcgagtccttcgaaaatatatatagttttggagtttgtgacaggaggagagctctttgatagaattgttcataaagggaggcttgaagaaagtgagtctcggaaatactttcaacagcttgtagatgctgttgctcattgtcactgcaagggtgtttaccaccgtgacctaaagccagaaaatcttttactcgatacaaatggaaatctgaaggtttcggatttcggactcagtgcattgcctcaggaaggagtagaacttctgcgtaccacatgtggaactccgaactatgtagctccagaggtacttagtggacagggttacgatggttcagcagctgatatttggtcttgcggggttattcttttcgttatattggctggatatttacctttttccgagacggatcttccagggttgtacagaaaaataaatgcagcagagttttcttgtccaccgtggttttccgcagaagtgaagtttttaatacataggatacttgaccccaatcccaaaacacgtattcaaattcaaggaatcaagaaagatccttggttcagattaaattatgtgcctatacgagcaagggaagaagaagaagtgaatttggatgatattcgtgcagtttttgatggaattgagggcagttatgtagcggagaatgtagagagaaatgatgaagggcccctgatgatgaatgcctttgagatgattaccttatcacaaggcttaaatttatctgcactatttgacaggcgacaggattttgttaaaaggcaaacccgttttgtttctcgaagggaacctagtgagataattgctaacattgaggctgtagcgaactcaatgggttttaagtctcatacacgaaacttcaagacaaggctcgagggattatcttcgatcaaggccggacagttagctgttgtgatagagatttacgaggtggcaccatcgcttttcatggtagacgtaagaaaggctgctggtgaaactcttgaatatcacaagttctacaagaagctatgttcgaaactggaaaacataatatggagggcaacagaaggaataccaaagtcagagattctcagaacaatcacgttttgatcccaacttaaatccaataaaaatgtacacttgtgtaataaatgacctaattattcttcagggagattggaagatttgcttcttgagctagtattctaatttgattgtgtcttgtagtttgctttggccattggtttggatccctctgttctctgtgtatggcaatacttctcaaaacttgtcctgcgaggacatgtactaacaaaacacatccaatatgagtttgcttact

SEQ ID NO: 47476 - protein, 446 aa, Arabidopsis thaliana
  peptide (1)..(446): Ceres Seq. ID no. 13592311
MTKKMRRVGKYEVGRTIGEGTFAKVKFARNTDTGDNVAIKIMAKSTILKNRMVDQIKREISIMKIVRHPNIVRLYEVLASPSKIYIVLEFVTGGELFDRIVHKGRLEESESRKYFQQLVDAVAHCHCKGVYHRDLKPENLLLDTNGNLKVSDFGLSALPQEGVELLRTTCGTPNYVAPEVLSGQGYDGSAADIWSCGVILFVILAGYLPFSETDLPGLYRKINAAEFSCPPWFSAEVKFLIHRILDPNPKTRIQIQGIKKDPWFRLNYVPIRAREEEEVNLDDIRAVFDGIEGSYVAENVERNDEGPLMMNAFEMITLSQGLNLSALFDRRQDFVKRQTRFVSRREPSEIIANIEAVANSMGFKSHTRNFKTRLEGLSSIKAGQLAVVIEIYEVAPSLFMVDVRKAAGETLEYHKFYKKLCSKLENIIWRATEGIPKSEILRTITF

SEQ ID NO: 47477 - protein, 442 aa, Arabidopsis thaliana
  peptide (1)..(442): Ceres Seq. ID no. 13592312
MRRVGKYEVGRTIGEGTFAKVKFARNTDTGDNVAIKIMAKSTILKNRMVDQIKREISIMKIVRHPNIVRLYEVLASPSKIYIVLEFVTGGELFDRIVHKGRLEESESRKYFQQLVDAVAHCHCKGVYHRDLKPENLLLDTNGNLKVSDFGLSALPQEGVELLRTTCGTPNYVAPEVLSGQGYDGSAADIWSCGVILFVILAGYLPFSETDLPGLYRKINAAEFSCPPWFSAEVKFLIHRILDPNPKTRIQIQGIKKDPWFRLNYVPIRAREEEEVNLDDIRAVFDGIEGSYVAENVERNDEGPLMMNAFEMITLSQGLNLSALFDRRQDFVKRQTRFVSRREPSEIIANIEAVANSMGFKSHTRNFKTRLEGLSSIKAGQLAVVIEIYEVAPSLFMVDVRKAAGETLEYHKFYKKLCSKLENIIWRATEGIPKSEILRTITF

SEQ ID NO: 47478 - protein, 405 aa, Arabidopsis thaliana
  peptide (1)..(405): Ceres Seq. ID no. 13592313
MAKSTILKNRMVDQIKREISIMKIVRHPNIVRLYEVLASPSKIYIVLEFVTGGELFDRIVHKGRLEESESRKYFQQLVDAVAHCHCKGVYHRDLKPENLLLDTNGNLKVSDFGLSALPQEGVELLRTTCGTPNYVAPEVLSGQGYDGSAADIWSCGVILFVILAGYLPFSETDLPGLYRKINAAEFSCPPWFSAEVKFLIHRILDPNPKTRIQIQGIKKDPWFRLNYVPIRAREEEEVNLDDIRAVFDGIEGSYVAENVERNDEGPLMMNAFEMITLSQGLNLSALFDRRQDFVKRQTRFVSRREPSEIIANIEAVANSMGFKSHTRNFKTRLEGLSSIKAGQLAVVIEIYEVAPSLFMVDVRKAAGETLEYHKFYKKLCSKLENIIWRATEGIPKSEILRTITF

SEQ ID NO: 47479 - DNA, 2714 bp, Arabidopsis thaliana; identical to SEQ ID NO: 44952
  misc_feature (1)..(2714): Ceres Seq. ID no. 12600111
  misc_feature (1)..(2714): Ortholog of  Ceres SEQ ID NO 14310206 as cited in SEQ ID NO 20650

SEQ ID NO: 47480 - protein, 773 aa, Arabidopsis thaliana; identical to SEQ ID NO: 44953
  peptide (1)..(773): Ceres Seq. ID no. 12600112

SEQ ID NO: 47481 - protein, 705 aa, Arabidopsis thaliana; identical to SEQ ID NO: 44954
  peptide (1)..(705): Ceres Seq. ID no. 12600113

SEQ ID NO: 47482 - protein, 695 aa, Arabidopsis thaliana; identical to SEQ ID NO: 44955
  peptide (1)..(695): Ceres Seq. ID no. 12600114

SEQ ID NO: 47483 - DNA, 663 bp, Arabidopsis thaliana
  misc_feature (1)..(663): Ceres Seq. ID no. 13592479
  misc_feature (1)..(663): Ortholog of  Ceres SEQ ID NO 13589868 as cited in SEQ ID NO 55521
  misc_feature (1)..(663): Ortholog of  Ceres SEQ ID NO 14312250 as cited in SEQ ID NO 59168
  misc_feature (1)..(663): Ortholog of  Ceres SEQ ID NO 15173326 as cited in SEQ ID NO 63793
  misc_feature (1)..(663): Ortholog of  Ceres SEQ ID NO 12617659 as cited in SEQ ID NO 65286
  misc_feature (1)..(663): Ortholog of  Ceres SEQ ID NO 12780566 as cited in SEQ ID NO 65822
  misc_feature (1)..(663): Ortholog of  Ceres SEQ ID NO 15179979 as cited in SEQ ID NO 0
atttcaatcacaaaatcgtctttgtgctgctgattggaagcttctctctctctcggtttagatccctttcaattctccaaaggatcaacagttaaaagggaaatggggctttcatttgcaaagctttttagccggctttttgccaagaaggagatgcgaatccttatggttggtcttgatgctgctggtaagaccaccattttgtacaagctcaagcttggtgagattgtcaccaccattcccaccatcgggtttaatgtggagacggttgagtacaagaacatcagcttcacggtttgggatgtcgggggtcaggacaagatccgtcccttgtggagacactacttccaaaacactcaaggtctgatatttgttgttgatagcaatgacagagaccgtgttgttgaagccagagatgaacttcacaggatgttgaatgaagatgagcttcgggatgcagtattgcttgtgtttgccaacaagcaggatcttccaaacgctatgaatgctgctgagattactgataagcttggccttcactcactccggcaacgccactggtacatccaaagcacatgcgcaactagcggtgaagggctctatgaaggtctggattggctttccaacaacattgctagcaaagtaagacttctgaattcatga

SEQ ID NO: 47484 - protein, 186 aa, Arabidopsis thaliana
  peptide (1)..(186): Ceres Seq. ID no. 13592480
MGLSFAKLFSRLFAKKEMRILMVGLDAAGKTTILYKLKLGEIVTTIPTIGFNVETVEYKNISFTVWDVGGQDKIRPLWRHYFQNTQGLIFVVDSNDRDRVVEARDELHRMLNEDELRDAVLLVFANKQDLPNAMNAAEITDKLGLHSLRQRHWYIQSTCATSGEGLYEGLDWLSNNIASKVRLLNS

SEQ ID NO: 47485 - protein, 169 aa, Arabidopsis thaliana
  peptide (1)..(169): Ceres Seq. ID no. 13592481
MRILMVGLDAAGKTTILYKLKLGEIVTTIPTIGFNVETVEYKNISFTVWDVGGQDKIRPLWRHYFQNTQGLIFVVDSNDRDRVVEARDELHRMLNEDELRDAVLLVFANKQDLPNAMNAAEITDKLGLHSLRQRHWYIQSTCATSGEGLYEGLDWLSNNIASKVRLLNS

SEQ ID NO: 47486 - protein, 165 aa, Arabidopsis thaliana
  peptide (1)..(165): Ceres Seq. ID no. 13592482
MVGLDAAGKTTILYKLKLGEIVTTIPTIGFNVETVEYKNISFTVWDVGGQDKIRPLWRHYFQNTQGLIFVVDSNDRDRVVEARDELHRMLNEDELRDAVLLVFANKQDLPNAMNAAEITDKLGLHSLRQRHWYIQSTCATSGEGLYEGLDWLSNNIASKVRLLNS

SEQ ID NO: 47487 - DNA, 1499 bp, Arabidopsis thaliana; identical to SEQ ID NO: 37087
  misc_feature (1)..(1499): Ceres Seq. ID no. 13593683
  misc_feature (1)..(1499): Ortholog of  Ceres SEQ ID NO 15176579 as cited in SEQ ID NO 54513

SEQ ID NO: 47488 - protein, 435 aa, Arabidopsis thaliana; identical to SEQ ID NO: 37088
  peptide (1)..(435): Ceres Seq. ID no. 13593684

SEQ ID NO: 47489 - protein, 425 aa, Arabidopsis thaliana; identical to SEQ ID NO: 37089
  peptide (1)..(425): Ceres Seq. ID no. 13593685

SEQ ID NO: 47490 - protein, 343 aa, Arabidopsis thaliana; identical to SEQ ID NO: 37090
  peptide (1)..(343): Ceres Seq. ID no. 13593686

SEQ ID NO: 47491 - DNA, 1002 bp, Arabidopsis thaliana
  misc_feature (1)..(1002): Ceres Seq. ID no. 13592496
  misc_feature (1)..(1002): Ortholog of  Ceres SEQ ID NO 14305286 as cited in SEQ ID NO 0
gaaaatgcaatctttatctctgcaatcgcttccatggaaaccaaattcagtgactttacctgaaatttatcttttgaatcccaagcaattgactgcctcgagttctcagtatcgtagaactcgaaactggagaattagaagttcgtcggaagataatgtagcaatttcgagtgacggcggagatttgaagaattctctgtccggtattgtgggaaatcaagtggaggagctattgagcagagaagagaacaaaggtttgcttgatggtctggaaaaagcttcgttgagagtggagattgcgaagagagagctcgaagatatagagagacaagaaattgaggcgaaattgctacaggattatattaatcagctcgaatcaagagccgcagagattgcagaatgccagcaggagattgacgcagcaagatcaatggttgaggaagcagaacgctccttgtcattagcagataactcgacaattggaagttcggagaaaggttattcgattgataaagacaaggagaggttagaatctgcaaaagcggcagtgatcgcagctgcggttgggaccattgcggaactcccatttgctctttctcaagtcgcaagcatggagcagcttgttctgcccctgggaatagcgtttgcaagctgtgcattgtttggagtcacattcaggtatgcagtcagaagagacttggatgataatcatctcaaatccggagccgttgcagcttttgggtttgttaaaggacttggtatgttgagcagaggaccgccattggagctgagctgggaaagcttgttttcacatgggatagacggcgccgttttggtgtctcagagcgtcttgatatttgcgtttgcgtccataggtttggacttctgtttcaagatgaagctcttaagaccatttcctagctctgactagattgaagagcaaattaaaaatgtagaaatgaacaaaatcttcttttgaagactttatttgtttttttttat

SEQ ID NO: 47492 - protein, 309 aa, Arabidopsis thaliana
  peptide (1)..(309): Ceres Seq. ID no. 13592497
KMQSLSLQSLPWKPNSVTLPEIYLLNPKQLTASSSQYRRTRNWRIRSSSEDNVAISSDGGDLKNSLSGIVGNQVEELLSREENKGLLDGLEKASLRVEIAKRELEDIERQEIEAKLLQDYINQLESRAAEIAECQQEIDAARSMVEEAERSLSLADNSTIGSSEKGYSIDKDKERLESAKAAVIAAAVGTIAELPFALSQVASMEQLVLPLGIAFASCALFGVTFRYAVRRDLDDNHLKSGAVAAFGFVKGLGMLSRGPPLELSWESLFSHGIDGAVLVSQSVLIFAFASIGLDFCFKMKLLRPFPSSD

SEQ ID NO: 47493 - protein, 308 aa, Arabidopsis thaliana
  peptide (1)..(308): Ceres Seq. ID no. 13592498
MQSLSLQSLPWKPNSVTLPEIYLLNPKQLTASSSQYRRTRNWRIRSSSEDNVAISSDGGDLKNSLSGIVGNQVEELLSREENKGLLDGLEKASLRVEIAKRELEDIERQEIEAKLLQDYINQLESRAAEIAECQQEIDAARSMVEEAERSLSLADNSTIGSSEKGYSIDKDKERLESAKAAVIAAAVGTIAELPFALSQVASMEQLVLPLGIAFASCALFGVTFRYAVRRDLDDNHLKSGAVAAFGFVKGLGMLSRGPPLELSWESLFSHGIDGAVLVSQSVLIFAFASIGLDFCFKMKLLRPFPSSD

SEQ ID NO: 47494 - protein, 166 aa, Arabidopsis thaliana
  peptide (1)..(166): Ceres Seq. ID no. 13592499
MVEEAERSLSLADNSTIGSSEKGYSIDKDKERLESAKAAVIAAAVGTIAELPFALSQVASMEQLVLPLGIAFASCALFGVTFRYAVRRDLDDNHLKSGAVAAFGFVKGLGMLSRGPPLELSWESLFSHGIDGAVLVSQSVLIFAFASIGLDFCFKMKLLRPFPSSD

SEQ ID NO: 47495 - DNA, 2322 bp, Arabidopsis thaliana
  misc_feature (1)..(2322): Ceres Seq. ID no. 12602034
  misc_feature (1)..(2322): Ortholog of  Ceres SEQ ID NO 13596198 as cited in SEQ ID NO 68488
atgaagaagtcgtcggataagtcaccggtgcggcaacatgacacggcgacgcaaatcaactctgacgcagtgtcttcttctacttccttcactgattccgactctacttgttcctttttgactccctccatggagttcccggatcgaatcagtttccggagaatcgattttagtgaagcagctcctactggtgtcgttcttccttctacttccagtgagttaactcgttccaattccagtgagaataagattcccaatgaagatatttccgtttcaacttcttctcgctatttggtgtttgataaaattctagctcttatgaagaaatcaccaggacgaagaggagataagactagtccggcgcggcggttagaccgtagtgatgcggtgaggaggaatatcgattatgacgcaggtgaagattcttcttcgttgttgataactcgttctttggatttcccgaatcgtactagttttcgagtcgatggagttgatgatggagaaatagatcggatttatcagtatattggtgtttctggtcctgaagattttgctatttcttctgatgcttggaaagctcgtatggagcatgagcgttcttcttcagatgttgttaataagttaaagtctcttgatcttgatagtcgtgaagcaggtcctagtggtggtgttgttgcttctagttcaatgaatcataagtttcagggtcatgatttgagtgaagcaggttctattggtgttgttgttgcttctaattttacgctttctgagtcgaataagattgagaacttaaatagtttgagggataaggaaattgttgatggtgatatggtagagaataggtgcggtattgagcgaaaaccgactattttggtgaagtcgagagggtatcttgttcacaatgatgatgtgggtgttggtggtggaattaagggtgtaagaccaccagtactaaacgttcctcgtgcggataaggaagttgttgatggtggtacggtggagagcaagagtggtattgaatggaaaccaactattttggtgaagtcaaaagggtatcttgtttccaatgatggtggaataaagggggtaacatcaccggtactaaatcttcgcccgacagataaggaagttgttgatagtggtacggtagagaatagacgtggtattaagggcgtaagaccatcggtacttaagcctcctccggtgatgaaactacctccagttgatcttccgggatcatcttgggatatccttactcattttgctcctgatagtgaaatagttaggcggccgagttcctcttcttcttccgaaaatggttgtgatgaagaagaagccgaggatgacaaagtggaaaaggaagagacgggagatatgtttatccagttggaggatacgactgatgaggcatgctcattcactacaaacgagggtgactcctcaagtacagtatccaatacctcaccgatttgtgtctctgggggatctatcaatacttcttggcaaaagggtcaacttctgcgacaaggatcgtttggctctgtgtatgaagccatttcagaagatggggacttctttgctgtcaaggaagtttcacttcttgatcagggaagtcaggcacaagaatgcatacaacaacttgagggggaaattgcactacttagtcagcttgagcatcagaatattctgcgatatcgtggcacagacaaggacgggtcaaatttgtatatttttcttgagcttgtaacacaaggatcccttctagaactctaccgaagataccagattcgggactcgctaatctccttgtacacaaaacaaatccttgacggtttgaaatatcttcaccataaaggtttcattcacagggacattaaatgtgcaactatattggtggacgccaatggcaccgtcaaacttgcagattttggattggcaaaggtgtcaaagttaaacgacattaagtcccgcaaggaaactctattttggatggctccagaggttattaaccggaaggataatgatggttacagaagtccagctgatatatggagcctcgggtgcactgtgctggaaatgtgtactggtcagatcccatactctgatctagaacccgttgaagccctgtttaggatcagaaggggtacgcttccggaagtacctgatactttatcactagacgctcggcatttcatacttaagtgtctcaaattgaacccggaagagcgtccaactgcaactgagctactgaaccatccatttgtgagaaggcccttaccatcctcaggctcaggatcaacatctccgctaatccgtagatga

SEQ ID NO: 47496 - protein, 773 aa, Arabidopsis thaliana
  peptide (1)..(773): Ceres Seq. ID no. 12602035
MKKSSDKSPVRQHDTATQINSDAVSSSTSFTDSDSTCSFLTPSMEFPDRISFRRIDFSEAAPTGVVLPSTSSELTRSNSSENKIPNEDISVSTSSRYLVFDKILALMKKSPGRRGDKTSPARRLDRSDAVRRNIDYDAGEDSSSLLITRSLDFPNRTSFRVDGVDDGEIDRIYQYIGVSGPEDFAISSDAWKARMEHERSSSDVVNKLKSLDLDSREAGPSGGVVASSSMNHKFQGHDLSEAGSIGVVVASNFTLSESNKIENLNSLRDKEIVDGDMVENRCGIERKPTILVKSRGYLVHNDDVGVGGGIKGVRPPVLNVPRADKEVVDGGTVESKSGIEWKPTILVKSKGYLVSNDGGIKGVTSPVLNLRPTDKEVVDSGTVENRRGIKGVRPSVLKPPPVMKLPPVDLPGSSWDILTHFAPDSEIVRRPSSSSSSENGCDEEEAEDDKVEKEETGDMFIQLEDTTDEACSFTTNEGDSSSTVSNTSPICVSGGSINTSWQKGQLLRQGSFGSVYEAISEDGDFFAVKEVSLLDQGSQAQECIQQLEGEIALLSQLEHQNILRYRGTDKDGSNLYIFLELVTQGSLLELYRRYQIRDSLISLYTKQILDGLKYLHHKGFIHRDIKCATILVDANGTVKLADFGLAKVSKLNDIKSRKETLFWMAPEVINRKDNDGYRSPADIWSLGCTVLEMCTGQIPYSDLEPVEALFRIRRGTLPEVPDTLSLDARHFILKCLKLNPEERPTATELLNHPFVRRPLPSSGSGSTSPLIRR

SEQ ID NO: 47497 - protein, 730 aa, Arabidopsis thaliana
  peptide (1)..(730): Ceres Seq. ID no. 12602036
MEFPDRISFRRIDFSEAAPTGVVLPSTSSELTRSNSSENKIPNEDISVSTSSRYLVFDKILALMKKSPGRRGDKTSPARRLDRSDAVRRNIDYDAGEDSSSLLITRSLDFPNRTSFRVDGVDDGEIDRIYQYIGVSGPEDFAISSDAWKARMEHERSSSDVVNKLKSLDLDSREAGPSGGVVASSSMNHKFQGHDLSEAGSIGVVVASNFTLSESNKIENLNSLRDKEIVDGDMVENRCGIERKPTILVKSRGYLVHNDDVGVGGGIKGVRPPVLNVPRADKEVVDGGTVESKSGIEWKPTILVKSKGYLVSNDGGIKGVTSPVLNLRPTDKEVVDSGTVENRRGIKGVRPSVLKPPPVMKLPPVDLPGSSWDILTHFAPDSEIVRRPSSSSSSENGCDEEEAEDDKVEKEETGDMFIQLEDTTDEACSFTTNEGDSSSTVSNTSPICVSGGSINTSWQKGQLLRQGSFGSVYEAISEDGDFFAVKEVSLLDQGSQAQECIQQLEGEIALLSQLEHQNILRYRGTDKDGSNLYIFLELVTQGSLLELYRRYQIRDSLISLYTKQILDGLKYLHHKGFIHRDIKCATILVDANGTVKLADFGLAKVSKLNDIKSRKETLFWMAPEVINRKDNDGYRSPADIWSLGCTVLEMCTGQIPYSDLEPVEALFRIRRGTLPEVPDTLSLDARHFILKCLKLNPEERPTATELLNHPFVRRPLPSSGSGSTSPLIRR

SEQ ID NO: 47498 - protein, 667 aa, Arabidopsis thaliana
  peptide (1)..(667): Ceres Seq. ID no. 12602037
MKKSPGRRGDKTSPARRLDRSDAVRRNIDYDAGEDSSSLLITRSLDFPNRTSFRVDGVDDGEIDRIYQYIGVSGPEDFAISSDAWKARMEHERSSSDVVNKLKSLDLDSREAGPSGGVVASSSMNHKFQGHDLSEAGSIGVVVASNFTLSESNKIENLNSLRDKEIVDGDMVENRCGIERKPTILVKSRGYLVHNDDVGVGGGIKGVRPPVLNVPRADKEVVDGGTVESKSGIEWKPTILVKSKGYLVSNDGGIKGVTSPVLNLRPTDKEVVDSGTVENRRGIKGVRPSVLKPPPVMKLPPVDLPGSSWDILTHFAPDSEIVRRPSSSSSSENGCDEEEAEDDKVEKEETGDMFIQLEDTTDEACSFTTNEGDSSSTVSNTSPICVSGGSINTSWQKGQLLRQGSFGSVYEAISEDGDFFAVKEVSLLDQGSQAQECIQQLEGEIALLSQLEHQNILRYRGTDKDGSNLYIFLELVTQGSLLELYRRYQIRDSLISLYTKQILDGLKYLHHKGFIHRDIKCATILVDANGTVKLADFGLAKVSKLNDIKSRKETLFWMAPEVINRKDNDGYRSPADIWSLGCTVLEMCTGQIPYSDLEPVEALFRIRRGTLPEVPDTLSLDARHFILKCLKLNPEERPTATELLNHPFVRRPLPSSGSGSTSPLIRR

SEQ ID NO: 47499 - DNA, 1118 bp, Arabidopsis thaliana
  misc_feature (1)..(1118): Ceres Seq. ID no. 13588331
  misc_feature (1)..(1118): Ortholog of  Ceres SEQ ID NO 13594655 as cited in SEQ ID NO 51843
  misc_feature (1)..(1118): Ortholog of  Ceres SEQ ID NO 13637562 as cited in SEQ ID NO 53674
  misc_feature (1)..(1118): Ortholog of  Ceres SEQ ID NO 13595851 as cited in SEQ ID NO 56559
  misc_feature (1)..(1118): Ortholog of  Ceres SEQ ID NO 15173454 as cited in SEQ ID NO 57898
  misc_feature (1)..(1118): Ortholog of  Ceres SEQ ID NO 13598755 as cited in SEQ ID NO 69032
ggcagtcaaaggtccgtcaaaggcaattttcccggaaaattcttttgggagctgagaaagtgagagctgtgaggtatgagtgtgggactgaaagttagcgcgttcttacatccaacgcttgcgttatcctcgagagatgtctctctctcatcctcatcatcttctctctatcttgatcggaaaattctccgaccaggctccgggagacggtggtgtaaatcccgaagaaccgaaccaatattggctgttgtagagtcaagtcgagtaccggagcttgattcttcttcagaaccagttcaagtattcgatggatcaacaaggttgtacatatcttacacttgcccatttgctcagcgtgcgtggattgctcgcaactacaagggtctgcaaaacaagatagaacttgtaccgatcgatcttaaaaacaggcctgcttggtataaggagaaagtttactcggctaacaaggtgcctgcattagagcacaataaccgagtattgggagagagccttgatctgattaagtacattgacactaattttgaagggccttcgcttacacccgatggtttagagaagcaagttgtagctgatgagttactctcttacactgactccttctccaaggctgtaagatccacattaaacggcactgacactaatgcagcagatgttgcatttgattacatcgagcaggctctttccaaattcaatgaagggcctttctttcttggtcaatttagtttggttgatgttgcatatgctcctttcatagagagatttcggcttatcttaagtgatgtgatgaacgtcgatattacatctggtcggcctaaccttgccctttggattcaggagatgaacaaaatcgaagcttacaccgaaacccgtcaagatccacaagagcttgttgaaagatacaagagacgagtccaagcagaagcacgtctctaaccagatggttctccggatatctccatttacaagggtttagaaggatcaaatgggaagagatattgtaaccaaagttttttatatatataaattatattgtatcggtaaaagcatctacatgacatgcaacaattgttttcatttatatcagaattcatgagacc

SEQ ID NO: 47500 - protein, 292 aa, Arabidopsis thaliana
  peptide (1)..(292): Ceres Seq. ID no. 13588332
MSVGLKVSAFLHPTLALSSRDVSLSSSSSSLYLDRKILRPGSGRRWCKSRRTEPILAVVESSRVPELDSSSEPVQVFDGSTRLYISYTCPFAQRAWIARNYKGLQNKIELVPIDLKNRPAWYKEKVYSANKVPALEHNNRVLGESLDLIKYIDTNFEGPSLTPDGLEKQVVADELLSYTDSFSKAVRSTLNGTDTNAADVAFDYIEQALSKFNEGPFFLGQFSLVDVAYAPFIERFRLILSDVMNVDITSGRPNLALWIQEMNKIEAYTETRQDPQELVERYKRRVQAEARL

SEQ ID NO: 47501 - DNA, 2543 bp, Arabidopsis thaliana
  misc_feature (1)..(2543): Ceres Seq. ID no. 12601296
  misc_feature (1)..(2543): Ortholog of  Ceres SEQ ID NO 14307896 as cited in SEQ ID NO 66915
  misc_feature (1)..(2543): Ortholog of  Ceres SEQ ID NO 13657008 as cited in SEQ ID NO 69164
gtcaaaagtacgcgtgaggttctctcttctctgcaaacaaaaatcctggcgttgatagcgattggttaattgtcggtgaatcaacgtttttctgttacacatatcaatcaatcatcatcctcttcatactctcttcttcttcttcatcgtaatcattagcttcaattccgagttttctcttcgtcgccgttgtgctagagttttgtcagatctcgccgggaaattagcaatggcgttttagtctgtttacctgtgaagcttttgcgtaaacgctggattcttctcaaatctctctcacctgatctcttattagattccgaggatggcgctaaagcgagggctatctggagttaaccggattagaggaagtggtggtggatctcgatctgtgcttgtgcttctcatatttttctgtgtttttgcacctctttgcttctttgttggccgaggagtgtatatcgattcctcaaatgattattcaattgtttctgtgaagcagaatcttgactggagagaacgtttagcaatgcaatctgttagatctcttttctcgaaagagatactagatgttatagcaaccagcacagctgatttgggtcctcttagccttgattcttttaagaaaaacaatttgtctgcatcatggcggggaaccggagtagacccctcctttagacattctgagaatccagcaactcctgatgtcaaatctaataacctgaatgaaaaacgtgacagcatttcaaaagatagtatccatcagaaagttgagacacctacaaagattcacagaaggcaactaagagagaaaaggcgtgagatgcgggcaaatgagttagttcagcacaatgatgacacgattttgaaactcgaaaatgctgccattgaacgctctaagtctgttgattctgcagtccttggtaaatacagtatttggagaagagaaaatgagaatgacaactctgattcaaatatacgcttgatgcgggatcaagtaataatggctagagtctatagtgggattgcaaaattgaaaaacaagaacgatttgttacaagaactccaggcccgacttaaggacagccaacgggttttgggggaagcaacatctgatgctgatcttcctcggagtgcgcatgagaaactcagagccatgggtcaagtcttggctaaagctaagatgcagttatatgactgcaagctggttactggaaagctgagagcaatgcttcagactgccgacgaacaagtgaggagcttaaagaagcagagtacttttctggctcagttagcagcaaaaaccattccaaatcctatccattgcctatcaatgcgcttgactatcgattactatcttctgtctccggagaaaagaaaattccctcggagtgaaaacctagaaaaccctaatctttatcattatgccctcttttccgacaatgtattagctgcatcagtagttgttaactcaaccatcatgaatgccaaggatccttctaagcatgtttttcaccttgtcacggataaactcaatttcggagcaatgaacatgtggttcctcctaaacccacccggaaaggcaaccatacatgtggaaaacgtcgatgagtttaagtggctcaattcatcttactgtcctgtccttcgtcagcttgaatctgcagcaatgagagagtactattttaaagcagaccatccaacttcaggctcttcgaatctaaaatacagaaacccaaagtatctatccatgttgaatcacttgagattctacctccctgaggtttatcccaagctgaacaaaatcctcttcctggacgatgacatcattgttcagaaagacttgactccactctgggaagttaacctgaacggcaaagtcaacggtgcagtcgaaacctgtggggaaagtttccacagattcgacaagtatctcaacttttcgaatcctcacattgcgaggaacttcaatccaaatgcttgtggatgggcttatggaatgaacatgttcgacctaaaggaatggaagaagagagacatcactggtatataccacaagtggcaaaacatgaatgagaacaggacactatggaagctagggacattgccaccaggattaataacattctacggattaacacatcccttaaacaaggcgtggcatgtgctgggacttggatataacccgagtatcgacaagaaggacattgagaatgcagcagtggttcactataacgggaacatgaaaccatggttggagttggcaatgtccaaatatcggccgtattggaccaagtacatcaagtttgatcacccatatcttcgtcgttgcaaccttcatgaataaaatcaaatctttgttagatgatttgaggtaattacttctaatgttctgttgttcccattccattgctctttattccacacattgttaattgtttattcatatcgttttttagtcattcttttcttctcttcttctttcgggttaaaaacacttatgttattttttgagtttttctaatgatagtaatatgtttctggag

SEQ ID NO: 47502 - protein, 673 aa, Arabidopsis thaliana
  peptide (1)..(673): Ceres Seq. ID no. 12601297
MALKRGLSGVNRIRGSGGGSRSVLVLLIFFCVFAPLCFFVGRGVYIDSSNDYSIVSVKQNLDWRERLAMQSVRSLFSKEILDVIATSTADLGPLSLDSFKKNNLSASWRGTGVDPSFRHSENPATPDVKSNNLNEKRDSISKDSIHQKVETPTKIHRRQLREKRREMRANELVQHNDDTILKLENAAIERSKSVDSAVLGKYSIWRRENENDNSDSNIRLMRDQVIMARVYSGIAKLKNKNDLLQELQARLKDSQRVLGEATSDADLPRSAHEKLRAMGQVLAKAKMQLYDCKLVTGKLRAMLQTADEQVRSLKKQSTFLAQLAAKTIPNPIHCLSMRLTIDYYLLSPEKRKFPRSENLENPNLYHYALFSDNVLAASVVVNSTIMNAKDPSKHVFHLVTDKLNFGAMNMWFLLNPPGKATIHVENVDEFKWLNSSYCPVLRQLESAAMREYYFKADHPTSGSSNLKYRNPKYLSMLNHLRFYLPEVYPKLNKILFLDDDIIVQKDLTPLWEVNLNGKVNGAVETCGESFHRFDKYLNFSNPHIARNFNPNACGWAYGMNMFDLKEWKKRDITGIYHKWQNMNENRTLWKLGTLPPGLITFYGLTHPLNKAWHVLGLGYNPSIDKKDIENAAVVHYNGNMKPWLELAMSKYRPYWTKYIKFDHPYLRRCNLHE

SEQ ID NO: 47503 - protein, 605 aa, Arabidopsis thaliana
  peptide (1)..(605): Ceres Seq. ID no. 12601298
MQSVRSLFSKEILDVIATSTADLGPLSLDSFKKNNLSASWRGTGVDPSFRHSENPATPDVKSNNLNEKRDSISKDSIHQKVETPTKIHRRQLREKRREMRANELVQHNDDTILKLENAAIERSKSVDSAVLGKYSIWRRENENDNSDSNIRLMRDQVIMARVYSGIAKLKNKNDLLQELQARLKDSQRVLGEATSDADLPRSAHEKLRAMGQVLAKAKMQLYDCKLVTGKLRAMLQTADEQVRSLKKQSTFLAQLAAKTIPNPIHCLSMRLTIDYYLLSPEKRKFPRSENLENPNLYHYALFSDNVLAASVVVNSTIMNAKDPSKHVFHLVTDKLNFGAMNMWFLLNPPGKATIHVENVDEFKWLNSSYCPVLRQLESAAMREYYFKADHPTSGSSNLKYRNPKYLSMLNHLRFYLPEVYPKLNKILFLDDDIIVQKDLTPLWEVNLNGKVNGAVETCGESFHRFDKYLNFSNPHIARNFNPNACGWAYGMNMFDLKEWKKRDITGIYHKWQNMNENRTLWKLGTLPPGLITFYGLTHPLNKAWHVLGLGYNPSIDKKDIENAAVVHYNGNMKPWLELAMSKYRPYWTKYIKFDHPYLRRCNLHE

SEQ ID NO: 47504 - protein, 507 aa, Arabidopsis thaliana
  peptide (1)..(507): Ceres Seq. ID no. 12601299
MRANELVQHNDDTILKLENAAIERSKSVDSAVLGKYSIWRRENENDNSDSNIRLMRDQVIMARVYSGIAKLKNKNDLLQELQARLKDSQRVLGEATSDADLPRSAHEKLRAMGQVLAKAKMQLYDCKLVTGKLRAMLQTADEQVRSLKKQSTFLAQLAAKTIPNPIHCLSMRLTIDYYLLSPEKRKFPRSENLENPNLYHYALFSDNVLAASVVVNSTIMNAKDPSKHVFHLVTDKLNFGAMNMWFLLNPPGKATIHVENVDEFKWLNSSYCPVLRQLESAAMREYYFKADHPTSGSSNLKYRNPKYLSMLNHLRFYLPEVYPKLNKILFLDDDIIVQKDLTPLWEVNLNGKVNGAVETCGESFHRFDKYLNFSNPHIARNFNPNACGWAYGMNMFDLKEWKKRDITGIYHKWQNMNENRTLWKLGTLPPGLITFYGLTHPLNKAWHVLGLGYNPSIDKKDIENAAVVHYNGNMKPWLELAMSKYRPYWTKYIKFDHPYLRRCNLHE

SEQ ID NO: 47505 - DNA, 1818 bp, Arabidopsis thaliana
  misc_feature (1)..(1818): Ceres Seq. ID no. 13592569
  misc_feature (1)..(1818): Ortholog of  Ceres SEQ ID NO 13581563 as cited in SEQ ID NO 58942
  misc_feature (1)..(1818): Ortholog of  Ceres SEQ ID NO 13658707 as cited in SEQ ID NO 66286
  misc_feature (1)..(1818): Ortholog of  Ceres SEQ ID NO 13654528 as cited in SEQ ID NO 68080
gacaacacttctctcactcaatcgctttctctttgagacgtttgtttagtttcaacaaacaaatcaaaacacacaaagtttgtgtcttcccttaagattcactcaaatctcgcaacacacacattcaacaaatcctgattcataacatctcaccaaatctctcaaaagatctccaaatctaaaatgttcttcttcttcttcttcatctgaatccaaaacaacaatggtgagacgtttcctctcttctcacaaatctctcatcactgttttctggatcgccactttcgcttccttattcatctggcaattcggcggcgtttccacaaatctctactccggtttctcccttttctggtcgtcgtcttcaacaaccaccaccgtcttctccggtggattccccaagctcagacctgtagttttcaatctaacagacttcggtgctgtcggcgatggtgtcacaatcaacactgaagctttcgagaaagctatttataagatctctaagcttgctaagaaaggaggtggtcaacttaatgttcctcctggtcgttggctcactgctccgtttaatctcactagttatatgactcttttcctctctgagaacgctgagattcttgctcttcaggatgaaaagtattggtctttgcttcctcctttaccttcatatggatatggaagagagcatcatggacctcgttatggaagtttcattcatggacagaatcttagagatgttgttgttacagggaataatggtagcatcaacgggcagggacaaacgtggtggaagaagtatcgccaaaagctgcttaaccacacgagaggaccactggtgcagataatgtggtcaagtgacattgtttttgccaatatcactttgcgtgattctccattttggacgcttcacccatatgactgcaaaaatgtcacaatcaccaatatgaccattttggcgcctgtgttcgaagccccaaacactgatggtatcgatccggattcgtgtgaggacatgttaatcgagaactcttacatcagcgttggggatgatggaatcgcaataaagagcggttgggaccagtatggaactacatatggaaaaccttcaaagaacatactcatccgcaacctcatcatccgctccatggttagcgctggtatatcaataggaagtgagatgtctggtggtgtctcgaatatcacagtcgagaatattctgatttggagctcccggcgtggagttaggattaaaaccgcaccaggacgaggtgggtatgtccgggatataacattccggaatgtcacattggatgagttgagagttggtattgtcattaaaacagactacaacgagcacccagatggtggattcaatccccaagcctttccgatactcgagaacataaactacactgggatatacggtcagggagtgcgtgtaccagtgcgtatccaaggaagcaaagagattcctgttaaaaatgtaaccttcagggacatgtcagtggggataacatacaagaaaaagcacatattccagtgtgcgtacgtggaggggcgtgtgataggcaccatcttcccagctccgtgtgataaccttgatcggtatgatgagcaggaacggttggtgaagcaatctgattcccagaatgcaacagatatagactacgagatctgaccaacaagagactgggtttggcctctgcaacaaatttgtttcgttggattttgtacatatacagaggaatctggaaagcaaaggaaattatcggtcagtcagattaaattgtatttgcactcttaaagaggaatttttcc

SEQ ID NO: 47506 - protein, 484 aa, Arabidopsis thaliana
  peptide (1)..(484): Ceres Seq. ID no. 13592570
MVRRFLSSHKSLITVFWIATFASLFIWQFGGVSTNLYSGFSLFWSSSSTTTTVFSGGFPKLRPVVFNLTDFGAVGDGVTINTEAFEKAIYKISKLAKKGGGQLNVPPGRWLTAPFNLTSYMTLFLSENAEILALQDEKYWSLLPPLPSYGYGREHHGPRYGSFIHGQNLRDVVVTGNNGSINGQGQTWWKKYRQKLLNHTRGPLVQIMWSSDIVFANITLRDSPFWTLHPYDCKNVTITNMTILAPVFEAPNTDGIDPDSCEDMLIENSYISVGDDGIAIKSGWDQYGTTYGKPSKNILIRNLIIRSMVSAGISIGSEMSGGVSNITVENILIWSSRRGVRIKTAPGRGGYVRDITFRNVTLDELRVGIVIKTDYNEHPDGGFNPQAFPILENINYTGIYGQGVRVPVRIQGSKEIPVKNVTFRDMSVGITYKKKHIFQCAYVEGRVIGTIFPAPCDNLDRYDEQERLVKQSDSQNATDIDYEI

SEQ ID NO: 47507 - protein, 364 aa, Arabidopsis thaliana
  peptide (1)..(364): Ceres Seq. ID no. 13592571
MTLFLSENAEILALQDEKYWSLLPPLPSYGYGREHHGPRYGSFIHGQNLRDVVVTGNNGSINGQGQTWWKKYRQKLLNHTRGPLVQIMWSSDIVFANITLRDSPFWTLHPYDCKNVTITNMTILAPVFEAPNTDGIDPDSCEDMLIENSYISVGDDGIAIKSGWDQYGTTYGKPSKNILIRNLIIRSMVSAGISIGSEMSGGVSNITVENILIWSSRRGVRIKTAPGRGGYVRDITFRNVTLDELRVGIVIKTDYNEHPDGGFNPQAFPILENINYTGIYGQGVRVPVRIQGSKEIPVKNVTFRDMSVGITYKKKHIFQCAYVEGRVIGTIFPAPCDNLDRYDEQERLVKQSDSQNATDIDYEI

SEQ ID NO: 47508 - protein, 277 aa, Arabidopsis thaliana
  peptide (1)..(277): Ceres Seq. ID no. 13592572
MWSSDIVFANITLRDSPFWTLHPYDCKNVTITNMTILAPVFEAPNTDGIDPDSCEDMLIENSYISVGDDGIAIKSGWDQYGTTYGKPSKNILIRNLIIRSMVSAGISIGSEMSGGVSNITVENILIWSSRRGVRIKTAPGRGGYVRDITFRNVTLDELRVGIVIKTDYNEHPDGGFNPQAFPILENINYTGIYGQGVRVPVRIQGSKEIPVKNVTFRDMSVGITYKKKHIFQCAYVEGRVIGTIFPAPCDNLDRYDEQERLVKQSDSQNATDIDYEI

SEQ ID NO: 47509 - DNA, 1237 bp, Arabidopsis thaliana
  misc_feature (1)..(1237): Ceres Seq. ID no. 13588421
  misc_feature (1)..(1237): Ortholog of  Ceres SEQ ID NO 14313491 as cited in SEQ ID NO 0
gagctcataacagaaagaagaaacacaaagtgagacagaactctctaattagtcccgaaggtttcaaaagggtattttggtaaaatcgaaagagaatcatggacgcttttgatgcgattccagatcctgtggtcatcgacattttgaacagagtcggtgacgtcaaaacgttaatacgatgtcgttccgtttctaaacgattcaactcgttagccactcagtctgagtcgctccttctccaactcgatcagatcctcggagccaccgaatctgactccgagatcgattctcctatcgctagcttcttccgatctctcttcaaatccattcacggtctccttcctcctatcttctccaaaccagctaactctgacgaaatcctaacccgatctccgaaaactccggctcagattctctccggatttgaacggatccggaatctggaggtggaattatacggtggtgatgtcaagcttgagaaaggcgccgccgttaagtggaaggctgagttcgggaaaactctcaagagctgcgtcatcgtcgctttccgttccgcgacggttaatacttcagcagctacggaagctgccgccgtcgtcgacggtgttgttgagtcagattcggagtttgtttgtggattgaagacgcgcgtggtgtggacgatcagcgcgttgatggcggcttccacgcgtcattacttgatgagagatttggtgaaagatcacaaggagatggagaaattgattgtgcgtgacagtgatggtgaaggtacggtggtgatggacgcggcggggatgaaagaatacagagagacggaggtgcgtggggataataaagaatcagagcgcgtgggggaacgaactgtggtacctagcgtgaggatgagtatgagacacgcgccgtcgctgatgctgaagagcgggatttgtctcgaagcagcgacgctggtggtcgtaaggccgactggtgtggcttccgatgataacgatgttgagctggtgacggaggcgttcgccggagatggcgacgattgtatgtacggagaagctgttacggcgttgcttaagcgtaggagaaatgtgttagagatgaattctttctaaggcctagtgggctttttttgggcttccgtttgtttggccctttttaatgtatatacatacgcatcgtacaaagccaactgtactattggcgtacgacttttgggtcaaatgacatcaaatccgaattattcctc

SEQ ID NO: 47510 - protein, 334 aa, Arabidopsis thaliana
  peptide (1)..(334): Ceres Seq. ID no. 13588422
MDAFDAIPDPVVIDILNRVGDVKTLIRCRSVSKRFNSLATQSESLLLQLDQILGATESDSEIDSPIASFFRSLFKSIHGLLPPIFSKPANSDEILTRSPKTPAQILSGFERIRNLEVELYGGDVKLEKGAAVKWKAEFGKTLKSCVIVAFRSATVNTSAATEAAAVVDGVVESDSEFVCGLKTRVVWTISALMAASTRHYLMRDLVKDHKEMEKLIVRDSDGEGTVVMDAAGMKEYRETEVRGDNKESERVGERTVVPSVRMSMRHAPSLMLKSGICLEAATLVVVRPTGVASDDNDVELVTEAFAGDGDDCMYGEAVTALLKRRRNVLEMNSF

SEQ ID NO: 47511 - DNA, 1896 bp, Arabidopsis thaliana; identical to SEQ ID NO: 41271
  misc_feature (1)..(1896): Ceres Seq. ID no. 13504759
  misc_feature (1)..(1896): Ortholog of  Ceres SEQ ID NO 13597411 as cited in SEQ ID NO 64125

SEQ ID NO: 47512 - protein, 556 aa, Arabidopsis thaliana; identical to SEQ ID NO: 41272
  peptide (1)..(556): Ceres Seq. ID no. 13504760

SEQ ID NO: 47513 - protein, 546 aa, Arabidopsis thaliana; identical to SEQ ID NO: 41273
  peptide (1)..(546): Ceres Seq. ID no. 13504761

SEQ ID NO: 47514 - protein, 502 aa, Arabidopsis thaliana; identical to SEQ ID NO: 41274
  peptide (1)..(502): Ceres Seq. ID no. 13504762

SEQ ID NO: 47515 - DNA, 1779 bp, Arabidopsis thaliana
  misc_feature (1)..(1779): Ceres Seq. ID no. 12591709
  misc_feature (1)..(1779): Ortholog of  Ceres SEQ ID NO 15177320 as cited in SEQ ID NO 52645
  misc_feature (1)..(1779): Ortholog of  Ceres SEQ ID NO 15171359 as cited in SEQ ID NO 57279
  misc_feature (1)..(1779): Ortholog of  Ceres SEQ ID NO 14313840 as cited in SEQ ID NO 59568
  misc_feature (1)..(1779): Ortholog of  Ceres SEQ ID NO 15168502 as cited in SEQ ID NO 60095
  misc_feature (1)..(1779): Ortholog of  Ceres SEQ ID NO 13662245 as cited in SEQ ID NO 62708
  misc_feature (1)..(1779): Ortholog of  Ceres SEQ ID NO 14314084 as cited in SEQ ID NO 63256
  misc_feature (1)..(1779): Ortholog of  Ceres SEQ ID NO 15169466 as cited in SEQ ID NO 66135
  misc_feature (1)..(1779): Ortholog of  Ceres SEQ ID NO 14303091 as cited in SEQ ID NO 66369
gagcttcattttgcctttgtatacttttgagtagatagatagacagactatagtctatataagatccatgtgacaatagttaaaatcctcatattttcatttccaatggagcgcaaagtcttgaataccctcgccttctccgtctttgccgttctcttcttcacctcctctgcttcttcccaataccaaactcttgtcgtcaacactcttccttcttccgcaacactctcatggcccgagtccgaatctttaactgatgaatctttatccgagtccacaacttcactctctgtccatttatcacacgtggatgctctgtcttccttctccgacgcatctccggcggacctcttcaacctccgtctccaacgagactctctccgcgtcaaatctattaccagcctcgccgccgtatcaaccggacgaaatgctacgaaaagaactccacgtaccgccggtggatttagcggcgcagttatctctggcctctcacaaggaagcggagagtattttatgaggttaggtgttggaactccggcgactaacgtttacatggtgctcgacacaggaagcgacgtcgtttggctccaatgctctccttgcaaagcctgttacaaccagaccgacgccatttttgacccgaagaaatccaaaactttcgccaccgtaccatgtggatctcgcctttgccggagactagacgactcgtcggaatgtgtcactcgtcgaagcaagacttgtctctaccaagtatcgtacggtgacggatcattcaccgaaggagatttctcaactgaaacgctgacgtttcatggagcgcgtgttgatcacgtgccgttaggatgcggtcacgataacgaaggcttgttcgttggtgcggctgggcttttgggcttgggccgtggtgggttatctttcccgtcgcagacgaaaaaccgttataacggaaaattctcttactgtttggttgaccggacgagttccggttcttcttctaaaccaccgtcaacaatcgtgtttggaaacgccgccgttccgaaaacctctgttttcacgccgttactaacgaacccgaaactcgacacgttttattacttgcagcttcttggaatcagcgttggtggttcgcgcgttcccggcgtttcggagtcgcagttcaagcttgacgccaccggaaacggcggtgtcattatagattccggtacttcggttactcggctgacgcaacctgcttacgtagcgcttagagacgcttttagacttggtgctacgaagctgaaacgtgctccatcgtattctttgttcgacacgtgttttgatctctcgggaatgacgactgtgaaggttccgacggttgtgtttcatttcggaggcggagaggtttcgcttccggcgagtaattatctgatcccggttaacactgaaggacggttctgttttgcgtttgccggaactatggggagtttgtcaatcattggaaacatacagcaacaaggtttccgggtcgcttatgacttggtcgggtcacgggtcgggtttttgtctcgcgcgtgttagattttgagcttgagttgactgatttattcccaaagactttttgggagaaaattgacaaagcaaattatcaaacattgttatcatcatcgactatcatactactcattagtcatcattcatgaagatccctagattaaatattgtactagtacttctgtactgtcaaaagtcaaagagaagtgaatcttaaaggtgcttttgtcctttgaaatttcttaaacc

SEQ ID NO: 47516 - protein, 483 aa, Arabidopsis thaliana
  peptide (1)..(483): Ceres Seq. ID no. 12591710
MERKVLNTLAFSVFAVLFFTSSASSQYQTLVVNTLPSSATLSWPESESLTDESLSESTTSLSVHLSHVDALSSFSDASPADLFNLRLQRDSLRVKSITSLAAVSTGRNATKRTPRTAGGFSGAVISGLSQGSGEYFMRLGVGTPATNVYMVLDTGSDVVWLQCSPCKACYNQTDAIFDPKKSKTFATVPCGSRLCRRLDDSSECVTRRSKTCLYQVSYGDGSFTEGDFSTETLTFHGARVDHVPLGCGHDNEGLFVGAAGLLGLGRGGLSFPSQTKNRYNGKFSYCLVDRTSSGSSSKPPSTIVFGNAAVPKTSVFTPLLTNPKLDTFYYLQLLGISVGGSRVPGVSESQFKLDATGNGGVIIDSGTSVTRLTQPAYVALRDAFRLGATKLKRAPSYSLFDTCFDLSGMTTVKVPTVVFHFGGGEVSLPASNYLIPVNTEGRFCFAFAGTMGSLSIIGNIQQQGFRVAYDLVGSRVGFLSRAC

SEQ ID NO: 47517 - protein, 347 aa, Arabidopsis thaliana
  peptide (1)..(347): Ceres Seq. ID no. 12591711
MRLGVGTPATNVYMVLDTGSDVVWLQCSPCKACYNQTDAIFDPKKSKTFATVPCGSRLCRRLDDSSECVTRRSKTCLYQVSYGDGSFTEGDFSTETLTFHGARVDHVPLGCGHDNEGLFVGAAGLLGLGRGGLSFPSQTKNRYNGKFSYCLVDRTSSGSSSKPPSTIVFGNAAVPKTSVFTPLLTNPKLDTFYYLQLLGISVGGSRVPGVSESQFKLDATGNGGVIIDSGTSVTRLTQPAYVALRDAFRLGATKLKRAPSYSLFDTCFDLSGMTTVKVPTVVFHFGGGEVSLPASNYLIPVNTEGRFCFAFAGTMGSLSIIGNIQQQGFRVAYDLVGSRVGFLSRAC

SEQ ID NO: 47518 - protein, 334 aa, Arabidopsis thaliana
  peptide (1)..(334): Ceres Seq. ID no. 12591712
MVLDTGSDVVWLQCSPCKACYNQTDAIFDPKKSKTFATVPCGSRLCRRLDDSSECVTRRSKTCLYQVSYGDGSFTEGDFSTETLTFHGARVDHVPLGCGHDNEGLFVGAAGLLGLGRGGLSFPSQTKNRYNGKFSYCLVDRTSSGSSSKPPSTIVFGNAAVPKTSVFTPLLTNPKLDTFYYLQLLGISVGGSRVPGVSESQFKLDATGNGGVIIDSGTSVTRLTQPAYVALRDAFRLGATKLKRAPSYSLFDTCFDLSGMTTVKVPTVVFHFGGGEVSLPASNYLIPVNTEGRFCFAFAGTMGSLSIIGNIQQQGFRVAYDLVGSRVGFLSRAC

SEQ ID NO: 47519 - DNA, 1078 bp, Arabidopsis thaliana; identical to SEQ ID NO: 23066
  misc_feature (1)..(1078): Ceres Seq. ID no. 12639248
  misc_feature (1)..(1078): Ortholog of  Ceres SEQ ID NO 14305963 as cited in SEQ ID NO 52290
  misc_feature (1)..(1078): Ortholog of  Ceres SEQ ID NO 14307492 as cited in SEQ ID NO 59504
  misc_feature (1)..(1078): Ortholog of  Ceres SEQ ID NO 13597255 as cited in SEQ ID NO 63874

SEQ ID NO: 47520 - protein, 217 aa, Arabidopsis thaliana; identical to SEQ ID NO: 23067
  peptide (1)..(217): Ceres Seq. ID no. 12639249

SEQ ID NO: 47521 - protein, 111 aa, Arabidopsis thaliana; identical to SEQ ID NO: 23068
  peptide (1)..(111): Ceres Seq. ID no. 12639250

SEQ ID NO: 47522 - DNA, 2009 bp, Arabidopsis thaliana; identical to SEQ ID NO: 46724
  misc_feature (1)..(2009): Ceres Seq. ID no. 13591952
  misc_feature (1)..(2009): Ortholog of  Ceres SEQ ID NO 14313670 as cited in SEQ ID NO 54491

SEQ ID NO: 47523 - protein, 593 aa, Arabidopsis thaliana; identical to SEQ ID NO: 46725
  peptide (1)..(593): Ceres Seq. ID no. 13591953

SEQ ID NO: 47524 - protein, 578 aa, Arabidopsis thaliana; identical to SEQ ID NO: 46726
  peptide (1)..(578): Ceres Seq. ID no. 13591954

SEQ ID NO: 47525 - protein, 463 aa, Arabidopsis thaliana; identical to SEQ ID NO: 46727
  peptide (1)..(463): Ceres Seq. ID no. 13591955

SEQ ID NO: 47526 - DNA, 2003 bp, Arabidopsis thaliana; identical to SEQ ID NO: 46166
  misc_feature (1)..(2003): Ceres Seq. ID no. 13592058
  misc_feature (1)..(2003): Ortholog of  Ceres SEQ ID NO 13659971 as cited in SEQ ID NO 67565

SEQ ID NO: 47527 - protein, 556 aa, Arabidopsis thaliana; identical to SEQ ID NO: 46167
  peptide (1)..(556): Ceres Seq. ID no. 13592059

SEQ ID NO: 47528 - protein, 483 aa, Arabidopsis thaliana; identical to SEQ ID NO: 46168
  peptide (1)..(483): Ceres Seq. ID no. 13592060

SEQ ID NO: 47529 - protein, 408 aa, Arabidopsis thaliana; identical to SEQ ID NO: 46169
  peptide (1)..(408): Ceres Seq. ID no. 13592061

SEQ ID NO: 47530 - DNA, 1173 bp, Arabidopsis thaliana
  misc_feature (1)..(1173): Ceres Seq. ID no. 12602042
  misc_feature (1)..(1173): Ortholog of  Ceres SEQ ID NO 13505109 as cited in SEQ ID NO 58983
  misc_feature (1)..(1173): Ortholog of  Ceres SEQ ID NO 14302303 as cited in SEQ ID NO 62365
  misc_feature (1)..(1173): Ortholog of  Ceres SEQ ID NO 13599066 as cited in SEQ ID NO 0
cttcagaacagaaaggcaaatttctcaaaggaagcgaagccctagcgtcctctctctgtcttctcgtttctgcgccgattcgtagtctgttgtgcgcttgcctctcctcttttggattagcatacctctcactcgcatcagatgcacttttggttatcctcataccaaaatgcagattttcagttgctttttctatccaaatggactgcaagaagttcatccagatggtcgaggagaagaaacgaagagttcttgagaagcaagaagctcctttgaaatgggagcagaagctagaggcggctgcgaatgccaaagcagacacagaaactaaagtgaagagatcaaagggccctaagagaaaacaaagggctgcgtctgaatctagctcagaaagtgatagtagctctgaggtgagaagaaagtctagaagatctcacaataagcaccgaagacatgcacactctgattcagatgacagtgataggaggaaagagaagaaatccaggaggcagaaaagaaggtccttgagtccaagcgatgatagcactggtgattatgaaagtgggtcagaggatgagctgaggatgaagataaagcaccatcggaggcacaagtggcatagctcaagaaagacttgcgatgatgacagtaccgaagatgtgagaagaaaacatttaaagcatcacaggcgcagtgaggtggtcacttcaagtgatagtgaggaagagagtggaagaagaaggcgaggcaaatatcacaggcacaacagaggttcagcctcctcgagtggctcggaagaagatagtgggaaaagtatgaagagaaggcaacataaaaggcatcgtttggctgagtcttcaagtgaggaagatggggcaatgagaaggactaggcatcataaacatggcagagattcagcatctgagtctgatggaagaaggtaatcagatgagaaaagagagcactacttcgacaaatgaaaatggaaaatgtctttgtttaattcacatcataagaactgaatcttgtggtaaaccatcagcacatgattactacccagatgttgggacccaaatacgatgaatattgtgttgaattactatggtggcactctgttcttagattttcatttttacatttgtagcaagaatggtacacaaccaattgaactct

SEQ ID NO: 47531 - protein, 313 aa, Arabidopsis thaliana
  peptide (1)..(313): Ceres Seq. ID no. 12602043
SEQKGKFLKGSEALASSLCLLVSAPIRSLLCACLSSFGLAYLSLASDALLVILIPKCRFSVAFSIQMDCKKFIQMVEEKKRRVLEKQEAPLKWEQKLEAAANAKADTETKVKRSKGPKRKQRAASESSSESDSSSEVRRKSRRSHNKHRRHAHSDSDDSDRRKEKKSRRQKRRSLSPSDDSTGDYESGSEDELRMKIKHHRRHKWHSSRKTCDDDSTEDVRRKHLKHHRRSEVVTSSDSEEESGRRRRGKYHRHNRGSASSSGSEEDSGKSMKRRQHKRHRLAESSSEEDGAMRRTRHHKHGRDSASESDGRR

SEQ ID NO: 47532 - protein, 247 aa, Arabidopsis thaliana; identical to SEQ ID NO: 25056
  peptide (1)..(247): Ceres Seq. ID no. 12602044

SEQ ID NO: 47533 - protein, 239 aa, Arabidopsis thaliana; identical to SEQ ID NO: 25057
  peptide (1)..(239): Ceres Seq. ID no. 12602045

SEQ ID NO: 47534 - DNA, 1192 bp, Arabidopsis thaliana
  misc_feature (1)..(1192): Ceres Seq. ID no. 13588886
  misc_feature (1)..(1192): Ortholog of  Ceres SEQ ID NO 14307288 as cited in SEQ ID NO 54318
  misc_feature (1)..(1192): Ortholog of  Ceres SEQ ID NO 13597393 as cited in SEQ ID NO 63453
gacagaagtgaagagcaagcagacgaaaaaaatggcgactctgtcttcctatctgttatcttctcctcctctatgcaaatcccgattctcggcaacaagtctcgtctcaggaattgatttcatctctttctctcctcgaacaactctctcctcgtcatccactgtcttgccggcgattctttctctttccgttaaacataatcgccggagaaactcgcttcaagtgaaatcagtagctagcccaacggagacgatttcagaattcgatgagatggtctccggcacgaaacgaaagtattacatgctcggtgggaaaggaggagtgggcaaaactagttgtgctgcttctttagctgtgagattcgccaacaatggacacccaactctggttgtatctacagatccagcacattccttgagcgattcttttgctcaggacttgactggaggaatgcttgtccctgtagaaggacccgaagctcctttatttgctttagaaataaaccctgagaaggctagggaagagtttcgtagtgcctcgcagatgaatggaggaactggggtgaaagattttatggatggtatgggacttggaatgcttgtagaacaggtcattcaattcttggaatcaccagagtataacatgttcaccagaatcgtatttgatactgcaccaacgggtcatacgctaaggctactctctttacctgatttcttggatgcatccattggtaaaatcttgaagcttagacagaaaataacctcggctacttcagcgatcaaatcagtttttgggaaagaagaaaaggggcctgatgctgccgacaaattggaaaaactaagagaaaggatggttaaagttcgcgagcttttccgtgacacagagtcaacagaattcgtcattgtcactatcccaacggtaatggctgtcagcgagtcttctaggttaagtgcttccttgaagaaggaaagtgttcccgtcaaaagactcattgttaatcagcttctcccgccatcctcctcagattgcaaattttgctctattaagagaaaggaccaaatgcgggctcttgatatgatccgggaggattcagaactctctgctttgacactgatggaggctccgctggttgatatggagatcagaggtgtccctgctctgcgcttcttgggcgatatcatttggaaataa

SEQ ID NO: 47535 - protein, 396 aa, Arabidopsis thaliana
  peptide (1)..(396): Ceres Seq. ID no. 13588887
TEVKSKQTKKMATLSSYLLSSPPLCKSRFSATSLVSGIDFISFSPRTTLSSSSTVLPAILSLSVKHNRRRNSLQVKSVASPTETISEFDEMVSGTKRKYYMLGGKGGVGKTSCAASLAVRFANNGHPTLVVSTDPAHSLSDSFAQDLTGGMLVPVEGPEAPLFALEINPEKAREEFRSASQMNGGTGVKDFMDGMGLGMLVEQVIQFLESPEYNMFTRIVFDTAPTGHTLRLLSLPDFLDASIGKILKLRQKITSATSAIKSVFGKEEKGPDAADKLEKLRERMVKVRELFRDTESTEFVIVTIPTVMAVSESSRLSASLKKESVPVKRLIVNQLLPPSSSDCKFCSIKRKDQMRALDMIREDSELSALTLMEAPLVDMEIRGVPALRFLGDIIWK

SEQ ID NO: 47536 - protein, 386 aa, Arabidopsis thaliana
  peptide (1)..(386): Ceres Seq. ID no. 13588888
MATLSSYLLSSPPLCKSRFSATSLVSGIDFISFSPRTTLSSSSTVLPAILSLSVKHNRRRNSLQVKSVASPTETISEFDEMVSGTKRKYYMLGGKGGVGKTSCAASLAVRFANNGHPTLVVSTDPAHSLSDSFAQDLTGGMLVPVEGPEAPLFALEINPEKAREEFRSASQMNGGTGVKDFMDGMGLGMLVEQVIQFLESPEYNMFTRIVFDTAPTGHTLRLLSLPDFLDASIGKILKLRQKITSATSAIKSVFGKEEKGPDAADKLEKLRERMVKVRELFRDTESTEFVIVTIPTVMAVSESSRLSASLKKESVPVKRLIVNQLLPPSSSDCKFCSIKRKDQMRALDMIREDSELSALTLMEAPLVDMEIRGVPALRFLGDIIWK

SEQ ID NO: 47537 - protein, 306 aa, Arabidopsis thaliana
  peptide (1)..(306): Ceres Seq. ID no. 13588889
MVSGTKRKYYMLGGKGGVGKTSCAASLAVRFANNGHPTLVVSTDPAHSLSDSFAQDLTGGMLVPVEGPEAPLFALEINPEKAREEFRSASQMNGGTGVKDFMDGMGLGMLVEQVIQFLESPEYNMFTRIVFDTAPTGHTLRLLSLPDFLDASIGKILKLRQKITSATSAIKSVFGKEEKGPDAADKLEKLRERMVKVRELFRDTESTEFVIVTIPTVMAVSESSRLSASLKKESVPVKRLIVNQLLPPSSSDCKFCSIKRKDQMRALDMIREDSELSALTLMEAPLVDMEIRGVPALRFLGDIIWK

SEQ ID NO: 47538 - DNA, 1225 bp, Arabidopsis thaliana
  misc_feature (1)..(1225): Ceres Seq. ID no. 13588890
  misc_feature (1)..(1225): Ortholog of  Ceres SEQ ID NO 15224803 as cited in SEQ ID NO 56572
  misc_feature (1)..(1225): Ortholog of  Ceres SEQ ID NO 13502952 as cited in SEQ ID NO 62271
  misc_feature (1)..(1225): Ortholog of  Ceres SEQ ID NO 13502973 as cited in SEQ ID NO 68052
  misc_feature (1)..(1225): Ortholog of  Ceres SEQ ID NO 13596000 as cited in SEQ ID NO 68188
atcaagtgacaaaagaaaaacaaacgtactcaaatggctctttcttcaccttcaagaatcctctgttttgctcttgccttatccgctgcttctctctccctctctttcgcttcttcccacgattactccatcgttggatactcccccgaggatttggaatctcatgacaaactcatagaactcttcgaaaactggatctcaaattttgagaaagcttatgaaaccgttgaagagaagtttcttaggttcgaagttttcaaggataatctaaagcacatcgatgagactaacaagaaagggaaaagctactggctcgggctcaacgagtttgcggatttgagccatgaggagttcaagaaaatgtatttagggctcaagactgatatagtgagacgcgatgaagaaagatcttacgcagagttcgcttacagggacgtcgaagctgttcctaagtctgttgactggagaaagaaaggagctgtggcggaagttaagaaccagggctcttgtggaagttgttgggcgttttcgacagtagcagctgtcgaaggtataaacaagattgtgacaggaaacttgacaacattgtcagaacaagaactcatagactgtgacacgacctacaacaatggctgcaacggtggtctcatggactatgcctttgagtacattgttaagaacggaggtctacgcaaggaagaagattatccttactctatggaagaaggaacttgcgagatgcaaaaggatgaatctgaaacagtaaccattaatggacaccaagacgtacctactaatgatgagaagagtctcttgaaggcattggctcatcagcctctcagtgtcgccattgatgcatctggtagagagttccagttctatagcggcggcgtgtttgatgggcggtgcggggttgatcttgaccacggtgtggctgcggttgggtatggatcaagcaagggttcagattacatcattgtgaagaattcttggggaccaaaatggggagaaaaaggttacatcaggctgaagaggaacactgggaaaccagagggtctctgtggaatcaacaagatggcttctttccccaccaaaactaagtgatcatcagatcattctctcttatctgcatttgatcagcatcttacagtgtcttcgttttttctcttttgatttatcaacggaagtcttgtaacaactatgtgcaataatacctatatataag

SEQ ID NO: 47539 - protein, 356 aa, Arabidopsis thaliana
  peptide (1)..(356): Ceres Seq. ID no. 13588891
MALSSPSRILCFALALSAASLSLSFASSHDYSIVGYSPEDLESHDKLIELFENWISNFEKAYETVEEKFLRFEVFKDNLKHIDETNKKGKSYWLGLNEFADLSHEEFKKMYLGLKTDIVRRDEERSYAEFAYRDVEAVPKSVDWRKKGAVAEVKNQGSCGSCWAFSTVAAVEGINKIVTGNLTTLSEQELIDCDTTYNNGCNGGLMDYAFEYIVKNGGLRKEEDYPYSMEEGTCEMQKDESETVTINGHQDVPTNDEKSLLKALAHQPLSVAIDASGREFQFYSGGVFDGRCGVDLDHGVAAVGYGSSKGSDYIIVKNSWGPKWGEKGYIRLKRNTGKPEGLCGINKMASFPTKTK

SEQ ID NO: 47540 - protein, 247 aa, Arabidopsis thaliana
  peptide (1)..(247): Ceres Seq. ID no. 13588892
MYLGLKTDIVRRDEERSYAEFAYRDVEAVPKSVDWRKKGAVAEVKNQGSCGSCWAFSTVAAVEGINKIVTGNLTTLSEQELIDCDTTYNNGCNGGLMDYAFEYIVKNGGLRKEEDYPYSMEEGTCEMQKDESETVTINGHQDVPTNDEKSLLKALAHQPLSVAIDASGREFQFYSGGVFDGRCGVDLDHGVAAVGYGSSKGSDYIIVKNSWGPKWGEKGYIRLKRNTGKPEGLCGINKMASFPTKTK

SEQ ID NO: 47541 - DNA, 4931 bp, Arabidopsis thaliana
  misc_feature (1)..(4931): Ceres Seq. ID no. 12602182
  misc_feature (1)..(4931): Ortholog of  Ceres SEQ ID NO 15176130 as cited in SEQ ID NO 1136
  misc_feature (1)..(4931): Ortholog of  Ceres SEQ ID NO 15171728 as cited in SEQ ID NO 57131
  misc_feature (1)..(4931): Ortholog of  Ceres SEQ ID NO 13582534 as cited in SEQ ID NO 57409
  misc_feature (1)..(4931): Ortholog of  Ceres SEQ ID NO 14308198 as cited in SEQ ID NO 59072
  misc_feature (1)..(4931): Ortholog of  Ceres SEQ ID NO 13654213 as cited in SEQ ID NO 60614
  misc_feature (1)..(4931): Ortholog of  Ceres SEQ ID NO 13597268 as cited in SEQ ID NO 63929
  misc_feature (1)..(4931): Ortholog of  Ceres SEQ ID NO 12617527 as cited in SEQ ID NO 64697
gaccgtaccgtacagagtcaattgaagaaaccgagagagagagtgagcggaatcatgacttctccgggaaaatctccgagatccgaccggaaatcaccgacggttgtcaccgtccagccgtcttctcccagattcccgatcagcacacctactgctggagctcaacgtaagatcgggatcgctgtcgatctaagcgacgagagtgcgtacgcagttcaatgggctgttcagaactatctccgatcaggtgacgccgttgttctccttcatgttcaaccgacgagtgtactttacggcgccgattggggcgctatggatttgtcgccgcagtgggatccaaataacgaagagtctcagaggaagcttgaggacgatttcgacattgtcactaataagaaagcgagcgacgttgctcagcctttggttgaggcggatattccgtttaagatccatatcgtcaaggatcacgatatgaaggagaggctttgtttggaggtggagaggttagggctaagtactttgattatgggtagtagaggatttggtgctacgaagaggagtagtaaagggagattagggagtgtcagtgattactcagttcaccattgtgcttgtccggtggttgttgttagatttcctgatgataaggatggagaagatgagaaatccggcgacagtggtggggagaatctgatggacagtgataaacttcatacagtgcctgaggtggctgaagaagagggagataaggatgagtaccatgatgcttcggataagcagtagcagcaaggttgactttgaatgcatgtcagtttcaatttacttaggaatattatatacaatcagtaatactctgctcggatcaagctttgacctttagaatgattggatattaggaagatccactaagatgctattttattcctgatgcttgaggtgtgtatgtttgaacatttgcgcatatcattgctttagttgtattcagtaatctcttgatgttaatgaccaataacttacatatgcatctattgatatgctagagatttgctgtttgtgagtacttttttttgtctcagtgatgtctggatatgtcaagttatttcttcaaaagttggatcaatcaatgatgtcttatctgtgatcactgatcttgtgcaggctttcatgttgcagaaggagacctccctaaggagacttagaaagaaaagaaagcgttcctttgcccttggtttgtgttcttgagtgtgcttaattgtgttgtttttggggtttggggtattctagatctcttttgtaagtattctcttgtttcttggttttgttttaaactctatggaatttgggatgagtggattcgatgtcttttgtttgtctttgaaaaagcagtgaaaagaatttcagtggtcttgtatatctctgcagttgaatagttggtacaaaataacatctttgacggttccaaataatatatcttgtcagtaatgaccattaaataaactttaccatgaaatggctatgcttgcatctttcagaaccattacatttgtcttgtcctgtttctgacttttctcttgactgtgtggaagttcataagatcaatggtaccgatgtgtctttgtttgtatctttgggaaaaagactgataatggttccgaagtttcactgtttgtacagtctcaaataagttctattttgtctctctgcagtttagttttccccatagaaagcatctctgatggtttcaaatgtaggcatcattaacattttcaccacattgtccctattctcaagcagcgaactctcttcctatgatcaacgtccactatctattcccaactttgaagagttaagagacatttacctaaggaatcggtaaatccttgtttgcatttgtcgatttcatgagctcctgttgcctgttgttgcgcgacctggtttcaaaacggcttccaagttcgatttcaagtttgcaaaatgtgaagttgtctctgatagtgactccttgcatgcccctatctcacacatgctcgtaaggccccatcacactttccaattatttctgagcggaaaagtcaagtgtggtgcctctgccagtggcaattaaatgtaaccaccaaacattagatgacataaagttatttcaagtcttaggattaaatcaacccttaaagctctacgtttctctcaaagttgctgagaagatgggttgtttgctaattcttcttcttacattgatttgcttttccttgaggctttgtttggctactgatgtaatcacgttttctagcgagttcagggactctgagactgtcgtctccaaccacagcaccttcaggtttggtttcttcagcccggttaactccacaggacgttatgcagggatatggttcaataatattcctgttcaaaccgtggtttgggtagcaaacagtaacagcccgatcaatgactcttccggaatggtttccatatccaaggaagggaatcttgttgttatggatggtcgcggacaggttcactggtccaccaatgtcttggtgccggtggctgctaacaccttctatgcccggttgctgaatacagggaacctcgtgctgctaggaactactaatactggggatgagattctttgggagagctttgagcatcctcaaaacatatatttgccaacaatgagtcttgctactgacacgaaaacaggcaggagccttaagctaagatcttggaaaagcccgtttgatccatcgcctggacgatactctgcaggtttgattcctctgccatttccagaacttgttgtctggaaagatgatcttctgatgtggcgtagcggtccatggaatggtcaatacttcattgggttaccaaatatggattaccgtatcaatcttttcgagttaacccttagtagtgacaatcgaggatctgtctccatgtcctatgctggaaatactttgttgtatcattttctcttggactccgaaggaagcgtgtttcagagagattggaacgtggctatccaagaatggaagacctggttaaaggtcccatcgaccaagtgtgatacatacgccacatgtggccaattcgctagttgcagattcaatcccgggtcgactccgccttgcatgtgcattagagggtttaagccacagagttacgcggagtggaacaacggaaactggactcagggatgcgtaagaaaggcaccattgcagtgcgaaagtcgagacaacaacgatggaagtagaaaaagtgatggatttgtgagagtgcaaaagatgaaagtgccccacaatccacaacgatctggagccaatgaacaagactgtcctgagagctgtctgaagaactgttcttgtacggcttactcattcgacagagggattggttgtcttctttggagcggaaacttgatggatatgcaggagttttctggcactggcgtggttttttacattcgtcttgcagattcagagtttagtaagtgtagtatcaacctcatttttccatccaacttagtttactagatcataacagatttgcaccaaatcttttgtagaaaagcggaccaatcggtcaattgtgatcacagtaactttgctagtaggcgcttttttgtttgcagggactgttgtcttagcactgtggaagatcgctaagcatagagagaagaacagaaacacaaggctacttaatgagagaatggaagctttaagtagtaatgacgttggtgcaatccttgtgaatcaatacaagcttaaagagctaccactgttcgagttccaagtgttagcagtggcgaccaacaatttttctatcacaaacaagctcggacaaggaggatttggtgctgtttacaaggggaggttacaagaagggctcgatatcgctgtgaagaggctttcgcgaacatcgggacaaggagtcgaggagtttgtgaatgaagtggtcgtgatctcaaagctgcaacaccggaatctcgtgagattgcttggtttctgcattgaaggagaagagaggatgttggtctatgagttcatgccagagaattgtttagacgcatatctatttgacccggtgaagcaaagacttcttgactggaagacgcggtttaacataatcgatgggatttgcagaggtcttatgtaccttcacagagattcaaggctgaagatcatacacagagatctaaaagcaagcaatattttgttagatgagaatctaaacccgaagatatccgactttgggctggctaggattttccaggggaatgaggatgaagtaagcaccgtaagagtggttggaacatacggttatatggcacccgaatatgcaatgggagggttgttctcagagaaatctgacgttttcagcttaggagtcatactcttagagattgtgagtggaagaagaaactcaagcttttacaatgatgggcagaatccaaatctttcagcttatgcatggaaactctggaacaccggggaagatattgctcttgtggatccggtcatctttgaagagtgttttgaaaatgaaatacgcagatgtgtgcacgtaggactattgtgtgtacaagatcacgcaaatgataggccgagcgttgcaacggtgatttggatgctaagtagcgagaactcaaaccttccagagccaaagcaacctgcatttatacctagaaggggcacttcagaagttgaatcctcgggacaaagcgacccaagagcatcgatcaacaatgtgagcctcacaaaaataacaggacgttagctctgtaagtgagataaacctactgctaaagaattttgatgaaaaaatgtttaagttgtatatctgtatgtaagagtaatctataggttacgaactaaaattcagaatctggtcatgttcttgtatgaagtcacataaatatagaacatgttttattg

SEQ ID NO: 47542 - protein, 442 aa, Arabidopsis thaliana
  peptide (1)..(442): Ceres Seq. ID no. 12602183
MGCLLILLLTLICFSLRLCLATDVITFSSEFRDSETVVSNHSTFRFGFFSPVNSTGRYAGIWFNNIPVQTVVWVANSNSPINDSSGMVSISKEGNLVVMDGRGQVHWSTNVLVPVAANTFYARLLNTGNLVLLGTTNTGDEILWESFEHPQNIYLPTMSLATDTKTGRSLKLRSWKSPFDPSPGRYSAGLIPLPFPELVVWKDDLLMWRSGPWNGQYFIGLPNMDYRINLFELTLSSDNRGSVSMSYAGNTLLYHFLLDSEGSVFQRDWNVAIQEWKTWLKVPSTKCDTYATCGQFASCRFNPGSTPPCMCIRGFKPQSYAEWNNGNWTQGCVRKAPLQCESRDNNDGSRKSDGFVRVQKMKVPHNPQRSGANEQDCPESCLKNCSCTAYSFDRGIGCLLWSGNLMDMQEFSGTGVVFYIRLADSEFSKCSINLIFPSNLVY

SEQ ID NO: 47543 - protein, 356 aa, Arabidopsis thaliana
  peptide (1)..(356): Ceres Seq. ID no. 12602184
MVSISKEGNLVVMDGRGQVHWSTNVLVPVAANTFYARLLNTGNLVLLGTTNTGDEILWESFEHPQNIYLPTMSLATDTKTGRSLKLRSWKSPFDPSPGRYSAGLIPLPFPELVVWKDDLLMWRSGPWNGQYFIGLPNMDYRINLFELTLSSDNRGSVSMSYAGNTLLYHFLLDSEGSVFQRDWNVAIQEWKTWLKVPSTKCDTYATCGQFASCRFNPGSTPPCMCIRGFKPQSYAEWNNGNWTQGCVRKAPLQCESRDNNDGSRKSDGFVRVQKMKVPHNPQRSGANEQDCPESCLKNCSCTAYSFDRGIGCLLWSGNLMDMQEFSGTGVVFYIRLADSEFSKCSINLIFPSNLVY

SEQ ID NO: 47544 - protein, 355 aa, Arabidopsis thaliana
  peptide (1)..(355): Ceres Seq. ID no. 12602185
MEALSSNDVGAILVNQYKLKELPLFEFQVLAVATNNFSITNKLGQGGFGAVYKGRLQEGLDIAVKRLSRTSGQGVEEFVNEVVVISKLQHRNLVRLLGFCIEGEERMLVYEFMPENCLDAYLFDPVKQRLLDWKTRFNIIDGICRGLMYLHRDSRLKIIHRDLKASNILLDENLNPKISDFGLARIFQGNEDEVSTVRVVGTYGYMAPEYAMGGLFSEKSDVFSLGVILLEIVSGRRNSSFYNDGQNPNLSAYAWKLWNTGEDIALVDPVIFEECFENEIRRCVHVGLLCVQDHANDRPSVATVIWMLSSENSNLPEPKQPAFIPRRGTSEVESSGQSDPRASINNVSLTKITGR

SEQ ID NO: 47545 - DNA, 1138 bp, Arabidopsis thaliana
  misc_feature (1)..(1138): Ceres Seq. ID no. 13588057
  misc_feature (1)..(1138): Ortholog of  Ceres SEQ ID NO 13597389 as cited in SEQ ID NO 63426
  misc_feature (1)..(1138): Ortholog of  Ceres SEQ ID NO 13595998 as cited in SEQ ID NO 68161
  misc_feature (1)..(1138): Ortholog of  Ceres SEQ ID NO 15180463 as cited in SEQ ID NO 0
gaccaaagtttctccaatggctactctctttctctactctaacacattttccttcttctttattacactcgtgtcgttagctcttctaattctccggcaaccctctagggcggcgagttgtacagctcggccggtgatttttaactttggagattctaattcagatacaggaggacttgttgctggacttggttaccccattggcttcccaaatggacgcttatttttccggcgatctaccggtcgtttgtccgacggacgtcttctcatcgatttcctatgtcagagtttgaatacaagtcttttgaggccatacttagattcattgggtagaacaaggtttcaaaatggtgcaaattttgcaattgctggatcctcaactcttcccaaaaacgtccctttctcgcttaacattcaggtcaagcagttcagccatttcaaatcccgatcactcgagctcgcttctagttcaaattcattaaagggcatgttcataagcaacaatggattcaaaaacgcgttgtacatgatcgatattggacagaacgacattgcgcgttcattcgctagaggcaactcgtattctcagacggttaagttgattccacaaattattacggaaataaaaagcagcataaagagattgtatgatgaaggaggaaggagattctggattcacaacactggtccattgggttgtctacctcaaaaactttctatggttaagagcaaagatctcgaccagcacggttgcttagtcagttacaactcggcagcaactctgtttaaccaaggattggatcatatgtgtgaggagctgaggaccgaactacgagatgccaccataatctatattgacatatacgctatcaaatacagtcttattgcaaactccaaccaatacggttttaagagtccgttgatggcgtgttgtggatacggagggactccatacaactacaatgtgaagataacatgtgggcacaaaggctctaatgtatgtgaggaagggtcgcgtttcataagctgggatgggattcattacaccgagacagctaatgccattgtagccatgaaagttctttcaatgcattactctaagccaccaactccgttccatttcttctgccgtcgctaa

SEQ ID NO: 47546 - protein, 378 aa, Arabidopsis thaliana
  peptide (1)..(378): Ceres Seq. ID no. 13588058
TKVSPMATLFLYSNTFSFFFITLVSLALLILRQPSRAASCTARPVIFNFGDSNSDTGGLVAGLGYPIGFPNGRLFFRRSTGRLSDGRLLIDFLCQSLNTSLLRPYLDSLGRTRFQNGANFAIAGSSTLPKNVPFSLNIQVKQFSHFKSRSLELASSSNSLKGMFISNNGFKNALYMIDIGQNDIARSFARGNSYSQTVKLIPQIITEIKSSIKRLYDEGGRRFWIHNTGPLGCLPQKLSMVKSKDLDQHGCLVSYNSAATLFNQGLDHMCEELRTELRDATIIYIDIYAIKYSLIANSNQYGFKSPLMACCGYGGTPYNYNVKITCGHKGSNVCEEGSRFISWDGIHYTETANAIVAMKVLSMHYSKPPTPFHFFCRR

SEQ ID NO: 47547 - protein, 373 aa, Arabidopsis thaliana
  peptide (1)..(373): Ceres Seq. ID no. 13588059
MATLFLYSNTFSFFFITLVSLALLILRQPSRAASCTARPVIFNFGDSNSDTGGLVAGLGYPIGFPNGRLFFRRSTGRLSDGRLLIDFLCQSLNTSLLRPYLDSLGRTRFQNGANFAIAGSSTLPKNVPFSLNIQVKQFSHFKSRSLELASSSNSLKGMFISNNGFKNALYMIDIGQNDIARSFARGNSYSQTVKLIPQIITEIKSSIKRLYDEGGRRFWIHNTGPLGCLPQKLSMVKSKDLDQHGCLVSYNSAATLFNQGLDHMCEELRTELRDATIIYIDIYAIKYSLIANSNQYGFKSPLMACCGYGGTPYNYNVKITCGHKGSNVCEEGSRFISWDGIHYTETANAIVAMKVLSMHYSKPPTPFHFFCRR

SEQ ID NO: 47548 - protein, 216 aa, Arabidopsis thaliana
  peptide (1)..(216): Ceres Seq. ID no. 13588060
MFISNNGFKNALYMIDIGQNDIARSFARGNSYSQTVKLIPQIITEIKSSIKRLYDEGGRRFWIHNTGPLGCLPQKLSMVKSKDLDQHGCLVSYNSAATLFNQGLDHMCEELRTELRDATIIYIDIYAIKYSLIANSNQYGFKSPLMACCGYGGTPYNYNVKITCGHKGSNVCEEGSRFISWDGIHYTETANAIVAMKVLSMHYSKPPTPFHFFCRR

SEQ ID NO: 47549 - DNA, 1613 bp, Arabidopsis thaliana
  misc_feature (1)..(1613): Ceres Seq. ID no. 13647830
  misc_feature (1)..(1613): Ortholog of  Ceres SEQ ID NO 14314567 as cited in SEQ ID NO 52335
  misc_feature (1)..(1613): Ortholog of  Ceres SEQ ID NO 14315985 as cited in SEQ ID NO 57720
ggaaattaagattcattcctccatggaagaagctctgtttttattctctttagcttagcttagcttctactgatctgtttttgctacaaaatcccatctttttctttaaaactctttatctctgaatcttgagtttcttgtagaagaagaagcaattttgaatctttcgtaatcataaagattcgtggaggatctctactgatttgtcggaatctctcactacagaatcacttgatcttatgtccggatggaggagagagaaggaaccaacatcaacaacaacatcactagcagtttcggcttgaagcagcaacatgaagctgctgcttctgatggtggttactcaatggacccaccaccaagacccgaaaaccctaacccgtttttagtcccacccactactgtccccgcggccgccaccgtagcagcagctgttactgagaatgcggctactccgtttagcttaacaatgccgacggagaacacttcagctgagcagctgwaaaagaagagaggtaggccgagaaagtataatcccgatgggactcttgccgtgactttatcgccgatgccaatctcgtcctctgttccgttgacgtcggagtttcctccaaggaaacgaggaagaggacgtggcaagtctaatcgatggctcaagaagtctcaaatgttccaattcgatagaagtcctgttgataccaatttggcaggtgtaggaactgctgattttgttggtgccaactttacacctcatgtactgatcgtcaacgccggagaggatgtgacgatgaagataatgacattctctcaacaaggatctcgtgctatctgcatcctttcagctaatggtcccatctccaatgttacgcttcgtcaatctatgacatccggtggtactctaacttatgagggtcgttttgagattctctctttgacgggttcgtttatgcaaaatgactctggaggaactcgaagtagagctggtggtatgagtgtttgccttgcaggaccagatggtcgtgtctttggtggaggactcgctggtctctttcttactgctggtcctgtccaggtaatggtagggacttttatagctggtcaagagcagtcacagctggagctagcaaaagaaagacggctaagatttggggctcaaccatcttctatctcctttaacatatccgcagaagaacggaaggcgagattcgagaggcttaacaagtctgttgctattcctgcaccaaccacttcatacacgcatgtaaacacaacaaatgcggttcacagttactatacaaactcggttaaccatgtcaaggatcccttctcgtctatcccagtaggaggaggaggaggtggagaggtaggagaagaagagggtgaagaagatgacgatgaattagaaggtgaagacgaagaattcggaggcgatagccaatctgacaacgagattccgagctgatgatgatcatycggtttaaacacawtaaagttggmacgggakkkgkkaaaggtttgatggatttcagattttggttgattgtttttattaacacagaatgtttagaagctgctatctttaggttcccatcctcttatgattgttgtagtat

SEQ ID NO: 47550 - protein, 404 aa, Arabidopsis thaliana
  peptide (1)..(404): Ceres Seq. ID no. 15220516
  misc_feature (86)..(86): Xaa is any aa, unknown or other
MEEREGTNINNNITSSFGLKQQHEAAASDGGYSMDPPPRPENPNPFLVPPTTVPAAATVAAAVTENAATPFSLTMPTENTSAEQLXKKRGRPRKYNPDGTLAVTLSPMPISSSVPLTSEFPPRKRGRGRGKSNRWLKKSQMFQFDRSPVDTNLAGVGTADFVGANFTPHVLIVNAGEDVTMKIMTFSQQGSRAICILSANGPISNVTLRQSMTSGGTLTYEGRFEILSLTGSFMQNDSGGTRSRAGGMSVCLAGPDGRVFGGGLAGLFLTAGPVQVMVGTFIAGQEQSQLELAKERRLRFGAQPSSISFNISAEERKARFERLNKSVAIPAPTTSYTHVNTTNAVHSYYTNSVNHVKDPFSSIPVGGGGGGEVGEEEGEEDDDELEGEDEEFGGDSQSDNEIPS

SEQ ID NO: 47551 - protein, 371 aa, Arabidopsis thaliana
  peptide (1)..(371): Ceres Seq. ID no. 15220517
  misc_feature (53)..(53): Xaa is any aa, unknown or other
MDPPPRPENPNPFLVPPTTVPAAATVAAAVTENAATPFSLTMPTENTSAEQLXKKRGRPRKYNPDGTLAVTLSPMPISSSVPLTSEFPPRKRGRGRGKSNRWLKKSQMFQFDRSPVDTNLAGVGTADFVGANFTPHVLIVNAGEDVTMKIMTFSQQGSRAICILSANGPISNVTLRQSMTSGGTLTYEGRFEILSLTGSFMQNDSGGTRSRAGGMSVCLAGPDGRVFGGGLAGLFLTAGPVQVMVGTFIAGQEQSQLELAKERRLRFGAQPSSISFNISAEERKARFERLNKSVAIPAPTTSYTHVNTTNAVHSYYTNSVNHVKDPFSSIPVGGGGGGEVGEEEGEEDDDELEGEDEEFGGDSQSDNEIPS

SEQ ID NO: 47552 - protein, 330 aa, Arabidopsis thaliana
  peptide (1)..(330): Ceres Seq. ID no. 15220518
  misc_feature (12)..(12): Xaa is any aa, unknown or other
MPTENTSAEQLXKKRGRPRKYNPDGTLAVTLSPMPISSSVPLTSEFPPRKRGRGRGKSNRWLKKSQMFQFDRSPVDTNLAGVGTADFVGANFTPHVLIVNAGEDVTMKIMTFSQQGSRAICILSANGPISNVTLRQSMTSGGTLTYEGRFEILSLTGSFMQNDSGGTRSRAGGMSVCLAGPDGRVFGGGLAGLFLTAGPVQVMVGTFIAGQEQSQLELAKERRLRFGAQPSSISFNISAEERKARFERLNKSVAIPAPTTSYTHVNTTNAVHSYYTNSVNHVKDPFSSIPVGGGGGGEVGEEEGEEDDDELEGEDEEFGGDSQSDNEIPS

SEQ ID NO: 47553 - DNA, 2082 bp, Arabidopsis thaliana
  misc_feature (1)..(2082): Ceres Seq. ID no. 13588352
  misc_feature (1)..(2082): Ortholog of  Ceres SEQ ID NO 15171224 as cited in SEQ ID NO 52348
atggcgagtactagtagtggtggtggtggtggtggtgataagaagaagaagaaaggtttctctgtaaaccctaaagattataaacttatggaagaagttggatatggtgctagtgctgttgttcatcgtgctatttatcttcctactaatgaagttgttgctatcaagtctttggatctcgatcgctgcaatagtaatctggatgatataaggagggaggctcagactatgactttgatagaccatccgaatgttataaagtcgttttgttcgtttgctgttgatcatcatctatgggtcgttatgccatttatggctcagggttcgtgtttgcatctaatgaaagcagcgtatccagatggatttgaagaggcggctatatgttctatgctgaaagaaacacttaaagctcttgattatcttcatagacaagggcatatccatcgagatgttaaggctggaaacatacttcttgatgacactggcgagattaagttaggtgattttggtgtctctgcatgtttgtttgacaatggcgataggcaacgtgcaagaaatacatttgttggtactccatgctggatggcaccggaagtcttgcagccagggagtggatacaattcaaaggctgatatatggtcttttggaataacggcgctggagttggctcacggtcatgcacctttctcaaaatatccccctatgaaggtactcttaatgactatccaaaatgcaccacctggccttgattatgaccgtgataagaagttttcaaagaagatgtccagctgcgctcagtcctttaaagaattggtagcattgtgtctggtgaaagatcaaacaaaaaggccaactgctgaaaaattgttgaaacactcatttttcaagaatgtgaagcctccagagatctgtgtaaaaaaattatttgtcgatttaccacctctttggactcgcgtaaaagctcttcagagtgaataccaaagaggagtaagtgcttggaacttcaatatcgaagatttgaaagaacaagcatctttgctagatgatgatgacattctaacagagagtagggaagaagaagaatcttttggcgaacagttgcataataaggtgaatgacagagggcaagtatctggtagtcaattgctatctgaaaacatgaatggaaaggaaaaagcttcagatactgaggtggtagaacctatctgtgaagagaaatccactctcaattcaaccacttcttctgtggaacaaccggcatcaagttcagaacaagacgttccacaggccaagggtaagccagtgagactccagactcatagtggaccactttcatccggtgtcgtgttaatcaattcagactcagagaaggttcatggttatgaaaggtctgagagtgaacggcaactgaaatcatcagtccggagggcacccagctttagtggtcctttgaatcttccaaatcgtgcttcagcaaacagtctttcagctcctatcaaatcttctggaggatttcgtgattctatagatgacaagtcgaaggctaatgtggttcaaatcaaaggaagattttcagtaacatcagaaaacttggatcttgcaagggcatcccctttgagaaaatctgccagtgttgggaattggatacttgattctaaaatgccaacgggccaggccatcaaggagtcaagtagtcatctctcattcattatacctcagcttcaaaatctgttccagcaaaattcaatgcagcaggatcttattatgaatctagtgaataccttacaacaagctgctgaaacaacagatggttctcaaaatggaaagttgccgcctttgcctcgaggatctgacagcaatggaaccgttgtagaacttacagcagctgagcgagagaggttactacttaccaagataaccgagcttcgagctaggttgttcctcttcttcaatcaatcacacctttcttataggagatcaatgtggatgaaagagttgacggaagaacttgaagtagaaaaatcaaaacagacccaactgcagcagaaattgaaatcagtcaccggtcgcgagcaattgtaa

SEQ ID NO: 47554 - protein, 693 aa, Arabidopsis thaliana
  peptide (1)..(693): Ceres Seq. ID no. 13588353
MASTSSGGGGGGDKKKKKGFSVNPKDYKLMEEVGYGASAVVHRAIYLPTNEVVAIKSLDLDRCNSNLDDIRREAQTMTLIDHPNVIKSFCSFAVDHHLWVVMPFMAQGSCLHLMKAAYPDGFEEAAICSMLKETLKALDYLHRQGHIHRDVKAGNILLDDTGEIKLGDFGVSACLFDNGDRQRARNTFVGTPCWMAPEVLQPGSGYNSKADIWSFGITALELAHGHAPFSKYPPMKVLLMTIQNAPPGLDYDRDKKFSKKMSSCAQSFKELVALCLVKDQTKRPTAEKLLKHSFFKNVKPPEICVKKLFVDLPPLWTRVKALQSEYQRGVSAWNFNIEDLKEQASLLDDDDILTESREEEESFGEQLHNKVNDRGQVSGSQLLSENMNGKEKASDTEVVEPICEEKSTLNSTTSSVEQPASSSEQDVPQAKGKPVRLQTHSGPLSSGVVLINSDSEKVHGYERSESERQLKSSVRRAPSFSGPLNLPNRASANSLSAPIKSSGGFRDSIDDKSKANVVQIKGRFSVTSENLDLARASPLRKSASVGNWILDSKMPTGQAIKESSSHLSFIIPQLQNLFQQNSMQQDLIMNLVNTLQQAAETTDGSQNGKLPPLPRGSDSNGTVVELTAAERERLLLTKITELRARLFLFFNQSHLSYRRSMWMKELTEELEVEKSKQTQLQQKLKSVTGREQL

SEQ ID NO: 47555 - protein, 664 aa, Arabidopsis thaliana
  peptide (1)..(664): Ceres Seq. ID no. 13588354
MEEVGYGASAVVHRAIYLPTNEVVAIKSLDLDRCNSNLDDIRREAQTMTLIDHPNVIKSFCSFAVDHHLWVVMPFMAQGSCLHLMKAAYPDGFEEAAICSMLKETLKALDYLHRQGHIHRDVKAGNILLDDTGEIKLGDFGVSACLFDNGDRQRARNTFVGTPCWMAPEVLQPGSGYNSKADIWSFGITALELAHGHAPFSKYPPMKVLLMTIQNAPPGLDYDRDKKFSKKMSSCAQSFKELVALCLVKDQTKRPTAEKLLKHSFFKNVKPPEICVKKLFVDLPPLWTRVKALQSEYQRGVSAWNFNIEDLKEQASLLDDDDILTESREEEESFGEQLHNKVNDRGQVSGSQLLSENMNGKEKASDTEVVEPICEEKSTLNSTTSSVEQPASSSEQDVPQAKGKPVRLQTHSGPLSSGVVLINSDSEKVHGYERSESERQLKSSVRRAPSFSGPLNLPNRASANSLSAPIKSSGGFRDSIDDKSKANVVQIKGRFSVTSENLDLARASPLRKSASVGNWILDSKMPTGQAIKESSSHLSFIIPQLQNLFQQNSMQQDLIMNLVNTLQQAAETTDGSQNGKLPPLPRGSDSNGTVVELTAAERERLLLTKITELRARLFLFFNQSHLSYRRSMWMKELTEELEVEKSKQTQLQQKLKSVTGREQL

SEQ ID NO: 47556 - protein, 617 aa, Arabidopsis thaliana
  peptide (1)..(617): Ceres Seq. ID no. 13588355
MTLIDHPNVIKSFCSFAVDHHLWVVMPFMAQGSCLHLMKAAYPDGFEEAAICSMLKETLKALDYLHRQGHIHRDVKAGNILLDDTGEIKLGDFGVSACLFDNGDRQRARNTFVGTPCWMAPEVLQPGSGYNSKADIWSFGITALELAHGHAPFSKYPPMKVLLMTIQNAPPGLDYDRDKKFSKKMSSCAQSFKELVALCLVKDQTKRPTAEKLLKHSFFKNVKPPEICVKKLFVDLPPLWTRVKALQSEYQRGVSAWNFNIEDLKEQASLLDDDDILTESREEEESFGEQLHNKVNDRGQVSGSQLLSENMNGKEKASDTEVVEPICEEKSTLNSTTSSVEQPASSSEQDVPQAKGKPVRLQTHSGPLSSGVVLINSDSEKVHGYERSESERQLKSSVRRAPSFSGPLNLPNRASANSLSAPIKSSGGFRDSIDDKSKANVVQIKGRFSVTSENLDLARASPLRKSASVGNWILDSKMPTGQAIKESSSHLSFIIPQLQNLFQQNSMQQDLIMNLVNTLQQAAETTDGSQNGKLPPLPRGSDSNGTVVELTAAERERLLLTKITELRARLFLFFNQSHLSYRRSMWMKELTEELEVEKSKQTQLQQKLKSVTGREQL

SEQ ID NO: 47557 - DNA, 1176 bp, Arabidopsis thaliana
  misc_feature (1)..(1176): Ceres Seq. ID no. 13588445
  misc_feature (1)..(1176): Ortholog of  Ceres SEQ ID NO 13597831 as cited in SEQ ID NO 64617
attagcatgagaaatggcatccattgattctctccaattccattctctctgcaatctccagtcgtcgattggaagagccaagctccagaatccttcaagtttggttattttcagacggagacccgtaaatctgaattgggttcaattcgaaactaaaggaagtttcgtgtgtaaagcgattggtgattcctcgactccagatgaagatattcagaacactcaaagtgatgataatgttgttgttgttactgctacgactcagagtgacattccccatgattccgagtattcaatttcgaggtttcgaagtatggttaccacactccctcctgttgtcttcctgatgaagaagtgctcagtgaacagcatttggattggggtctgcatcacggctactgttttggtcgctgcgattagggcttatgtagtcagaaagtcaagagataatcagcgtgctggctctgttgctgatcttgtgagacgtggccagctgaggtctggtgatagaagaggcatctccaaatctcttaactacgaggacccattcaacaacccttttgtgaaacttgataaaggaagctcaacggtagagatgtgcgggaaagtttatcggctagctccagtcacacttacagagaaagaacaaactattcatcagaaaagaaggtcaagagcttaccaatggaagcgaccaacgatttttctcaaagaaggggactcgataccacctgatgttgatcccgatacagtcagatggatcccggccaatcatccgtttgccaccacagttagcgatatcgatcaagaccttgcccagaataatgtctaccagaagcaaggtgttcctttccggattcgagctgagcatgaagctatgcagaaaaagcttgaagctttacaaaatgaggagaaattgaacaatctgagtattgacagtcaaaatgccagagatttccagaggccatacaagttctcagcgaagctcgaaggcgagaatatccagaagaattctcaggagaatcatacaggcaattcatcctctgaggaaacgcacaagtcctgagacgtactaatctaattgtaaatacagttttccctcgagagtcatacttgcgttccaagaaactggagattttctttgtagtagatcacacttacctaaatctatgtttttct

SEQ ID NO: 47558 - protein, 349 aa, Arabidopsis thaliana
  peptide (1)..(349): Ceres Seq. ID no. 13588446
MASIDSLQFHSLCNLQSSIGRAKLQNPSSLVIFRRRPVNLNWVQFETKGSFVCKAIGDSSTPDEDIQNTQSDDNVVVVTATTQSDIPHDSEYSISRFRSMVTTLPPVVFLMKKCSVNSIWIGVCITATVLVAAIRAYVVRKSRDNQRAGSVADLVRRGQLRSGDRRGISKSLNYEDPFNNPFVKLDKGSSTVEMCGKVYRLAPVTLTEKEQTIHQKRRSRAYQWKRPTIFLKEGDSIPPDVDPDTVRWIPANHPFATTVSDIDQDLAQNNVYQKQGVPFRIRAEHEAMQKKLEALQNEEKLNNLSIDSQNARDFQRPYKFSAKLEGENIQKNSQENHTGNSSSEETHKS

SEQ ID NO: 47559 - protein, 250 aa, Arabidopsis thaliana
  peptide (1)..(250): Ceres Seq. ID no. 13588447
MVTTLPPVVFLMKKCSVNSIWIGVCITATVLVAAIRAYVVRKSRDNQRAGSVADLVRRGQLRSGDRRGISKSLNYEDPFNNPFVKLDKGSSTVEMCGKVYRLAPVTLTEKEQTIHQKRRSRAYQWKRPTIFLKEGDSIPPDVDPDTVRWIPANHPFATTVSDIDQDLAQNNVYQKQGVPFRIRAEHEAMQKKLEALQNEEKLNNLSIDSQNARDFQRPYKFSAKLEGENIQKNSQENHTGNSSSEETHKS

SEQ ID NO: 47560 - protein, 239 aa, Arabidopsis thaliana
  peptide (1)..(239): Ceres Seq. ID no. 13588448
MKKCSVNSIWIGVCITATVLVAAIRAYVVRKSRDNQRAGSVADLVRRGQLRSGDRRGISKSLNYEDPFNNPFVKLDKGSSTVEMCGKVYRLAPVTLTEKEQTIHQKRRSRAYQWKRPTIFLKEGDSIPPDVDPDTVRWIPANHPFATTVSDIDQDLAQNNVYQKQGVPFRIRAEHEAMQKKLEALQNEEKLNNLSIDSQNARDFQRPYKFSAKLEGENIQKNSQENHTGNSSSEETHKS

SEQ ID NO: 47561 - DNA, 1005 bp, Arabidopsis thaliana; identical to SEQ ID NO: 27241
  misc_feature (1)..(1005): Ceres Seq. ID no. 13592440
  misc_feature (1)..(1005): Ortholog of  Ceres SEQ ID NO 13638651 as cited in SEQ ID NO 52216
  misc_feature (1)..(1005): Ortholog of  Ceres SEQ ID NO 15171460 as cited in SEQ ID NO 58412

SEQ ID NO: 47562 - protein, 293 aa, Arabidopsis thaliana; identical to SEQ ID NO: 27242
  peptide (1)..(293): Ceres Seq. ID no. 13592441

SEQ ID NO: 47563 - protein, 272 aa, Arabidopsis thaliana; identical to SEQ ID NO: 27243
  peptide (1)..(272): Ceres Seq. ID no. 13592442

SEQ ID NO: 47564 - protein, 178 aa, Arabidopsis thaliana; identical to SEQ ID NO: 27244
  peptide (1)..(178): Ceres Seq. ID no. 13592443

SEQ ID NO: 47565 - DNA, 722 bp, Arabidopsis thaliana
  misc_feature (1)..(722): Ceres Seq. ID no. 12605661
  misc_feature (1)..(722): Ortholog of  Ceres SEQ ID NO 14305540 as cited in SEQ ID NO 60089
gtttcgttacttgctcagagaccttttcaaatccaaaacagaggaatataagagattaaggaaccattgtgacgatgcctaacttgctccacaccaatcaatctcacttcttcttcctccatcatccgccaatctacaccgtcagttcaaagacgcaggctttccacttcccgcaaccaatggcgccggtcaacctccgtacgaatctctccgtgcgcaggaccgtacggtgtatggcgaacccgaggagagttaagatggtggctaagcagataatgagagaactctccgacatgcttctaacagacacggttttacaacacgctgtcttacctgaagctgcacttggagctgaccgctacctctcttctctcaccaccattagcgatgttgaagtctctaatgatttgcaggtggttaaagtatatgtatccgtgtttggagatgatagagggaaagacgttgcaattgcggggttgaaatcgaaagctaagtacgttaggagtgagcttgggaagcgaatgaagttgagattgacgcctgaggtcaggtttattgaggatgaagccatggaaagaggaagcagggtaattgcaatactggacaaaataaaagctgagaaaggaagcggtgaagggaaaacagaaccatctgactcaacagaagatgatcaagattgggaagtggatgaccccgacgaagacataatctatgtaaagtaa

SEQ ID NO: 47566 - protein, 215 aa, Arabidopsis thaliana
  peptide (1)..(215): Ceres Seq. ID no. 12605662
MPNLLHTNQSHFFFLHHPPIYTVSSKTQAFHFPQPMAPVNLRTNLSVRRTVRCMANPRRVKMVAKQIMRELSDMLLTDTVLQHAVLPEAALGADRYLSSLTTISDVEVSNDLQVVKVYVSVFGDDRGKDVAIAGLKSKAKYVRSELGKRMKLRLTPEVRFIEDEAMERGSRVIAILDKIKAEKGSGEGKTEPSDSTEDDQDWEVDDPDEDIIYVK

SEQ ID NO: 47567 - protein, 180 aa, Arabidopsis thaliana
  peptide (1)..(180): Ceres Seq. ID no. 12605663
MAPVNLRTNLSVRRTVRCMANPRRVKMVAKQIMRELSDMLLTDTVLQHAVLPEAALGADRYLSSLTTISDVEVSNDLQVVKVYVSVFGDDRGKDVAIAGLKSKAKYVRSELGKRMKLRLTPEVRFIEDEAMERGSRVIAILDKIKAEKGSGEGKTEPSDSTEDDQDWEVDDPDEDIIYVK

SEQ ID NO: 47568 - protein, 162 aa, Arabidopsis thaliana
  peptide (1)..(162): Ceres Seq. ID no. 12605664
MANPRRVKMVAKQIMRELSDMLLTDTVLQHAVLPEAALGADRYLSSLTTISDVEVSNDLQVVKVYVSVFGDDRGKDVAIAGLKSKAKYVRSELGKRMKLRLTPEVRFIEDEAMERGSRVIAILDKIKAEKGSGEGKTEPSDSTEDDQDWEVDDPDEDIIYVK

SEQ ID NO: 47569 - DNA, 1710 bp, Arabidopsis thaliana; identical to SEQ ID NO: 45690
  misc_feature (1)..(1710): Ceres Seq. ID no. 13576229
  misc_feature (1)..(1710): Ortholog of  Ceres SEQ ID NO 13594213 as cited in SEQ ID NO 57038
  misc_feature (1)..(1710): Ortholog of  Ceres SEQ ID NO 13654989 as cited in SEQ ID NO 63117
  misc_feature (1)..(1710): Ortholog of  Ceres SEQ ID NO 13584744 as cited in SEQ ID NO 69137

SEQ ID NO: 47570 - protein, 410 aa, Arabidopsis thaliana; identical to SEQ ID NO: 45691
  peptide (1)..(410): Ceres Seq. ID no. 13576230

SEQ ID NO: 47571 - protein, 259 aa, Arabidopsis thaliana; identical to SEQ ID NO: 45692
  peptide (1)..(259): Ceres Seq. ID no. 13576231

SEQ ID NO: 47572 - protein, 236 aa, Arabidopsis thaliana; identical to SEQ ID NO: 45693
  peptide (1)..(236): Ceres Seq. ID no. 13576232

SEQ ID NO: 47573 - DNA, 808 bp, Arabidopsis thaliana; identical to SEQ ID NO: 22027
  misc_feature (1)..(808): Ceres Seq. ID no. 13592444
  misc_feature (1)..(808): Ortholog of  Ceres SEQ ID NO 12610334 as cited in SEQ ID NO 56235
  misc_feature (1)..(808): Ortholog of  Ceres SEQ ID NO 13654825 as cited in SEQ ID NO 62409

SEQ ID NO: 47574 - protein, 187 aa, Arabidopsis thaliana; identical to SEQ ID NO: 22028
  peptide (1)..(187): Ceres Seq. ID no. 15221104

SEQ ID NO: 47575 - protein, 93 aa, Arabidopsis thaliana; identical to SEQ ID NO: 22029
  peptide (1)..(93): Ceres Seq. ID no. 15221105

SEQ ID NO: 47576 - DNA, 1080 bp, Arabidopsis thaliana
  misc_feature (1)..(1080): Ceres Seq. ID no. 12591749
  misc_feature (1)..(1080): Ortholog of  Ceres SEQ ID NO 13654989 as cited in SEQ ID NO 63117
  misc_feature (1)..(1080): Ortholog of  Ceres SEQ ID NO 13584744 as cited in SEQ ID NO 69137
atggattaccaaatctcactaatcctagccaccagcataagctccatcttcctcttgcttatcgtcttcaccgtcgttatgatcgtatgtcgccgtcgtcctccaatccaaaaccatcctcgccggaatcgtaacttccccgaccccgatcccgatctaaacacggaaacagtaaccgaaagcttcgatccatcaatctgtgaaatatccatggcggaactcactatagcaactaaaaacttctcatcggatcttatcgtcggcgacggaagtttcggtctcgtttatcgagctcagctctcaaacggcgtcgtagtcgccgttaaaaagctcgatcacgacgctttacaaggattccgagaattcgcagccgaaatggacactctaggtcgtctcaatcacccaaacatagttaggatcctcggttattgcatctcgggatcagatcggattcttatctacgagttcttagagaaaagtagtcttgactattggttacacgagactgacgaagagaacagtccattgacttggtcaacgcgcgtgaatatcacgcgcgatgtggccaagggtttagcttatctgcatggtttaccgaaaccaattatacatagagatatcaaatcgagtaatgtgctgttggattcggatttcgtggcgcatattgcggatttcggattggcgcgaaggatcgatgcgtcgaggtcgcatgtgtcgacgcaagtggcggggacgatggggtacatgccaccggagtattgggaagggaataccgcggcgacggttaaagctgatgtttatagttttggtgtattgatgttggaattggcgacgcggagacggccgaatttaacggttgttgtggatgagaaggaagttgggttggctcaatgggctgtgatcatggtggagcaaaatcggtgttatgaaatgttggattttggaggtgtttgtggtagtgagaagggagtggaagagtattttaggattgcttgtctttgtattaaagagtcgactagagaaaggcctactatggttcaagtggtggagttattggaggagttatgtcgatttatgtag

SEQ ID NO: 47577 - protein, 359 aa, Arabidopsis thaliana
  peptide (1)..(359): Ceres Seq. ID no. 12591750
MDYQISLILATSISSIFLLLIVFTVVMIVCRRRPPIQNHPRRNRNFPDPDPDLNTETVTESFDPSICEISMAELTIATKNFSSDLIVGDGSFGLVYRAQLSNGVVVAVKKLDHDALQGFREFAAEMDTLGRLNHPNIVRILGYCISGSDRILIYEFLEKSSLDYWLHETDEENSPLTWSTRVNITRDVAKGLAYLHGLPKPIIHRDIKSSNVLLDSDFVAHIADFGLARRIDASRSHVSTQVAGTMGYMPPEYWEGNTAATVKADVYSFGVLMLELATRRRPNLTVVVDEKEVGLAQWAVIMVEQNRCYEMLDFGGVCGSEKGVEEYFRIACLCIKESTRERPTMVQVVELLEELCRFM

SEQ ID NO: 47578 - protein, 333 aa, Arabidopsis thaliana
  peptide (1)..(333): Ceres Seq. ID no. 12591751
MIVCRRRPPIQNHPRRNRNFPDPDPDLNTETVTESFDPSICEISMAELTIATKNFSSDLIVGDGSFGLVYRAQLSNGVVVAVKKLDHDALQGFREFAAEMDTLGRLNHPNIVRILGYCISGSDRILIYEFLEKSSLDYWLHETDEENSPLTWSTRVNITRDVAKGLAYLHGLPKPIIHRDIKSSNVLLDSDFVAHIADFGLARRIDASRSHVSTQVAGTMGYMPPEYWEGNTAATVKADVYSFGVLMLELATRRRPNLTVVVDEKEVGLAQWAVIMVEQNRCYEMLDFGGVCGSEKGVEEYFRIACLCIKESTRERPTMVQVVELLEELCRFM

SEQ ID NO: 47579 - protein, 289 aa, Arabidopsis thaliana
  peptide (1)..(289): Ceres Seq. ID no. 12591752
MAELTIATKNFSSDLIVGDGSFGLVYRAQLSNGVVVAVKKLDHDALQGFREFAAEMDTLGRLNHPNIVRILGYCISGSDRILIYEFLEKSSLDYWLHETDEENSPLTWSTRVNITRDVAKGLAYLHGLPKPIIHRDIKSSNVLLDSDFVAHIADFGLARRIDASRSHVSTQVAGTMGYMPPEYWEGNTAATVKADVYSFGVLMLELATRRRPNLTVVVDEKEVGLAQWAVIMVEQNRCYEMLDFGGVCGSEKGVEEYFRIACLCIKESTRERPTMVQVVELLEELCRFM

SEQ ID NO: 47580 - DNA, 2921 bp, Arabidopsis thaliana
  misc_feature (1)..(2921): Ceres Seq. ID no. 12591927
  misc_feature (1)..(2921): Ortholog of  Ceres SEQ ID NO 13655523 as cited in SEQ ID NO 63809
atgagatctcttctctttgtactatcactcatttgcttttgctctcaaacagcactttcatggaagaaggaagagtttcgcagctgtgaccaaactccattttgtaaacgcgctcgatctcgtactcccggcgcgtgttctctaattgtcggcgatgtttccatcactgatggagatctcgtagcgaagcttctaccgaaagcgcctaatcaaggcgatggggatcagatcaagccgttgattctttctctctcagtttacaaggatgggatcgtgcggcttaaaatcgatgaggaccattcgttgaacccgccgaagaagaggttccaagttcctgatgtggtagtgtctgagtttgaggagaagaagatctggctgcagaaagtagcgacggagacgatctctggagacactagtccgtcttcagtagtttatgtatccgatggttacgaggcggtggtgcgacacgatccgtttgaggtgtatgtgcgtgagaaatcaggtgatcgccgtcgcgttgtgtcattgaattctcatggattatttgattttgagcagttggggaggaaaactgaaggagataactgggaagagaaatttaggactcatacagattctagaccatctggtcctcaatctattagtttcgatgtttcgttttatgattccagtttcgtttatggaattcctgaacacgccactagcttcgcgttgaagcctaccaagggtcctggagttgaggaatctgaaccctacaggctttttaatctagatgtgtttgaatacgatcatgaatcaccgtttgggctttacgggtcgattccgttcatggtttcgcatgggaagtctggtaaaacttcaggatttttctggttgaatgctgcggaaatgcagattgatgtgttggctaatggttgggatgcagagagtggtatttctttgccttctagtcacagtaggatcgacacattctggatgagcgaggcagggattgtggatacattctttttcgttgggcctgagccaaaggatgttgtaaagcagtatgcaagtgtgacaggtacttcagccatgcctcagttgtttgccactggttatcatcaatgtaggtggaactacaaagatgaggaggatgtggcacaggtggactcgaaattcgatgaacacgatattccttatgatgttctctggcttgacattgagcatacagatgggaagagatactttacatgggatagtgtgttgtttcctcatccagaggagatgcaaaagaaattggctgcaaagggtaggaagatggtgaccattgtggatcctcatatcaagagggatgactcatacttcttacacaaagaggctactcagatgggatactatgttaaggattcatctggaaaagactttgatggttggtgctggcctggttcatcatcttacattgatatgttgagcccagagattagaaaatggtggggtgggaggttctcgtataagaactatgttggttcaactccatcattgtacacctggaatgacatgaatgagccttctgtattcaatggtcccgaggttactatgccaagagatgcattacatgttgggggtgttgaacacagagaagttcataacgcatatggatattacttccacatggcgacttccgatggacttgttatgcgtgaagaaggaaaggataggccttttgtattgtcaagagcaatctttcccggcactcaaagatacggagcaatttggactggagataacacagccgaatgggaacaccttagagtctccattccaatgatattgacacttggtcttactggaattacattctctggagctgatattggtgggttttttggaaatcctgaaccagaacttctagttaggtggtaccaagtgggtgcttactatccatttttcaggggtcatgctcatcacgataccaaaagacgagagccttggttgtttggtgaacggaacacagaactcatgagagatgccatacacactcgttacacactgctcccatacttctacacgttgttcagagaagcaaacgttacgggtgttcctgttgtacgcccattatggatggaattcccgcaagatgaagctacttttagcaacgatgaagccttcatggtcggtagtggtctactggttcaaggagtttacaccaagggaacaacgcaagcttccgtgtatttgcctggcaaagaatcatggtatgacttgagaaacggtaagacttacgttggaggcaagactcacaagatggatgctccagaggagagtattcctgcgtttcaaaaggcaggaaccatcatcccaaggaaggaccggtttaggcgaagttcctctcaaatggacaatgatccttatactttggtggtagctttgaacagttctcaagaagcagaaggtgaactctacatcgatgacggcaaaagctttgaattcagacgaggctcttacatccatcgtcgcttcgtcttctcaaagggtgttcttacatcaacgaacttagctcctccagaagctcgtctctcttcccaatgcttgatcgacagaattatcctcttgggacacagctcaggtccaaaatctgcgttggtggaaccgttgaatcaaaaggcagagattgagatgggacctctgcgaatgggtgggcttgtagcttcctcgggtacaaaggtgttgactatccgcaaaccgggtgttcgagtggaccaagactggaccgtaaagattctgtgattgaacggtttgaaccagtttcactcatggccgttagagtggccgaaatctgcttttccggcgacggaatatcacactttttaatatatgtttggagatttagacttaaatagttgtaagagctaacagtttgaaagtcactttgcattgttgtt

SEQ ID NO: 47581 - protein, 921 aa, Arabidopsis thaliana
  peptide (1)..(921): Ceres Seq. ID no. 12591928
MRSLLFVLSLICFCSQTALSWKKEEFRSCDQTPFCKRARSRTPGACSLIVGDVSITDGDLVAKLLPKAPNQGDGDQIKPLILSLSVYKDGIVRLKIDEDHSLNPPKKRFQVPDVVVSEFEEKKIWLQKVATETISGDTSPSSVVYVSDGYEAVVRHDPFEVYVREKSGDRRRVVSLNSHGLFDFEQLGRKTEGDNWEEKFRTHTDSRPSGPQSISFDVSFYDSSFVYGIPEHATSFALKPTKGPGVEESEPYRLFNLDVFEYDHESPFGLYGSIPFMVSHGKSGKTSGFFWLNAAEMQIDVLANGWDAESGISLPSSHSRIDTFWMSEAGIVDTFFFVGPEPKDVVKQYASVTGTSAMPQLFATGYHQCRWNYKDEEDVAQVDSKFDEHDIPYDVLWLDIEHTDGKRYFTWDSVLFPHPEEMQKKLAAKGRKMVTIVDPHIKRDDSYFLHKEATQMGYYVKDSSGKDFDGWCWPGSSSYIDMLSPEIRKWWGGRFSYKNYVGSTPSLYTWNDMNEPSVFNGPEVTMPRDALHVGGVEHREVHNAYGYYFHMATSDGLVMREEGKDRPFVLSRAIFPGTQRYGAIWTGDNTAEWEHLRVSIPMILTLGLTGITFSGADIGGFFGNPEPELLVRWYQVGAYYPFFRGHAHHDTKRREPWLFGERNTELMRDAIHTRYTLLPYFYTLFREANVTGVPVVRPLWMEFPQDEATFSNDEAFMVGSGLLVQGVYTKGTTQASVYLPGKESWYDLRNGKTYVGGKTHKMDAPEESIPAFQKAGTIIPRKDRFRRSSSQMDNDPYTLVVALNSSQEAEGELYIDDGKSFEFRRGSYIHRRFVFSKGVLTSTNLAPPEARLSSQCLIDRIILLGHSSGPKSALVEPLNQKAEIEMGPLRMGGLVASSGTKVLTIRKPGVRVDQDWTVKIL

SEQ ID NO: 47582 - protein, 645 aa, Arabidopsis thaliana
  peptide (1)..(645): Ceres Seq. ID no. 12591929
MVSHGKSGKTSGFFWLNAAEMQIDVLANGWDAESGISLPSSHSRIDTFWMSEAGIVDTFFFVGPEPKDVVKQYASVTGTSAMPQLFATGYHQCRWNYKDEEDVAQVDSKFDEHDIPYDVLWLDIEHTDGKRYFTWDSVLFPHPEEMQKKLAAKGRKMVTIVDPHIKRDDSYFLHKEATQMGYYVKDSSGKDFDGWCWPGSSSYIDMLSPEIRKWWGGRFSYKNYVGSTPSLYTWNDMNEPSVFNGPEVTMPRDALHVGGVEHREVHNAYGYYFHMATSDGLVMREEGKDRPFVLSRAIFPGTQRYGAIWTGDNTAEWEHLRVSIPMILTLGLTGITFSGADIGGFFGNPEPELLVRWYQVGAYYPFFRGHAHHDTKRREPWLFGERNTELMRDAIHTRYTLLPYFYTLFREANVTGVPVVRPLWMEFPQDEATFSNDEAFMVGSGLLVQGVYTKGTTQASVYLPGKESWYDLRNGKTYVGGKTHKMDAPEESIPAFQKAGTIIPRKDRFRRSSSQMDNDPYTLVVALNSSQEAEGELYIDDGKSFEFRRGSYIHRRFVFSKGVLTSTNLAPPEARLSSQCLIDRIILLGHSSGPKSALVEPLNQKAEIEMGPLRMGGLVASSGTKVLTIRKPGVRVDQDWTVKIL

SEQ ID NO: 47583 - protein, 625 aa, Arabidopsis thaliana
  peptide (1)..(625): Ceres Seq. ID no. 12591930
MQIDVLANGWDAESGISLPSSHSRIDTFWMSEAGIVDTFFFVGPEPKDVVKQYASVTGTSAMPQLFATGYHQCRWNYKDEEDVAQVDSKFDEHDIPYDVLWLDIEHTDGKRYFTWDSVLFPHPEEMQKKLAAKGRKMVTIVDPHIKRDDSYFLHKEATQMGYYVKDSSGKDFDGWCWPGSSSYIDMLSPEIRKWWGGRFSYKNYVGSTPSLYTWNDMNEPSVFNGPEVTMPRDALHVGGVEHREVHNAYGYYFHMATSDGLVMREEGKDRPFVLSRAIFPGTQRYGAIWTGDNTAEWEHLRVSIPMILTLGLTGITFSGADIGGFFGNPEPELLVRWYQVGAYYPFFRGHAHHDTKRREPWLFGERNTELMRDAIHTRYTLLPYFYTLFREANVTGVPVVRPLWMEFPQDEATFSNDEAFMVGSGLLVQGVYTKGTTQASVYLPGKESWYDLRNGKTYVGGKTHKMDAPEESIPAFQKAGTIIPRKDRFRRSSSQMDNDPYTLVVALNSSQEAEGELYIDDGKSFEFRRGSYIHRRFVFSKGVLTSTNLAPPEARLSSQCLIDRIILLGHSSGPKSALVEPLNQKAEIEMGPLRMGGLVASSGTKVLTIRKPGVRVDQDWTVKIL

SEQ ID NO: 47584 - DNA, 1596 bp, Arabidopsis thaliana
  misc_feature (1)..(1596): Ceres Seq. ID no. 13588360
  misc_feature (1)..(1596): Ortholog of  Ceres SEQ ID NO 13597325 as cited in SEQ ID NO 63935
ggtttgttttgtggctgacgataaaacagagcacaaaagaaaaaaaaatctagggtttgttttgagactaagaggaagagaaagaagaagaagagaaaattcgtacaattccgccattaaagcttcaacctttaatggcgacaacgactctttcttccttctctctttctcttcctcaacttctccataaacccacaaagcctcttcctttcctcttccttcttcctcgattcaatcggagatttcgaagtctcactatcacttcttcttctacaacttcttcaaacaatttcagtagtaattgtggcgatgatggcttctctcttgacgatttcactctccattctgattctcgatcacctaaaaaatgtgtcctttctgatcttatacaagagattgagccattagatgtgagtttgattcagaaggatgttccagttactactttggatgcaatgaaaagaacaatctcaggcatgttgggtcttcttccatctgataggtttcaggttcatattgagtcactttgggaacctttgtctaagcttttggtatcttcaatgatgactgggtatacattgaggaatgctgaatatcggctttttcttgaaaaaaaccttgatatgagtggtggaggcttggacagccacgcttcggaaaacactgaatatgatatggaagggacgtttcctgatgaagatcatgtttcatccaaaagggatagcagaactcagaacctttctgaaacgattgatgaagaaggtttgggcagagtatcctctgaagctcaagaatatatcttacgtttgcagtcacaattgtcttctgtgaaaaaggaattacaagaaatgagacgaaagaacgctgccctacaaatgcaacaatttgttggcgaagagaagaatgatttgttggactatttacgatctttgcaacctgagaaggtagctgagttgtcagaacctgcggctcctgaggtgaaagagactattcattctgttgttcacggtcttttggcaactctatcaccgaagatgcactctaagtttccagcatcagaagttccacctactgaaacggtgaaagcaaaaagtgatgaagattgtgctgaacttgtagagaacacttcgttgcagtttcagcctcttatctcactgactcgagactaccttgctcgtcttctcttctggtgcatgctattgggacattatctcagaggtttggaatatcgaatggaactgatggaggtcctgtctttgacatgcgatgccaatgggtctgagaacgtcgcttgaagctatctttatacatctcaacattgtcttacatgcgtatcagcggccttgacactcttaaaccaacaaagtgggcaagtgactaggagacaggccagcctttgagctttagctcttgcacatatatgcagctttgtgctggcctgaaaattcatgggcgaggtaaagtgtaacataagaaatcacttctactaaaattatttttcgttgcattatcgtgtgatggatctgcaaagcaataaagctaagtgtaattgtattcaggaatatactcgtttggtcattaagtatagtttgtcct

SEQ ID NO: 47585 - protein, 386 aa, Arabidopsis thaliana
  peptide (1)..(386): Ceres Seq. ID no. 13588361
MATTTLSSFSLSLPQLLHKPTKPLPFLFLLPRFNRRFRSLTITSSSTTSSNNFSSNCGDDGFSLDDFTLHSDSRSPKKCVLSDLIQEIEPLDVSLIQKDVPVTTLDAMKRTISGMLGLLPSDRFQVHIESLWEPLSKLLVSSMMTGYTLRNAEYRLFLEKNLDMSGGGLDSHASENTEYDMEGTFPDEDHVSSKRDSRTQNLSETIDEEGLGRVSSEAQEYILRLQSQLSSVKKELQEMRRKNAALQMQQFVGEEKNDLLDYLRSLQPEKVAELSEPAAPEVKETIHSVVHGLLATLSPKMHSKFPASEVPPTETVKAKSDEDCAELVENTSLQFQPLISLTRDYLARLLFWCMLLGHYLRGLEYRMELMEVLSLTCDANGSENVA

SEQ ID NO: 47586 - protein, 279 aa, Arabidopsis thaliana; identical to SEQ ID NO: 30593
  peptide (1)..(279): Ceres Seq. ID no. 13588362

SEQ ID NO: 47587 - protein, 272 aa, Arabidopsis thaliana; identical to SEQ ID NO: 30594
  peptide (1)..(272): Ceres Seq. ID no. 13588363

SEQ ID NO: 47588 - DNA, 785 bp, Arabidopsis thaliana
  misc_feature (1)..(785): Ceres Seq. ID no. 14304327
  misc_feature (1)..(785): Ortholog of  Ceres SEQ ID NO 13581971 as cited in SEQ ID NO 56006
  misc_feature (1)..(785): Ortholog of  Ceres SEQ ID NO 15175208 as cited in SEQ ID NO 57966
ggcttagatatcatcgaacttgctccaactgctctatctcaggatctctctcagacacagtttcttccatccatggcgtctctttcttctacctctctctctctccccaagaattctcaccaactccatccttcatctggtttttctctgaatccaaatgctcgttgtgtcagtgtttcatttggactgaatcactccaacaaacttcatatttctgctcctagaaccaaaaggatcctaaccattcaatctgcatacagagatgatgatggttcaggcagcacaggcctattcgtcggagggtttattttgggcggacttatagtcggtgccctcggatgtgtatatgcaccacagatcagcaaggctatagctggagcagaccgaaaggatctcatgaggaagttgcctaaattcatatatgacgaggaaaaagctttggagaaaacacgtaaggtactagctgagaaaattgctcagcttaactctgctatcgacgatgtctcctctcagctcaaatcagaagatactccgaatggtgcagctctaagcaccgatgaaatcgaggctacagcctgaaatcatctgtttttaggatttgaaattgaatcatgggagattacttactatgatcccaataattgttttcctttctgtgtaatgttgtacaacttttcgtctactatcttcaaatgactgctttcttccttctttttttttttctcgaaatcgcggtgttgaaggatatatcacagttatatgcgaaaccagacgttatgaagact

SEQ ID NO: 47589 - protein, 192 aa, Arabidopsis thaliana
  peptide (1)..(192): Ceres Seq. ID no. 14304328
GLDIIELAPTALSQDLSQTQFLPSMASLSSTSLSLPKNSHQLHPSSGFSLNPNARCVSVSFGLNHSNKLHISAPRTKRILTIQSAYRDDDGSGSTGLFVGGFILGGLIVGALGCVYAPQISKAIAGADRKDLMRKLPKFIYDEEKALEKTRKVLAEKIAQLNSAIDDVSSQLKSEDTPNGAALSTDEIEATA

SEQ ID NO: 47590 - protein, 168 aa, Arabidopsis thaliana
  peptide (1)..(168): Ceres Seq. ID no. 14304329
MASLSSTSLSLPKNSHQLHPSSGFSLNPNARCVSVSFGLNHSNKLHISAPRTKRILTIQSAYRDDDGSGSTGLFVGGFILGGLIVGALGCVYAPQISKAIAGADRKDLMRKLPKFIYDEEKALEKTRKVLAEKIAQLNSAIDDVSSQLKSEDTPNGAALSTDEIEATA

SEQ ID NO: 47591 - DNA, 2237 bp, Arabidopsis thaliana
  misc_feature (1)..(2237): Ceres Seq. ID no. 12602079
  misc_feature (1)..(2237): Ortholog of  Ceres SEQ ID NO 13659971 as cited in SEQ ID NO 67565
aacgaatccaattacccaaccagaaacagcaacacatatagagatatatactattaaacaataacataacaaagaaaccattttttctcttttgttattgacttaaacaaaaactatcaacgaataattatccttttttgagtttttcccatttcttcttcgtctccatttcatcgtcttctcgctgttctgctatattccgtttcgttggatgaggagaagaagaaagtgaaaaaagttgtgaaatagagagagtttgtttcatgggcaattcatgtcgtggttcttttaaggacaaaatctacgagggcaatcatagtaggcccgaggagaattccaaatccaccaccactactgtttcctctgttcattctcctactacagaccaagatttctccaaacagaacaccaatccagctcttgtgattcctgttaaagaacccattatgcggcgtaacgttgacaatcaatcttactatgttcttggtcacaagactcctaacattcgtgatctttacacgttgagtcgtaagttaggacaaggacaattcgggacaacgtatttgtgtactgatattgccacaggtgttgactatgcttgtaagtctatatccaagaggaaattgatatctaaagaagatgttgaggatgttaggagggagattcagattatgcatcatttagctggtcacaagaatattgttactattaaaggagcttatgaggatcctttgtatgttcacattgtgatggagctttgtgctggtggtgagttgtttgataggattattcatagaggtcattacagcgagaggaaagctgctgagttgaccaagatcattgtcggtgttgttgaggcgtgtcattctcttggtgttatgcatagagatttaaagcctgagaatttcttgttggttaataaggatgatgatttctctcttaaggccattgattttggtctctctgttttcttcaaaccaggccaaatattcaaggatgttgttggaagtccatactatgttgctcctgaggttcttctaaaacattatggtccagaagctgatgtgtggactgctggtgttatactctatatcttactaagtggtgtcccgcctttctgggcagaaacacagcaaggaatatttgatgctgtgttgaagggatatattgactttgatacagacccgtggcctgtcatatccgacagtgctaaagatctgatccggaagatgttatgctctagtccttctgaacgtttgactgctcatgaagtcttgcgtcatccatggatctgtgagaatggagttgcaccggatagagcacttgacccggctgttttgtctcgtctaaaacagttttctgcaatgaataaattaaagaagatggctttaaaggtgatagctgagagcctctcagaagaagagattgcgggtttaagagcaatgtttgaggcaatggatactgataacagcggtgcaatcacttttgatgaactcaaagctggcttgagaagatatggatcaaccttgaaagacaccgagatccgagatcttatggaagcggctgatgtggacaacagcggtacaatagattacagcgagtttattgcagcgacgatccatctgaataaactagagagagaagagcatcttgtctctgcatttcagtactttgacaaagatggaagtggttacatcaccattgatgagctgcaacaatcttgcattgaacatgggatgaccgatgtttttcttgaagacataatcaaagaagtagatcaagacaacgatggacggattgattacgaagaatttgttgcgatgatgcaaaagggaaatgctggtgtagggagaagaacaatgaaaaatagtctaaacatcagcatgagagatgtgtaggcacatacacacatctttaaatcgtctattcggtgaggatgcaaatgtttccatggaatcaacatttgcaatgtttaatcacagaggaggaagagaaaccagattcatagctgcagcgaaccagctaaatcgttgaaggtttgagttaaaaatgttaaaaactactgtatgattaaaaaatggtgaaagataaaaaaaaagtgttaagttctgttcatcagtagctgtgaggactatttctattttctctctctctgttttgtttgtttgtaacaactgtttaagtttggtttttatttcatctccatcgtcgaaagctttgaccctttttgggttttt

SEQ ID NO: 47592 - protein, 544 aa, Arabidopsis thaliana
  peptide (1)..(544): Ceres Seq. ID no. 12602080
MGNSCRGSFKDKIYEGNHSRPEENSKSTTTTVSSVHSPTTDQDFSKQNTNPALVIPVKEPIMRRNVDNQSYYVLGHKTPNIRDLYTLSRKLGQGQFGTTYLCTDIATGVDYACKSISKRKLISKEDVEDVRREIQIMHHLAGHKNIVTIKGAYEDPLYVHIVMELCAGGELFDRIIHRGHYSERKAAELTKIIVGVVEACHSLGVMHRDLKPENFLLVNKDDDFSLKAIDFGLSVFFKPGQIFKDVVGSPYYVAPEVLLKHYGPEADVWTAGVILYILLSGVPPFWAETQQGIFDAVLKGYIDFDTDPWPVISDSAKDLIRKMLCSSPSERLTAHEVLRHPWICENGVAPDRALDPAVLSRLKQFSAMNKLKKMALKVIAESLSEEEIAGLRAMFEAMDTDNSGAITFDELKAGLRRYGSTLKDTEIRDLMEAADVDNSGTIDYSEFIAATIHLNKLEREEHLVSAFQYFDKDGSGYITIDELQQSCIEHGMTDVFLEDIIKEVDQDNDGRIDYEEFVAMMQKGNAGVGRRTMKNSLNISMRDV

SEQ ID NO: 47593 - protein, 483 aa, Arabidopsis thaliana
  peptide (1)..(483): Ceres Seq. ID no. 12602081
MRRNVDNQSYYVLGHKTPNIRDLYTLSRKLGQGQFGTTYLCTDIATGVDYACKSISKRKLISKEDVEDVRREIQIMHHLAGHKNIVTIKGAYEDPLYVHIVMELCAGGELFDRIIHRGHYSERKAAELTKIIVGVVEACHSLGVMHRDLKPENFLLVNKDDDFSLKAIDFGLSVFFKPGQIFKDVVGSPYYVAPEVLLKHYGPEADVWTAGVILYILLSGVPPFWAETQQGIFDAVLKGYIDFDTDPWPVISDSAKDLIRKMLCSSPSERLTAHEVLRHPWICENGVAPDRALDPAVLSRLKQFSAMNKLKKMALKVIAESLSEEEIAGLRAMFEAMDTDNSGAITFDELKAGLRRYGSTLKDTEIRDLMEAADVDNSGTIDYSEFIAATIHLNKLEREEHLVSAFQYFDKDGSGYITIDELQQSCIEHGMTDVFLEDIIKEVDQDNDGRIDYEEFVAMMQKGNAGVGRRTMKNSLNISMRDV

SEQ ID NO: 47594 - protein, 408 aa, Arabidopsis thaliana
  peptide (1)..(408): Ceres Seq. ID no. 12602082
MHHLAGHKNIVTIKGAYEDPLYVHIVMELCAGGELFDRIIHRGHYSERKAAELTKIIVGVVEACHSLGVMHRDLKPENFLLVNKDDDFSLKAIDFGLSVFFKPGQIFKDVVGSPYYVAPEVLLKHYGPEADVWTAGVILYILLSGVPPFWAETQQGIFDAVLKGYIDFDTDPWPVISDSAKDLIRKMLCSSPSERLTAHEVLRHPWICENGVAPDRALDPAVLSRLKQFSAMNKLKKMALKVIAESLSEEEIAGLRAMFEAMDTDNSGAITFDELKAGLRRYGSTLKDTEIRDLMEAADVDNSGTIDYSEFIAATIHLNKLEREEHLVSAFQYFDKDGSGYITIDELQQSCIEHGMTDVFLEDIIKEVDQDNDGRIDYEEFVAMMQKGNAGVGRRTMKNSLNISMRDV

SEQ ID NO: 47595 - DNA, 1503 bp, Arabidopsis thaliana
  misc_feature (1)..(1503): Ceres Seq. ID no. 13592541
  misc_feature (1)..(1503): Ortholog of  Ceres SEQ ID NO 14307273 as cited in SEQ ID NO 54302
  misc_feature (1)..(1503): Ortholog of  Ceres SEQ ID NO 14315317 as cited in SEQ ID NO 58242
  misc_feature (1)..(1503): Ortholog of  Ceres SEQ ID NO 13655375 as cited in SEQ ID NO 63347
  misc_feature (1)..(1503): Ortholog of  Ceres SEQ ID NO 12626166 as cited in SEQ ID NO 64505
  misc_feature (1)..(1503): Ortholog of  Ceres SEQ ID NO 14301599 as cited in SEQ ID NO 65699
  misc_feature (1)..(1503): Ortholog of  Ceres SEQ ID NO 14301978 as cited in SEQ ID NO 0
  misc_feature (1)..(1503): Ortholog of  Ceres SEQ ID NO 14303290 as cited in SEQ ID NO 0
gctatcaaacgtagaaagcgaaaactatctttcttcttcctctctctcactatttttctctgtacggtggtgagtgaagaccatcaaaaattgcagaaaataggcttaatctgaatctcttctcctccgtcgaagttttgaattctctctggttctccaattctcctctcgagctgccttaagcttcgcatttacgtttacgttatgcacgaatgagatcatcgtagatcgtgattgaagaagcgagagataaattaggagagcgaagatgagcgagggccagaagttccagttgggaacaatcggcgctttgagtttgtccgttgtgtcatctgtctcgattgtgatctgtaacaaagcgcttattagcacccttggcttcacattcgcgactactttgacaagttggcatcttttggtcacattttgttcccttcatgtggcattatggatgaagatgttcgaacacaagccttttgatccacgagctgtgatgggatttggcatattgaatgggatatccataggactattgaacctcagcctgggctttaattctgtcggtttttaccagatgactaaactagctatcatcccctgcactgttctcttggagaccctcttcttcaggaaaaagttcagtcgaaaaatccagttttcattaaccatccttctccttggtgttggaattgcaaccgtcacagatcttcaacttaatatgctgggttctgtcttgtcgctgctggctgttgtcacaacttgtgttgctcaaattatgacaaataccatccagaagaagttcaaagtttcatccacgcagcttctgtatcagtcttgcccatatcaagcaatcactcttttcgtcactgggccatttttagatgggctcctaaccaatcagaacgtgtttgctttcaagtacacttctcaagtagtgttcttcatcgtcctgtcttgcctcatatcagtctctgtaaacttcagcacatttcttgtcattggaaaaacatctcctgtcacatatcaggttctaggacatctcaaaacatgcctggttctagcatttggctatgtgttgctgcgagacccattcgactggcgcaacattctcggtattctagtggctgtgattggaatggttgtttattcctattactgctcgattgagactcagcagaaggcaagtgaaacctcaactcagttgcctcagatgaaagagagcgagaaggatccgctaatagcagctgaaaatggaagcggagtgttatcagatggcggcgggggagtgcagcaaaagacggtggctcctgtatggaactcaaataaagattttcaagcctaaaagctttgatcatcgctatttttttatataatatcaaactctctttgtattgtccccaaaaaaacacaaactttttaatttctctttttttttttttttgttccctttttaaatatgcatagcagagaagtaggggagactgaaaaatcaacaaaccttcc

SEQ ID NO: 47596 - protein, 357 aa, Arabidopsis thaliana
  peptide (1)..(357): Ceres Seq. ID no. 13592542
MSEGQKFQLGTIGALSLSVVSSVSIVICNKALISTLGFTFATTLTSWHLLVTFCSLHVALWMKMFEHKPFDPRAVMGFGILNGISIGLLNLSLGFNSVGFYQMTKLAIIPCTVLLETLFFRKKFSRKIQFSLTILLLGVGIATVTDLQLNMLGSVLSLLAVVTTCVAQIMTNTIQKKFKVSSTQLLYQSCPYQAITLFVTGPFLDGLLTNQNVFAFKYTSQVVFFIVLSCLISVSVNFSTFLVIGKTSPVTYQVLGHLKTCLVLAFGYVLLRDPFDWRNILGILVAVIGMVVYSYYCSIETQQKASETSTQLPQMKESEKDPLIAAENGSGVLSDGGGGVQQKTVAPVWNSNKDFQA

SEQ ID NO: 47597 - protein, 296 aa, Arabidopsis thaliana
  peptide (1)..(296): Ceres Seq. ID no. 13592543
MKMFEHKPFDPRAVMGFGILNGISIGLLNLSLGFNSVGFYQMTKLAIIPCTVLLETLFFRKKFSRKIQFSLTILLLGVGIATVTDLQLNMLGSVLSLLAVVTTCVAQIMTNTIQKKFKVSSTQLLYQSCPYQAITLFVTGPFLDGLLTNQNVFAFKYTSQVVFFIVLSCLISVSVNFSTFLVIGKTSPVTYQVLGHLKTCLVLAFGYVLLRDPFDWRNILGILVAVIGMVVYSYYCSIETQQKASETSTQLPQMKESEKDPLIAAENGSGVLSDGGGGVQQKTVAPVWNSNKDFQA

SEQ ID NO: 47598 - protein, 294 aa, Arabidopsis thaliana
  peptide (1)..(294): Ceres Seq. ID no. 13592544
MFEHKPFDPRAVMGFGILNGISIGLLNLSLGFNSVGFYQMTKLAIIPCTVLLETLFFRKKFSRKIQFSLTILLLGVGIATVTDLQLNMLGSVLSLLAVVTTCVAQIMTNTIQKKFKVSSTQLLYQSCPYQAITLFVTGPFLDGLLTNQNVFAFKYTSQVVFFIVLSCLISVSVNFSTFLVIGKTSPVTYQVLGHLKTCLVLAFGYVLLRDPFDWRNILGILVAVIGMVVYSYYCSIETQQKASETSTQLPQMKESEKDPLIAAENGSGVLSDGGGGVQQKTVAPVWNSNKDFQA

SEQ ID NO: 47599 - DNA, 4931 bp, Arabidopsis thaliana; identical to SEQ ID NO: 47541
  misc_feature (1)..(4931): Ceres Seq. ID no. 12602182
  misc_feature (1)..(4931): Ortholog of  Ceres SEQ ID NO 15176130 as cited in SEQ ID NO 1136
  misc_feature (1)..(4931): Ortholog of  Ceres SEQ ID NO 15171728 as cited in SEQ ID NO 57131
  misc_feature (1)..(4931): Ortholog of  Ceres SEQ ID NO 13582534 as cited in SEQ ID NO 57409
  misc_feature (1)..(4931): Ortholog of  Ceres SEQ ID NO 14308198 as cited in SEQ ID NO 59072
  misc_feature (1)..(4931): Ortholog of  Ceres SEQ ID NO 13654213 as cited in SEQ ID NO 60614
  misc_feature (1)..(4931): Ortholog of  Ceres SEQ ID NO 13597268 as cited in SEQ ID NO 63929
  misc_feature (1)..(4931): Ortholog of  Ceres SEQ ID NO 12617527 as cited in SEQ ID NO 64697

SEQ ID NO: 47600 - protein, 442 aa, Arabidopsis thaliana; identical to SEQ ID NO: 47542
  peptide (1)..(442): Ceres Seq. ID no. 12602183

SEQ ID NO: 47601 - protein, 356 aa, Arabidopsis thaliana; identical to SEQ ID NO: 47543
  peptide (1)..(356): Ceres Seq. ID no. 12602184

SEQ ID NO: 47602 - protein, 355 aa, Arabidopsis thaliana; identical to SEQ ID NO: 47544
  peptide (1)..(355): Ceres Seq. ID no. 12602185

SEQ ID NO: 47603 - DNA, 1654 bp, Arabidopsis thaliana
  misc_feature (1)..(1654): Ceres Seq. ID no. 13647961
  misc_feature (1)..(1654): Ortholog of  Ceres SEQ ID NO 13598326 as cited in SEQ ID NO 68812
cactagtcccccccccccccccaccgcttctccccggcttgacccttgtcgtactcgtcgatggctccggtgaagcagaagaagaagaataagaagaagcctctggataaggcgaagaagttggcgaagaataaagagaagaagagagtcaacgcagtgccattggatccggaggctatcgactgcgactggtgggatactttctggctccgaaactcttctccctcagctcctctagggttctttgaattgaaccgagagattgttgttgttttcagtcccctcagacgaagactatgcgttcaagcacttctttagggcttctaagacaacttttagctacatttgctcgctcgtcagggaggatcttatctctagacctccctctggtctcatcaacatcgagggaaggcttcttagtgttgagaaacaagtcgccattgctcttcgaaggttagcttccggtgattctcaggtctccgttggtgctgcctttggtgttggccagtccactgtttctcaggttacatggagattcatcgaggcactcgaagaacgtgccaagcatcatcttagatggccagattctgaccgaattgaagagatcaagtcaaagttcgaggagatgtacggtctccccaattgctgcggagccattgacactacgcacatcatcatgactctcccggctgtgcaagcatcagatgactggtgtgaccaggagaagaactacagcatgttcttacaaggagtctttgatcacgagatgagatttctcaacatggttaccggctggcctggcggcatgaccgtctccaagcttctcaagttctctggcttcttcaaactctgtgaaaacgctcagattttagacggcaatcctaaaactctatcccaaggagcccagattagagaatacgttgttggagggatcagttacccgcttcttccctggcttataactcctcacgacagcgatcatccctctgattccatggtggcgttcaacgaaaggcatgagaaggtgaggtcagtcgcagctactgcctttcaacagcttaaaggaagctggaggattctgagcaaagttatgtggagaccagacaggaggaagctacctagtataatactggtgtgttgtttgttgcataacatcattatcgactgtggggattatcttcaagaagatgttcctttgtctggtcatcacgactccggttatgcagaccggtactgcaagcagaccgagccgcttggtagtgagctcagaggatgtctgactgagcatttgcttaggtgaggatcttaaccttgggaattggacatcttcatctcttctctaaggccgtactaagcccgttagaccattcagcatcagtttagtggtagcccgagacatatcggacaaaagcaatgttatgaaacttttcttcaggtatcaacaccagattaacatcatgccagttggacctacaaaaatagattcatccttaagtgtgattaccatactttgtgaactactaatcttttgagaggagtggactatatccccaacggaactgtttgttttggcaatgtaaatgttatttttttaataataattggtgttttctttcaaaaaaaaaaaaaaaaaactcgagggggggcccggtac

SEQ ID NO: 47604 - protein, 224 aa, Arabidopsis thaliana
  peptide (1)..(224): Ceres Seq. ID no. 13647962
MYGLPNCCGAIDTTHIIMTLPAVQASDDWCDQEKNYSMFLQGVFDHEMRFLNMVTGWPGGMTVSKLLKFSGFFKLCENAQILDGNPKTLSQGAQIREYVVGGISYPLLPWLITPHDSDHPSDSMVAFNERHEKVRSVAATAFQQLKGSWRILSKVMWRPDRRKLPSIILVCCLLHNIIIDCGDYLQEDVPLSGHHDSGYADRYCKQTEPLGSELRGCLTEHLLR

SEQ ID NO: 47605 - protein, 207 aa, Arabidopsis thaliana
  peptide (1)..(207): Ceres Seq. ID no. 13647963
MTLPAVQASDDWCDQEKNYSMFLQGVFDHEMRFLNMVTGWPGGMTVSKLLKFSGFFKLCENAQILDGNPKTLSQGAQIREYVVGGISYPLLPWLITPHDSDHPSDSMVAFNERHEKVRSVAATAFQQLKGSWRILSKVMWRPDRRKLPSIILVCCLLHNIIIDCGDYLQEDVPLSGHHDSGYADRYCKQTEPLGSELRGCLTEHLLR

SEQ ID NO: 47606 - protein, 187 aa, Arabidopsis thaliana
  peptide (1)..(187): Ceres Seq. ID no. 13647964
MFLQGVFDHEMRFLNMVTGWPGGMTVSKLLKFSGFFKLCENAQILDGNPKTLSQGAQIREYVVGGISYPLLPWLITPHDSDHPSDSMVAFNERHEKVRSVAATAFQQLKGSWRILSKVMWRPDRRKLPSIILVCCLLHNIIIDCGDYLQEDVPLSGHHDSGYADRYCKQTEPLGSELRGCLTEHLLR

SEQ ID NO: 47607 - DNA, 2649 bp, Arabidopsis thaliana; identical to SEQ ID NO: 46523
  misc_feature (1)..(2649): Ceres Seq. ID no. 13592024
  misc_feature (1)..(2649): Ortholog of  Ceres SEQ ID NO 13595900 as cited in SEQ ID NO 69289

SEQ ID NO: 47608 - protein, 703 aa, Arabidopsis thaliana; identical to SEQ ID NO: 46524
  peptide (1)..(703): Ceres Seq. ID no. 13592025

SEQ ID NO: 47609 - protein, 603 aa, Arabidopsis thaliana; identical to SEQ ID NO: 46525
  peptide (1)..(603): Ceres Seq. ID no. 13592026

SEQ ID NO: 47610 - protein, 485 aa, Arabidopsis thaliana; identical to SEQ ID NO: 46526
  peptide (1)..(485): Ceres Seq. ID no. 13592027

SEQ ID NO: 47611 - DNA, 2050 bp, Arabidopsis thaliana
  misc_feature (1)..(2050): Ceres Seq. ID no. 13592370
  misc_feature (1)..(2050): Ortholog of  Ceres SEQ ID NO 13657873 as cited in SEQ ID NO 66361
tctcttccttctcatctctcttttcctctctttctttctctctctcagccctaagagagaagaaataggctctgctctgcgccttttctacaagaaattcaccaaaaaagcttgaatatttatcggaatcaaagcttgggtttttaatcctggtaaagccatgtcacatatggtgtttcagagcgttgtcgctcccaaacccttatctcctctcaaaccctgtttacctatccctcgtccactcgttactctgccttgtaagctccgtcgtggcttcgttagagcttcttcgtcctcgtttcttgtcgatgattcagtttcaggactcgagcgttgcttacagttaccttctggagttgagttaggcacatcttcctctggctctttctctgcaagtactcagatgtgtcctgtgatgaaaggcaaatttggttcggtaggagctgttactttggaaaaagggaagcttgatatgacccagaagatttctgagactagccctgagattgcaactggaggagggggtggaaacattggaaagagtatcaataatggtggtggcgatggaggtgacgataatggtgatgatgatgattactttgatgaattcgatgatggtgatgagggagatgatgatggactttttaggcgtaggatgtttctcgcagagatttttgataggaaattcgttgatgctgtgttgaatgaatggcaaaaaacaatgatggatttacctgccggtctccgtcaagcatatgaaatgggtttggtcagctcagctcaaatggtgaaattccttgccataaatgcccgtcctacaacgactagaatgatctcccgtgcccttcctcagggattatcgagggcctttgttggcaggatgttggcggatcctgcatttctctataaacttcttttggagcaagctgccacggttggatgctcagtttggtgggaggtgaagaatcgtaagaatagactaaaagaggaatgggatcttgcacttataaatgttcttactgtatcagcatgcaatgcagctgctgtttggttactagctccatgtcgttcctatggaaacacattccggtttgacctgcaaaatacattacaaaagctaccaaataatttatttgaaatgagctatcctcttagagagttcgacttgcaaaagagatttcattctcttttctacaaggctgcagagttgtccattcttggactcgcagcaggaacactccagggttcgttgtcaaacgttctagcaggaaagaagaagaacagagtatctgtgacggtcccatctatcagcacaaatgctcttggttatggtgcatttcttggaatatatgccaacttgagatatcagctgttatgtggatttgaaagaggagtgagcagtcactttgacgtcataggagtagcactcttcttcggcactgccttgaggattatgaatgtgcaattaggggaaaagtcaagacaagtatggctaggtgtagaggcagacccactggcgcagtcagatgatctgctggcaaaagcatacaaccgaccctcagaggaagcagtagcaaagccatcttcaaaatggttcatctcaaagaatgcaattgtctcagggctactcgggaagaagcaagaagattcagtttcagattctccacctccaaaggctcggcgaaaaaggatagtgaggaagaaggtggctgcatctgcctcttaaataaccaacaaaacctctaaaatgtcacaattttcagagtccatggaagaacaacagtgaggttttgttgttcatttgaggcacacatgaaaaaggttttgttgccagaggaaggaagaagggatcaccaaacttggaggaattgaaaaaaagctctatagcttctttttttttttttttactttatgactcgttctctctagttttaagtgcttttggaaagacatttctatttttaggtgtggtgataaagatgcttatctctggttaaaattctgtattttctcaatgtttctaataaatagccacatcttatacgttcgt

SEQ ID NO: 47612 - protein, 521 aa, Arabidopsis thaliana
  peptide (1)..(521): Ceres Seq. ID no. 13592371
MSHMVFQSVVAPKPLSPLKPCLPIPRPLVTLPCKLRRGFVRASSSSFLVDDSVSGLERCLQLPSGVELGTSSSGSFSASTQMCPVMKGKFGSVGAVTLEKGKLDMTQKISETSPEIATGGGGGNIGKSINNGGGDGGDDNGDDDDYFDEFDDGDEGDDDGLFRRRMFLAEIFDRKFVDAVLNEWQKTMMDLPAGLRQAYEMGLVSSAQMVKFLAINARPTTTRMISRALPQGLSRAFVGRMLADPAFLYKLLLEQAATVGCSVWWEVKNRKNRLKEEWDLALINVLTVSACNAAAVWLLAPCRSYGNTFRFDLQNTLQKLPNNLFEMSYPLREFDLQKRFHSLFYKAAELSILGLAAGTLQGSLSNVLAGKKKNRVSVTVPSISTNALGYGAFLGIYANLRYQLLCGFERGVSSHFDVIGVALFFGTALRIMNVQLGEKSRQVWLGVEADPLAQSDDLLAKAYNRPSEEAVAKPSSKWFISKNAIVSGLLGKKQEDSVSDSPPPKARRKRIVRKKVAASAS

SEQ ID NO: 47613 - protein, 518 aa, Arabidopsis thaliana
  peptide (1)..(518): Ceres Seq. ID no. 13592372
MVFQSVVAPKPLSPLKPCLPIPRPLVTLPCKLRRGFVRASSSSFLVDDSVSGLERCLQLPSGVELGTSSSGSFSASTQMCPVMKGKFGSVGAVTLEKGKLDMTQKISETSPEIATGGGGGNIGKSINNGGGDGGDDNGDDDDYFDEFDDGDEGDDDGLFRRRMFLAEIFDRKFVDAVLNEWQKTMMDLPAGLRQAYEMGLVSSAQMVKFLAINARPTTTRMISRALPQGLSRAFVGRMLADPAFLYKLLLEQAATVGCSVWWEVKNRKNRLKEEWDLALINVLTVSACNAAAVWLLAPCRSYGNTFRFDLQNTLQKLPNNLFEMSYPLREFDLQKRFHSLFYKAAELSILGLAAGTLQGSLSNVLAGKKKNRVSVTVPSISTNALGYGAFLGIYANLRYQLLCGFERGVSSHFDVIGVALFFGTALRIMNVQLGEKSRQVWLGVEADPLAQSDDLLAKAYNRPSEEAVAKPSSKWFISKNAIVSGLLGKKQEDSVSDSPPPKARRKRIVRKKVAASAS

SEQ ID NO: 47614 - protein, 440 aa, Arabidopsis thaliana
  peptide (1)..(440): Ceres Seq. ID no. 13592373
MCPVMKGKFGSVGAVTLEKGKLDMTQKISETSPEIATGGGGGNIGKSINNGGGDGGDDNGDDDDYFDEFDDGDEGDDDGLFRRRMFLAEIFDRKFVDAVLNEWQKTMMDLPAGLRQAYEMGLVSSAQMVKFLAINARPTTTRMISRALPQGLSRAFVGRMLADPAFLYKLLLEQAATVGCSVWWEVKNRKNRLKEEWDLALINVLTVSACNAAAVWLLAPCRSYGNTFRFDLQNTLQKLPNNLFEMSYPLREFDLQKRFHSLFYKAAELSILGLAAGTLQGSLSNVLAGKKKNRVSVTVPSISTNALGYGAFLGIYANLRYQLLCGFERGVSSHFDVIGVALFFGTALRIMNVQLGEKSRQVWLGVEADPLAQSDDLLAKAYNRPSEEAVAKPSSKWFISKNAIVSGLLGKKQEDSVSDSPPPKARRKRIVRKKVAASAS

SEQ ID NO: 47615 - DNA, 821 bp, Arabidopsis thaliana
  misc_feature (1)..(821): Ceres Seq. ID no. 13647965
  misc_feature (1)..(821): Ortholog of  Ceres SEQ ID NO 15172821 as cited in SEQ ID NO 57953
accttcacttaacacagcagaaaccctttcttcagtcttctccggcgttctccttcttcacttcccaactaaatctcgccggacgatcgtaaccggagagcttccgtcgaccggtaaagtgtttgatatctaaagaagatgttgaagtttctatcaaaagtaagaattgagttcaacacattagatccaagacttgcgtcttgtgttgaattcttagctcaatgcaatgcaaggaaggccaaagaatcgaatcccaattgtcaggttttggtgaaacgtagaaccgatgagcagccgccgcagatcactgtcacgtttgttaatggtgttgaggaagcttttgatgcagctgcaacctcggctcagtcgattagaaagatgattcttgataaaggtcagtatcttgagacagagcaaatgtttcgtgaagctggagaacaatggcctgtgattatccctgatgaagaacttctccaagaggctcctggtgttaagccgagaaaagcagaagacaagaagtgatgctgcaccaagcacgatcaatatctcttggtgtaatctcattgatttgacaaatctagcttttgggaatgtaagatcgtttgcagtgtgcaactcgatatgtgtctcaagcttagggtttcgacagatagatttgtattgttttcttgtttatgtgaaccgcaatggatgaacttttggtcaggaaccgggactatgacactgttatggaagctattgaagctctgggaataaaaaccaatttttataggcaaaaaaaaaaaaaaaaaaaactcgagggggggcccggtacccaattc

SEQ ID NO: 47616 - protein, 127 aa, Arabidopsis thaliana
  peptide (1)..(127): Ceres Seq. ID no. 15219512
MLKFLSKVRIEFNTLDPRLASCVEFLAQCNARKAKESNPNCQVLVKRRTDEQPPQITVTFVNGVEEAFDAAATSAQSIRKMILDKGQYLETEQMFREAGEQWPVIIPDEELLQEAPGVKPRKAEDKK

SEQ ID NO: 47617 - protein, 77 aa, Arabidopsis thaliana
  peptide (1)..(77): Ceres Seq. ID no. 15219513
MKNFSKRLLVLSREKQKTRSDAAPSTINISWCNLIDLTNLAFGNVRSFAVCNSICVSSLGFRQIDLYCFLVYVNRNG

SEQ ID NO: 47618 - DNA, 1350 bp, Arabidopsis thaliana
  misc_feature (1)..(1350): Ceres Seq. ID no. 12602083
  misc_feature (1)..(1350): Ortholog of  Ceres SEQ ID NO 13654868 as cited in SEQ ID NO 62704
atgggcccaaagatgcccaacacagaaacagaaaatatgaaaatattagtcaccggctctactggttacttaggcgcacgactctgccacgttctcctccgtcgtggccactccgtacgtgcattggtccgccgcaccagcgatctctctgacttacctccagaagttgagctcgcctatggagacgtaacggattaccgttctctaacggatgcttgctccggttgcgatatcgttttccacgccgcagctttagttgagccttggcttcctgacccatctcgattcatctcagtcaacgttggtggactgaagaatgtcttggaagctgtaaaggagacgaagaccgtgcagaagattatctacacttcttccttcttcgctcttggatctaccgatggatctgttgctaatgagaatcaagttcataatgagaggttcttctgcactgagtatgagagatccaaggctgttgctgataagatggctttgaatgctgcttctgaaggtgtgccgataattttgctgtatcctggtgttatttttggtccaggcaagctcacttcagccaatatggttgctagaatgttgatcgagcgctttaacgggaggttgcctggatatattggctctgggacggatagatactccttcagccatgttgatgatgttgtggagggtcatgttgctgcaatggaaaaaggtaggcttggtgaaagatacttactcactggggaaaatgcttctttcaagcttgtctttgacatggctgcactgattactggaaccaaaaagccaaactttagcattccattatgggccatcaacgcatacggatggttatctgttttaatctctcgggttacaggaaagcttccacttatcagtcctccgacagtgacagtgctgagacatcagtggtcatactcttgtgataaggctaagctggaacttggttataaccctcgaagcctaaaggaaggattggaggagatgctcccttggttgaagagtctgggcgtcattcactactgaaattcaaatttcccatctttcaggtatttcgaagaataatattcccttgaattcagtcactatgatgagtgatgactacatttttacttctcccgttacacttttaacccaatcgatttttatcttgttacaaaactgcttcgttttgatcgtgtatgtcaaataaatgtgaaacattgtgtgcaaatgctgatgatcatattttaagatgttgagctacgtgtgagagtaggaaagagggaatatgtaaatgtgggaaataatcacattttatctgccaagaactatatgattacatctataacatatatgatc

SEQ ID NO: 47619 - protein, 344 aa, Arabidopsis thaliana
  peptide (1)..(344): Ceres Seq. ID no. 12602084
MGPKMPNTETENMKILVTGSTGYLGARLCHVLLRRGHSVRALVRRTSDLSDLPPEVELAYGDVTDYRSLTDACSGCDIVFHAAALVEPWLPDPSRFISVNVGGLKNVLEAVKETKTVQKIIYTSSFFALGSTDGSVANENQVHNERFFCTEYERSKAVADKMALNAASEGVPIILLYPGVIFGPGKLTSANMVARMLIERFNGRLPGYIGSGTDRYSFSHVDDVVEGHVAAMEKGRLGERYLLTGENASFKLVFDMAALITGTKKPNFSIPLWAINAYGWLSVLISRVTGKLPLISPPTVTVLRHQWSYSCDKAKLELGYNPRSLKEGLEEMLPWLKSLGVIHY

SEQ ID NO: 47620 - protein, 340 aa, Arabidopsis thaliana
  peptide (1)..(340): Ceres Seq. ID no. 12602085
MPNTETENMKILVTGSTGYLGARLCHVLLRRGHSVRALVRRTSDLSDLPPEVELAYGDVTDYRSLTDACSGCDIVFHAAALVEPWLPDPSRFISVNVGGLKNVLEAVKETKTVQKIIYTSSFFALGSTDGSVANENQVHNERFFCTEYERSKAVADKMALNAASEGVPIILLYPGVIFGPGKLTSANMVARMLIERFNGRLPGYIGSGTDRYSFSHVDDVVEGHVAAMEKGRLGERYLLTGENASFKLVFDMAALITGTKKPNFSIPLWAINAYGWLSVLISRVTGKLPLISPPTVTVLRHQWSYSCDKAKLELGYNPRSLKEGLEEMLPWLKSLGVIHY

SEQ ID NO: 47621 - protein, 332 aa, Arabidopsis thaliana
  peptide (1)..(332): Ceres Seq. ID no. 12602086
MKILVTGSTGYLGARLCHVLLRRGHSVRALVRRTSDLSDLPPEVELAYGDVTDYRSLTDACSGCDIVFHAAALVEPWLPDPSRFISVNVGGLKNVLEAVKETKTVQKIIYTSSFFALGSTDGSVANENQVHNERFFCTEYERSKAVADKMALNAASEGVPIILLYPGVIFGPGKLTSANMVARMLIERFNGRLPGYIGSGTDRYSFSHVDDVVEGHVAAMEKGRLGERYLLTGENASFKLVFDMAALITGTKKPNFSIPLWAINAYGWLSVLISRVTGKLPLISPPTVTVLRHQWSYSCDKAKLELGYNPRSLKEGLEEMLPWLKSLGVIHY

SEQ ID NO: 47622 - DNA, 1420 bp, Arabidopsis thaliana; identical to SEQ ID NO: 29119
  misc_feature (1)..(1420): Ceres Seq. ID no. 12602555
  misc_feature (1)..(1420): Ortholog of  Ceres SEQ ID NO 15175857 as cited in SEQ ID NO 59046

SEQ ID NO: 47623 - protein, 341 aa, Arabidopsis thaliana; identical to SEQ ID NO: 29120
  peptide (1)..(341): Ceres Seq. ID no. 12602556

SEQ ID NO: 47624 - protein, 330 aa, Arabidopsis thaliana; identical to SEQ ID NO: 29121
  peptide (1)..(330): Ceres Seq. ID no. 12602557

SEQ ID NO: 47625 - protein, 319 aa, Arabidopsis thaliana; identical to SEQ ID NO: 29122
  peptide (1)..(319): Ceres Seq. ID no. 12602558

SEQ ID NO: 47626 - DNA, 1163 bp, Arabidopsis thaliana
  misc_feature (1)..(1163): Ceres Seq. ID no. 12605703
  misc_feature (1)..(1163): Ortholog of  Ceres SEQ ID NO 12611141 as cited in SEQ ID NO 55992
ggacgccgtttcttcttttaccttccttctctcgctcaccgtcgcacctccttcattttttctctctctctcaaactcgtctctaaaactcgtccgtcgattaattcctcgttagtctcaggtttgatagaatcattgcctgaggcatctaataatgggaacaccagagacatctcgggagccttgccctgatcgtatactcgatgatatcggtggtgcttttggtatgggagctgttggaggatctgcctttcatttcattaaagggacttacaattctcctaaaggtagtcgctttgttggaggaacacaatcggtgagcatgaacgcacctcgtactggaggcagttttgctgtttggggaggtttattctcgacatttgactgtaccatggtgtacctaaggcaaaaggaggatccttggaactctatcattgctggtgctgcaactggagggtttctgtctatgcggcaaggggctggtgctgcttcgagatcagctatttttggaggggttttgcttgctttgattgaaggagctgggatcatgttgaacaaggtactggctcagcctcagaatatgatgatggaggaccctggaatgcaaggaatgcctgggatgcagggaatgcagggaatgcctgggatgcccggaatgcaaggaatgcctgggatgcaaggaatgcagatggggcagatgcagagtcaagcacagataaggtcagagagtcaaaaccagaatacagcttcatcatcatcatcatcatcatggtttggagggctttttgataagaaaaaggaggaggtgcaaccaggcagtgaaagtaaaacagaggtgttggagagttttgatgctcctccggtgccatcatttgagttcaagtaagctttgtggacatctatttctctgtcatccaatggtttacctactgcctcaactatcaattccatttcgtcgtctttttgtctatcctaagttctcagctgaattcttcttgttcatggaagaatcagcatgctatgttctctctcttttcacttatggttatgtttcaatgagcttatgcactcaatctaggaatattctctttgtgaaaccattccacagatattgttggttcttaaataatgtagttatagattttaacaatattcgccagtgg

SEQ ID NO: 47627 - protein, 243 aa, Arabidopsis thaliana
  peptide (1)..(243): Ceres Seq. ID no. 12605704
MGTPETSREPCPDRILDDIGGAFGMGAVGGSAFHFIKGTYNSPKGSRFVGGTQSVSMNAPRTGGSFAVWGGLFSTFDCTMVYLRQKEDPWNSIIAGAATGGFLSMRQGAGAASRSAIFGGVLLALIEGAGIMLNKVLAQPQNMMMEDPGMQGMPGMQGMQGMPGMPGMQGMPGMQGMQMGQMQSQAQIRSESQNQNTASSSSSSSWFGGLFDKKKEEVQPGSESKTEVLESFDAPPVPSFEFK

SEQ ID NO: 47628 - protein, 219 aa, Arabidopsis thaliana
  peptide (1)..(219): Ceres Seq. ID no. 12605705
MGAVGGSAFHFIKGTYNSPKGSRFVGGTQSVSMNAPRTGGSFAVWGGLFSTFDCTMVYLRQKEDPWNSIIAGAATGGFLSMRQGAGAASRSAIFGGVLLALIEGAGIMLNKVLAQPQNMMMEDPGMQGMPGMQGMQGMPGMPGMQGMPGMQGMQMGQMQSQAQIRSESQNQNTASSSSSSSWFGGLFDKKKEEVQPGSESKTEVLESFDAPPVPSFEFK

SEQ ID NO: 47629 - protein, 187 aa, Arabidopsis thaliana
  peptide (1)..(187): Ceres Seq. ID no. 12605706
MNAPRTGGSFAVWGGLFSTFDCTMVYLRQKEDPWNSIIAGAATGGFLSMRQGAGAASRSAIFGGVLLALIEGAGIMLNKVLAQPQNMMMEDPGMQGMPGMQGMQGMPGMPGMQGMPGMQGMQMGQMQSQAQIRSESQNQNTASSSSSSSWFGGLFDKKKEEVQPGSESKTEVLESFDAPPVPSFEFK

SEQ ID NO: 47630 - DNA, 724 bp, Arabidopsis thaliana
  misc_feature (1)..(724): Ceres Seq. ID no. 13647263
  misc_feature (1)..(724): Ortholog of  Ceres SEQ ID NO 12473977 as cited in SEQ ID NO 133
  misc_feature (1)..(724): Ortholog of  Ceres SEQ ID NO 12585294 as cited in SEQ ID NO 63023
gggagcaaaagatctggccaccacaacacaacgatcgacgaatacaatcggaaaatttgaaatctcgtcgatgaagatgactgctaagatgcgccgtgaattcccgacggcgttccttctcttgtttctggttccggtgatgattccggtcggtgaggctgtatggctagatgtgcctcccaccggaacaaagtgtgtatctgaagaaatccagagcaatgtcgtcgttttggctgattacctcatcatctccgaggatcacgaggtcatgcccactatatccgtcaaggtgacatccccatatggcaacaatctgcacaatatggaaaacgtaacgcatggccaatttgcatttacaacccaagaatcagggaactacttggcgtgcttttgggcagatgaaaagagtcacggaaacaaaaatgttagcatcaacattgactggagaactggaatcgctgctaaggattgggcctctattgctaagaaagagaagatcgagggtgtggagctggagatcaggaaactcgaaggcgcagtcgaagccatccatgaaaatatactctacctaagaaacagagaagcagacatgaggacaatgagtgagaaaacgaactcgcgggtggcttggtacagtataatgtcactaggtgtttgcattgctgtctctggtttccaggtactctacttgaagcagtactttgagaagaagaagcttatatag

SEQ ID NO: 47631 - protein, 240 aa, Arabidopsis thaliana
  peptide (1)..(240): Ceres Seq. ID no. 13647264
GAKDLATTTQRSTNTIGKFEISSMKMTAKMRREFPTAFLLLFLVPVMIPVGEAVWLDVPPTGTKCVSEEIQSNVVVLADYLIISEDHEVMPTISVKVTSPYGNNLHNMENVTHGQFAFTTQESGNYLACFWADEKSHGNKNVSINIDWRTGIAAKDWASIAKKEKIEGVELEIRKLEGAVEAIHENILYLRNREADMRTMSEKTNSRVAWYSIMSLGVCIAVSGFQVLYLKQYFEKKKLI

SEQ ID NO: 47632 - protein, 217 aa, Arabidopsis thaliana
  peptide (1)..(217): Ceres Seq. ID no. 13647265
MKMTAKMRREFPTAFLLLFLVPVMIPVGEAVWLDVPPTGTKCVSEEIQSNVVVLADYLIISEDHEVMPTISVKVTSPYGNNLHNMENVTHGQFAFTTQESGNYLACFWADEKSHGNKNVSINIDWRTGIAAKDWASIAKKEKIEGVELEIRKLEGAVEAIHENILYLRNREADMRTMSEKTNSRVAWYSIMSLGVCIAVSGFQVLYLKQYFEKKKLI

SEQ ID NO: 47633 - protein, 215 aa, Arabidopsis thaliana
  peptide (1)..(215): Ceres Seq. ID no. 13647266
MTAKMRREFPTAFLLLFLVPVMIPVGEAVWLDVPPTGTKCVSEEIQSNVVVLADYLIISEDHEVMPTISVKVTSPYGNNLHNMENVTHGQFAFTTQESGNYLACFWADEKSHGNKNVSINIDWRTGIAAKDWASIAKKEKIEGVELEIRKLEGAVEAIHENILYLRNREADMRTMSEKTNSRVAWYSIMSLGVCIAVSGFQVLYLKQYFEKKKLI

SEQ ID NO: 47634 - DNA, 1873 bp, Arabidopsis thaliana; identical to SEQ ID NO: 28194
  misc_feature (1)..(1873): Ceres Seq. ID no. 12680413
  misc_feature (1)..(1873): Ortholog of  Ceres SEQ ID NO 13599324 as cited in SEQ ID NO 0

SEQ ID NO: 47635 - protein, 522 aa, Arabidopsis thaliana; identical to SEQ ID NO: 28195
  peptide (1)..(522): Ceres Seq. ID no. 12680414

SEQ ID NO: 47636 - protein, 506 aa, Arabidopsis thaliana; identical to SEQ ID NO: 28196
  peptide (1)..(506): Ceres Seq. ID no. 12680415

SEQ ID NO: 47637 - protein, 298 aa, Arabidopsis thaliana; identical to SEQ ID NO: 28197
  peptide (1)..(298): Ceres Seq. ID no. 12680416

SEQ ID NO: 47638 - DNA, 1537 bp, Arabidopsis thaliana
  misc_feature (1)..(1537): Ceres Seq. ID no. 13647286
  misc_feature (1)..(1537): Ortholog of  Ceres SEQ ID NO 15225226 as cited in SEQ ID NO 58693
  misc_feature (1)..(1537): Ortholog of  Ceres SEQ ID NO 13654989 as cited in SEQ ID NO 63117
  misc_feature (1)..(1537): Ortholog of  Ceres SEQ ID NO 13584744 as cited in SEQ ID NO 69137
attcacacacacacactcacacaaaaaccaaaaactaattttcacgaaatccgaagcttaaaaattattcctctactgtttcaatttcatctcttcttcctcttgagttggcaatttctagggttttctcattttcctttttttccatttctggaaactggtaaaaggctttttctttgtctgtgggggagaaacaaaaatggagacagacgaagcataccaaaagaaagagcgagctgcattagtagccatcgttgtccttgcttgtcttgctttatcttctttgttcgtcgcctttagctactactgctatattcgtaacaaggtttctaagcgtcacagaattagcaagaggtttgattgtgaggaaaaaggcgattgtcagaaagtacaagatgttactgacaatgggttgcaaattttcacctttaagcaattgcattcagcaactggtggatttagcaagtctaatgtggttgggaatggtgggtttggcttggtttatcgtggtgtgcttaacgatggcagaaaagttgctatcaagctcatggatcatgcaggaaagcaaggggaagaagaattcaagatggaggttgagttactgagccgtctgcgttcaccatacttgttggcacttcttggttattgctcagacaatagtcataagctgcttgtgtatgagttcatggcaaatggtggtctgcaggaacacctgtatcttcccaacaggtctggttctgtcccaccaagattagattgggaaactaggatgagaatagctgtggaagctgcaaaaggcttggaatatctccatgaacaagtatcacccccggtgattcatagagactttaagagcagcaatattctgctggacagaaacttcaatgccaaagtttcagattttggattggctaaagtcggatcagataaagctggtggacacgtttctacccgtgtattaggcacacaaggatatgtagctcctgagtacgctttaactggtcacttgacaacaaagtcggatgtctatagctacggtgttgtcctgttagagttactaaccggtagagttccagtagatatgaagagagctacaggagaaggtgttcttgtctcttgggctttgcctcaattggctgatagagacaaagtagtagacataatggatccaacactcgaaggacaatactctacgaaagaagttgttcaagttgcagcaatagcagcaatgtgtgttcaagcagaagctgactacagacccttaatggcagatgtggtgcagtcactggttccattagtgagaaaccgtaggtcagcttcaaagcttagtggctgctctagtagctttagcttggctcggtctcctaactctccgggtaaagcaagcataggttctcaatgaataaatcaatcagagaagacgaaatgtgaggcttttattatgtaacggtatttactaaaacagacaatgatgtaaacacttgagtgatcaaacatggagtcatagagataatcatcaaataaactttttcgaacc

SEQ ID NO: 47639 - protein, 400 aa, Arabidopsis thaliana
  peptide (1)..(400): Ceres Seq. ID no. 13647287
METDEAYQKKERAALVAIVVLACLALSSLFVAFSYYCYIRNKVSKRHRISKRFDCEEKGDCQKVQDVTDNGLQIFTFKQLHSATGGFSKSNVVGNGGFGLVYRGVLNDGRKVAIKLMDHAGKQGEEEFKMEVELLSRLRSPYLLALLGYCSDNSHKLLVYEFMANGGLQEHLYLPNRSGSVPPRLDWETRMRIAVEAAKGLEYLHEQVSPPVIHRDFKSSNILLDRNFNAKVSDFGLAKVGSDKAGGHVSTRVLGTQGYVAPEYALTGHLTTKSDVYSYGVVLLELLTGRVPVDMKRATGEGVLVSWALPQLADRDKVVDIMDPTLEGQYSTKEVVQVAAIAAMCVQAEADYRPLMADVVQSLVPLVRNRRSASKLSGCSSSFSLARSPNSPGKASIGSQ

SEQ ID NO: 47640 - protein, 284 aa, Arabidopsis thaliana
  peptide (1)..(284): Ceres Seq. ID no. 13647288
MDHAGKQGEEEFKMEVELLSRLRSPYLLALLGYCSDNSHKLLVYEFMANGGLQEHLYLPNRSGSVPPRLDWETRMRIAVEAAKGLEYLHEQVSPPVIHRDFKSSNILLDRNFNAKVSDFGLAKVGSDKAGGHVSTRVLGTQGYVAPEYALTGHLTTKSDVYSYGVVLLELLTGRVPVDMKRATGEGVLVSWALPQLADRDKVVDIMDPTLEGQYSTKEVVQVAAIAAMCVQAEADYRPLMADVVQSLVPLVRNRRSASKLSGCSSSFSLARSPNSPGKASIGSQ

SEQ ID NO: 47641 - protein, 271 aa, Arabidopsis thaliana
  peptide (1)..(271): Ceres Seq. ID no. 13647289
MEVELLSRLRSPYLLALLGYCSDNSHKLLVYEFMANGGLQEHLYLPNRSGSVPPRLDWETRMRIAVEAAKGLEYLHEQVSPPVIHRDFKSSNILLDRNFNAKVSDFGLAKVGSDKAGGHVSTRVLGTQGYVAPEYALTGHLTTKSDVYSYGVVLLELLTGRVPVDMKRATGEGVLVSWALPQLADRDKVVDIMDPTLEGQYSTKEVVQVAAIAAMCVQAEADYRPLMADVVQSLVPLVRNRRSASKLSGCSSSFSLARSPNSPGKASIGSQ

SEQ ID NO: 47642 - DNA, 782 bp, Arabidopsis thaliana
  misc_feature (1)..(782): Ceres Seq. ID no. 12672750
  misc_feature (1)..(782): Ortholog of  Ceres SEQ ID NO 12474478 as cited in SEQ ID NO 96
  misc_feature (1)..(782): Ortholog of  Ceres SEQ ID NO 14309053 as cited in SEQ ID NO 0
atttgtagttgttaaactaaaataacccatttgtgttttaaatctaaaatggctagaaatttcgagctttctttgattctctttgttctgtatctgtccactgcagcaatagtcatggctagaaaccttgaagaggaatcaagtggtgatacagagttcattaaagcctcttgtgagacgacgtcgtacccagaccgatgcttccagtctctgtcttcatatgcaagcgagatcaagaagcagccacgtaagcttgctgagaccgcgcttgccgttagcatagcccgagcaaagtcagccaaaacctatgtatcagagatgactgattataaaggaatcacaaagaggcagcacgaggctgtagcggactgtctagaggagatgggagacactgttgacaggttgagcaattcgctgaaggaactgaagcatctggaggaaggtgacagcggagaagacttttggttctgtctgagcaatgtccggacgtggacaagcgcagcactgacagatgagaccgcgtgtatggatgggtttggagggaaggccatggctggggagctgaaaagtttaatcagaacacacattgtgagtgttgcggaagagacgagcaatgccttggctttgatcaatgactttgcttccaagcattgaaatcatttcaaaggggtttagtctttgggacaagagtttttctcgtattcaacactgcttgtgtttttttttctctctttaaagtttctactttatcttaacttatcatttttcatattatgcataaa

SEQ ID NO: 47643 - protein, 201 aa, Arabidopsis thaliana
  peptide (1)..(201): Ceres Seq. ID no. 12672751
MARNFELSLILFVLYLSTAAIVMARNLEEESSGDTEFIKASCETTSYPDRCFQSLSSYASEIKKQPRKLAETALAVSIARAKSAKTYVSEMTDYKGITKRQHEAVADCLEEMGDTVDRLSNSLKELKHLEEGDSGEDFWFCLSNVRTWTSAALTDETACMDGFGGKAMAGELKSLIRTHIVSVAEETSNALALINDFASKH

SEQ ID NO: 47644 - protein, 179 aa, Arabidopsis thaliana
  peptide (1)..(179): Ceres Seq. ID no. 12672752
MARNLEEESSGDTEFIKASCETTSYPDRCFQSLSSYASEIKKQPRKLAETALAVSIARAKSAKTYVSEMTDYKGITKRQHEAVADCLEEMGDTVDRLSNSLKELKHLEEGDSGEDFWFCLSNVRTWTSAALTDETACMDGFGGKAMAGELKSLIRTHIVSVAEETSNALALINDFASKH

SEQ ID NO: 47645 - protein, 111 aa, Arabidopsis thaliana
  peptide (1)..(111): Ceres Seq. ID no. 12672753
MTDYKGITKRQHEAVADCLEEMGDTVDRLSNSLKELKHLEEGDSGEDFWFCLSNVRTWTSAALTDETACMDGFGGKAMAGELKSLIRTHIVSVAEETSNALALINDFASKH

SEQ ID NO: 47646 - DNA, 776 bp, Arabidopsis thaliana
  misc_feature (1)..(776): Ceres Seq. ID no. 12720774
  misc_feature (1)..(776): Ortholog of  Ceres SEQ ID NO 13638716 as cited in SEQ ID NO 51101
  misc_feature (1)..(776): Ortholog of  Ceres SEQ ID NO 14306010 as cited in SEQ ID NO 59330
  misc_feature (1)..(776): Ortholog of  Ceres SEQ ID NO 12627045 as cited in SEQ ID NO 67611
atggcactgtaccgaccccttctcttgcatcatccaacttctccgtctgtaactacgtttctacgaaattacccctcgaaaccgatcaaattctccagcctgcccttccttcatcgctgccgtaagtctcgggtctcctcctcctccgctcggtgttgttcttccatggaatctcctcctgaaggatacagaagaaatgtcggcgtctgcctcatgaattcttccaaaaagattttcactgcctcgaggttggatattcccagtgcttggcaaatgcctcagggtggaatcgacgaaggtgaagatccaagagttgcagtcatgagagagcttaaagaagagactggagttcactctgctgagattctcgctgaggcacctcactggataacctatgacttccctcctgatgttagggagaagcttaaggtccgatggggatccgattggaagggtcaagcacagaaatggtttcttctgaaatttactgggaaagatgaagaaatcaatcttcttggcgatggtactgagaaacctgagtttggtgaatggtcctggacttctcctgatcaagtcgttgaaaatgcagtggagttcaagaagccagtgtacaaggaagtcatgtcagctttcgcttctcatctccagtagcaaaataaatcgaaaactaaactctctgttttaagtttttcgtaagaaactctgagaataagctcttcttgacatatttgctcttttttgaacaatctttgaatcaaaatacaattcttgttccc

SEQ ID NO: 47647 - protein, 216 aa, Arabidopsis thaliana
  peptide (1)..(216): Ceres Seq. ID no. 12720775
MALYRPLLLHHPTSPSVTTFLRNYPSKPIKFSSLPFLHRCRKSRVSSSSARCCSSMESPPEGYRRNVGVCLMNSSKKIFTASRLDIPSAWQMPQGGIDEGEDPRVAVMRELKEETGVHSAEILAEAPHWITYDFPPDVREKLKVRWGSDWKGQAQKWFLLKFTGKDEEINLLGDGTEKPEFGEWSWTSPDQVVENAVEFKKPVYKEVMSAFASHLQ

SEQ ID NO: 47648 - protein, 161 aa, Arabidopsis thaliana
  peptide (1)..(161): Ceres Seq. ID no. 12720776
MESPPEGYRRNVGVCLMNSSKKIFTASRLDIPSAWQMPQGGIDEGEDPRVAVMRELKEETGVHSAEILAEAPHWITYDFPPDVREKLKVRWGSDWKGQAQKWFLLKFTGKDEEINLLGDGTEKPEFGEWSWTSPDQVVENAVEFKKPVYKEVMSAFASHLQ

SEQ ID NO: 47649 - protein, 145 aa, Arabidopsis thaliana
  peptide (1)..(145): Ceres Seq. ID no. 12720777
MNSSKKIFTASRLDIPSAWQMPQGGIDEGEDPRVAVMRELKEETGVHSAEILAEAPHWITYDFPPDVREKLKVRWGSDWKGQAQKWFLLKFTGKDEEINLLGDGTEKPEFGEWSWTSPDQVVENAVEFKKPVYKEVMSAFASHLQ

SEQ ID NO: 47650 - DNA, 1312 bp, Arabidopsis thaliana
  misc_feature (1)..(1312): Ceres Seq. ID no. 13579070
  misc_feature (1)..(1312): Ortholog of  Ceres SEQ ID NO 14308787 as cited in SEQ ID NO 55614
  misc_feature (1)..(1312): Ortholog of  Ceres SEQ ID NO 13656547 as cited in SEQ ID NO 65935
gcatccaccatctttcttcccaatatctaattgagttttttccttctgcgcttgaaaagaaatgtcgaattctaggatgaatggtgttgagaagctaagcagcaaatccacaaggcgtgtcgcaaatgccggaaaggcaacactgcttgctcttggcaaagccttcccaagccaagtcgttcctcaggagaatctagtggaaggatttctacgagacaccaaatgtgatgacgcgtttatcaaagaaaagctggaacacttgtgcaaaacgacaaccgtgaagacgcgatacactgtgttgacgcgagagatactggctaaataccctgagctaacaacagagggttcaccaacaatcaagcaaagacttgaaattgcaaacgaggcggttgtggaaatggcattggaagccagtttaggttgcatcaaggaatggggaaggccagtggaagacatcactcacattgtctacgtttcctcaagcgagatccgtttacccggtggtgacctttacctctcagcaaagctaggcctgaggaatgacgtgaacagagtgatgctgtattttctgggatgctacggaggtgtgactggcctccgtgtggccaaagacattgctgagaacaaccccggaagccgtgttctgctcacaacctctgaaaccaccattctcggatttcggccaccaaacaaagcgcgtccgtacgacctagttggagctgctctgtttggagatggtgcagctgctgtgatcatcggagctgacccgagagagtgtgaagctcctttcatggagctgcactatgcggttcagcagttcttgccggggacacagaacgtgatcgacgggaggttgactgaggaaggcataaacttcaagcttggacgagacctcccgcagaagatagaggagaacatagaagagttctgcaagaagctgatgggaaaggctggcgatgagtcgatggagttcaatgacatgttctgggctgttcatccaggaggacctgcgattctgaaccgtctggagacaaaactgaagctggagaaagagaagctggagagcagcagaagggcgttggtggattacgggaacgtgagcagcaacacgatactgtatgtgatggagtatatgagagatgagctgaagaagaaaggtgacgcagcacaagagtggggacttggcttagctttcggacctggaatcaccttcgaaggccttctcatccgcagcctcacctcttcctaattgttataatttacatttgggttataaacatattgtaagcatgaaatgagagtattatttgtc

SEQ ID NO: 47651 - protein, 395 aa, Arabidopsis thaliana
  peptide (1)..(395): Ceres Seq. ID no. 13579071
MSNSRMNGVEKLSSKSTRRVANAGKATLLALGKAFPSQVVPQENLVEGFLRDTKCDDAFIKEKLEHLCKTTTVKTRYTVLTREILAKYPELTTEGSPTIKQRLEIANEAVVEMALEASLGCIKEWGRPVEDITHIVYVSSSEIRLPGGDLYLSAKLGLRNDVNRVMLYFLGCYGGVTGLRVAKDIAENNPGSRVLLTTSETTILGFRPPNKARPYDLVGAALFGDGAAAVIIGADPRECEAPFMELHYAVQQFLPGTQNVIDGRLTEEGINFKLGRDLPQKIEENIEEFCKKLMGKAGDESMEFNDMFWAVHPGGPAILNRLETKLKLEKEKLESSRRALVDYGNVSSNTILYVMEYMRDELKKKGDAAQEWGLGLAFGPGITFEGLLIRSLTSS

SEQ ID NO: 47652 - protein, 390 aa, Arabidopsis thaliana
  peptide (1)..(390): Ceres Seq. ID no. 13579072
MNGVEKLSSKSTRRVANAGKATLLALGKAFPSQVVPQENLVEGFLRDTKCDDAFIKEKLEHLCKTTTVKTRYTVLTREILAKYPELTTEGSPTIKQRLEIANEAVVEMALEASLGCIKEWGRPVEDITHIVYVSSSEIRLPGGDLYLSAKLGLRNDVNRVMLYFLGCYGGVTGLRVAKDIAENNPGSRVLLTTSETTILGFRPPNKARPYDLVGAALFGDGAAAVIIGADPRECEAPFMELHYAVQQFLPGTQNVIDGRLTEEGINFKLGRDLPQKIEENIEEFCKKLMGKAGDESMEFNDMFWAVHPGGPAILNRLETKLKLEKEKLESSRRALVDYGNVSSNTILYVMEYMRDELKKKGDAAQEWGLGLAFGPGITFEGLLIRSLTSS

SEQ ID NO: 47653 - protein, 283 aa, Arabidopsis thaliana
  peptide (1)..(283): Ceres Seq. ID no. 13579073
MALEASLGCIKEWGRPVEDITHIVYVSSSEIRLPGGDLYLSAKLGLRNDVNRVMLYFLGCYGGVTGLRVAKDIAENNPGSRVLLTTSETTILGFRPPNKARPYDLVGAALFGDGAAAVIIGADPRECEAPFMELHYAVQQFLPGTQNVIDGRLTEEGINFKLGRDLPQKIEENIEEFCKKLMGKAGDESMEFNDMFWAVHPGGPAILNRLETKLKLEKEKLESSRRALVDYGNVSSNTILYVMEYMRDELKKKGDAAQEWGLGLAFGPGITFEGLLIRSLTSS

SEQ ID NO: 47654 - DNA, 1113 bp, Arabidopsis thaliana
  misc_feature (1)..(1113): Ceres Seq. ID no. 13647305
  misc_feature (1)..(1113): Ortholog of  Ceres SEQ ID NO 14314964 as cited in SEQ ID NO 54270
gctttgtctgattgctatgaagagcatttccttgttccatacaaacgcattgtcatggtgaccaacaagagagtcgtgttattacagtgctctgatctggataagatggataagaaacccagcaagatcatgtgggatgtgccttgggaggaacttatggcgttggaattggcaaaggcaggtagccaaaggccctcgcatctcatactgcatctgaagagttttcggaagtcagagagttttgctcaggttataaaatgcagcgtgccagaagacttaaatggactagaacctcaagctgtccgaatctgttcagtagtgcgcaaaatgtggaaagcatatcagtctaacatgaaaaatcttgtgctcaaggttccttcaagccagagacatgtgtattttgcttggaatgaggctgatggaagagactcaaaaacatacaaaaacaaagctattattaaatcgagagaactttcttcttcaagctctgtctcagatgataaaaagcttgtcaaacatagtatcaacttctcaaaaatctggagtagtgagcgagaatccaaaggtcgatgttctttgtgtaaaaagcaggattctgaagatggaggagtttgcactatctggagacccagttgtccagcgggattcgtgtcagtgggtgatgtagctcacgtgggtagccatcccccaaatgttgctgctgtctacaataacaccaatggagtgtttgcacttcctgtgggttatgacctggtgtggaggaattgcttagatgattacataagtcctgtatcgatctggcatccacgggctcctgagggattcgtctctcctggatgtgttgcagtggctggtttcatcgagccagagctcaacacagtgtattgcatgccaacgtctttggccgagcagactgagtttgaagaacagaaggtttggtctgcacctgactcgtacccatgggcttgtcaaatttaccaagttcgaagtgatgcactccactttatggctctgcgacagaccaaagaggactctgattggaaagcaattagagttcgagatgattacaggtccatagaatctgaatcgggaaagaatttgcgtttagaatga

SEQ ID NO: 47655 - protein, 370 aa, Arabidopsis thaliana
  peptide (1)..(370): Ceres Seq. ID no. 13647306
ALSDCYEEHFLVPYKRIVMVTNKRVVLLQCSDLDKMDKKPSKIMWDVPWEELMALELAKAGSQRPSHLILHLKSFRKSESFAQVIKCSVPEDLNGLEPQAVRICSVVRKMWKAYQSNMKNLVLKVPSSQRHVYFAWNEADGRDSKTYKNKAIIKSRELSSSSSVSDDKKLVKHSINFSKIWSSERESKGRCSLCKKQDSEDGGVCTIWRPSCPAGFVSVGDVAHVGSHPPNVAAVYNNTNGVFALPVGYDLVWRNCLDDYISPVSIWHPRAPEGFVSPGCVAVAGFIEPELNTVYCMPTSLAEQTEFEEQKVWSAPDSYPWACQIYQVRSDALHFMALRQTKEDSDWKAIRVRDDYRSIESESGKNLRLE

SEQ ID NO: 47656 - protein, 352 aa, Arabidopsis thaliana
  peptide (1)..(352): Ceres Seq. ID no. 13647307
MVTNKRVVLLQCSDLDKMDKKPSKIMWDVPWEELMALELAKAGSQRPSHLILHLKSFRKSESFAQVIKCSVPEDLNGLEPQAVRICSVVRKMWKAYQSNMKNLVLKVPSSQRHVYFAWNEADGRDSKTYKNKAIIKSRELSSSSSVSDDKKLVKHSINFSKIWSSERESKGRCSLCKKQDSEDGGVCTIWRPSCPAGFVSVGDVAHVGSHPPNVAAVYNNTNGVFALPVGYDLVWRNCLDDYISPVSIWHPRAPEGFVSPGCVAVAGFIEPELNTVYCMPTSLAEQTEFEEQKVWSAPDSYPWACQIYQVRSDALHFMALRQTKEDSDWKAIRVRDDYRSIESESGKNLRLE

SEQ ID NO: 47657 - protein, 335 aa, Arabidopsis thaliana
  peptide (1)..(335): Ceres Seq. ID no. 13647308
MDKKPSKIMWDVPWEELMALELAKAGSQRPSHLILHLKSFRKSESFAQVIKCSVPEDLNGLEPQAVRICSVVRKMWKAYQSNMKNLVLKVPSSQRHVYFAWNEADGRDSKTYKNKAIIKSRELSSSSSVSDDKKLVKHSINFSKIWSSERESKGRCSLCKKQDSEDGGVCTIWRPSCPAGFVSVGDVAHVGSHPPNVAAVYNNTNGVFALPVGYDLVWRNCLDDYISPVSIWHPRAPEGFVSPGCVAVAGFIEPELNTVYCMPTSLAEQTEFEEQKVWSAPDSYPWACQIYQVRSDALHFMALRQTKEDSDWKAIRVRDDYRSIESESGKNLRLE

SEQ ID NO: 47658 - DNA, 2229 bp, Arabidopsis thaliana
  misc_feature (1)..(2229): Ceres Seq. ID no. 13647309
  misc_feature (1)..(2229): Ortholog of  Ceres SEQ ID NO 14303276 as cited in SEQ ID NO 1264
  misc_feature (1)..(2229): Ortholog of  Ceres SEQ ID NO 15170536 as cited in SEQ ID NO 52791
  misc_feature (1)..(2229): Ortholog of  Ceres SEQ ID NO 15171813 as cited in SEQ ID NO 57309
  misc_feature (1)..(2229): Ortholog of  Ceres SEQ ID NO 14314378 as cited in SEQ ID NO 57601
  misc_feature (1)..(2229): Ortholog of  Ceres SEQ ID NO 12465083 as cited in SEQ ID NO 68239
acaaacctaaaaacctagctctattctttctctttgctgctcttaaactttttcttagctttttctatcttcgtgtgataatggctggtaaaggagaaggtcctgcgatcggtatcgatcttggtacgacgtactcttgcgtcggagtgtggcaacacgaccgtgttgagatcatcgctaatgatcaaggaaacagaaccactccctcgtacgttgctttcactgactccgagaggttgatcggtgatgctgctaagaaccaagtcgccatgaaccctgttaacactgttttcgatgcaaagaggttgattggtcgtagattcagtgacgcatctgtccaaagtgacagacagttatggcctttcactatcatctccggaactgcagagaaaccaatgattgtcgtcgaatacaagggagaagagaaacagttcgctgctgaagagatctcttccatggttcttattaagatgcgtgagatcgctgaggctttccttggcactacggtcaagaacgctgtcgtcactgttcctgcttacttcaatgactctcaacgtcaggctacaaaggatgctggtgtcatcgctggtttgaatgttttgcgtatcatcaacgagcccactgctgcagccattgcttatggtcttgacaagaaggccacaagtgttggagagaagaatgttttgatctttgatcttggtggtggtacttttgatgtctctcttcttacaatcgaagagggtatctttgaggtgaaggcaacagctggtgatactcatcttggtggggaagattttgacaacagaatggttaaccattttgttcaagagtttaagagaaagaacaagcaggatatcaccggtcaaccgagagccctcaggagattgagaacagcttgtgagagagcaaagaggactctttcttccaccgctcaaacgaccatcgagattgactctttatatggtggagctgacttctattctccaatcacccgtgctagattcgaagagatgaacatggatctctttaggaagtgtatggagcctgttgagaagtgtctccgtgatgctaagatggacaagagcactgttcacgagattgtccttgttggtggatccacccgtatccctaaggttcagcaattgcttcaggacttcttcaacggcaaagagctttgcaagtctatcaaccctgatgaggctgtagcttatggtgcagctgttcaggctgcgatcctaagcggtgaaggaaacgaaaaggtccaagaccttctcttgcttgatgtcacacctctctcccttggtcttgaaactgctggtggtgtcatgaccactttgattcaaagaaacacaaccattccaaccaagaaggaacaggtcttctcaacttattcggacaaccagcctggagtgttgatccaagtttttgaaggtgagagggctaggaccaaggacaacaacctcctcggtaaatttgagctttctggaattccccctgctccacgaggtgtccctcaaatcactgtctgcttcgacattgacgccaatggtatcctcaacgtctctgctgaggacaagaccactggaaagaagaacaagatcacaatcactaatgacaagggtcgtttgtctaaagaggatattgagaagatggttcaagaagcggagaagtacaagtctgaggatgaggagcacaagaagaaggtcgaggccaagaacgctcttgagaactacgcttacaacatgaggaacaccatccgtgatgagaagatcggtgagaagcttccagctgcagacaagaagaaggttgaggactctattgaggaagcaatccaatggctagatggtaaccaattgggtgaagctgacgagtttgaagacaagatgaaggagttggagagtgtttgcaatccgatcatcgctaagatgtaccaaggaggagctggtggtgaagctggtggtcctggagcttctggaatggacgaggatgaagctcctcctgcatcaggtggtgctggtcccaagatcgaggaagtcgactaagtgttctcttagttattttgtctttttatttgaactctctcaatttagtgttggattttatgttctacattttctttgatctaagtactttctctctattgtttggtcattggtgacccctttctcttaacaatgctttagtggtcacttggtagaaagctttgttatgaaaaattctttacatgtc

SEQ ID NO: 47659 - protein, 679 aa, Arabidopsis thaliana
  peptide (1)..(679): Ceres Seq. ID no. 13647310
KPKNLALFFLFAALKLFLSFFYLRVIMAGKGEGPAIGIDLGTTYSCVGVWQHDRVEIIANDQGNRTTPSYVAFTDSERLIGDAAKNQVAMNPVNTVFDAKRLIGRRFSDASVQSDRQLWPFTIISGTAEKPMIVVEYKGEEKQFAAEEISSMVLIKMREIAEAFLGTTVKNAVVTVPAYFNDSQRQATKDAGVIAGLNVLRIINEPTAAAIAYGLDKKATSVGEKNVLIFDLGGGTFDVSLLTIEEGIFEVKATAGDTHLGGEDFDNRMVNHFVQEFKRKNKQDITGQPRALRRLRTACERAKRTLSSTAQTTIEIDSLYGGADFYSPITRARFEEMNMDLFRKCMEPVEKCLRDAKMDKSTVHEIVLVGGSTRIPKVQQLLQDFFNGKELCKSINPDEAVAYGAAVQAAILSGEGNEKVQDLLLLDVTPLSLGLETAGGVMTTLIQRNTTIPTKKEQVFSTYSDNQPGVLIQVFEGERARTKDNNLLGKFELSGIPPAPRGVPQITVCFDIDANGILNVSAEDKTTGKKNKITITNDKGRLSKEDIEKMVQEAEKYKSEDEEHKKKVEAKNALENYAYNMRNTIRDEKIGEKLPAADKKKVEDSIEEAIQWLDGNQLGEADEFEDKMKELESVCNPIIAKMYQGGAGGEAGGPGASGMDEDEAPPASGGAGPKIEEVD

SEQ ID NO: 47660 - protein, 653 aa, Arabidopsis thaliana
  peptide (1)..(653): Ceres Seq. ID no. 13647311
MAGKGEGPAIGIDLGTTYSCVGVWQHDRVEIIANDQGNRTTPSYVAFTDSERLIGDAAKNQVAMNPVNTVFDAKRLIGRRFSDASVQSDRQLWPFTIISGTAEKPMIVVEYKGEEKQFAAEEISSMVLIKMREIAEAFLGTTVKNAVVTVPAYFNDSQRQATKDAGVIAGLNVLRIINEPTAAAIAYGLDKKATSVGEKNVLIFDLGGGTFDVSLLTIEEGIFEVKATAGDTHLGGEDFDNRMVNHFVQEFKRKNKQDITGQPRALRRLRTACERAKRTLSSTAQTTIEIDSLYGGADFYSPITRARFEEMNMDLFRKCMEPVEKCLRDAKMDKSTVHEIVLVGGSTRIPKVQQLLQDFFNGKELCKSINPDEAVAYGAAVQAAILSGEGNEKVQDLLLLDVTPLSLGLETAGGVMTTLIQRNTTIPTKKEQVFSTYSDNQPGVLIQVFEGERARTKDNNLLGKFELSGIPPAPRGVPQITVCFDIDANGILNVSAEDKTTGKKNKITITNDKGRLSKEDIEKMVQEAEKYKSEDEEHKKKVEAKNALENYAYNMRNTIRDEKIGEKLPAADKKKVEDSIEEAIQWLDGNQLGEADEFEDKMKELESVCNPIIAKMYQGGAGGEAGGPGASGMDEDEAPPASGGAGPKIEEVD

SEQ ID NO: 47661 - protein, 590 aa, Arabidopsis thaliana
  peptide (1)..(590): Ceres Seq. ID no. 13647312
MNPVNTVFDAKRLIGRRFSDASVQSDRQLWPFTIISGTAEKPMIVVEYKGEEKQFAAEEISSMVLIKMREIAEAFLGTTVKNAVVTVPAYFNDSQRQATKDAGVIAGLNVLRIINEPTAAAIAYGLDKKATSVGEKNVLIFDLGGGTFDVSLLTIEEGIFEVKATAGDTHLGGEDFDNRMVNHFVQEFKRKNKQDITGQPRALRRLRTACERAKRTLSSTAQTTIEIDSLYGGADFYSPITRARFEEMNMDLFRKCMEPVEKCLRDAKMDKSTVHEIVLVGGSTRIPKVQQLLQDFFNGKELCKSINPDEAVAYGAAVQAAILSGEGNEKVQDLLLLDVTPLSLGLETAGGVMTTLIQRNTTIPTKKEQVFSTYSDNQPGVLIQVFEGERARTKDNNLLGKFELSGIPPAPRGVPQITVCFDIDANGILNVSAEDKTTGKKNKITITNDKGRLSKEDIEKMVQEAEKYKSEDEEHKKKVEAKNALENYAYNMRNTIRDEKIGEKLPAADKKKVEDSIEEAIQWLDGNQLGEADEFEDKMKELESVCNPIIAKMYQGGAGGEAGGPGASGMDEDEAPPASGGAGPKIEEVD

SEQ ID NO: 47662 - DNA, 496 bp, Arabidopsis thaliana
  misc_feature (1)..(496): Ceres Seq. ID no. 13647325
  misc_feature (1)..(496): Ortholog of  Ceres SEQ ID NO 15177850 as cited in SEQ ID NO 51765
ttttgtataaacagaatttcttatacctcgcagtttgtgtttacgtaaaaaaaaaaaaaaaaaaaaaaaaaaaaattgatatggatcgaagtgttagtggtcggctacattgagttccaacgaaacgctgagctggactcggagaagcgtttgtatccaggaggcaagttctttgacccgttaggattagcgtctgatccggagaagaaggctcagcttcagctagctgagatcaaacatgctcgtttagccatggttgggttcttgggttttgcggttcaggcggctgcaaccggtaaaggaccactcaacaactgggcgactcaccttagtgacccacttcacaccaccattatcgataccttctcttcctcttgatgtggtggctcttagcttctataggtgtcatgtaatgatgtactgtcgttattttaaagaaaatttggcaccttttgtataaacagaatttcttatacctcgcagtttgtgtttacgc

SEQ ID NO: 47663 - protein, 41 aa, Arabidopsis thaliana
  peptide (1)..(41): Ceres Seq. ID no. 13647326
MVGFLGFAVQAAATGKGPLNNWATHLSDPLHTTIIDTFSSS

SEQ ID NO: 47664 - protein, 36 aa, Arabidopsis thaliana
  peptide (1)..(36): Ceres Seq. ID no. 13647327
LYKQNFLYLAVCVYVKKKKKKKKKIDMDRSVSGRLH

SEQ ID NO: 47665 - DNA, 4304 bp, Arabidopsis thaliana
  misc_feature (1)..(4304): Ceres Seq. ID no. 13647333
  misc_feature (1)..(4304): Ortholog of  Ceres SEQ ID NO 14306467 as cited in SEQ ID NO 53338
gaaaaaaggaacatggccaaggctcgaaagccgaagaacgaggaagctcctggcgcgaagacttcagagaacactggagctaaagttcttcaccagaaactctttctctctattgacttcaaaaaacgccaaatctacggttacacagagttagaagtgagtgtgccagatattggtattgtgggactacacgcagagaacttgggaattgagagtgttttggtagatggggaacctactgtatttgagtactatccgcaccatcagaactctgaaactgaaagtaactggaactcggtctctgacccagcttcagcagctgatgctgcggccatggaatatgtcggggttcttaagagagaagacactgcaaatttactgatcaactgttgcaagccttctaaggatttatctgaacagctggacagtgtgactttagaaaacggttcccaatcttcaggggaggcaaaacagaatgttaaattgattcggattaactactgggtagagaaaatagagtcaggaattcattttgatgggaacattgtacatactgataaccagatgagacgtgctcgttgttggtttccttgtattgatgatgagtaccatcgttgcagtttcgatttggaattcactgttccgcacaactttgtggctgttagtgttgggaaattactctaccaggttatgtgcaaagaagatactactcaaaaaacgtatgtttatgaactagctattcctattgcaccgcggtgggtgtctttagttgcaggaccattggaaatccttccagatcagaccaactttctcatatctaacttgtgtttgccgcatgatctctcgaggcttcgtaatacaatggaatttttccatgaagcttatagctactatgaggattatttaagtgcgaactttccatttggattctacaagcaagtatttttacctcctgaaatggttgttacttcgtcgacttcgggagcttccttgagtatctttagctcccacatactatatgatgagagggttattgatcagacaatagatacacgcattaaacttgcttctgcgttagcaaaacagtggtttggagtttatattactcctgaatcaccaaatgatgattggctccttgatggtcttgctggtttcttaacggatatgtttatcaagcagtttttgggaaataatgaagcacgatatcggagatacaaggcaaattgtgctgtctgtaaagctgatgatagtggtgcaatgtgcttgagctcatctccttcttgcagggacctatttggaactcattctattggaatgcatgggaagatacgatcatggaaatcaggagcagtccttcagatgttggagaagcaaatgggctcagactcgtttcgtaaaatattgcagaaaattatttctcgagccaaggatccatctaattctatacggtctcttagcacgaaggagttccggcaatttgctaataagattggaaatcttgagcgtccatttcttaaagaattttttcagcgatgggttgcatcttatggttgtcccgtgctaaggattgggttgtcttacaacaaaaggaaaaacaatgttgaaatggctgctctgcgagaatgcacggctgcactggatgcaagattatcagttataggggctacttctgattcagaaagccgggatgtggatgctggctggccgggtattatgagtataagggtttatgaactcgatggaatgtctgatcatccaaagttgcctatggctggagatagatggcagctactggaattaccatgtcattctaaacttgctgctaaacgctatcaaaaaccaaagaagggagggaaacctgatggggctgaagacaatgttgatgctatagcaccgttagaaaataaaacgagcattgaatctcccttggcttggattaaagctgaccctgagatggaatatattgctgagattcaccttcatcagcccctacaaatgtgggtcaatcaactagagaaggacggagatgttgttgctcaggcacaagcaattgcgtcacttgaagccttaaaacaacactccttttccattgtgaatgcactcaaaaatgtcctcactgactccaaggtcttctggagaatacgtattgcggcagcgtttgcattggctaaaacagcatcagaggagtctgactgggcgggtttgcaacatctaataaagttttataagagtagaagatttgatgcagagattggactccccaagccgaatgacttccgcgatttcccagaatattttgtgcttgaggccattccacatgccattgcaatagttaggggtgctgaggggaaaagccctagagaagctgttgaatttatcttacagcttctgaagtacaatgacaacagtgggaattcgtattctgatgtattctggcttgctgtgcttgttcagtcagttggtgatctcgaattctgtcagcagagtctaacgtttttggcccctcttctgaagcgcattgacagactcttgcagtttgacaggttgatgccaagctacaatggcatcttgacaattagctgcatccgaacattggcacagactgctctcaagctttctgattccatcagtttcgatcacatctgtaaacttattgaacctttccggaattcggatacaatattgcaaattcgtatagaaggaagtagggcacttcttgacatcgagtaccaatccaaaggcataagttccgcacttttgttgtttatgaaatatttggtagaagaatcatctttgagagggcaggtaaaattgtgtgtacacacaatgcggttatgtcaaatagcagttggatgtgactcagacgattgtgtcgacactgttactcttctggatttgctgcatctattcaagagccatgtagtatttaacaatgaacttcttcgctactacttgttctgcatttttcaaatcctcgctggaagacccccaacgttgttcggagttcccaaagaaaaacctttgcagcttgttgatgtggaggcctgcattgaaccgaaaaatgtatttttggttcccggagcagaggcaggggagccttcactttcggcacttggagatgccaaaggacaatcgctggatgttgctccttatggtgttccaataataccacaggaaatgttcatgcctattgttcctgaactgatgttgccagaacctgttgcagcgtatgatgagacacagcatcttgaacctcgcatggaaagtcaaaaccaaccttcacatgaaaatcccatcgttcatgagattccatcagatgttgaaggtccaacagaagaattagctcatagggaagcaaaccctccaacaaaggaacctcaaaaagaacctgatgtggtttctgtgtctgttagtcatgaggtgaagaagtctgttatacggatcaaggtcagaccatctggggcaaccagcagagcggaaggatcagcacgaactatagaaagatctcaagggattgtggtacgccatgatatagaccgaggtcaaactagttcagcttcagtggacgccccacagagaatctcaactgacgctgtgagcataagcaatcagaatcacgtggaggaagtaaattcgtgtcacgatgttggttctcgcatgactgcaagcatcggcagtgtaaaatttgcaagcgaaggcgatatttttgggaaagagttgcaatgcactgctgagtctgggaaaccttcgacaagccagaaagcagataataacaaccgaactgtaccacctagcttcttaccactagaccacagtatggaaaacgaggcgcagcagaaatacgcgagcctccaaacactttcgattggtaaagaaaaggaaaagaagaaagacaaggaaaagaaagagaagaagaggaaaagagaagatcccgtttatctagagaagaaacggttaaagaaagagaagaaacgaaaggagaaggaaatggcgaagctcgtgagcagcactacggatccagctaaaaagaagatagagagtgttgcggaggttaaagaagaagaaccaagtgatggtgccatgttgattaaggttgaaccaaagactgaaccatcaacagcagaagctagaccgcttcccaaattccgaatcaaactgaaaagcaaagcgttcaacaactcataaggttagatccgagccagtccctccccgccaaaatctgagtagtaacttttatttccaaaagctttgttgttacaacttgcaaggtgttgtgattatatgtcaatgtaatctgtttattc

SEQ ID NO: 47666 - protein, 1394 aa, Arabidopsis thaliana
  peptide (1)..(1394): Ceres Seq. ID no. 13647334
EKRNMAKARKPKNEEAPGAKTSENTGAKVLHQKLFLSIDFKKRQIYGYTELEVSVPDIGIVGLHAENLGIESVLVDGEPTVFEYYPHHQNSETESNWNSVSDPASAADAAAMEYVGVLKREDTANLLINCCKPSKDLSEQLDSVTLENGSQSSGEAKQNVKLIRINYWVEKIESGIHFDGNIVHTDNQMRRARCWFPCIDDEYHRCSFDLEFTVPHNFVAVSVGKLLYQVMCKEDTTQKTYVYELAIPIAPRWVSLVAGPLEILPDQTNFLISNLCLPHDLSRLRNTMEFFHEAYSYYEDYLSANFPFGFYKQVFLPPEMVVTSSTSGASLSIFSSHILYDERVIDQTIDTRIKLASALAKQWFGVYITPESPNDDWLLDGLAGFLTDMFIKQFLGNNEARYRRYKANCAVCKADDSGAMCLSSSPSCRDLFGTHSIGMHGKIRSWKSGAVLQMLEKQMGSDSFRKILQKIISRAKDPSNSIRSLSTKEFRQFANKIGNLERPFLKEFFQRWVASYGCPVLRIGLSYNKRKNNVEMAALRECTAALDARLSVIGATSDSESRDVDAGWPGIMSIRVYELDGMSDHPKLPMAGDRWQLLELPCHSKLAAKRYQKPKKGGKPDGAEDNVDAIAPLENKTSIESPLAWIKADPEMEYIAEIHLHQPLQMWVNQLEKDGDVVAQAQAIASLEALKQHSFSIVNALKNVLTDSKVFWRIRIAAAFALAKTASEESDWAGLQHLIKFYKSRRFDAEIGLPKPNDFRDFPEYFVLEAIPHAIAIVRGAEGKSPREAVEFILQLLKYNDNSGNSYSDVFWLAVLVQSVGDLEFCQQSLTFLAPLLKRIDRLLQFDRLMPSYNGILTISCIRTLAQTALKLSDSISFDHICKLIEPFRNSDTILQIRIEGSRALLDIEYQSKGISSALLLFMKYLVEESSLRGQVKLCVHTMRLCQIAVGCDSDDCVDTVTLLDLLHLFKSHVVFNNELLRYYLFCIFQILAGRPPTLFGVPKEKPLQLVDVEACIEPKNVFLVPGAEAGEPSLSALGDAKGQSLDVAPYGVPIIPQEMFMPIVPELMLPEPVAAYDETQHLEPRMESQNQPSHENPIVHEIPSDVEGPTEELAHREANPPTKEPQKEPDVVSVSVSHEVKKSVIRIKVRPSGATSRAEGSARTIERSQGIVVRHDIDRGQTSSASVDAPQRISTDAVSISNQNHVEEVNSCHDVGSRMTASIGSVKFASEGDIFGKELQCTAESGKPSTSQKADNNNRTVPPSFLPLDHSMENEAQQKYASLQTLSIGKEKEKKKDKEKKEKKRKREDPVYLEKKRLKKEKKRKEKEMAKLVSSTTDPAKKKIESVAEVKEEEPSDGAMLIKVEPKTEPSTAEARPLPKFRIKLKSKAFNNS

SEQ ID NO: 47667 - protein, 1390 aa, Arabidopsis thaliana
  peptide (1)..(1390): Ceres Seq. ID no. 13647335
MAKARKPKNEEAPGAKTSENTGAKVLHQKLFLSIDFKKRQIYGYTELEVSVPDIGIVGLHAENLGIESVLVDGEPTVFEYYPHHQNSETESNWNSVSDPASAADAAAMEYVGVLKREDTANLLINCCKPSKDLSEQLDSVTLENGSQSSGEAKQNVKLIRINYWVEKIESGIHFDGNIVHTDNQMRRARCWFPCIDDEYHRCSFDLEFTVPHNFVAVSVGKLLYQVMCKEDTTQKTYVYELAIPIAPRWVSLVAGPLEILPDQTNFLISNLCLPHDLSRLRNTMEFFHEAYSYYEDYLSANFPFGFYKQVFLPPEMVVTSSTSGASLSIFSSHILYDERVIDQTIDTRIKLASALAKQWFGVYITPESPNDDWLLDGLAGFLTDMFIKQFLGNNEARYRRYKANCAVCKADDSGAMCLSSSPSCRDLFGTHSIGMHGKIRSWKSGAVLQMLEKQMGSDSFRKILQKIISRAKDPSNSIRSLSTKEFRQFANKIGNLERPFLKEFFQRWVASYGCPVLRIGLSYNKRKNNVEMAALRECTAALDARLSVIGATSDSESRDVDAGWPGIMSIRVYELDGMSDHPKLPMAGDRWQLLELPCHSKLAAKRYQKPKKGGKPDGAEDNVDAIAPLENKTSIESPLAWIKADPEMEYIAEIHLHQPLQMWVNQLEKDGDVVAQAQAIASLEALKQHSFSIVNALKNVLTDSKVFWRIRIAAAFALAKTASEESDWAGLQHLIKFYKSRRFDAEIGLPKPNDFRDFPEYFVLEAIPHAIAIVRGAEGKSPREAVEFILQLLKYNDNSGNSYSDVFWLAVLVQSVGDLEFCQQSLTFLAPLLKRIDRLLQFDRLMPSYNGILTISCIRTLAQTALKLSDSISFDHICKLIEPFRNSDTILQIRIEGSRALLDIEYQSKGISSALLLFMKYLVEESSLRGQVKLCVHTMRLCQIAVGCDSDDCVDTVTLLDLLHLFKSHVVFNNELLRYYLFCIFQILAGRPPTLFGVPKEKPLQLVDVEACIEPKNVFLVPGAEAGEPSLSALGDAKGQSLDVAPYGVPIIPQEMFMPIVPELMLPEPVAAYDETQHLEPRMESQNQPSHENPIVHEIPSDVEGPTEELAHREANPPTKEPQKEPDVVSVSVSHEVKKSVIRIKVRPSGATSRAEGSARTIERSQGIVVRHDIDRGQTSSASVDAPQRISTDAVSISNQNHVEEVNSCHDVGSRMTASIGSVKFASEGDIFGKELQCTAESGKPSTSQKADNNNRTVPPSFLPLDHSMENEAQQKYASLQTLSIGKEKEKKKDKEKKEKKRKREDPVYLEKKRLKKEKKRKEKEMAKLVSSTTDPAKKKIESVAEVKEEEPSDGAMLIKVEPKTEPSTAEARPLPKFRIKLKSKAFNNS

SEQ ID NO: 47668 - protein, 1283 aa, Arabidopsis thaliana
  peptide (1)..(1283): Ceres Seq. ID no. 13647336
MEYVGVLKREDTANLLINCCKPSKDLSEQLDSVTLENGSQSSGEAKQNVKLIRINYWVEKIESGIHFDGNIVHTDNQMRRARCWFPCIDDEYHRCSFDLEFTVPHNFVAVSVGKLLYQVMCKEDTTQKTYVYELAIPIAPRWVSLVAGPLEILPDQTNFLISNLCLPHDLSRLRNTMEFFHEAYSYYEDYLSANFPFGFYKQVFLPPEMVVTSSTSGASLSIFSSHILYDERVIDQTIDTRIKLASALAKQWFGVYITPESPNDDWLLDGLAGFLTDMFIKQFLGNNEARYRRYKANCAVCKADDSGAMCLSSSPSCRDLFGTHSIGMHGKIRSWKSGAVLQMLEKQMGSDSFRKILQKIISRAKDPSNSIRSLSTKEFRQFANKIGNLERPFLKEFFQRWVASYGCPVLRIGLSYNKRKNNVEMAALRECTAALDARLSVIGATSDSESRDVDAGWPGIMSIRVYELDGMSDHPKLPMAGDRWQLLELPCHSKLAAKRYQKPKKGGKPDGAEDNVDAIAPLENKTSIESPLAWIKADPEMEYIAEIHLHQPLQMWVNQLEKDGDVVAQAQAIASLEALKQHSFSIVNALKNVLTDSKVFWRIRIAAAFALAKTASEESDWAGLQHLIKFYKSRRFDAEIGLPKPNDFRDFPEYFVLEAIPHAIAIVRGAEGKSPREAVEFILQLLKYNDNSGNSYSDVFWLAVLVQSVGDLEFCQQSLTFLAPLLKRIDRLLQFDRLMPSYNGILTISCIRTLAQTALKLSDSISFDHICKLIEPFRNSDTILQIRIEGSRALLDIEYQSKGISSALLLFMKYLVEESSLRGQVKLCVHTMRLCQIAVGCDSDDCVDTVTLLDLLHLFKSHVVFNNELLRYYLFCIFQILAGRPPTLFGVPKEKPLQLVDVEACIEPKNVFLVPGAEAGEPSLSALGDAKGQSLDVAPYGVPIIPQEMFMPIVPELMLPEPVAAYDETQHLEPRMESQNQPSHENPIVHEIPSDVEGPTEELAHREANPPTKEPQKEPDVVSVSVSHEVKKSVIRIKVRPSGATSRAEGSARTIERSQGIVVRHDIDRGQTSSASVDAPQRISTDAVSISNQNHVEEVNSCHDVGSRMTASIGSVKFASEGDIFGKELQCTAESGKPSTSQKADNNNRTVPPSFLPLDHSMENEAQQKYASLQTLSIGKEKEKKKDKEKKEKKRKREDPVYLEKKRLKKEKKRKEKEMAKLVSSTTDPAKKKIESVAEVKEEEPSDGAMLIKVEPKTEPSTAEARPLPKFRIKLKSKAFNNS

SEQ ID NO: 47669 - DNA, 1525 bp, Arabidopsis thaliana; identical to SEQ ID NO: 41191
  misc_feature (1)..(1525): Ceres Seq. ID no. 12323934
  misc_feature (1)..(1525): Ortholog of  Ceres SEQ ID NO 15225244 as cited in SEQ ID NO 66088

SEQ ID NO: 47670 - protein, 465 aa, Arabidopsis thaliana; identical to SEQ ID NO: 41192
  peptide (1)..(465): Ceres Seq. ID no. 12323935

SEQ ID NO: 47671 - protein, 461 aa, Arabidopsis thaliana; identical to SEQ ID NO: 41193
  peptide (1)..(461): Ceres Seq. ID no. 12323936

SEQ ID NO: 47672 - protein, 400 aa, Arabidopsis thaliana; identical to SEQ ID NO: 41194
  peptide (1)..(400): Ceres Seq. ID no. 12323937

SEQ ID NO: 47673 - DNA, 1729 bp, Arabidopsis thaliana
  misc_feature (1)..(1729): Ceres Seq. ID no. 13647368
  misc_feature (1)..(1729): Ortholog of  Ceres SEQ ID NO 13655298 as cited in SEQ ID NO 68914
gagaaaaatccttacatcattttttttttgttatctttgtttcgtttttctggtagaagagagaagaaggagagacgaattggcagctaagcgattctctctctttctctctttctcttctcgtgtaatcttttggtgttcttgaaaccacttttttttttgttaattcctctgtttccttggaattgttttctgcttttttaagaagaaaaaaacgatgaatgtggtgcggagattaacgagtattgcctctggacgtaatttcgtttcttctgataacgtaggagaaactgagacgccgagatcaaagcctaaccagaatcgtgaagaaacagagtctacggaaactacgtcgtacgagaaagattctgtctcttcctcagagaactctgatcatttaccaaaggaaatccgtgaggatatggactgtggaatcatcaagggaaatggaacagaatctggacggattattaccaccaaaaagaagggtttgaatgatcaaaaagacaagacaatctcttacagagctgaacatgtaattggcactggctcattcggtgttgtctttcaggctaagtgcttagagacggaagaaaaagtagcaataaagaaagtgttacaggacaagagatacaaaaacagagaacttcagatcatgcgaatgcttgatcatcctaatgtcgttgagctcaagcattctttcttttccacgactgagaaagacgagctttatcttaaccttgttcttgagtatgtacccgagactatttaccgcgcttccagatcttacaccaagatgaatcagcatatgcctttgatttatattcagctctacacctatcagatttgccgtgctatgaattatctgcatcaagtggttggagtgtgtcaccgtgacattaagccgcagaatctgttggtcaataatgttacgcatgaagtaaagatatgcgattttgggagcgccaaaatgctgattccaggagaaccaaatatatcttacatatgctcaaggtattacagagctcctgaactcatatttggagcaaccgaatacacaagtgcgatcgatatgtggtctgtaggttgtgtcatggctgagctttttcttggacatcctctattccctggagaaaccagtgttgatcaattggtggagatcattaagattttagggacaccagcaagagaagagataaagaacatgaatcctcgttacaatgattttaagttccctcagatcaaagctcagccgtggcacaagattttccggagacaggtatctccagaagcaatggatcttgcctctagattgctccagtattcaccaaacctgagatgcacagcgcttgaagcatgtgcacacccattcttcgatgatctgagagacccgagagcatccttgcctaatggaagagcacttcctccattgtttgatttcacagctcaagaacttgctggggcatctgttgaactgcgtcatcgcttaatacctgagcatgcaaggaaatgaccatttgggttaatggctgcttctctacgcagatgttgatatataaatctttttttattttgagagtttcttgttcacaagtatagcattgtgctggttatgaaccctcactgacctctgcaaccacatcgactagcagtttgaaagtgtataattgtaagtttgtaactttgtagctttcattgttgcagacagaaatgcagaattttccgagtt

SEQ ID NO: 47674 - protein, 431 aa, Arabidopsis thaliana
  peptide (1)..(431): Ceres Seq. ID no. 13647369
MNVVRRLTSIASGRNFVSSDNVGETETPRSKPNQNREETESTETTSYEKDSVSSSENSDHLPKEIREDMDCGIIKGNGTESGRIITTKKKGLNDQKDKTISYRAEHVIGTGSFGVVFQAKCLETEEKVAIKKVLQDKRYKNRELQIMRMLDHPNVVELKHSFFSTTEKDELYLNLVLEYVPETIYRASRSYTKMNQHMPLIYIQLYTYQICRAMNYLHQVVGVCHRDIKPQNLLVNNVTHEVKICDFGSAKMLIPGEPNISYICSRYYRAPELIFGATEYTSAIDMWSVGCVMAELFLGHPLFPGETSVDQLVEIIKILGTPAREEIKNMNPRYNDFKFPQIKAQPWHKIFRRQVSPEAMDLASRLLQYSPNLRCTALEACAHPFFDDLRDPRASLPNGRALPPLFDFTAQELAGASVELRHRLIPEHARK

SEQ ID NO: 47675 - protein, 363 aa, Arabidopsis thaliana
  peptide (1)..(363): Ceres Seq. ID no. 13647370
MDCGIIKGNGTESGRIITTKKKGLNDQKDKTISYRAEHVIGTGSFGVVFQAKCLETEEKVAIKKVLQDKRYKNRELQIMRMLDHPNVVELKHSFFSTTEKDELYLNLVLEYVPETIYRASRSYTKMNQHMPLIYIQLYTYQICRAMNYLHQVVGVCHRDIKPQNLLVNNVTHEVKICDFGSAKMLIPGEPNISYICSRYYRAPELIFGATEYTSAIDMWSVGCVMAELFLGHPLFPGETSVDQLVEIIKILGTPAREEIKNMNPRYNDFKFPQIKAQPWHKIFRRQVSPEAMDLASRLLQYSPNLRCTALEACAHPFFDDLRDPRASLPNGRALPPLFDFTAQELAGASVELRHRLIPEHARK

SEQ ID NO: 47676 - protein, 285 aa, Arabidopsis thaliana
  peptide (1)..(285): Ceres Seq. ID no. 13647371
MRMLDHPNVVELKHSFFSTTEKDELYLNLVLEYVPETIYRASRSYTKMNQHMPLIYIQLYTYQICRAMNYLHQVVGVCHRDIKPQNLLVNNVTHEVKICDFGSAKMLIPGEPNISYICSRYYRAPELIFGATEYTSAIDMWSVGCVMAELFLGHPLFPGETSVDQLVEIIKILGTPAREEIKNMNPRYNDFKFPQIKAQPWHKIFRRQVSPEAMDLASRLLQYSPNLRCTALEACAHPFFDDLRDPRASLPNGRALPPLFDFTAQELAGASVELRHRLIPEHARK

SEQ ID NO: 47677 - DNA, 1606 bp, Arabidopsis thaliana
  misc_feature (1)..(1606): Ceres Seq. ID no. 12725994
  misc_feature (1)..(1606): Ortholog of  Ceres SEQ ID NO 12593464 as cited in SEQ ID NO 69039
atggctctaaacaactttttgactttccaactactccttcttctacttcgtgtttcatcggaatctccatggatcgtcgccggagatgtgtctcgaatcccgatcaatttcctcgaattagcaaagagcccggaggttttcgattcaatggtgagaatcagaaggaaaatccacgagaatcctgagctgggatacgaggaattcgaaactagtaagttcattaggtcggagcttgaccttatcggagttaagtataggtttccggtagctatcaccggtattatcggatatatcggtaccggagaaccaccattcgtcgctctaagagcagatatggatgctttgcctattcaggaagctgttgagtgggagcacaagagcaaaaatcctggaaaaatgcatgcttgtggacatgatggtcatgttgctatgcttcttggtgctgctaagatacttcaacaacatcgccaacatttgcagggaactgtggtgcttatctttcagccagctgaggaaggtttgagtggagcaaagatgatgagagaagaaggagcgttgaagaacgttgaagctatttttggtatacatctttccccccggactccctttgggaaagctgcttcacttgcaggttcatttatggctggagctggagctttcgaggctgtaatcactgggaaaggaggtcatgctgccatccctcagcatacaatagatcctgttgttgcagcttcaagcattgtcctcagtcttcaacacttggtttcacgtgaaactgacccttcggattcaaaggtggtcacagttactaaggttaatggaggcaacgcgttcaatgtcatccctgattcaatcaccataggaggaactcttcgagcctttaccgggtttactcagcttcaggagagaatcaaagagattattacaaagcaagcagccgttcaccgatgcaatgcgtccgtgaatctagcacccaatggtaaccaaccgatgccaccaactgtgaacaacatggacttatacaagaaattcaagaaggtggttagggatttgttgggtcaagaagcttttgtggaagcagtgcctgaaatgggatccgaggacttctcatactttgcagaaacaatcccgggccatttctccctcttgggaatgcaagatgagacccaaggttatgcgtcgtctcattcaccacactatagaatcaacgaggatgttcttccttacggagctgctatccatgcaacgatggcagtacagtacctcaaagataaggcttctaaaggttctgtctcaggctttcatgacgaactctaatccctgtcaaccttggtacagtttcctcatcggtcattggttcgaattcagaagtaccaaatttacactccattgttgatagaattccatttaaatgatgaaaagccttaattcgtagaacaatttcaattgggaaattctcaacttttatgatatgtttgtgtaactgtaacatactggcataatcttagaacatgaattataattaataggctagtcttgttgtaatgcattggcaaaaccacaccttttatgtttatattgatcagaatcggagattttaagcatc

SEQ ID NO: 47678 - protein, 438 aa, Arabidopsis thaliana
  peptide (1)..(438): Ceres Seq. ID no. 12725995
MALNNFLTFQLLLLLLRVSSESPWIVAGDVSRIPINFLELAKSPEVFDSMVRIRRKIHENPELGYEEFETSKFIRSELDLIGVKYRFPVAITGIIGYIGTGEPPFVALRADMDALPIQEAVEWEHKSKNPGKMHACGHDGHVAMLLGAAKILQQHRQHLQGTVVLIFQPAEEGLSGAKMMREEGALKNVEAIFGIHLSPRTPFGKAASLAGSFMAGAGAFEAVITGKGGHAAIPQHTIDPVVAASSIVLSLQHLVSRETDPSDSKVVTVTKVNGGNAFNVIPDSITIGGTLRAFTGFTQLQERIKEIITKQAAVHRCNASVNLAPNGNQPMPPTVNNMDLYKKFKKVVRDLLGQEAFVEAVPEMGSEDFSYFAETIPGHFSLLGMQDETQGYASSHSPHYRINEDVLPYGAAIHATMAVQYLKDKASKGSVSGFHDEL

SEQ ID NO: 47679 - protein, 389 aa, Arabidopsis thaliana
  peptide (1)..(389): Ceres Seq. ID no. 12725996
MVRIRRKIHENPELGYEEFETSKFIRSELDLIGVKYRFPVAITGIIGYIGTGEPPFVALRADMDALPIQEAVEWEHKSKNPGKMHACGHDGHVAMLLGAAKILQQHRQHLQGTVVLIFQPAEEGLSGAKMMREEGALKNVEAIFGIHLSPRTPFGKAASLAGSFMAGAGAFEAVITGKGGHAAIPQHTIDPVVAASSIVLSLQHLVSRETDPSDSKVVTVTKVNGGNAFNVIPDSITIGGTLRAFTGFTQLQERIKEIITKQAAVHRCNASVNLAPNGNQPMPPTVNNMDLYKKFKKVVRDLLGQEAFVEAVPEMGSEDFSYFAETIPGHFSLLGMQDETQGYASSHSPHYRINEDVLPYGAAIHATMAVQYLKDKASKGSVSGFHDEL

SEQ ID NO: 47680 - protein, 327 aa, Arabidopsis thaliana
  peptide (1)..(327): Ceres Seq. ID no. 12725997
MDALPIQEAVEWEHKSKNPGKMHACGHDGHVAMLLGAAKILQQHRQHLQGTVVLIFQPAEEGLSGAKMMREEGALKNVEAIFGIHLSPRTPFGKAASLAGSFMAGAGAFEAVITGKGGHAAIPQHTIDPVVAASSIVLSLQHLVSRETDPSDSKVVTVTKVNGGNAFNVIPDSITIGGTLRAFTGFTQLQERIKEIITKQAAVHRCNASVNLAPNGNQPMPPTVNNMDLYKKFKKVVRDLLGQEAFVEAVPEMGSEDFSYFAETIPGHFSLLGMQDETQGYASSHSPHYRINEDVLPYGAAIHATMAVQYLKDKASKGSVSGFHDEL

SEQ ID NO: 47681 - DNA, 2388 bp, Arabidopsis thaliana
  misc_feature (1)..(2388): Ceres Seq. ID no. 13647403
  misc_feature (1)..(2388): Ortholog of  Ceres SEQ ID NO 14307716 as cited in SEQ ID NO 59652
tcaaaaaaaaaaaaataggaagccttcatcgtcttctgccgaacatctctagaaagtcctacacagttttttttttcgatctagcttcgatgaattgatacaatctcttctatctgctgagttttttgttttctggtaaacaattttatctgtggagttttctggagttgctagtggaagaatctgtctcacagctaggcgattatctttcggatgaatttcatgggaacgatgatggtatagtgccagactcagcgtatgaggatggaggtcagtttccaattctagttagtaacaggaagaaacgaagaaatgatgatatgggtagtggaacaaaccatctaaagagtaatacttttatcaagagagaggcaaacatgttaggaaaaaatccatggcctgagaaagatagtggtggctcttcggtttctcgtgatacgggaacaggaaaagatgttcaggatatgacattggaggatacaaatacttcagatcatggtttcaatggtggccacgtagatgtggttgaaaatttctccactggggatcccatgttgtgtgacacttccgctgcaacgaatgatggcgtatataattattccctcaacagcattccggatgctgaaaatgatcttagctttttcgacaatggagataaagaaaaaaatgatctcttctatggctggggtgacataggaaattttgaggatgtggacaacatgcttaggagttgtgattcaacattcggcttggatagtcttaataatgaaggtgacttagggtggttctcttctgcccagccaaacgaggagacagcaggcgcgatgacagatgatctcaaaccagacaaaatgttggaaaatcaaagaaccgctatgttgcaggttgaagactttttgaacaacagtgagcccaaccatgctgttgaagatgagtatggatatactattgaggacgattcagctcaaggaaaatcatcacaaaatgtattcgatacaagtttgcaaaagaaggatatattgatgctggatgtagaggcaaatcttgagaagaagcagactgatcatcttcatcatctggatgggaaaagtgatgggttctcggagaacagttttactttacagcacagtggtatttcaagggaaataatggataccaaccagtattaccctccctccgcattccaacagcgagatgtgccatactcgcatttcaattgtgagcagccttccgttcaagtatcagcatgtgaaagtaaatctggtattaaatctgagaacaaacccagtccttcctctgcttcaaatgagtcatacacatcaaatcatgcacaatcaatcgagagcttacaaggtccaactgttgatgatcggtttaggaaggtctttgaaacgagagccaacttgctgcctgggcaagatatgcctccttcttttgctgcaaataccaagaagagtagtaagacagactccatggtgtttcctgatgctgctcctatccagaagattgggcttgagaatgaccacagaaaagctgcaactgaattggaaacatcaaatatgcagggaagttcttgtgttagctctgttgtggatgacatttcactggaagcaacaagttttcgccagcttcaacaagttatagaacagttggatgttaggacaaagctttgcataagagacagcttataccgattagcaaaaagtgcggaacagagacatcatggtggaaacagaccggagaaaggcgcaggctcgcatctcgtgactggtgaagcagacaagtatgctggattcatggatatcgaaactgatacaaacccgatagatcgatcgatagctcatttgctgtttcacaggccctcagactcatctctttcatccgataacaatgttctgtcttataaatctcatccaatgattcctcagcccaatagtagtccgagcctgaggatagagaaacaagaggaaactacagaacttagacccgaagcagaagttgtaacaagtgacaacaattaatgatgtcaaataaaactggctctttcattgctgaagcattcgagatattgttgttaacactaatctcgattttggctaagcgaaattgctcaggttagttactaaaatcctgactgcttcttcattagaatcatggattttgtaacacagttgtatttatgtgttgagataactttctggtctagatttcggttcgaacctgattgtacacctggttgctcgaacctgattgtacacctggttgctcgaaccaggtctttaagatatgttctttacctttgtaatctgttcaagttgttaagtagaggaagaagtagagacatagcaattctgtagataaagatgttagttcgttttgtaatgcgat

SEQ ID NO: 47682 - protein, 566 aa, Arabidopsis thaliana
  peptide (1)..(566): Ceres Seq. ID no. 13647404
MGSGTNHLKSNTFIKREANMLGKNPWPEKDSGGSSVSRDTGTGKDVQDMTLEDTNTSDHGFNGGHVDVVENFSTGDPMLCDTSAATNDGVYNYSLNSIPDAENDLSFFDNGDKEKNDLFYGWGDIGNFEDVDNMLRSCDSTFGLDSLNNEGDLGWFSSAQPNEETAGAMTDDLKPDKMLENQRTAMLQVEDFLNNSEPNHAVEDEYGYTIEDDSAQGKSSQNVFDTSLQKKDILMLDVEANLEKKQTDHLHHLDGKSDGFSENSFTLQHSGISREIMDTNQYYPPSAFQQRDVPYSHFNCEQPSVQVSACESKSGIKSENKPSPSSASNESYTSNHAQSIESLQGPTVDDRFRKVFETRANLLPGQDMPPSFAANTKKSSKTDSMVFPDAAPIQKIGLENDHRKAATELETSNMQGSSCVSSVVDDISLEATSFRQLQQVIEQLDVRTKLCIRDSLYRLAKSAEQRHHGGNRPEKGAGSHLVTGEADKYAGFMDIETDTNPIDRSIAHLLFHRPSDSSLSSDNNVLSYKSHPMIPQPNSSPSLRIEKQEETTELRPEAEVVTSDNN

SEQ ID NO: 47683 - protein, 547 aa, Arabidopsis thaliana
  peptide (1)..(547): Ceres Seq. ID no. 13647405
MLGKNPWPEKDSGGSSVSRDTGTGKDVQDMTLEDTNTSDHGFNGGHVDVVENFSTGDPMLCDTSAATNDGVYNYSLNSIPDAENDLSFFDNGDKEKNDLFYGWGDIGNFEDVDNMLRSCDSTFGLDSLNNEGDLGWFSSAQPNEETAGAMTDDLKPDKMLENQRTAMLQVEDFLNNSEPNHAVEDEYGYTIEDDSAQGKSSQNVFDTSLQKKDILMLDVEANLEKKQTDHLHHLDGKSDGFSENSFTLQHSGISREIMDTNQYYPPSAFQQRDVPYSHFNCEQPSVQVSACESKSGIKSENKPSPSSASNESYTSNHAQSIESLQGPTVDDRFRKVFETRANLLPGQDMPPSFAANTKKSSKTDSMVFPDAAPIQKIGLENDHRKAATELETSNMQGSSCVSSVVDDISLEATSFRQLQQVIEQLDVRTKLCIRDSLYRLAKSAEQRHHGGNRPEKGAGSHLVTGEADKYAGFMDIETDTNPIDRSIAHLLFHRPSDSSLSSDNNVLSYKSHPMIPQPNSSPSLRIEKQEETTELRPEAEVVTSDNN

SEQ ID NO: 47684 - protein, 518 aa, Arabidopsis thaliana
  peptide (1)..(518): Ceres Seq. ID no. 13647406
MTLEDTNTSDHGFNGGHVDVVENFSTGDPMLCDTSAATNDGVYNYSLNSIPDAENDLSFFDNGDKEKNDLFYGWGDIGNFEDVDNMLRSCDSTFGLDSLNNEGDLGWFSSAQPNEETAGAMTDDLKPDKMLENQRTAMLQVEDFLNNSEPNHAVEDEYGYTIEDDSAQGKSSQNVFDTSLQKKDILMLDVEANLEKKQTDHLHHLDGKSDGFSENSFTLQHSGISREIMDTNQYYPPSAFQQRDVPYSHFNCEQPSVQVSACESKSGIKSENKPSPSSASNESYTSNHAQSIESLQGPTVDDRFRKVFETRANLLPGQDMPPSFAANTKKSSKTDSMVFPDAAPIQKIGLENDHRKAATELETSNMQGSSCVSSVVDDISLEATSFRQLQQVIEQLDVRTKLCIRDSLYRLAKSAEQRHHGGNRPEKGAGSHLVTGEADKYAGFMDIETDTNPIDRSIAHLLFHRPSDSSLSSDNNVLSYKSHPMIPQPNSSPSLRIEKQEETTELRPEAEVVTSDNN

SEQ ID NO: 47685 - DNA, 1269 bp, Arabidopsis thaliana
  misc_feature (1)..(1269): Ceres Seq. ID no. 13647458
  misc_feature (1)..(1269): Ortholog of  Ceres SEQ ID NO 15180558 as cited in SEQ ID NO 0
atggctttcttatgggcacggtacttgtttgtttacttgtctttctttctttctgtcacactctttaaagatgggaaacatcctggttgtgatgaatattactttggtagaagagaattctcgtttacgcttgaaaacgatgtttatttgcggtataagtctttcaagaatgcttcacttatggaagctgctatcaaatcgaattttccatacaagattgatattggtgctgtgtatagcgttgatccggataagagacatgcatatgctcaaagtggaaccaatttgtttactccagtggagagggagttagtctttgatattgatataacagattatgatgatgttagatactgttgttcgggagccgatgtttgctccaaatgctggcctttaatgacagttgctatcaaagtcattgatacttccttaagagaggattttggtttcaaacacatcctctgggtcttcagtggacgtcgtggagttcactgttgggtttgtgatgctaaagctcgaaggttgactaatgaacaaagatcagcagttgctgaatactttcgtgtttataagggaaatgaaaacaatgcaaaaaaggtcgatctgatgggtcattctcttcatccgtttcttgcgagatcatatgtggactttattaagagtttctttgagggtgagttacaagcaactcaaagtatattctcaagcaaagaaaagtatgagaagatacttgggatgattacagatgaagatattcaagcagacctcagaggaaagtgggagaattctgcgagatcatctctatcagaagaagccaccagccttttaaggtgggaacaacttaagaaagctcttcaatcgaagagaaacaaggctctatcactgcggacgtgcgtagaagaaattgtcttcacctttacgtatcctcgaattgatttggaggtttcaaaacaaatgaaccatttgcttaaggcacccttctgcgtccatccaaaaacaggtcgtgtctgtgttcctattgacccgaataactgtgatgagtttgatccattggcagttccaactctttcacagctaatagaagaaatcaattccggtggcctcagaatggacgtggatgatgatgattcagatagtagtttacttgggaaatcaataaagttcttcagatcctcattcctagaacccttactaaaatcatgcaaggaagaaatagagagttcatacaaaaccaagattgctaagactaaggattcattcagctggtga

SEQ ID NO: 47686 - protein, 422 aa, Arabidopsis thaliana
  peptide (1)..(422): Ceres Seq. ID no. 13647459
MAFLWARYLFVYLSFFLSVTLFKDGKHPGCDEYYFGRREFSFTLENDVYLRYKSFKNASLMEAAIKSNFPYKIDIGAVYSVDPDKRHAYAQSGTNLFTPVERELVFDIDITDYDDVRYCCSGADVCSKCWPLMTVAIKVIDTSLREDFGFKHILWVFSGRRGVHCWVCDAKARRLTNEQRSAVAEYFRVYKGNENNAKKVDLMGHSLHPFLARSYVDFIKSFFEGELQATQSIFSSKEKYEKILGMITDEDIQADLRGKWENSARSSLSEEATSLLRWEQLKKALQSKRNKALSLRTCVEEIVFTFTYPRIDLEVSKQMNHLLKAPFCVHPKTGRVCVPIDPNNCDEFDPLAVPTLSQLIEEINSGGLRMDVDDDDSDSSLLGKSIKFFRSSFLEPLLKSCKEEIESSYKTKIAKTKDSFSW

SEQ ID NO: 47687 - protein, 362 aa, Arabidopsis thaliana
  peptide (1)..(362): Ceres Seq. ID no. 13647460
MEAAIKSNFPYKIDIGAVYSVDPDKRHAYAQSGTNLFTPVERELVFDIDITDYDDVRYCCSGADVCSKCWPLMTVAIKVIDTSLREDFGFKHILWVFSGRRGVHCWVCDAKARRLTNEQRSAVAEYFRVYKGNENNAKKVDLMGHSLHPFLARSYVDFIKSFFEGELQATQSIFSSKEKYEKILGMITDEDIQADLRGKWENSARSSLSEEATSLLRWEQLKKALQSKRNKALSLRTCVEEIVFTFTYPRIDLEVSKQMNHLLKAPFCVHPKTGRVCVPIDPNNCDEFDPLAVPTLSQLIEEINSGGLRMDVDDDDSDSSLLGKSIKFFRSSFLEPLLKSCKEEIESSYKTKIAKTKDSFSW

SEQ ID NO: 47688 - protein, 290 aa, Arabidopsis thaliana
  peptide (1)..(290): Ceres Seq. ID no. 13647461
MTVAIKVIDTSLREDFGFKHILWVFSGRRGVHCWVCDAKARRLTNEQRSAVAEYFRVYKGNENNAKKVDLMGHSLHPFLARSYVDFIKSFFEGELQATQSIFSSKEKYEKILGMITDEDIQADLRGKWENSARSSLSEEATSLLRWEQLKKALQSKRNKALSLRTCVEEIVFTFTYPRIDLEVSKQMNHLLKAPFCVHPKTGRVCVPIDPNNCDEFDPLAVPTLSQLIEEINSGGLRMDVDDDDSDSSLLGKSIKFFRSSFLEPLLKSCKEEIESSYKTKIAKTKDSFSW

SEQ ID NO: 47689 - DNA, 2082 bp, Arabidopsis thaliana
  misc_feature (1)..(2082): Ceres Seq. ID no. 13647442
  misc_feature (1)..(2082): Ortholog of  Ceres SEQ ID NO 15174852 as cited in SEQ ID NO 67166
  misc_feature (1)..(2082): Ortholog of  Ceres SEQ ID NO 12635879 as cited in SEQ ID NO 0
  misc_feature (1)..(2082): Ortholog of  Ceres SEQ ID NO 13599649 as cited in SEQ ID NO 0
atccaaaacataattagtataacgatactactactaaccgactggactagattattctacttgatatatcctctcgagaactattgctgccgctactcgtttcatatctccgtctccggctcgatccgccaagtagagtaagcagcaatgactaaaaagaagaatcctaatgttttcttggatgtatcaattggtggggatcccgttcaacggattgtcattgagctttttgctgatgttgtccccaagacagcggaaaacttccgtgccctctgcacaggtgaggcgggcgttggaaagtccactgggaagcctctacatttcaaaggatcatctttccatcgggttatcaaaggattcatggctcagggtggtgatttttccaatgggaatggcactggtggggagagcatctatggtgggaagttttcagatgagaactttagattggaccatgatggagctggagtcctttcaatggcaaattgtggcccaaataccaacgggtcccaattttttatactttttaaacgccaaccacatcttgatgggaagcatgttgtatttggcaaagtcgttgaagggatggcagtaatcaagaaaatggaacttctggggacgagtgatgggaaacctactagcccagtcaaaataatagactgtggtgaaacgtctcagataagagcacatgatgctgctgaaagagaaaaagggaaatcgaaaaaatcaaacaagaacttttctcctggtgacgtatctgaccgtgaagctaaggagacacgcaaaaaagaatctaacgagaaaaggataaaacgaaaaagaagatactcttcgtcagattcatatagctcaagttccgactcagattcagattcggaatcagaagcatattcatcttcctcctatgagtctagttcttccagtgatgggaagcataggaagaggaagtcaacaacaagacacaaaggccgacgcggggaaagaaagagtaaaggacgaagcgggaaaaagaaagctcggccagatagaaaaccaagcacgaatagttcaagtgacacggagagtagcagcagttctgatgatgagaaagtgggccacaaagccataaagtcagtgaaagttgataacgctgatcaacacgccaacttggatgactcagtgaaatcaaggagcaggagcccaattcgtaggagaaaccaaaacagcaggagcaaaagtcctagtaggagccctgtgagagttcttggaaatggaaacagaagtcctagtaggagccctgtgagagatcttggaaatggaagcagaagtcctcgtgagaagccaacagaggaaactgtggggaaatctttcagaagcccatctccaagtggtgtgcccaagcgcatccgaaaggggcgtgggttcaccgaacgctattcctttgctcggaagtaccatactccttctcctgagcgttctcctcctagacattggcctgacagaagaaactttcaggataggaacagggataggtatccgagcaacagaagttactctgagcgctcaccgaggggacgctttagaagcccacccagaagaaggagccctccaaggtacaaccggaggagaaggagcacttctcggagtccagatgggtaccgtagacgattgagagacggaagcaggagccagagtccgaggcatcgtagccgtagccagagccctagaaagaggcagccaattagccaagacctgaaatcccgtctcgggccacagagatcccccatcagaggaggacgcacctctcctgcagaatcactcagcccttctcactcaccttctccaccaggaaagagaggtctggttagctatgcggattgatggtcactctcatccattggtttctctgctgacttgcgagtttttgttttaatttccgtgttttagtgcaagcaataataggtaatgatattttttatgttggtcggatatataatactctaccttagttgcattattacagatcgtggaacattgatcaaattgagactgatatatgttggcagaattgagtttgggaatcgaagtttgtagaaaatttat

SEQ ID NO: 47690 - protein, 570 aa, Arabidopsis thaliana
  peptide (1)..(570): Ceres Seq. ID no. 13647443
MTKKKNPNVFLDVSIGGDPVQRIVIELFADVVPKTAENFRALCTGEAGVGKSTGKPLHFKGSSFHRVIKGFMAQGGDFSNGNGTGGESIYGGKFSDENFRLDHDGAGVLSMANCGPNTNGSQFFILFKRQPHLDGKHVVFGKVVEGMAVIKKMELLGTSDGKPTSPVKIIDCGETSQIRAHDAAEREKGKSKKSNKNFSPGDVSDREAKETRKKESNEKRIKRKRRYSSSDSYSSSSDSDSDSESEAYSSSSYESSSSSDGKHRKRKSTTRHKGRRGERKSKGRSGKKKARPDRKPSTNSSSDTESSSSSDDEKVGHKAIKSVKVDNADQHANLDDSVKSRSRSPIRRRNQNSRSKSPSRSPVRVLGNGNRSPSRSPVRDLGNGSRSPREKPTEETVGKSFRSPSPSGVPKRIRKGRGFTERYSFARKYHTPSPERSPPRHWPDRRNFQDRNRDRYPSNRSYSERSPRGRFRSPPRRRSPPRYNRRRRSTSRSPDGYRRRLRDGSRSQSPRHRSRSQSPRKRQPISQDLKSRLGPQRSPIRGGRTSPAESLSPSHSPSPPGKRGLVSYAD

SEQ ID NO: 47691 - protein, 499 aa, Arabidopsis thaliana
  peptide (1)..(499): Ceres Seq. ID no. 13647444
MAQGGDFSNGNGTGGESIYGGKFSDENFRLDHDGAGVLSMANCGPNTNGSQFFILFKRQPHLDGKHVVFGKVVEGMAVIKKMELLGTSDGKPTSPVKIIDCGETSQIRAHDAAEREKGKSKKSNKNFSPGDVSDREAKETRKKESNEKRIKRKRRYSSSDSYSSSSDSDSDSESEAYSSSSYESSSSSDGKHRKRKSTTRHKGRRGERKSKGRSGKKKARPDRKPSTNSSSDTESSSSSDDEKVGHKAIKSVKVDNADQHANLDDSVKSRSRSPIRRRNQNSRSKSPSRSPVRVLGNGNRSPSRSPVRDLGNGSRSPREKPTEETVGKSFRSPSPSGVPKRIRKGRGFTERYSFARKYHTPSPERSPPRHWPDRRNFQDRNRDRYPSNRSYSERSPRGRFRSPPRRRSPPRYNRRRRSTSRSPDGYRRRLRDGSRSQSPRHRSRSQSPRKRQPISQDLKSRLGPQRSPIRGGRTSPAESLSPSHSPSPPGKRGLVSYAD

SEQ ID NO: 47692 - protein, 460 aa, Arabidopsis thaliana
  peptide (1)..(460): Ceres Seq. ID no. 13647445
MANCGPNTNGSQFFILFKRQPHLDGKHVVFGKVVEGMAVIKKMELLGTSDGKPTSPVKIIDCGETSQIRAHDAAEREKGKSKKSNKNFSPGDVSDREAKETRKKESNEKRIKRKRRYSSSDSYSSSSDSDSDSESEAYSSSSYESSSSSDGKHRKRKSTTRHKGRRGERKSKGRSGKKKARPDRKPSTNSSSDTESSSSSDDEKVGHKAIKSVKVDNADQHANLDDSVKSRSRSPIRRRNQNSRSKSPSRSPVRVLGNGNRSPSRSPVRDLGNGSRSPREKPTEETVGKSFRSPSPSGVPKRIRKGRGFTERYSFARKYHTPSPERSPPRHWPDRRNFQDRNRDRYPSNRSYSERSPRGRFRSPPRRRSPPRYNRRRRSTSRSPDGYRRRLRDGSRSQSPRHRSRSQSPRKRQPISQDLKSRLGPQRSPIRGGRTSPAESLSPSHSPSPPGKRGLVSYAD

SEQ ID NO: 47693 - DNA, 672 bp, Arabidopsis thaliana
  misc_feature (1)..(672): Ceres Seq. ID no. 13647469
  misc_feature (1)..(672): Ortholog of  Ceres SEQ ID NO 13595818 as cited in SEQ ID NO 56698
acactcttgtataaagttttgagctttaagtctcagagtcaggttttggtgggttaattctggtagacaagaatcaaacaaacaatgggagacgaagcaaagatcttcactctttcagaagtttcagagcataatcaagctcatgactgttggattgtcatcaatggaaaggtgtacaatgtgaccaagtttcttgaagaccatccaggtggggacgatgttctcttgtcttcaacaggtaaggatgcaacggatgattttgaggacgtgggtcacagcgagagtgcaagagaaatgatggagcagtactacgtaggagagattgatccaacaacaataccaaagaaagtcaaatacacacctcctaaacagcctcactacaatcaagacaagacctctgaattcataatcaagctcctccagttcctcgtaccccttgccattcttggtttagcagtcggaatccgtatctacaccaaatcagggtaggcttcttttttttctgagcattacttccttatatcttatatatagagagaaagattcaagtcttttgaaaagacaaatctgaaagtctctccctttgttattgtctcttcccatattttgctgtttgaatgtattttggataatttcttatctattgtggtgtaactgcatataaacacagtc

SEQ ID NO: 47694 - protein, 134 aa, Arabidopsis thaliana
  peptide (1)..(134): Ceres Seq. ID no. 13647470
MGDEAKIFTLSEVSEHNQAHDCWIVINGKVYNVTKFLEDHPGGDDVLLSSTGKDATDDFEDVGHSESAREMMEQYYVGEIDPTTIPKKVKYTPPKQPHYNQDKTSEFIIKLLQFLVPLAILGLAVGIRIYTKSG

SEQ ID NO: 47695 - DNA, 2002 bp, Arabidopsis thaliana; identical to SEQ ID NO: 44162
  misc_feature (1)..(2002): Ceres Seq. ID no. 12489432
  misc_feature (1)..(2002): Ortholog of  Ceres SEQ ID NO 13638136 as cited in SEQ ID NO 58644
  misc_feature (1)..(2002): Ortholog of  Ceres SEQ ID NO 13596868 as cited in SEQ ID NO 62806
  misc_feature (1)..(2002): Ortholog of  Ceres SEQ ID NO 14302836 as cited in SEQ ID NO 65013
  misc_feature (1)..(2002): Ortholog of  Ceres SEQ ID NO 12566239 as cited in SEQ ID NO 0

SEQ ID NO: 47696 - protein, 434 aa, Arabidopsis thaliana; identical to SEQ ID NO: 44163
  peptide (1)..(434): Ceres Seq. ID no. 12489433

SEQ ID NO: 47697 - protein, 415 aa, Arabidopsis thaliana; identical to SEQ ID NO: 44164
  peptide (1)..(415): Ceres Seq. ID no. 12489434

SEQ ID NO: 47698 - protein, 388 aa, Arabidopsis thaliana; identical to SEQ ID NO: 44165
  peptide (1)..(388): Ceres Seq. ID no. 12489435

SEQ ID NO: 47699 - DNA, 2066 bp, Arabidopsis thaliana; identical to SEQ ID NO: 41121
  misc_feature (1)..(2066): Ceres Seq. ID no. 13575096
  misc_feature (1)..(2066): Ortholog of  Ceres SEQ ID NO 12613725 as cited in SEQ ID NO 68196

SEQ ID NO: 47700 - protein, 583 aa, Arabidopsis thaliana; identical to SEQ ID NO: 41122
  peptide (1)..(583): Ceres Seq. ID no. 15222613

SEQ ID NO: 47701 - protein, 541 aa, Arabidopsis thaliana; identical to SEQ ID NO: 41123
  peptide (1)..(541): Ceres Seq. ID no. 15222614

SEQ ID NO: 47702 - protein, 474 aa, Arabidopsis thaliana; identical to SEQ ID NO: 41124
  peptide (1)..(474): Ceres Seq. ID no. 15222615

SEQ ID NO: 47703 - DNA, 2948 bp, Arabidopsis thaliana
  misc_feature (1)..(2948): Ceres Seq. ID no. 12591727
  misc_feature (1)..(2948): Ortholog of  Ceres SEQ ID NO 15172237 as cited in SEQ ID NO 55116
agaccaagctcaggctatcatctctccgttaattagggttttcttctctatctcgatttcaataccattgttgatccgctgagctagggttgttcgatcccgataattgtgtcgcttagctctgatctctgttcatcgaatttggttaatttgttttgattggttaagatacattggaaagcgatgccaccgaaggttgtgaagaggggaggcgccgcgagaagaggtgggaggcttacgagatcggcgctcaaggcgcagaatcctcacgtggaatcttcccatgacgaatctgttaatatcggtgagctctcaggctccgatgcactggaagccaaggaggtgactccggaggttgataaaactgttgaggaagagaatccattagatgtgccgaagtcatcggattcaattgatgattctgaagctgcagcgaatccgcatgttgatgttccgtcgaaaaaggagactgaggtagaggaatctgtggatgattttggaaaagatgaaagattggatttagatgacaatgaacctgagtatgaggctgaggaatatggcggggaggagtttgaagagagggaattgggacaggaggaccatgagttggtaaatgaggagggggaagaactggaggaagagattgaggtcgaggaggaagctggtgagtttgcagacgagattggagatggtgcggaggaccttgatagtgaggatgatgatgatgatcatgctattgaagaggtcaagcatggagaaactgttgatgtggaagaagaagagcatcatgatgttctccatgagaggcgtaagcgtaaggagttcgaaatatttgttgggagtttggacaaaggtgcttcggaggaggacttaaagaaagtgtttggtcatgtgggcgaggtgactgaagttaggattttgaagaatcctcagacaaagaagagcaagggttctgctttcttgcgttttgcaactgtggaacaggcaaaacgagctgttaaagagcttaaaagcccaatgataaatggtaaaaagtgtggtgtaactgcaagccaagataatgataccctcttcgttggtaacatatgcaagatatggaccccagaagctttgagggagaagcttaaacactatggagttgagaatatggatgatataacgttggtagaggacagcaacaatgtcaacatgaatcgagggtatgcctttttggaattctcatctcgctcagatgccatggatgctcacaagcgtctcgtcaagaaagatgtgatgtttggagttgagaagcctgcaaaggtctcttttactgattctttcttagacctggaagatgagataatggcgcaggttaagacaatcttcattgacggtctgttaccttcatggaatgaagaacgtgttagagaccttctgaaaccatatggtaaacttgaaaaagttgagcttgctcgcaatatgccatcagcaaggaggaaagattttggctttgtaacttttgatactcatgaagctgctgtgagttgtgccaaattcatcaacaactcagagctaggcgaaggggaggacaaggcaaaagtgagagcacgcctgtctagaccacttcagaaagcaggtaaaggccgacaatctagtcgctcagaccagcggtctaggcatggggctggacggtctggaaggagttcatttgctcgtcttccacctcgtagccttgcttcctctcggagtgctagaggcgctggatctcgggccccatcttctagtgcaaagagagcttctggatcaagaggaagacgtcctcgcccacctctacctccgcctgcaagagctaggcccttgcctccacctgcaagagccaggcccatgccaccacctgcaagagccaggcccttgccaccacctgctaggtcatatgatagaagacctccagttcctctgtatccaaaggctagcttgaagagagactatgatcggcgtgatgaacttcctcctccaagaagcagaccagctgtaagctatagttccaggctttctcctgagaggcatctgtcttacagagatgattatccaccccggggttcgggttattcagatcttcctagaagttcttctcgctctgaaattaggaggccattcgtagatgacctttacagtccgagatttgaaagacctccaagttacagtgagggaagacctcgtgcttatgaacctcttcctggatcaaagcgtccatatgctgcactggatgaccttcctccccgttatgctgatgttgatgttcgtcattcaagaccccgtctggactatgatgttggcccatctcaatatggggaatcctacggggaccggattcctaggtctagtctaggatatggaagcagccgaaattctatgtcaaatcatgactcgcggggcccatacagcagtcgtcagggaatggattatggaggaggttcttatagtggcagcgatgtaggaggtatgtactcgtcaagctatggtggcgacttacccagaagagatggaggaggtagctcgtattcttcaatttactccagccgtggcttgggtggtagtagttactctggtggtggtccaggatcatactactgaataatttcacatgaccgaggctgctaaaaaaggaggtttggccatgcaaagttgtgtatgtagaaaggaagctaccagctgcgaaaggattaaagccagcttcggtgagactgttggaatattaatgggcttgcatctacaactgcacttgtatcttttttcggatggaatgataagctcgagttttatagagatggttcatagttgtgggactcgttatctatcttatctatctctatctcttgaataatggatggatttgttggaacagagattaagctgtgtttgtattattgatccatcagtttagttaagctttcaccgtcttctcagct

SEQ ID NO: 47704 - protein, 809 aa, Arabidopsis thaliana
  peptide (1)..(809): Ceres Seq. ID no. 12591728
MPPKVVKRGGAARRGGRLTRSALKAQNPHVESSHDESVNIGELSGSDALEAKEVTPEVDKTVEEENPLDVPKSSDSIDDSEAAANPHVDVPSKKETEVEESVDDFGKDERLDLDDNEPEYEAEEYGGEEFEERELGQEDHELVNEEGEELEEEIEVEEEAGEFADEIGDGAEDLDSEDDDDDHAIEEVKHGETVDVEEEEHHDVLHERRKRKEFEIFVGSLDKGASEEDLKKVFGHVGEVTEVRILKNPQTKKSKGSAFLRFATVEQAKRAVKELKSPMINGKKCGVTASQDNDTLFVGNICKIWTPEALREKLKHYGVENMDDITLVEDSNNVNMNRGYAFLEFSSRSDAMDAHKRLVKKDVMFGVEKPAKVSFTDSFLDLEDEIMAQVKTIFIDGLLPSWNEERVRDLLKPYGKLEKVELARNMPSARRKDFGFVTFDTHEAAVSCAKFINNSELGEGEDKAKVRARLSRPLQKAGKGRQSSRSDQRSRHGAGRSGRSSFARLPPRSLASSRSARGAGSRAPSSSAKRASGSRGRRPRPPLPPPARARPLPPPARARPMPPPARARPLPPPARSYDRRPPVPLYPKASLKRDYDRRDELPPPRSRPAVSYSSRLSPERHLSYRDDYPPRGSGYSDLPRSSSRSEIRRPFVDDLYSPRFERPPSYSEGRPRAYEPLPGSKRPYAALDDLPPRYADVDVRHSRPRLDYDVGPSQYGESYGDRIPRSSLGYGSSRNSMSNHDSRGPYSSRQGMDYGGGSYSGSDVGGMYSSSYGGDLPRRDGGGSSYSSIYSSRGLGGSSYSGGGPGSYY

SEQ ID NO: 47705 - protein, 531 aa, Arabidopsis thaliana
  peptide (1)..(531): Ceres Seq. ID no. 12591729
MINGKKCGVTASQDNDTLFVGNICKIWTPEALREKLKHYGVENMDDITLVEDSNNVNMNRGYAFLEFSSRSDAMDAHKRLVKKDVMFGVEKPAKVSFTDSFLDLEDEIMAQVKTIFIDGLLPSWNEERVRDLLKPYGKLEKVELARNMPSARRKDFGFVTFDTHEAAVSCAKFINNSELGEGEDKAKVRARLSRPLQKAGKGRQSSRSDQRSRHGAGRSGRSSFARLPPRSLASSRSARGAGSRAPSSSAKRASGSRGRRPRPPLPPPARARPLPPPARARPMPPPARARPLPPPARSYDRRPPVPLYPKASLKRDYDRRDELPPPRSRPAVSYSSRLSPERHLSYRDDYPPRGSGYSDLPRSSSRSEIRRPFVDDLYSPRFERPPSYSEGRPRAYEPLPGSKRPYAALDDLPPRYADVDVRHSRPRLDYDVGPSQYGESYGDRIPRSSLGYGSSRNSMSNHDSRGPYSSRQGMDYGGGSYSGSDVGGMYSSSYGGDLPRRDGGGSSYSSIYSSRGLGGSSYSGGGPGSYY

SEQ ID NO: 47706 - protein, 488 aa, Arabidopsis thaliana
  peptide (1)..(488): Ceres Seq. ID no. 12591730
MDDITLVEDSNNVNMNRGYAFLEFSSRSDAMDAHKRLVKKDVMFGVEKPAKVSFTDSFLDLEDEIMAQVKTIFIDGLLPSWNEERVRDLLKPYGKLEKVELARNMPSARRKDFGFVTFDTHEAAVSCAKFINNSELGEGEDKAKVRARLSRPLQKAGKGRQSSRSDQRSRHGAGRSGRSSFARLPPRSLASSRSARGAGSRAPSSSAKRASGSRGRRPRPPLPPPARARPLPPPARARPMPPPARARPLPPPARSYDRRPPVPLYPKASLKRDYDRRDELPPPRSRPAVSYSSRLSPERHLSYRDDYPPRGSGYSDLPRSSSRSEIRRPFVDDLYSPRFERPPSYSEGRPRAYEPLPGSKRPYAALDDLPPRYADVDVRHSRPRLDYDVGPSQYGESYGDRIPRSSLGYGSSRNSMSNHDSRGPYSSRQGMDYGGGSYSGSDVGGMYSSSYGGDLPRRDGGGSSYSSIYSSRGLGGSSYSGGGPGSYY

SEQ ID NO: 47707 - DNA, 2231 bp, Arabidopsis thaliana
  misc_feature (1)..(2231): Ceres Seq. ID no. 12600732
  misc_feature (1)..(2231): Ortholog of  Ceres SEQ ID NO 15225034 as cited in SEQ ID NO 53426
cttggctctctctctctctctctcttcttctctgctcaagacaagaacttgatgttcatgtcttgaaacttaacaaagtattgatctttccttttaagtaaagaatttgggggttacacaacttcgtctagatggagcaagagaaaagcttggatccacaactatggcatgcttgtgcaggatcaatggttcaaatcccttcactgaattcaacggttttttacttcgctcaaggccacacagagcacgctcacgcgcctcctgattttcacgcgccgcgcgttccacctcttatcctctgtcgtgtcgtctccgtgaagttcctcgccgacgctgaaacagacgaagtttttgctaaaattacgcttttgccacttccgggaaacgacttggatctagaaaacgacgccgttttgggtctaactcctccttcttctgacggtaacggtaacggtaaagagaaaccggcgtctttcgctaaaacgttaacgcagtctgacgctaataacggcggtggtttctccgttccacgttattgcgccgagacgattttcccgcggcttgattactcggcggagccaccggttcaaaccgtgattgctaaagacatccacggcgagacttggaaattccggcatatttacagaggaacacctcgccgtcatctcctaaccaccggttggagcactttcgttaaccagaagaaactaatcgccggagactcaatcgtcttcctccgttctgaatccggtgacctctgcgtcggaatccgccgcgctaaacgcggcggtctcggatctaacgcaggatccgacaatccttaccctggattctccggtttcctccgtgacgacgagtcaacaacaacaacatcgaagctaatgatgatgaaacgcaacggaaacaacgacggaaacgccgcggctacagggagggttagagtagaagcagtagcggaagcggtggcgcgtgcagcgtgtggacaagcgtttgaggttgtttattatccacgcgctagtacaccggagttttgcgtaaaagcagctgatgttagatcagcaatgaggataagatggtgtagtggtatgcgttttaaaatggcgtttgaaacagaggattcttctagaatcagttggtttatgggtactgtctccgccgttcaagtcgctgatccaattcgttggcctaattcaccatggcgtctccttcaggtagcttgggacgaaccggatttgttacaaaacgttaagcgggttagtccgtggttagtcgaattggtatcgaacatgcctacaatacatttatctccattctctccgaggaagaagattaggattccgcagccatttgagtttccattccacggtactaaattcccgattttctccccgggattcgccaacaatggcggtggcgagtccatgtgttatctgtcaaacgacaacaataatgctcctgcaggaatacagggagccaggcaagctcaacaactcttcggatcaccatctccgtctttgttgtctgatctcaatcttagtagttacaccggtaacaacaagttacattctccggcgatgtttctatcgagtttcaacccgaggcatcatcattatcaggctagggatagtgagaatagtaataacatttcgtgttctttaactatggggaatcctgctatggttcaggataagaagaagtctgttggttcggttaagactcatcagttcgtgttgttcggtcaaccgattttaaccgaacagcaagttatgaaccgaaaacggtttttggaagaagaggcggaagcggaggaggagaaaggtttagtggctcgtgggttaacatggaattatagtttgcaaggacttgagacgggtcattgtaaagttttcatggaatctgaggatgttggacgcacactcgatctctcggttattggctcgtaccaagaattgtaccggaaattggctgagatgtttcatatagaagagaggtcggatttgttgactcatgttgtgtaccgggatgcaaatggtgttatcaaacgtattggagacgaacctttcagtgatttcatgaaagcaactaaacggctaacaatcaagatggatattggtggcgacaacgtgagaaagacgtggataaccggaatcaggactggtgaaaatggtatagacgcttctacgaagactggtccgctcagcatcttcgcttgaacttgaagcatattgagg

SEQ ID NO: 47708 - protein, 693 aa, Arabidopsis thaliana
  peptide (1)..(693): Ceres Seq. ID no. 12600733
MEQEKSLDPQLWHACAGSMVQIPSLNSTVFYFAQGHTEHAHAPPDFHAPRVPPLILCRVVSVKFLADAETDEVFAKITLLPLPGNDLDLENDAVLGLTPPSSDGNGNGKEKPASFAKTLTQSDANNGGGFSVPRYCAETIFPRLDYSAEPPVQTVIAKDIHGETWKFRHIYRGTPRRHLLTTGWSTFVNQKKLIAGDSIVFLRSESGDLCVGIRRAKRGGLGSNAGSDNPYPGFSGFLRDDESTTTTSKLMMMKRNGNNDGNAAATGRVRVEAVAEAVARAACGQAFEVVYYPRASTPEFCVKAADVRSAMRIRWCSGMRFKMAFETEDSSRISWFMGTVSAVQVADPIRWPNSPWRLLQVAWDEPDLLQNVKRVSPWLVELVSNMPTIHLSPFSPRKKIRIPQPFEFPFHGTKFPIFSPGFANNGGGESMCYLSNDNNNAPAGIQGARQAQQLFGSPSPSLLSDLNLSSYTGNNKLHSPAMFLSSFNPRHHHYQARDSENSNNISCSLTMGNPAMVQDKKKSVGSVKTHQFVLFGQPILTEQQVMNRKRFLEEEAEAEEEKGLVARGLTWNYSLQGLETGHCKVFMESEDVGRTLDLSVIGSYQELYRKLAEMFHIEERSDLLTHVVYRDANGVIKRIGDEPFSDFMKATKRLTIKMDIGGDNVRKTWITGIRTGENGIDASTKTGPLSIFA

SEQ ID NO: 47709 - protein, 675 aa, Arabidopsis thaliana
  peptide (1)..(675): Ceres Seq. ID no. 12600734
MVQIPSLNSTVFYFAQGHTEHAHAPPDFHAPRVPPLILCRVVSVKFLADAETDEVFAKITLLPLPGNDLDLENDAVLGLTPPSSDGNGNGKEKPASFAKTLTQSDANNGGGFSVPRYCAETIFPRLDYSAEPPVQTVIAKDIHGETWKFRHIYRGTPRRHLLTTGWSTFVNQKKLIAGDSIVFLRSESGDLCVGIRRAKRGGLGSNAGSDNPYPGFSGFLRDDESTTTTSKLMMMKRNGNNDGNAAATGRVRVEAVAEAVARAACGQAFEVVYYPRASTPEFCVKAADVRSAMRIRWCSGMRFKMAFETEDSSRISWFMGTVSAVQVADPIRWPNSPWRLLQVAWDEPDLLQNVKRVSPWLVELVSNMPTIHLSPFSPRKKIRIPQPFEFPFHGTKFPIFSPGFANNGGGESMCYLSNDNNNAPAGIQGARQAQQLFGSPSPSLLSDLNLSSYTGNNKLHSPAMFLSSFNPRHHHYQARDSENSNNISCSLTMGNPAMVQDKKKSVGSVKTHQFVLFGQPILTEQQVMNRKRFLEEEAEAEEEKGLVARGLTWNYSLQGLETGHCKVFMESEDVGRTLDLSVIGSYQELYRKLAEMFHIEERSDLLTHVVYRDANGVIKRIGDEPFSDFMKATKRLTIKMDIGGDNVRKTWITGIRTGENGIDASTKTGPLSIFA

SEQ ID NO: 47710 - protein, 443 aa, Arabidopsis thaliana
  peptide (1)..(443): Ceres Seq. ID no. 12600735
MMMKRNGNNDGNAAATGRVRVEAVAEAVARAACGQAFEVVYYPRASTPEFCVKAADVRSAMRIRWCSGMRFKMAFETEDSSRISWFMGTVSAVQVADPIRWPNSPWRLLQVAWDEPDLLQNVKRVSPWLVELVSNMPTIHLSPFSPRKKIRIPQPFEFPFHGTKFPIFSPGFANNGGGESMCYLSNDNNNAPAGIQGARQAQQLFGSPSPSLLSDLNLSSYTGNNKLHSPAMFLSSFNPRHHHYQARDSENSNNISCSLTMGNPAMVQDKKKSVGSVKTHQFVLFGQPILTEQQVMNRKRFLEEEAEAEEEKGLVARGLTWNYSLQGLETGHCKVFMESEDVGRTLDLSVIGSYQELYRKLAEMFHIEERSDLLTHVVYRDANGVIKRIGDEPFSDFMKATKRLTIKMDIGGDNVRKTWITGIRTGENGIDASTKTGPLSIFA

SEQ ID NO: 47711 - DNA, 2235 bp, Arabidopsis thaliana; identical to SEQ ID NO: 38002
  misc_feature (1)..(2235): Ceres Seq. ID no. 12466389
  misc_feature (1)..(2235): Ortholog of  Ceres SEQ ID NO 14312180 as cited in SEQ ID NO 59480

SEQ ID NO: 47712 - protein, 639 aa, Arabidopsis thaliana; identical to SEQ ID NO: 38003
  peptide (1)..(639): Ceres Seq. ID no. 12466390

SEQ ID NO: 47713 - protein, 587 aa, Arabidopsis thaliana; identical to SEQ ID NO: 38004
  peptide (1)..(587): Ceres Seq. ID no. 12466391

SEQ ID NO: 47714 - protein, 525 aa, Arabidopsis thaliana; identical to SEQ ID NO: 38005
  peptide (1)..(525): Ceres Seq. ID no. 12466392

SEQ ID NO: 47715 - DNA, 1291 bp, Arabidopsis thaliana
  misc_feature (1)..(1291): Ceres Seq. ID no. 12683979
  misc_feature (1)..(1291): Ortholog of  Ceres SEQ ID NO 12578784 as cited in SEQ ID NO 20729
  misc_feature (1)..(1291): Ortholog of  Ceres SEQ ID NO 13658847 as cited in SEQ ID NO 66674
gaaaaaaaacaaatcagattctcaaatactgaaaataaaaagaagaagagagaaatctacggtggtgggtgattcgccggagttcaatttcgtagctagatttctcctccttttccccccgacgagctgtgcgagagagggaggggaatcatgcagaaacggagaacggtgaaggaatctacgaagataagaaatggtaaaggtatggattccggcgaaaagaagagatctgagaagagattgatgaagttcgaggagttacctaggtatttgaaagataacgagttcatacacaatcattatcgatgtgagtggtcaatcaaagaaactttcctcagcgctttctcatggcacaatgagactctcaacatctggacgcatttgtgtggatttgcgatatttacttggatgatggttgtgagttcaatggagacgacggagcttggcctcgccggctttgttagccttctctccggagcaacaattcgctggccatggccgtcaatggcaatgtcaaaagatgtttacttctccagcgatcaaactctgcatcacgacttaaacgtgacacacactcgctcgctcctgaattctcaaggagatgttaactacgaagccattccgaaatggccatggcttgtgttcttgaccggagcaatgggctgcttgatctgcagttccatgtcacacctcttcgcctgtcactccagacggttcaacctcttcttctggcgtctagactacgctggaatctccctcatgatcgtctgttcattcttcgcacctatctactatgcattctcatgccacacttactggcgactcttctacctctcatcgatctcaatcctcggtctcctcgccatcttcactctcctctctccatcactctcagctccacgtttcagatctttcagagcagctctgttcctaacaatgggattttctggcgtaataccagccacacatgtgctttaccttcataaggatcacccaaacgtgcttatagctctcgtatatgaacttgcgatggctgtgttgtatgcaacaggagcagcgttttatgttacccgcatacctgaaagatggaagcctggggcttttgatattgcaggacatagccatcagatattccatgtgtttgtagtcttaggagctcttgctcatagtgttgccagtcttcttatcatggattttcgacgggcttctccttcttgtgccttttaactcgaaaacacattgtaaaacatttagtaatacttcattcaatgtatcaatgtatgtttgtccc

SEQ ID NO: 47716 - protein, 358 aa, Arabidopsis thaliana
  peptide (1)..(358): Ceres Seq. ID no. 12683980
MQKRRTVKESTKIRNGKGMDSGEKKRSEKRLMKFEELPRYLKDNEFIHNHYRCEWSIKETFLSAFSWHNETLNIWTHLCGFAIFTWMMVVSSMETTELGLAGFVSLLSGATIRWPWPSMAMSKDVYFSSDQTLHHDLNVTHTRSLLNSQGDVNYEAIPKWPWLVFLTGAMGCLICSSMSHLFACHSRRFNLFFWRLDYAGISLMIVCSFFAPIYYAFSCHTYWRLFYLSSISILGLLAIFTLLSPSLSAPRFRSFRAALFLTMGFSGVIPATHVLYLHKDHPNVLIALVYELAMAVLYATGAAFYVTRIPERWKPGAFDIAGHSHQIFHVFVVLGALAHSVASLLIMDFRRASPSCAF

SEQ ID NO: 47717 - protein, 340 aa, Arabidopsis thaliana
  peptide (1)..(340): Ceres Seq. ID no. 12683981
MDSGEKKRSEKRLMKFEELPRYLKDNEFIHNHYRCEWSIKETFLSAFSWHNETLNIWTHLCGFAIFTWMMVVSSMETTELGLAGFVSLLSGATIRWPWPSMAMSKDVYFSSDQTLHHDLNVTHTRSLLNSQGDVNYEAIPKWPWLVFLTGAMGCLICSSMSHLFACHSRRFNLFFWRLDYAGISLMIVCSFFAPIYYAFSCHTYWRLFYLSSISILGLLAIFTLLSPSLSAPRFRSFRAALFLTMGFSGVIPATHVLYLHKDHPNVLIALVYELAMAVLYATGAAFYVTRIPERWKPGAFDIAGHSHQIFHVFVVLGALAHSVASLLIMDFRRASPSCAF

SEQ ID NO: 47718 - protein, 327 aa, Arabidopsis thaliana
  peptide (1)..(327): Ceres Seq. ID no. 12683982
MKFEELPRYLKDNEFIHNHYRCEWSIKETFLSAFSWHNETLNIWTHLCGFAIFTWMMVVSSMETTELGLAGFVSLLSGATIRWPWPSMAMSKDVYFSSDQTLHHDLNVTHTRSLLNSQGDVNYEAIPKWPWLVFLTGAMGCLICSSMSHLFACHSRRFNLFFWRLDYAGISLMIVCSFFAPIYYAFSCHTYWRLFYLSSISILGLLAIFTLLSPSLSAPRFRSFRAALFLTMGFSGVIPATHVLYLHKDHPNVLIALVYELAMAVLYATGAAFYVTRIPERWKPGAFDIAGHSHQIFHVFVVLGALAHSVASLLIMDFRRASPSCAF

SEQ ID NO: 47719 - DNA, 1800 bp, Arabidopsis thaliana
  misc_feature (1)..(1800): Ceres Seq. ID no. 13647568
  misc_feature (1)..(1800): Ortholog of  Ceres SEQ ID NO 13663419 as cited in SEQ ID NO 66561
gaacaatctcagaaaaggaaaaaaaaagaagcacagttgaaagaaccaaaaatggagaaactaacttttctcagccttctcctgcatttcgtcgtcttcatcgcttcaacgataccgtcttcatcgttcctcttgaatgatcgcacctttgagagatcgaacttgccgtctacgcgcgcggagaagctgatccgtgagctaaaccttttcccgcagcaggatctgaatgtgatcgatgtcgctgatttgcctctcactgctgcggagggaccggggattgttgaacggaagttcgtattcccgaatatacttgccgatggtggccctactgtcgacgatttaggtcatcatgctggttattacaagctcccgaaatctcgtggcgcaagcatgttctacttcttcttcgagtcacggaacaagaaggatgctcctgttgtgatttggttgacgggagggcctggatgtagtagtgagttggctgtgttctatgagaatggtcctttcaagatcactagtaacatgtctcttgcttggaatgagtatggatgggatcaggtttccaatcttctgtatgttgatcagcctgttggaactggtttcagctacacgacagataaaagtgatatccgtcatgacgaaactggagttagcaatgatctttatgattttctgcaggctttctttgcggagcaccctaagttggcaaaaaacgacttttatattactggagagtcatatgctgggcactatatcccagcttttgcttcccgagtccataaaggaaacaaggctaatgagggagttcatattaacctaaagggattcgctattggaaatgggcttacagatcctgcactccaatacccagcctatcctgactacgctttggaaatgggtctaatcacgcaaaaagagcatgatcgcttagaaaagattgtcccactgtgcgaactatcaatcaagctttgtggaactgatggcacaacttcttgtttggcatcatatcttgtctgcaactctttgttcagtggtgtaatgagtcatgctggtggagtaaactattacgacatcaggaagaagtgcgtgggaagtttgtgctacgatttctcaaacatggagaaatttttgaatctgcaatctgtgaggaagtcacttggtgttggggacatagactttgtctcctgcagtacttcagtctatcaggcaatgcttgtagattggatgaggaatctcgaggttggaattcccacgctcttggaagatggaatcagcctccttgtgtatgctggagaatatgatcttatctgcaactggctcggtaactcgaggtgggtgaatgcaatggagtggtcagggaaaacaaactttggggcggctaaagaagttccgtttattgtggatggcaaagaagcaggcttgttaaagacttatgaacaactcagtttcctcaaggtgagagatgcaggacacatggttccaatggaccagcctaaagctgcattgaaaatgctgaagcgatggatggagaattcacttatcgaagatgctactgtgactgttgctgctcagggaggagaggaactggttgctcagatgtgatcacatcttcttttgcgttgcatgaaaacaaaaggcagcaaacataaaacaatgtgtgagcaattgacgttttcttctgtaatttgatctcataagtcataagaaagatacagtatatgtaggggttgcccaatttcgttataaaatcaaactctgctgacaccaaaaacataataattactacgaaatgtgttatct

SEQ ID NO: 47720 - protein, 533 aa, Arabidopsis thaliana
  peptide (1)..(533): Ceres Seq. ID no. 13647569
EQSQKRKKKEAQLKEPKMEKLTFLSLLLHFVVFIASTIPSSSFLLNDRTFERSNLPSTRAEKLIRELNLFPQQDLNVIDVADLPLTAAEGPGIVERKFVFPNILADGGPTVDDLGHHAGYYKLPKSRGASMFYFFFESRNKKDAPVVIWLTGGPGCSSELAVFYENGPFKITSNMSLAWNEYGWDQVSNLLYVDQPVGTGFSYTTDKSDIRHDETGVSNDLYDFLQAFFAEHPKLAKNDFYITGESYAGHYIPAFASRVHKGNKANEGVHINLKGFAIGNGLTDPALQYPAYPDYALEMGLITQKEHDRLEKIVPLCELSIKLCGTDGTTSCLASYLVCNSLFSGVMSHAGGVNYYDIRKKCVGSLCYDFSNMEKFLNLQSVRKSLGVGDIDFVSCSTSVYQAMLVDWMRNLEVGIPTLLEDGISLLVYAGEYDLICNWLGNSRWVNAMEWSGKTNFGAAKEVPFIVDGKEAGLLKTYEQLSFLKVRDAGHMVPMDQPKAALKMLKRWMENSLIEDATVTVAAQGGEELVAQM

SEQ ID NO: 47721 - protein, 516 aa, Arabidopsis thaliana
  peptide (1)..(516): Ceres Seq. ID no. 13647570
MEKLTFLSLLLHFVVFIASTIPSSSFLLNDRTFERSNLPSTRAEKLIRELNLFPQQDLNVIDVADLPLTAAEGPGIVERKFVFPNILADGGPTVDDLGHHAGYYKLPKSRGASMFYFFFESRNKKDAPVVIWLTGGPGCSSELAVFYENGPFKITSNMSLAWNEYGWDQVSNLLYVDQPVGTGFSYTTDKSDIRHDETGVSNDLYDFLQAFFAEHPKLAKNDFYITGESYAGHYIPAFASRVHKGNKANEGVHINLKGFAIGNGLTDPALQYPAYPDYALEMGLITQKEHDRLEKIVPLCELSIKLCGTDGTTSCLASYLVCNSLFSGVMSHAGGVNYYDIRKKCVGSLCYDFSNMEKFLNLQSVRKSLGVGDIDFVSCSTSVYQAMLVDWMRNLEVGIPTLLEDGISLLVYAGEYDLICNWLGNSRWVNAMEWSGKTNFGAAKEVPFIVDGKEAGLLKTYEQLSFLKVRDAGHMVPMDQPKAALKMLKRWMENSLIEDATVTVAAQGGEELVAQM

SEQ ID NO: 47722 - protein, 403 aa, Arabidopsis thaliana
  peptide (1)..(403): Ceres Seq. ID no. 13647571
MFYFFFESRNKKDAPVVIWLTGGPGCSSELAVFYENGPFKITSNMSLAWNEYGWDQVSNLLYVDQPVGTGFSYTTDKSDIRHDETGVSNDLYDFLQAFFAEHPKLAKNDFYITGESYAGHYIPAFASRVHKGNKANEGVHINLKGFAIGNGLTDPALQYPAYPDYALEMGLITQKEHDRLEKIVPLCELSIKLCGTDGTTSCLASYLVCNSLFSGVMSHAGGVNYYDIRKKCVGSLCYDFSNMEKFLNLQSVRKSLGVGDIDFVSCSTSVYQAMLVDWMRNLEVGIPTLLEDGISLLVYAGEYDLICNWLGNSRWVNAMEWSGKTNFGAAKEVPFIVDGKEAGLLKTYEQLSFLKVRDAGHMVPMDQPKAALKMLKRWMENSLIEDATVTVAAQGGEELVAQM

SEQ ID NO: 47723 - DNA, 3579 bp, Arabidopsis thaliana
  misc_feature (1)..(3579): Ceres Seq. ID no. 13647525
  misc_feature (1)..(3579): Ortholog of  Ceres SEQ ID NO 14313620 as cited in SEQ ID NO 54969
atggacattctttttgctcagatccaggcggacctccgttcaaatgacgcgcttcgccagtcatcggcgcttcttcaggcgctgcagcaatccgccgccggaagagatatctctgtgatcgctaagtctgctgtggaggagattgttgcttctccggcttcagctgtttgtaagaagctggcattcgatctcatccgatctacccgcctcactccggatctttgggacaccgtttgctcaggtgtcaaaacggatcttcattttccggacccggatgttaccgccgctgccgtctccatccttgcggctctccctgccttctcgcttcctaaactcatctctgattgcagctctgagattgcttcctgcttcgattctccatctgacaaccttcgtttttccatcaccgagacacttggctgcatcctcgcgcgtgatgatctcgttactttgtgcgagaacaatgtgggtctcctcgacaaggtctccaactggtgggctcggatcggccagaacatgctcgacaaatccgacgccgtctccaaggttgcctttgagtccgtcggcagactcttccaggagttcgactccaagcggatgagccgtcttgctggcgataagctcgttgacagcgagaactccctcgccatcaggtccaagtgggtctcttccatggttgacattgtatggagaaagaggagcgctttgatggctaggtctttagtccttcctgtcgaaaccttcagagccactgttttccctcttgtctttgctgtcaaagctgttgcttccggtagtgtcgaagtgattagacagctttccaaggcttcctctgctgctgctgcagctaatgccaccgttgtggactccaacgccgagaagctggttggcgtctcagatttggttacccatttggcgccattcttggcttcctctttggatccagctttgatttttgaagtgggaattaacatgctctacctggcagatgttgccggaggcaagccagagtgggcttcacagtccattattgcaattttaacactctgggaccgccaagaattttcctctgctagagagagtatagtcagggccgttgttacgaacctgcacttgcttgatctgcatatgcagctgtggcctatgatttctgaatcattctttttggaatttgttacgaaggtttcgttgtttagaagactgctgcttatggtgagaaacttgagagcagaatcggacaggatgcacgcattagcctgtatctgtcggacagctctctgtgttcacctttttgccagagaaagtgcccgaagaggtcagaagcctctgcctgggacagatattatttctctctttgaagatgcaaggattaaagatgatctcaatagtgttaccagtaagagcttatttcgggaagagctggtggcaatgcttgtggaaagctgcttccagttgtctctacctttgcctgaacaaaaaaactcgggtatggagagcagagtgattggtgcgttagcatatggtactggttatggtgctctgaactggacagaaccagcccttgaggttgtggaagtttgtaggccttgtgtcaaatgggattgtgatggcaggacgtacgctgtagattgctatttgaaattgcttgttaggctgtgccatatctatgatacccgtggaggagtgaagaggctgaaagatggtgcttcccaggatcaaatattaaatgagacacgattgcagaacttgcaacgtgagcttgttaaggatctccaagaggtaaataccccaagaatcctcgggcgtcttatatggacaatcgcagaacatattgatctagaaggtctagatccacttttagctgatgaccccgatgatccattgaatattatcatagcaaacatacataaggttctcttcaacttggatgccgctgctactacatcgaataggctacaagatgttcaggcagtcttattatgcgcccagaggatgggatcgcgtcatgcaagagctggccagttattaaccaaagagcttgaagagtataggaaccatgctgctgcagatacagttagcaaacatcaaacccgtttaatattgcagaggatcaaatatgtttcaaatcttcctgaaagaaagtgggctggagttagtgagacaagaggagattacccgtttagccaccataagcttactgttcagttttacgaaccatcagctgctcaagacaggaaattagaaggtctaattcacaaggccattctcgagctttggaggccaaagcccactgaattaactctcttccttacaaaaggggtcgactcaacttctatcaaggttcctcccacagcatatcctttgaccggaagcagtgatccttgctatatagaagcttaccatttagcagatacaaatgatggaagggtcactttgcacttgaagattattaatttgacagaacttgaactgaatcgtgtggatatacgggttggattatctggtgccctatacttcatggatggctctcctcaagcagtgcggcagttgcgtaatcttgtctcacaggatcctgtacaatgcagtgtcaccgttggtgtgtcccaatttgaaagatgtggtttctgggttcaagtcctctactatccattccgtggtgctaggggagaatatgacggtgactacatagaagaggatccacagatcatgaagcagaagagaggttcaaaagcagaactcggagagcctgtgatcttaagatgtcagccttacaagatcccactgactgagcttcttctaccgcacaaaatctcaccagtcgagttctttcgtttgtggcctagcttgccagctgttgcagagtacactggcacatatatgtatgaaggaagcggcttcatggcgaccgccgcacaacagtatggggcttcaccatttttaagcggactcaaatcattatcctcgaagccattccacagagtctgttcccacattatacgcacagttgctggctttcagctttgttacgctgcaaaaacgtggcatggaggttttgtgggtatgatgatctttggcgctagtgaagtgagcaggaacatggatctgggtgacgagactaccaccatgatgtgcaagtttgtggttagagcatcagaagcatcaatcacaaagcaaatagagtcggatattcagggatggtgtgatgatctaactgacgggggcgttgagtacatgccagaggacgaagtgaaggcaaccgcggccgagaagctgaagatctctatggagaggatagctttgttgaaggcagctcagccgaagaagacttcaaagatagaggaggaatcagaaaacgaagaagaagaagaaggagaagaagaagatgatgatgaagaagtaaaagagaaaaaggagaaagaagagggaaaggacaaggaagagaagaagaaaaaagagaaggaaaaaggaacattttctaagctgacagcagaagaaacagagcacatggcgcttcaggcagcagtgctccaagaatggcacatcttgtgcaaagatagaaaatataccaaagttaactaa

SEQ ID NO: 47724 - protein, 1192 aa, Arabidopsis thaliana
  peptide (1)..(1192): Ceres Seq. ID no. 13647526
MDILFAQIQADLRSNDALRQSSALLQALQQSAAGRDISVIAKSAVEEIVASPASAVCKKLAFDLIRSTRLTPDLWDTVCSGVKTDLHFPDPDVTAAAVSILAALPAFSLPKLISDCSSEIASCFDSPSDNLRFSITETLGCILARDDLVTLCENNVGLLDKVSNWWARIGQNMLDKSDAVSKVAFESVGRLFQEFDSKRMSRLAGDKLVDSENSLAIRSKWVSSMVDIVWRKRSALMARSLVLPVETFRATVFPLVFAVKAVASGSVEVIRQLSKASSAAAAANATVVDSNAEKLVGVSDLVTHLAPFLASSLDPALIFEVGINMLYLADVAGGKPEWASQSIIAILTLWDRQEFSSARESIVRAVVTNLHLLDLHMQLWPMISESFFLEFVTKVSLFRRLLLMVRNLRAESDRMHALACICRTALCVHLFARESARRGQKPLPGTDIISLFEDARIKDDLNSVTSKSLFREELVAMLVESCFQLSLPLPEQKNSGMESRVIGALAYGTGYGALNWTEPALEVVEVCRPCVKWDCDGRTYAVDCYLKLLVRLCHIYDTRGGVKRLKDGASQDQILNETRLQNLQRELVKDLQEVNTPRILGRLIWTIAEHIDLEGLDPLLADDPDDPLNIIIANIHKVLFNLDAAATTSNRLQDVQAVLLCAQRMGSRHARAGQLLTKELEEYRNHAAADTVSKHQTRLILQRIKYVSNLPERKWAGVSETRGDYPFSHHKLTVQFYEPSAAQDRKLEGLIHKAILELWRPKPTELTLFLTKGVDSTSIKVPPTAYPLTGSSDPCYIEAYHLADTNDGRVTLHLKIINLTELELNRVDIRVGLSGALYFMDGSPQAVRQLRNLVSQDPVQCSVTVGVSQFERCGFWVQVLYYPFRGARGEYDGDYIEEDPQIMKQKRGSKAELGEPVILRCQPYKIPLTELLLPHKISPVEFFRLWPSLPAVAEYTGTYMYEGSGFMATAAQQYGASPFLSGLKSLSSKPFHRVCSHIIRTVAGFQLCYAAKTWHGGFVGMMIFGASEVSRNMDLGDETTTMMCKFVVRASEASITKQIESDIQGWCDDLTDGGVEYMPEDEVKATAAEKLKISMERIALLKAAQPKKTSKIEEESENEEEEEGEEEDDDEEVKEKKEKEEGKDKEEKKKKEKEKGTFSKLTAEETEHMALQAAVLQEWHILCKDRKYTKVN

SEQ ID NO: 47725 - protein, 1020 aa, Arabidopsis thaliana
  peptide (1)..(1020): Ceres Seq. ID no. 13647527
MLDKSDAVSKVAFESVGRLFQEFDSKRMSRLAGDKLVDSENSLAIRSKWVSSMVDIVWRKRSALMARSLVLPVETFRATVFPLVFAVKAVASGSVEVIRQLSKASSAAAAANATVVDSNAEKLVGVSDLVTHLAPFLASSLDPALIFEVGINMLYLADVAGGKPEWASQSIIAILTLWDRQEFSSARESIVRAVVTNLHLLDLHMQLWPMISESFFLEFVTKVSLFRRLLLMVRNLRAESDRMHALACICRTALCVHLFARESARRGQKPLPGTDIISLFEDARIKDDLNSVTSKSLFREELVAMLVESCFQLSLPLPEQKNSGMESRVIGALAYGTGYGALNWTEPALEVVEVCRPCVKWDCDGRTYAVDCYLKLLVRLCHIYDTRGGVKRLKDGASQDQILNETRLQNLQRELVKDLQEVNTPRILGRLIWTIAEHIDLEGLDPLLADDPDDPLNIIIANIHKVLFNLDAAATTSNRLQDVQAVLLCAQRMGSRHARAGQLLTKELEEYRNHAAADTVSKHQTRLILQRIKYVSNLPERKWAGVSETRGDYPFSHHKLTVQFYEPSAAQDRKLEGLIHKAILELWRPKPTELTLFLTKGVDSTSIKVPPTAYPLTGSSDPCYIEAYHLADTNDGRVTLHLKIINLTELELNRVDIRVGLSGALYFMDGSPQAVRQLRNLVSQDPVQCSVTVGVSQFERCGFWVQVLYYPFRGARGEYDGDYIEEDPQIMKQKRGSKAELGEPVILRCQPYKIPLTELLLPHKISPVEFFRLWPSLPAVAEYTGTYMYEGSGFMATAAQQYGASPFLSGLKSLSSKPFHRVCSHIIRTVAGFQLCYAAKTWHGGFVGMMIFGASEVSRNMDLGDETTTMMCKFVVRASEASITKQIESDIQGWCDDLTDGGVEYMPEDEVKATAAEKLKISMERIALLKAAQPKKTSKIEEESENEEEEEGEEEDDDEEVKEKKEKEEGKDKEEKKKKEKEKGTFSKLTAEETEHMALQAAVLQEWHILCKDRKYTKVN

SEQ ID NO: 47726 - protein, 993 aa, Arabidopsis thaliana
  peptide (1)..(993): Ceres Seq. ID no. 13647528
MSRLAGDKLVDSENSLAIRSKWVSSMVDIVWRKRSALMARSLVLPVETFRATVFPLVFAVKAVASGSVEVIRQLSKASSAAAAANATVVDSNAEKLVGVSDLVTHLAPFLASSLDPALIFEVGINMLYLADVAGGKPEWASQSIIAILTLWDRQEFSSARESIVRAVVTNLHLLDLHMQLWPMISESFFLEFVTKVSLFRRLLLMVRNLRAESDRMHALACICRTALCVHLFARESARRGQKPLPGTDIISLFEDARIKDDLNSVTSKSLFREELVAMLVESCFQLSLPLPEQKNSGMESRVIGALAYGTGYGALNWTEPALEVVEVCRPCVKWDCDGRTYAVDCYLKLLVRLCHIYDTRGGVKRLKDGASQDQILNETRLQNLQRELVKDLQEVNTPRILGRLIWTIAEHIDLEGLDPLLADDPDDPLNIIIANIHKVLFNLDAAATTSNRLQDVQAVLLCAQRMGSRHARAGQLLTKELEEYRNHAAADTVSKHQTRLILQRIKYVSNLPERKWAGVSETRGDYPFSHHKLTVQFYEPSAAQDRKLEGLIHKAILELWRPKPTELTLFLTKGVDSTSIKVPPTAYPLTGSSDPCYIEAYHLADTNDGRVTLHLKIINLTELELNRVDIRVGLSGALYFMDGSPQAVRQLRNLVSQDPVQCSVTVGVSQFERCGFWVQVLYYPFRGARGEYDGDYIEEDPQIMKQKRGSKAELGEPVILRCQPYKIPLTELLLPHKISPVEFFRLWPSLPAVAEYTGTYMYEGSGFMATAAQQYGASPFLSGLKSLSSKPFHRVCSHIIRTVAGFQLCYAAKTWHGGFVGMMIFGASEVSRNMDLGDETTTMMCKFVVRASEASITKQIESDIQGWCDDLTDGGVEYMPEDEVKATAAEKLKISMERIALLKAAQPKKTSKIEEESENEEEEEGEEEDDDEEVKEKKEKEEGKDKEEKKKKEKEKGTFSKLTAEETEHMALQAAVLQEWHILCKDRKYTKVN

SEQ ID NO: 47727 - DNA, 2943 bp, Arabidopsis thaliana
  misc_feature (1)..(2943): Ceres Seq. ID no. 13647533
  misc_feature (1)..(2943): Ortholog of  Ceres SEQ ID NO 13595870 as cited in SEQ ID NO 62101
  misc_feature (1)..(2943): Ortholog of  Ceres SEQ ID NO 13590241 as cited in SEQ ID NO 63878
  misc_feature (1)..(2943): Ortholog of  Ceres SEQ ID NO 13657939 as cited in SEQ ID NO 66349
atggcgtctatagacaatgttttctcactcggtactcggttctcaatcccagaaaaccccaagagatcgatattgaaacacgcgactacatcgagtttctccgcgagaactcaaactcgatggagagctccaattctgcgtcggtcgtttacagttttgtgcgaattgaaaactgggtcatctagctccggcgagacgaacaattcccctgctgctgacgatttcgtaactagggttttgaaggagaatcctagccaagtggaacctcgttaccgagttggtgataagctgtataatctgaaggagagagaagatttaagcaaaggcaccaatgcggcgacgggtgcgtttgaatttatcaaaaggaagtttgattcgaagaagaaaacagagacagacaaaagcgaagagtctgtttatttgagtgatattttgagggagtacaaaggaaagctttatgttccggagcaagtttttgggccagagttatctgaagaagaggagtttgagaaaaatgtgaaagatttaccaaagatgagtttggaagattttagaaaagctatggagaatgataaagttaagctgcttacatcgaaggaagtttctggtgtttcttatacgagtggctatagaggttttattgttgatcttaaggagattcctggagtcaagagcttacagagaaccaaatggtcaatgaagcttgaagttggagaagctcaagctcttctgaaagaatacacgggtccgcagtacgaaattgaaaggcacatgacgtcttgggttggaaaagtggcggacttcccaaaccctgttgcgtcttctatttcaagtagagtgatggttgagctgggaatggtgacagcagttattgctgcagccgcagttgttgttggaggattcttagcctcagctgtttttgcagtcactagtttcgcctttgtcactacagtatatgttgtttggcctatagcaaagccattcctcaaactttttgttggcgtcttccttggtgttcttgaaaaatcatgggattacattgttgatgttctcgccgatgggggcatcttctcaaggatttctgatttctatacatttggtggtgtagcatcaagtctggagatgctcaaaccaatcctacttgttgtcatgactatggttcttcttgttcgtttcacactgtcacggagaccaaagaactttaggaaatgggatttatggcaagggattgctttttctcagtctaaagcagaagctcgtgttgatggttcaaccggtgttaaattcgctgatgttgcagggattgatgaagcagttgatgaacttcaagagcttgtaaagtacttgaagaatcccgacctgtttgataaaatgggaattaaacctccccatggagttcttctggagggtccccctggttgtggcaagacactcgttgcaaaagccattgcgggggaagctggtgtaccgttctaccaaatggcaggatctgaattcgtcgaagttcttgttggagttgggtcagctcgtatcagagatctgtttaaaagagctaaggtaaacaagccatccgttattttcatcgatgaaattgatgccttagcaactcgacgtcaagggattttcaaggaaaactcagaccagttgtacaatgcggccacacaagaaagagaaaccacattgaaccagctactcatcgagcttgatggttttgacacaggcaaaggtgtgattttcttgggtgccaccaatcgcagagatttgttagaccctgctcttctacgtccaggtcgatttgatcgaaagataagagtccgtccccctaatgcgaaagggagattggatattctgaagattcatgccagcaaagtcaagatgtcggattctgttgacttatcatcttatgcaagtaacttaccaggatggtccggagcaaaactggcacagttggttcaagaggctgctcttgtagctgtcaggaaaacgcataactcgattcttcaatcagacatggacgacgctgtggaccgactcactgttggtccgacacgtattggtttagaattgggacatcaaggtcagtgtcgtagagccacaactgaagtcggagtggcaatcacttcacatcttttattgcggtatgagaatgcaaagattgagcggtgcgatcgcgtttctatcattcctcgtggtcagacactgtctcaagttgtgtttcatcggcttgatgatgagtcctacatgtttggtcgtcttccacaactgcttcatcgtcttcaggtcttgctcggaggaagagctgcagaagaagtgatctacggttcagatacttcaaaggcatcagtcgattatctctctgacgcctcatggctagctcgtaaaatcttaaccatatggaacctggagaacccaatggtgatacatggcgaaccaccaccatggagaaagagacctcagttcgtgggaccacgcttagactttgaaggatctctctatgacgactatgacctcgtcgagccgccagttaacttcaacatggatgatgaagtcgcacatagaagcgaagaactcattagccagatgtataacaaaacagtttctctcctcaggcaaaaccaaaccgctctcctcaaaaccgttaaggttctattgaaccagaaagagataagtggagaagcaatagacttcatacttgaccattaccctcctcagactccgttaaattctctcttacaagagcaaaatccgggaagtcttccttttgtccctgaacatctccggcgtgaatccggcgactttgtccttgttaatcactctaccgacgtcaatgctcaagtatgattccggcgtcccagagacatcaaatcactaagcttaggtttattcattgtccgtcattgtaacttcgactcaatctctgaagtttcggacagttaaatttac

SEQ ID NO: 47728 - protein, 946 aa, Arabidopsis thaliana
  peptide (1)..(946): Ceres Seq. ID no. 13647534
MASIDNVFSLGTRFSIPENPKRSILKHATTSSFSARTQTRWRAPILRRSFTVLCELKTGSSSSGETNNSPAADDFVTRVLKENPSQVEPRYRVGDKLYNLKEREDLSKGTNAATGAFEFIKRKFDSKKKTETDKSEESVYLSDILREYKGKLYVPEQVFGPELSEEEEFEKNVKDLPKMSLEDFRKAMENDKVKLLTSKEVSGVSYTSGYRGFIVDLKEIPGVKSLQRTKWSMKLEVGEAQALLKEYTGPQYEIERHMTSWVGKVADFPNPVASSISSRVMVELGMVTAVIAAAAVVVGGFLASAVFAVTSFAFVTTVYVVWPIAKPFLKLFVGVFLGVLEKSWDYIVDVLADGGIFSRISDFYTFGGVASSLEMLKPILLVVMTMVLLVRFTLSRRPKNFRKWDLWQGIAFSQSKAEARVDGSTGVKFADVAGIDEAVDELQELVKYLKNPDLFDKMGIKPPHGVLLEGPPGCGKTLVAKAIAGEAGVPFYQMAGSEFVEVLVGVGSARIRDLFKRAKVNKPSVIFIDEIDALATRRQGIFKENSDQLYNAATQERETTLNQLLIELDGFDTGKGVIFLGATNRRDLLDPALLRPGRFDRKIRVRPPNAKGRLDILKIHASKVKMSDSVDLSSYASNLPGWSGAKLAQLVQEAALVAVRKTHNSILQSDMDDAVDRLTVGPTRIGLELGHQGQCRRATTEVGVAITSHLLLRYENAKIERCDRVSIIPRGQTLSQVVFHRLDDESYMFGRLPQLLHRLQVLLGGRAAEEVIYGSDTSKASVDYLSDASWLARKILTIWNLENPMVIHGEPPPWRKRPQFVGPRLDFEGSLYDDYDLVEPPVNFNMDDEVAHRSEELISQMYNKTVSLLRQNQTALLKTVKVLLNQKEISGEAIDFILDHYPPQTPLNSLLQEQNPGSLPFVPEHLRRESGDFVLVNHSTDVNAQV

SEQ ID NO: 47729 - protein, 768 aa, Arabidopsis thaliana
  peptide (1)..(768): Ceres Seq. ID no. 13647535
MSLEDFRKAMENDKVKLLTSKEVSGVSYTSGYRGFIVDLKEIPGVKSLQRTKWSMKLEVGEAQALLKEYTGPQYEIERHMTSWVGKVADFPNPVASSISSRVMVELGMVTAVIAAAAVVVGGFLASAVFAVTSFAFVTTVYVVWPIAKPFLKLFVGVFLGVLEKSWDYIVDVLADGGIFSRISDFYTFGGVASSLEMLKPILLVVMTMVLLVRFTLSRRPKNFRKWDLWQGIAFSQSKAEARVDGSTGVKFADVAGIDEAVDELQELVKYLKNPDLFDKMGIKPPHGVLLEGPPGCGKTLVAKAIAGEAGVPFYQMAGSEFVEVLVGVGSARIRDLFKRAKVNKPSVIFIDEIDALATRRQGIFKENSDQLYNAATQERETTLNQLLIELDGFDTGKGVIFLGATNRRDLLDPALLRPGRFDRKIRVRPPNAKGRLDILKIHASKVKMSDSVDLSSYASNLPGWSGAKLAQLVQEAALVAVRKTHNSILQSDMDDAVDRLTVGPTRIGLELGHQGQCRRATTEVGVAITSHLLLRYENAKIERCDRVSIIPRGQTLSQVVFHRLDDESYMFGRLPQLLHRLQVLLGGRAAEEVIYGSDTSKASVDYLSDASWLARKILTIWNLENPMVIHGEPPPWRKRPQFVGPRLDFEGSLYDDYDLVEPPVNFNMDDEVAHRSEELISQMYNKTVSLLRQNQTALLKTVKVLLNQKEISGEAIDFILDHYPPQTPLNSLLQEQNPGSLPFVPEHLRRESGDFVLVNHSTDVNAQV

SEQ ID NO: 47730 - protein, 759 aa, Arabidopsis thaliana
  peptide (1)..(759): Ceres Seq. ID no. 13647536
MENDKVKLLTSKEVSGVSYTSGYRGFIVDLKEIPGVKSLQRTKWSMKLEVGEAQALLKEYTGPQYEIERHMTSWVGKVADFPNPVASSISSRVMVELGMVTAVIAAAAVVVGGFLASAVFAVTSFAFVTTVYVVWPIAKPFLKLFVGVFLGVLEKSWDYIVDVLADGGIFSRISDFYTFGGVASSLEMLKPILLVVMTMVLLVRFTLSRRPKNFRKWDLWQGIAFSQSKAEARVDGSTGVKFADVAGIDEAVDELQELVKYLKNPDLFDKMGIKPPHGVLLEGPPGCGKTLVAKAIAGEAGVPFYQMAGSEFVEVLVGVGSARIRDLFKRAKVNKPSVIFIDEIDALATRRQGIFKENSDQLYNAATQERETTLNQLLIELDGFDTGKGVIFLGATNRRDLLDPALLRPGRFDRKIRVRPPNAKGRLDILKIHASKVKMSDSVDLSSYASNLPGWSGAKLAQLVQEAALVAVRKTHNSILQSDMDDAVDRLTVGPTRIGLELGHQGQCRRATTEVGVAITSHLLLRYENAKIERCDRVSIIPRGQTLSQVVFHRLDDESYMFGRLPQLLHRLQVLLGGRAAEEVIYGSDTSKASVDYLSDASWLARKILTIWNLENPMVIHGEPPPWRKRPQFVGPRLDFEGSLYDDYDLVEPPVNFNMDDEVAHRSEELISQMYNKTVSLLRQNQTALLKTVKVLLNQKEISGEAIDFILDHYPPQTPLNSLLQEQNPGSLPFVPEHLRRESGDFVLVNHSTDVNAQV

SEQ ID NO: 47731 - DNA, 3324 bp, Arabidopsis thaliana
  misc_feature (1)..(3324): Ceres Seq. ID no. 13647541
  misc_feature (1)..(3324): Ortholog of  Ceres SEQ ID NO 13657677 as cited in SEQ ID NO 66119
atggcggctcttctctatttccctaaaatctcttcgcaaatgacttcctcacatttcatctctttctcaccaatggatttgaggagactttctcgcgcaagctacttattcactcgccgcttgaaattcatagcgaaatctcgaaaatgctttcatacaagccgatacctgcaacagtgtgttcatcggccggataaatcggaagagacttcctctgatcggcatttacacgaacgattatcttcagttttgtcgaagagatctctagattacgagcagtgtaaacaactgataactgttctatcgcctctcgaattcgataggttgtttcctgagtttcgatccaaagttaatcccaagacggctttggatttcttccgattagcttctgattcgtttagtttctcctttagtctccgttcttattgtttattgataggtttattgcttgatgcgaatctgttatcggctgctagggtagttttgattcgtttgatcaatgggaatgtaccggttttgccttgtggtttgagagatagtcgagttgcgattgcggatgcaatggcgagtttgagtttgtgttttgatgaagaaatcagaaggaaaatgtcggatttgttgattgaagtttattgcacacagttcaagcgtgatggttgttatttagctcttgatgtatttcctgttcttgcaaacaagggtatgtttccttctaagacgacttgcaacattttgttgacttctctagtgagagctaatgagtttcagaagtgttgtgaagcttttgatgttgtttgcaaaggggtttctccggatgtttacttgttcactacagcgattaatgcgttttgcaagggaggtaaagttgaggaggccgttaagttgttctcaaaaatggaagaagcgggtgttgcaccaaacgttgtcacttttaatactgttattgatggacttgggatgtgtggaaggtatgatgaggcgtttatgtttaaagaaaagatggtagaaagaggcatggaaccaactcttatcacttatagtattcttgtcaagggtttgaccagggctaagaggattggtgatgcttattttgtcttgaaggaaatgacaaagaaagggtttcctcctaatgttattgtatataataatttgattgatagtttcatcgaggctggaagtttgaacaaagctattgagataaaggatctcatggtttcgaaagggttgtctctcacatcgtcgacgtataatactctcataaagggatactgcaagaacggtcaagcagataatgcggagcgtctcctgaaggaaatgctgtcgattggttttaatgtaaatcagggctcctttacatctgtgatttgcttgttgtgcagtcatcttatgtttgactcagcacttcgttttgttggagagatgctattacgcaacatgagtcctggtggtggattacttactacattgatttctggtctctgtaagcatgggaaacactcaaaggcactagaactttggtttcaatttctaaataaaggttttgtagtggacacgaggacttcaaatgctttacttcatggactctgtgaagcagggaagctggatgaagcttttaggattcaaaaggagatattagggcgtggctgtgttatggatagagtttcctataacacgttgatttctggatgttgcggaaagaagaaactagatgaagcttttatgttcttggatgaaatggttaagagaggacttaagcctgacaattatacttatagcatattgatttgcgggctgtttaatatgaataaagttgaggaggccatacagttttgggatgattgtaaacggaatggcatgcttccagatgtttatacatattcggtgatgatagatggatgttgtaaagctgaaagaacagaagagggtcaggaattttttgatgagatgatgagcaaaaacgtgcagccaaatactgttgtttacaatcatcttatcagagcatactgtagaagcggaaggctatcgatggccttggaactccgtgaagatatgaaacacaaaggaatttcacctaattctgctacatacacttcactaataaaggggatgtcaatcattagccgtgttgaggaggcaaaactcctcttcgaggagatgaggatggagggtttggaaccgaatgtctttcattatacagcacttattgatggatatggtaaattgggtcagatggtcaaagttgaatgtcttctgcgtgagatgcattcaaagaacgtacacccaaataagattacctacactgtgatgattggtgggtatgctagagatgggaatgtaacggaagcttctaggcttctaaatgagatgagggaaaaaggaattgttccggatagtatcacatacaaagaatttatatacggatatcttaagcagggaggtgtgttggaagcttttaaaggttctgatgaagaaaattatgcagcaatcattgaaggatggaacaaactcattcagtaactgatgaataagaagaagaacagttggaaattgaaatctagtagccatctcagttttgattcacgccggggatctacgtcttcttcttagaggagcacgttaggatggagttacttggtaaatgatgcatatggttcattgcatcttacaagtagggtagtgtgttctacttgattctccagcccattcagttaacagctttggcctgcttcaatcttaatgagaaaagttgtttcttttagcatcaaaggctatatgggtttatgatttacaaatccacattactggtactcgtcaggtttaggattgagtgccacagaatcaaaggcatatgatagattctggatcagagcaggtacttcagacagcagtcctgaaaagattatacagatttagacacacatcatggatagtcaattaaaagtttacacatggatattcatgggagctatgagaatggatcaataggaggctcctcggtttacaggtcacataaatagagcttaagcgaattctcatcggagtagtttagaactaattcatgcctgacacatcgctggggagaatttcctcagccgtgcagaattttttgcccaaggagattaatggactgatttgaaaggtaacagtttacaacggtatcaactaattcgacaacattcaccttagagtatagactttcagtggggtgaatactgtttattcatcttgtttacgattctttaaatttgttaattctcttaaagaggtggaaaaagtgttttagatgtacgtagaaagaaagaaggaaaacaagaataaaatttg

SEQ ID NO: 47732 - protein, 838 aa, Arabidopsis thaliana
  peptide (1)..(838): Ceres Seq. ID no. 15218682
MAALLYFPKISSQMTSSHFISFSPMDLRRLSRASYLFTRRLKFIAKSRKCFHTSRYLQQCVHRPDKSEETSSDRHLHERLSSVLSKRSLDYEQCKQLITVLSPLEFDRLFPEFRSKVNPKTALDFFRLASDSFSFSFSLRSYCLLIGLLLDANLLSAARVVLIRLINGNVPVLPCGLRDSRVAIADAMASLSLCFDEEIRRKMSDLLIEVYCTQFKRDGCYLALDVFPVLANKGMFPSKTTCNILLTSLVRANEFQKCCEAFDVVCKGVSPDVYLFTTAINAFCKGGKVEEAVKLFSKMEEAGVAPNVVTFNTVIDGLGMCGRYDEAFMFKEKMVERGMEPTLITYSILVKGLTRAKRIGDAYFVLKEMTKKGFPPNVIVYNNLIDSFIEAGSLNKAIEIKDLMVSKGLSLTSSTYNTLIKGYCKNGQADNAERLLKEMLSIGFNVNQGSFTSVICLLCSHLMFDSALRFVGEMLLRNMSPGGGLLTTLISGLCKHGKHSKALELWFQFLNKGFVVDTRTSNALLHGLCEAGKLDEAFRIQKEILGRGCVMDRVSYNTLISGCCGKKKLDEAFMFLDEMVKRGLKPDNYTYSILICGLFNMNKVEEAIQFWDDCKRNGMLPDVYTYSVMIDGCCKAERTEEGQEFFDEMMSKNVQPNTVVYNHLIRAYCRSGRLSMALELREDMKHKGISPNSATYTSLIKGMSIISRVEEAKLLFEEMRMEGLEPNVFHYTALIDGYGKLGQMVKVECLLREMHSKNVHPNKITYTVMIGGYARDGNVTEASRLLNEMREKGIVPDSITYKEFIYGYLKQGGVLEAFKGSDEENYAAIIEGWNKLIQ

SEQ ID NO: 47733 - protein, 825 aa, Arabidopsis thaliana
  peptide (1)..(825): Ceres Seq. ID no. 15218683
MTSSHFISFSPMDLRRLSRASYLFTRRLKFIAKSRKCFHTSRYLQQCVHRPDKSEETSSDRHLHERLSSVLSKRSLDYEQCKQLITVLSPLEFDRLFPEFRSKVNPKTALDFFRLASDSFSFSFSLRSYCLLIGLLLDANLLSAARVVLIRLINGNVPVLPCGLRDSRVAIADAMASLSLCFDEEIRRKMSDLLIEVYCTQFKRDGCYLALDVFPVLANKGMFPSKTTCNILLTSLVRANEFQKCCEAFDVVCKGVSPDVYLFTTAINAFCKGGKVEEAVKLFSKMEEAGVAPNVVTFNTVIDGLGMCGRYDEAFMFKEKMVERGMEPTLITYSILVKGLTRAKRIGDAYFVLKEMTKKGFPPNVIVYNNLIDSFIEAGSLNKAIEIKDLMVSKGLSLTSSTYNTLIKGYCKNGQADNAERLLKEMLSIGFNVNQGSFTSVICLLCSHLMFDSALRFVGEMLLRNMSPGGGLLTTLISGLCKHGKHSKALELWFQFLNKGFVVDTRTSNALLHGLCEAGKLDEAFRIQKEILGRGCVMDRVSYNTLISGCCGKKKLDEAFMFLDEMVKRGLKPDNYTYSILICGLFNMNKVEEAIQFWDDCKRNGMLPDVYTYSVMIDGCCKAERTEEGQEFFDEMMSKNVQPNTVVYNHLIRAYCRSGRLSMALELREDMKHKGISPNSATYTSLIKGMSIISRVEEAKLLFEEMRMEGLEPNVFHYTALIDGYGKLGQMVKVECLLREMHSKNVHPNKITYTVMIGGYARDGNVTEASRLLNEMREKGIVPDSITYKEFIYGYLKQGGVLEAFKGSDEENYAAIIEGWNKLIQ

SEQ ID NO: 47734 - protein, 814 aa, Arabidopsis thaliana
  peptide (1)..(814): Ceres Seq. ID no. 15218684
MDLRRLSRASYLFTRRLKFIAKSRKCFHTSRYLQQCVHRPDKSEETSSDRHLHERLSSVLSKRSLDYEQCKQLITVLSPLEFDRLFPEFRSKVNPKTALDFFRLASDSFSFSFSLRSYCLLIGLLLDANLLSAARVVLIRLINGNVPVLPCGLRDSRVAIADAMASLSLCFDEEIRRKMSDLLIEVYCTQFKRDGCYLALDVFPVLANKGMFPSKTTCNILLTSLVRANEFQKCCEAFDVVCKGVSPDVYLFTTAINAFCKGGKVEEAVKLFSKMEEAGVAPNVVTFNTVIDGLGMCGRYDEAFMFKEKMVERGMEPTLITYSILVKGLTRAKRIGDAYFVLKEMTKKGFPPNVIVYNNLIDSFIEAGSLNKAIEIKDLMVSKGLSLTSSTYNTLIKGYCKNGQADNAERLLKEMLSIGFNVNQGSFTSVICLLCSHLMFDSALRFVGEMLLRNMSPGGGLLTTLISGLCKHGKHSKALELWFQFLNKGFVVDTRTSNALLHGLCEAGKLDEAFRIQKEILGRGCVMDRVSYNTLISGCCGKKKLDEAFMFLDEMVKRGLKPDNYTYSILICGLFNMNKVEEAIQFWDDCKRNGMLPDVYTYSVMIDGCCKAERTEEGQEFFDEMMSKNVQPNTVVYNHLIRAYCRSGRLSMALELREDMKHKGISPNSATYTSLIKGMSIISRVEEAKLLFEEMRMEGLEPNVFHYTALIDGYGKLGQMVKVECLLREMHSKNVHPNKITYTVMIGGYARDGNVTEASRLLNEMREKGIVPDSITYKEFIYGYLKQGGVLEAFKGSDEENYAAIIEGWNKLIQ

SEQ ID NO: 47735 - DNA, 670 bp, Arabidopsis thaliana
  misc_feature (1)..(670): Ceres Seq. ID no. 13647557
  misc_feature (1)..(670): Ortholog of  Ceres SEQ ID NO 14301855 as cited in SEQ ID NO 61528
  misc_feature (1)..(670): Ortholog of  Ceres SEQ ID NO 13584026 as cited in SEQ ID NO 63527
gagaaagagcgatcagatcacggagaaagagatgggtcacggagaagaagataaaagcaaaggatttgcttcggaagaaggtaaccagcatcatcaatacggtacctttcaaggtgtttccaattaccctccgccgcagaattctgctccggtcactgggtttcctcaaccttctgcgccacctggcgtttacgattctggagctccttattacgctcatggatatcaaactgttccagtccatggtggtgttgctgaaggaagacctgtcagacaacgtcgccttccttgctgtggaattggtcttggatggttcctgttcattgttggatttttccttggagcaatcccttggtatgtcggattgttcatcatgatgtttggaaggagaatcgattacagggagaaaccaggatacattgcctgcactatcgctgctattctagcaacaatcgctgtgattctgggtgtatctaaaggagcagacgactggtgatggatcaatcatcttgtggggttactctaaaaatgtttgtataggtttctttatcgtgtgttgtattatctacttccttttttacttactctatgaagaaacaagaaaaaaaaaagtgtaaacttcacaagaattatttgagttttgttatctaaataagaagaagtcaaagat

SEQ ID NO: 47736 - protein, 164 aa, Arabidopsis thaliana
  peptide (1)..(164): Ceres Seq. ID no. 13647558
RKSDQITEKEMGHGEEDKSKGFASEEGNQHHQYGTFQGVSNYPPPQNSAPVTGFPQPSAPPGVYDSGAPYYAHGYQTVPVHGGVAEGRPVRQRRLPCCGIGLGWFLFIVGFFLGAIPWYVGLFIMMFGRRIDYREKPGYIACTIAAILATIAVILGVSKGADDW

SEQ ID NO: 47737 - protein, 154 aa, Arabidopsis thaliana
  peptide (1)..(154): Ceres Seq. ID no. 13647559
MGHGEEDKSKGFASEEGNQHHQYGTFQGVSNYPPPQNSAPVTGFPQPSAPPGVYDSGAPYYAHGYQTVPVHGGVAEGRPVRQRRLPCCGIGLGWFLFIVGFFLGAIPWYVGLFIMMFGRRIDYREKPGYIACTIAAILATIAVILGVSKGADDW

SEQ ID NO: 47738 - protein, 124 aa, Arabidopsis thaliana
  peptide (1)..(124): Ceres Seq. ID no. 13647560
ERAIRSRRKRWVTEKKIKAKDLLRKKVTSIINTVPFKVFPITLRRRILLRSLGFLNLLRHLAFTILELLITLMDIKLFQSMVVLLKEDLSDNVAFLAVELVLDGSCSLLDFSLEQSLGMSDCSS

SEQ ID NO: 47739 - DNA, 1332 bp, Arabidopsis thaliana
  misc_feature (1)..(1332): Ceres Seq. ID no. 12668514
  misc_feature (1)..(1332): Ortholog of  Ceres SEQ ID NO 13592961 as cited in SEQ ID NO 20522
  misc_feature (1)..(1332): Ortholog of  Ceres SEQ ID NO 12583469 as cited in SEQ ID NO 51031
  misc_feature (1)..(1332): Ortholog of  Ceres SEQ ID NO 14303071 as cited in SEQ ID NO 67114
  misc_feature (1)..(1332): Ortholog of  Ceres SEQ ID NO 13595998 as cited in SEQ ID NO 68161
gagtgacaaagacgaacgaagaccacgactagctcttcccatggcttcttcactgaagaagcttatctcaagctttctacttgtcttatactctaccaccatcattgttgcttcatcagaatctcgatgtcggcgctttacatctatcatcagctttggtgattccatcgcagacaccggaaatattctccatctctccgacgtcaatcatcttcctcaaaccgccttttttccttatggtgaaagcttcttccatcctccctctggtcgtgcctctgatggccgtctcatcatcgacttcatcgctgaattcttgggactaccgtatgttccaccttactttggatcccaaaacgttagctttgaacaagggatcaatttcgcggtgtatggagcaaccgcattggaccgagcgtattttgtggcaaaaggaattgaatctgatttcaccaacgttagtttaggtgttcagcttgacatcttcaagcagattttgcctaacctttgtgcctcatcttctcgtgattgcagagagatgcttggagactcgctgatactcatgggagagattggaggtaacgactttttttacccatcctccgaaggcaaaagtatcaatgaaaccaaactacaggatttgatcatcaaagctatttcttctgcaattgtggatttgatcgctttagggggcaaaacatttttggtacccggaggcttcccagcaggatgttccgcagcgtgtcttactcaatatcagaacgcgacagaagaagactacgaccccttgacaggttgtatcccacggctcaatgaacttggagagcacgacaacgaacaacttaagacagaactcaaacgactccaaaaactctatcctgatgtcaacatcatttacgctgactaccataactccttataccggttttatcaagaaccagctaaatatgggtttaagaacaaacctttagctgcttgctgtggagtcggaggtaaatacaacttcactattggtaaggagtgtggatacgaaggagttagctattgtcaaaatccttccgagtatgtgaattgggatggttatcatttaaccgaagccgcctaccagaagatggctgagggtatactcaacggtccctatgcaactcctgctttcgactggtcctgccttggctctggtacagtggatacataaaaggagcagttagaattcatttgttgtaaaaaaaaaaaaagaggaagaaaattgtgtgatgatgattaacaaaaagattgcttgtacggcaggatttgactagtgacaaaaatttcgaggatatatgcatcaatcttatc

SEQ ID NO: 47740 - protein, 396 aa, Arabidopsis thaliana
  peptide (1)..(396): Ceres Seq. ID no. 12668515
SDKDERRPRLALPMASSLKKLISSFLLVLYSTTIIVASSESRCRRFTSIISFGDSIADTGNILHLSDVNHLPQTAFFPYGESFFHPPSGRASDGRLIIDFIAEFLGLPYVPPYFGSQNVSFEQGINFAVYGATALDRAYFVAKGIESDFTNVSLGVQLDIFKQILPNLCASSSRDCREMLGDSLILMGEIGGNDFFYPSSEGKSINETKLQDLIIKAISSAIVDLIALGGKTFLVPGGFPAGCSAACLTQYQNATEEDYDPLTGCIPRLNELGEHDNEQLKTELKRLQKLYPDVNIIYADYHNSLYRFYQEPAKYGFKNKPLAACCGVGGKYNFTIGKECGYEGVSYCQNPSEYVNWDGYHLTEAAYQKMAEGILNGPYATPAFDWSCLGSGTVDT

SEQ ID NO: 47741 - protein, 383 aa, Arabidopsis thaliana
  peptide (1)..(383): Ceres Seq. ID no. 12668516
MASSLKKLISSFLLVLYSTTIIVASSESRCRRFTSIISFGDSIADTGNILHLSDVNHLPQTAFFPYGESFFHPPSGRASDGRLIIDFIAEFLGLPYVPPYFGSQNVSFEQGINFAVYGATALDRAYFVAKGIESDFTNVSLGVQLDIFKQILPNLCASSSRDCREMLGDSLILMGEIGGNDFFYPSSEGKSINETKLQDLIIKAISSAIVDLIALGGKTFLVPGGFPAGCSAACLTQYQNATEEDYDPLTGCIPRLNELGEHDNEQLKTELKRLQKLYPDVNIIYADYHNSLYRFYQEPAKYGFKNKPLAACCGVGGKYNFTIGKECGYEGVSYCQNPSEYVNWDGYHLTEAAYQKMAEGILNGPYATPAFDWSCLGSGTVDT

SEQ ID NO: 47742 - protein, 218 aa, Arabidopsis thaliana
  peptide (1)..(218): Ceres Seq. ID no. 12668517
MLGDSLILMGEIGGNDFFYPSSEGKSINETKLQDLIIKAISSAIVDLIALGGKTFLVPGGFPAGCSAACLTQYQNATEEDYDPLTGCIPRLNELGEHDNEQLKTELKRLQKLYPDVNIIYADYHNSLYRFYQEPAKYGFKNKPLAACCGVGGKYNFTIGKECGYEGVSYCQNPSEYVNWDGYHLTEAAYQKMAEGILNGPYATPAFDWSCLGSGTVDT

SEQ ID NO: 47743 - DNA, 2369 bp, Arabidopsis thaliana
  misc_feature (1)..(2369): Ceres Seq. ID no. 13647576
  misc_feature (1)..(2369): Ortholog of  Ceres SEQ ID NO 13657460 as cited in SEQ ID NO 66115
  misc_feature (1)..(2369): Ortholog of  Ceres SEQ ID NO 13659394 as cited in SEQ ID NO 67049
gacggccaggcttcactgtcctcctcgtcctcctcaattacccctaacccctttttccgggattcatctccaacccacatccttccaaattctcaccccctcactgagtttttgctttttctcctcatcggagatcgtgaagacgatcaagtaatttaagaatcccaccattgataaaagagtctagcttttctactaccaaacctttttctgtttggaaattttcgattttggatttaacccttttcttaccttatttataaccatgcaatctcacgaccaacaacccttcaatctccatggcggaatccggcgatttcaacggtggtcaacctcctcctcatagtcctctgagaacaacttcttccggtagtagcagcagcaacaaccgtggtcctcctcctcctcctcctcctcctttagtgatggtgagaaaaagattagcttccgagatgtcttctaaccctgactacaacaactcctctcgtcctcctcgccgtgtctctcaccttcttgactccaactacaatactgtcacaccacaacaaccaccgtctcttacggcggcggctactgtatcttctcaaccaaacccaccactctctgtttgtggcttctctggtcttcccgtttttccttcagaccgtggtggtcggaatgttatgatgtccgtacaaccaatggatcaagactcttcatcttcttctgcttcacctactgtatgggttgacgccattatcagagaccttatccattcctcaacttcagtctctattcctcaacttatccaaaacgttagagacattatcttcccttgtaacccaaatctcggtgctcttcttgaatacaggctccgatctctcatgctccttgatccttcctcttcctctgacccttctcctcaaactttcgaacctctctatcagatctccaacaatccttctcctccacaacagcaacagcagcaccaacaacaacaacaacagcataagcctcctcctcctccgattcagcagcaagaaagagaaaattcttctaccgatgcaccaccgcaaccagagacagtgacggccactgttcccgccgtccaaacaaatacggcggaggctttaagagagaggaaggaagagattaagaggcagaagcaagacgaagaaggattacaccttctcacattgctgctacagtgtgctgaagctgtctctgctgataatctcgaagaagcaaacaagcttcttcttgagatctctcagttatcaactccttacgggacctcagcgcagagagtagctgcttacttctcggaagctatgtcagcgagattactcaactcgtgtctcggaatttacgcggctttgccttcacggtggatgcctcaaacgcatagcttgaaaatggtctctgcgtttcaggtctttaatgggataagccctttagtgaaattctcacactttacagcgaatcaggcgattcaagaagcatttgagaaagaagacagtgtacacatcattgacttggacatcatgcagggacttcaatggcctggtttattccacattcttgcttctagacctggaggacctccacacgtgcgactcacgggacttggtacttccatggaagctcttcaggctacagggaaacgtctttcggatttcgcagataagcttggcctgccttttgagttctgccctttagctgagaaagttggaaacttggacactgagagactcaatgtgaggaaaagggaagctgtggctgttcactggcttcaacattctctttatgatgtcactggctctgatgcacacactctctggttactccaaagattagctcctaaagttgtgacagtagtggaacaagatttgagccacgctggttctttcttaggaagatttgtagaagcaatacattactactctgcactctttgactcactgggagcaagctacggcgaagagagtgaagagagacatgtcgtggaacagcagctattatcgaaagagatacggaatgtattagcggttggaggaccatcgagaagcggtgaagtgaagtttgagagctggagggagaaaatgcaacaatgtgggtttaaaggtatatctttagctggaaatgcagctacacaagcgactctactgttgggaatgtttccttcggatggttacactttggttgatgataatggtacacttaagcttggatggaaagatctttcgttactcactgcttcagcttggacgcctcgttcttagttttcttctcctttttcacaaacaatgtgcccataaatagatttacctgttttttttttgttatgtatcaaaaagagaggattttttgaagtcaaattgttctcaccc

SEQ ID NO: 47744 - protein, 653 aa, Arabidopsis thaliana
  peptide (1)..(653): Ceres Seq. ID no. 15218838
MAESGDFNGGQPPPHSPLRTTSSGSSSSNNRGPPPPPPPPLVMVRKRLASEMSSNPDYNNSSRPPRRVSHLLDSNYNTVTPQQPPSLTAAATVSSQPNPPLSVCGFSGLPVFPSDRGGRNVMMSVQPMDQDSSSSSASPTVWVDAIIRDLIHSSTSVSIPQLIQNVRDIIFPCNPNLGALLEYRLRSLMLLDPSSSSDPSPQTFEPLYQISNNPSPPQQQQQHQQQQQQHKPPPPPIQQQERENSSTDAPPQPETVTATVPAVQTNTAEALRERKEEIKRQKQDEEGLHLLTLLLQCAEAVSADNLEEANKLLLEISQLSTPYGTSAQRVAAYFSEAMSARLLNSCLGIYAALPSRWMPQTHSLKMVSAFQVFNGISPLVKFSHFTANQAIQEAFEKEDSVHIIDLDIMQGLQWPGLFHILASRPGGPPHVRLTGLGTSMEALQATGKRLSDFADKLGLPFEFCPLAEKVGNLDTERLNVRKREAVAVHWLQHSLYDVTGSDAHTLWLLQRLAPKVVTVVEQDLSHAGSFLGRFVEAIHYYSALFDSLGASYGEESEERHVVEQQLLSKEIRNVLAVGGPSRSGEVKFESWREKMQQCGFKGISLAGNAATQATLLLGMFPSDGYTLVDDNGTLKLGWKDLSLLTASAWTPRS

SEQ ID NO: 47745 - protein, 611 aa, Arabidopsis thaliana
  peptide (1)..(611): Ceres Seq. ID no. 15218839
MVRKRLASEMSSNPDYNNSSRPPRRVSHLLDSNYNTVTPQQPPSLTAAATVSSQPNPPLSVCGFSGLPVFPSDRGGRNVMMSVQPMDQDSSSSSASPTVWVDAIIRDLIHSSTSVSIPQLIQNVRDIIFPCNPNLGALLEYRLRSLMLLDPSSSSDPSPQTFEPLYQISNNPSPPQQQQQHQQQQQQHKPPPPPIQQQERENSSTDAPPQPETVTATVPAVQTNTAEALRERKEEIKRQKQDEEGLHLLTLLLQCAEAVSADNLEEANKLLLEISQLSTPYGTSAQRVAAYFSEAMSARLLNSCLGIYAALPSRWMPQTHSLKMVSAFQVFNGISPLVKFSHFTANQAIQEAFEKEDSVHIIDLDIMQGLQWPGLFHILASRPGGPPHVRLTGLGTSMEALQATGKRLSDFADKLGLPFEFCPLAEKVGNLDTERLNVRKREAVAVHWLQHSLYDVTGSDAHTLWLLQRLAPKVVTVVEQDLSHAGSFLGRFVEAIHYYSALFDSLGASYGEESEERHVVEQQLLSKEIRNVLAVGGPSRSGEVKFESWREKMQQCGFKGISLAGNAATQATLLLGMFPSDGYTLVDDNGTLKLGWKDLSLLTASAWTPRS

SEQ ID NO: 47746 - protein, 602 aa, Arabidopsis thaliana
  peptide (1)..(602): Ceres Seq. ID no. 15218840
MSSNPDYNNSSRPPRRVSHLLDSNYNTVTPQQPPSLTAAATVSSQPNPPLSVCGFSGLPVFPSDRGGRNVMMSVQPMDQDSSSSSASPTVWVDAIIRDLIHSSTSVSIPQLIQNVRDIIFPCNPNLGALLEYRLRSLMLLDPSSSSDPSPQTFEPLYQISNNPSPPQQQQQHQQQQQQHKPPPPPIQQQERENSSTDAPPQPETVTATVPAVQTNTAEALRERKEEIKRQKQDEEGLHLLTLLLQCAEAVSADNLEEANKLLLEISQLSTPYGTSAQRVAAYFSEAMSARLLNSCLGIYAALPSRWMPQTHSLKMVSAFQVFNGISPLVKFSHFTANQAIQEAFEKEDSVHIIDLDIMQGLQWPGLFHILASRPGGPPHVRLTGLGTSMEALQATGKRLSDFADKLGLPFEFCPLAEKVGNLDTERLNVRKREAVAVHWLQHSLYDVTGSDAHTLWLLQRLAPKVVTVVEQDLSHAGSFLGRFVEAIHYYSALFDSLGASYGEESEERHVVEQQLLSKEIRNVLAVGGPSRSGEVKFESWREKMQQCGFKGISLAGNAATQATLLLGMFPSDGYTLVDDNGTLKLGWKDLSLLTASAWTPRS

SEQ ID NO: 47747 - DNA, 978 bp, Arabidopsis thaliana
  misc_feature (1)..(978): Ceres Seq. ID no. 13647584
  misc_feature (1)..(978): Ortholog of  Ceres SEQ ID NO 13595497 as cited in SEQ ID NO 51127
  misc_feature (1)..(978): Ortholog of  Ceres SEQ ID NO 14306765 as cited in SEQ ID NO 53275
attatcttctaaactcatttccttttcctctcgaaatctcaaagatagataaattttaaaggcatatttttttcatttcgactcagatgggttttgatgatacatgcaacacaggtcttgttcttggattaggtccctcaccaattccaaataattacaatagtaccatcagacaatcctccgtttacaagctcgagccgtcgttgactctatgcctctcgggcgatccctcggttaccgtggtgaccggagctgaccagctatgccgtcagacgtcatctcacagcggagtctcttctttctcaagcgggagggtggtgaaaagagagagagacggtggcgaagagtcgccggaggaggaagagatgacggagagagttataagtgattaccatgaagatgaagaaggtattagtgctagaaaaaaacttaggcttacgaaacaacaatctgctcttcttgaggaaagcttcaaggatcatagcacccttaatcccaaacaaaagcaagttctggctagacagctgaatctaaggcctagacaagttgaagtatggtttcaaaatagaagagccaggacaaagctgaagcaaacagaagtagattgtgagtttttgaagaagtgttgtgaaacattagcagatgagaacataagacttcagaaagagattcaagaactcaaaaccctaaaattgactcagcccttttacatgcacatgcctgcatcgactctaacgaagtgtccttcttgtgagagaatcggcggcggcggcgggggtaatggaggaggaggtggcggcagcggggctaccgcggtgattgtagatggaagtacggccaaaggagctttctctatctcctcaaagcctcacttcttcaacccttttactaacccatctgcagcttgttgaatagtagtaattcgtttaattttattacttaaaatattaattttcttttttttttgggtggcatttt

SEQ ID NO: 47748 - protein, 274 aa, Arabidopsis thaliana
  peptide (1)..(274): Ceres Seq. ID no. 13647585
MGFDDTCNTGLVLGLGPSPIPNNYNSTIRQSSVYKLEPSLTLCLSGDPSVTVVTGADQLCRQTSSHSGVSSFSSGRVVKRERDGGEESPEEEEMTERVISDYHEDEEGISARKKLRLTKQQSALLEESFKDHSTLNPKQKQVLARQLNLRPRQVEVWFQNRRARTKLKQTEVDCEFLKKCCETLADENIRLQKEIQELKTLKLTQPFYMHMPASTLTKCPSCERIGGGGGGNGGGGGGSGATAVIVDGSTAKGAFSISSKPHFFNPFTNPSAAC

SEQ ID NO: 47749 - protein, 181 aa, Arabidopsis thaliana
  peptide (1)..(181): Ceres Seq. ID no. 13647586
MTERVISDYHEDEEGISARKKLRLTKQQSALLEESFKDHSTLNPKQKQVLARQLNLRPRQVEVWFQNRRARTKLKQTEVDCEFLKKCCETLADENIRLQKEIQELKTLKLTQPFYMHMPASTLTKCPSCERIGGGGGGNGGGGGGSGATAVIVDGSTAKGAFSISSKPHFFNPFTNPSAAC

SEQ ID NO: 47750 - DNA, 1597 bp, Arabidopsis thaliana
  misc_feature (1)..(1597): Ceres Seq. ID no. 12734454
  misc_feature (1)..(1597): Ortholog of  Ceres SEQ ID NO 14316215 as cited in SEQ ID NO 53085
aatcgctgctacgaacagcaagcttcggcgaaaatgggattcattacgactctttaactcatcgatcccaatttgaaaactcgcatttccattgattcctttgatcagttctcaagtcgaaggtaattttgaatcaggcgcgatactccaagttaggatcttcggttcgagcttttgtgtgatcgatctaaaaggctatagaatatggtgaaaccatcggatttcaaagcaattcaagggtttattcggctgcattacactcgggtcaaccctgtcacaattggccgatcaaacccatcagctttgtcttctccagctattccctccaatggtgtttctcagcttcagcctaagtttagcttccacagcttatcctcgaaacccacttccaaaaacgtgggattatatcagattctgtcgtctcctaagctcaatcctaagttgcagcaagctttgggtttgcctcgtgtgaatgtgagttttgcatcggcgtttagattggtatccactaagagctctggatttcgaaaggttgatgggagttttgcgagaaaggttgttgataagcctgtcaaagctgttagttctacttttgctagataccgtgaggctatagggttgcacattgatgcattttggaaaaagaatagtcttgttgtgtttggagctgcaggtgtttttgtatgtattttcctttggcggattatgtttggaattgctagtacgtttgttggcctctcagagggcatggccaagtatgggtttcttgcactctcctcagccattgtagcattttctggattatacctccgctcaaggtttacaattaatccggataaagtttatagaatgaccatgaggaagatcaacacggcagctgaaattctagaagttatgggtgctcctctgtcaggatcagatttacgagcgtatgtgatgtcaggtggtggcataacatttaagaaattcaagccaacaattaggagcaagcgctgctttcttctattccccgttcagggttctgagcaaaagggccttgttagcgttgaagttaagaagaagaaaggccagtatgacatgaagcttttggcggtagatattccaatggcatctggtcccgaccaacggttatttctgattggcgatgaagaagagtacagaattggtggtggtttaatctctgtgttaagagaccctgttgtgaaagcaatggcagcaactaaggagttcgataatcttgatagaatcgaagaggaagaagacgctgaaagagaacttcaagaagctgaaagaaagcatcgtgaagagatcgagaaactcgagaaggagggctcataactcgtattttcttccccagaaatattttcttcttcggtggatataagaacaacaccatgaatcttttccaaaacccagttttttttttgtttttgctaactttcgagaaataaatttccctggctatgttgatcagaggatgctattgtgattactgattcttcttcatacaagatgtatctccttgttagagcagcctgtgctgtgaaaaaccgtttggtttagaacttttgtcttccaaagtataaactggtgtaag

SEQ ID NO: 47751 - protein, 377 aa, Arabidopsis thaliana
  peptide (1)..(377): Ceres Seq. ID no. 12734455
MVKPSDFKAIQGFIRLHYTRVNPVTIGRSNPSALSSPAIPSNGVSQLQPKFSFHSLSSKPTSKNVGLYQILSSPKLNPKLQQALGLPRVNVSFASAFRLVSTKSSGFRKVDGSFARKVVDKPVKAVSSTFARYREAIGLHIDAFWKKNSLVVFGAAGVFVCIFLWRIMFGIASTFVGLSEGMAKYGFLALSSAIVAFSGLYLRSRFTINPDKVYRMTMRKINTAAEILEVMGAPLSGSDLRAYVMSGGGITFKKFKPTIRSKRCFLLFPVQGSEQKGLVSVEVKKKKGQYDMKLLAVDIPMASGPDQRLFLIGDEEEYRIGGGLISVLRDPVVKAMAATKEFDNLDRIEEEEDAERELQEAERKHREEIEKLEKEGS

SEQ ID NO: 47752 - protein, 210 aa, Arabidopsis thaliana
  peptide (1)..(210): Ceres Seq. ID no. 12734456
MFGIASTFVGLSEGMAKYGFLALSSAIVAFSGLYLRSRFTINPDKVYRMTMRKINTAAEILEVMGAPLSGSDLRAYVMSGGGITFKKFKPTIRSKRCFLLFPVQGSEQKGLVSVEVKKKKGQYDMKLLAVDIPMASGPDQRLFLIGDEEEYRIGGGLISVLRDPVVKAMAATKEFDNLDRIEEEEDAERELQEAERKHREEIEKLEKEGS

SEQ ID NO: 47753 - protein, 196 aa, Arabidopsis thaliana
  peptide (1)..(196): Ceres Seq. ID no. 12734457
MAKYGFLALSSAIVAFSGLYLRSRFTINPDKVYRMTMRKINTAAEILEVMGAPLSGSDLRAYVMSGGGITFKKFKPTIRSKRCFLLFPVQGSEQKGLVSVEVKKKKGQYDMKLLAVDIPMASGPDQRLFLIGDEEEYRIGGGLISVLRDPVVKAMAATKEFDNLDRIEEEEDAERELQEAERKHREEIEKLEKEGS

SEQ ID NO: 47754 - DNA, 1725 bp, Arabidopsis thaliana
  misc_feature (1)..(1725): Ceres Seq. ID no. 13647945
  misc_feature (1)..(1725): Ortholog of  Ceres SEQ ID NO 13646595 as cited in SEQ ID NO 20561
  misc_feature (1)..(1725): Ortholog of  Ceres SEQ ID NO 14314636 as cited in SEQ ID NO 56924
  misc_feature (1)..(1725): Ortholog of  Ceres SEQ ID NO 15171614 as cited in SEQ ID NO 60106
  misc_feature (1)..(1725): Ortholog of  Ceres SEQ ID NO 13597574 as cited in SEQ ID NO 64677
  misc_feature (1)..(1725): Ortholog of  Ceres SEQ ID NO 13597843 as cited in SEQ ID NO 64850
  misc_feature (1)..(1725): Ortholog of  Ceres SEQ ID NO 13597678 as cited in SEQ ID NO 65375
  misc_feature (1)..(1725): Ortholog of  Ceres SEQ ID NO 13596180 as cited in SEQ ID NO 67941
  misc_feature (1)..(1725): Ortholog of  Ceres SEQ ID NO 13591190 as cited in SEQ ID NO 68044
  misc_feature (1)..(1725): Ortholog of  Ceres SEQ ID NO 13595961 as cited in SEQ ID NO 68223
gaaaccgacacaataacaacaacaacaacaacaaaaaaaaaaaaaaaaaaggccaacgttcagtgatctaggctatgaagattacaaaaccacatgtggccatgttcgctagccccggaatgggccacatcatcccggtgatcgagctcggaaaacgcttagctggttcccacggcttcgatgtcaccattttcgtccttgaaaccgacgcagcctcagctcaatctcaattccttaactcaccaggctgcgacgcggcccttgttgatatcgttggcctcccaacgcccgatatctccggtttagtcgacccatcagccttttttgggatcaagctcttggtcatgatgcgtgagaccattcctaccatccggtcaaagatagaggagatgcaacacaaaccaacggctctgatcgtagacttgtttggtttggacgcgataccgctcggtggtgagttcaacatgttgacttatatcttcatcgcttcaaacgcacgttttctcgcggtggctttgtttttcccaacgttggacaaagacatggaagaagagcacataatcaagaagcaacctatggttatgcctggatgtgaaccggttcggtttgaagatacacttgaaacattccttgacccaaacagccaactctaccgggaatttgttcctttcggttcggttttcccaacgtgtgatggtattattgtgaatacatgggatgatatggagcccaaaactttgaaatctcttcaagacccaaagctcttgggtcgaattgctggtgtaccggtttatccaattggtcctttgtctagaccggttgatccatctaaaactaatcatccggttttggattggttaaacaaacagccggacgagtcggtactttacatttcatttggaagcggtggctctctctcggctaaacaactaaccgaattggcttggggacttgagatgagtcagcaacggttcgtttgggtggttcgacccccggtggacggttcagcttgcagtgcatatttatccgctaacagtggtaaaatacgagacggtacacctgattatctcccggaaggttttgttagccggactcatgagagaggctttatggtctcttcttgggctccccaagcggagatcttggcccaccaagccgtaggtgggtttctaactcactgcggttggaattcgattctcgagagcgtcgttggtggcgttccgatgatcgcgtggccactttttgcggagcagatgatgaacgcgacactcctcaacgaagagcttggcgttgccgtccgctctaagaaactaccgtcggagggagtgattacgagggcggagatcgaggcgttggtgagaaagatcatggtggaggaggaaggtgctgagatgagaaagaagataaagaagctgaaagagaccgctgccgaatcgctgagttgcgacggtggagtggcgcatgaatcgttgtcaagaatcgccgacgagagcgagcatcttttggagcgtgtcaggtgcatggcacgtggtgcctaggaacgcttaccgtttatagtatgttacttataaactgcgtgtcgttttacccttttgggtatcttgtattatatagtttccgagtcttggttgccacatggtatcacgtggttttgttttggtcaatgctagtccctatcagtaatgtattttacaatgtaaaataaataattagtgtttaatttgt

SEQ ID NO: 47755 - protein, 487 aa, Arabidopsis thaliana
  peptide (1)..(487): Ceres Seq. ID no. 13647946
MKITKPHVAMFASPGMGHIIPVIELGKRLAGSHGFDVTIFVLETDAASAQSQFLNSPGCDAALVDIVGLPTPDISGLVDPSAFFGIKLLVMMRETIPTIRSKIEEMQHKPTALIVDLFGLDAIPLGGEFNMLTYIFIASNARFLAVALFFPTLDKDMEEEHIIKKQPMVMPGCEPVRFEDTLETFLDPNSQLYREFVPFGSVFPTCDGIIVNTWDDMEPKTLKSLQDPKLLGRIAGVPVYPIGPLSRPVDPSKTNHPVLDWLNKQPDESVLYISFGSGGSLSAKQLTELAWGLEMSQQRFVWVVRPPVDGSACSAYLSANSGKIRDGTPDYLPEGFVSRTHERGFMVSSWAPQAEILAHQAVGGFLTHCGWNSILESVVGGVPMIAWPLFAEQMMNATLLNEELGVAVRSKKLPSEGVITRAEIEALVRKIMVEEEGAEMRKKIKKLKETAAESLSCDGGVAHESLSRIADESEHLLERVRCMARGA

SEQ ID NO: 47756 - protein, 478 aa, Arabidopsis thaliana
  peptide (1)..(478): Ceres Seq. ID no. 13647947
MFASPGMGHIIPVIELGKRLAGSHGFDVTIFVLETDAASAQSQFLNSPGCDAALVDIVGLPTPDISGLVDPSAFFGIKLLVMMRETIPTIRSKIEEMQHKPTALIVDLFGLDAIPLGGEFNMLTYIFIASNARFLAVALFFPTLDKDMEEEHIIKKQPMVMPGCEPVRFEDTLETFLDPNSQLYREFVPFGSVFPTCDGIIVNTWDDMEPKTLKSLQDPKLLGRIAGVPVYPIGPLSRPVDPSKTNHPVLDWLNKQPDESVLYISFGSGGSLSAKQLTELAWGLEMSQQRFVWVVRPPVDGSACSAYLSANSGKIRDGTPDYLPEGFVSRTHERGFMVSSWAPQAEILAHQAVGGFLTHCGWNSILESVVGGVPMIAWPLFAEQMMNATLLNEELGVAVRSKKLPSEGVITRAEIEALVRKIMVEEEGAEMRKKIKKLKETAAESLSCDGGVAHESLSRIADESEHLLERVRCMARGA

SEQ ID NO: 47757 - protein, 472 aa, Arabidopsis thaliana
  peptide (1)..(472): Ceres Seq. ID no. 13647948
MGHIIPVIELGKRLAGSHGFDVTIFVLETDAASAQSQFLNSPGCDAALVDIVGLPTPDISGLVDPSAFFGIKLLVMMRETIPTIRSKIEEMQHKPTALIVDLFGLDAIPLGGEFNMLTYIFIASNARFLAVALFFPTLDKDMEEEHIIKKQPMVMPGCEPVRFEDTLETFLDPNSQLYREFVPFGSVFPTCDGIIVNTWDDMEPKTLKSLQDPKLLGRIAGVPVYPIGPLSRPVDPSKTNHPVLDWLNKQPDESVLYISFGSGGSLSAKQLTELAWGLEMSQQRFVWVVRPPVDGSACSAYLSANSGKIRDGTPDYLPEGFVSRTHERGFMVSSWAPQAEILAHQAVGGFLTHCGWNSILESVVGGVPMIAWPLFAEQMMNATLLNEELGVAVRSKKLPSEGVITRAEIEALVRKIMVEEEGAEMRKKIKKLKETAAESLSCDGGVAHESLSRIADESEHLLERVRCMARGA

SEQ ID NO: 47758 - DNA, 1432 bp, Arabidopsis thaliana
  misc_feature (1)..(1432): Ceres Seq. ID no. 13648403
  misc_feature (1)..(1432): Ortholog of  Ceres SEQ ID NO 14312216 as cited in SEQ ID NO 53930
  misc_feature (1)..(1432): Ortholog of  Ceres SEQ ID NO 13656404 as cited in SEQ ID NO 65806
  misc_feature (1)..(1432): Ortholog of  Ceres SEQ ID NO 12779935 as cited in SEQ ID NO 66774
  misc_feature (1)..(1432): Ortholog of  Ceres SEQ ID NO 13598695 as cited in SEQ ID NO 67368
  misc_feature (1)..(1432): Ortholog of  Ceres SEQ ID NO 13591174 as cited in SEQ ID NO 68289
gactctttttctttttcaaaatcatttttattttcgacttcatgcaagtgataaaagactaaagtgtaagactaataagactatcgtcatcgatccttaatccaaattttcgcgctcgattcgtcttttctgtatctcccggagctccgggacttgggcggaagaggagatgaggagcttgttgttgtggattgcggtggtcgtgtgcttgctatgttcagtcgcggcggtggttcaaagcggatctagcgacggatttgggaaacccagagatactgagactgcgatatcttttctggagtataaattgatggcgccttcggttccaatgatacctctcaccttgattcacggagctgactctaaaggagctgtgtgcttagatgggacgctacctggttatcatctagatcgtggttttggatcaggtgctaacagttggcttatccagcttgagggtggaggatggtgtaacaaccataggagctgtgtgtatcgcaaaacaagtcgacgtggttcctctaaattcatggaaaaagctttggccttcactggaattttgagcaatagatctgaagagaatcctgacttctttaattggaacaggatcaagttgcgttactgcgatggtgcgtctttctctggtgatagtcaggacgagttcgcaacttttctatcgaggacaacgaatctggcaagtggctatggaagaattcctgtctttaggcatgaagcaagcaaaccaggtctttgcatttcattgagtctatcagctggaggattagcttctattttgcactgtgatgagttcagggaactattacctagttccacgaaagtaaaatgcttaagtgatgctggaatgtttctggactcagtggatgtctctgggggccactcgcttaggaatatgttccaaggtgttgttacagtgcagaacctccaaaaggacttgtccagtacttgtacaaaccatttggatcctacttcgtgcttttttccccagaacttggtttcagacattaaaaccccaatgtttcttctcaacacagcatatgactcttggcagatccaagagagcttagctcctcctactgctgatccaggcggtatctggaaggcatgcaaatcagatcactcgcgatgtaattcatcacagatccaattcttccaagaattcaggaatcaaatgctgtttgctgtaaactcattctcaaactctgaccagaacggtctttatataaactcttgcttcgcgcattgtcagactgaaagacaggacacttggtttgctcaagattctcctcaactaaacggaaagagagtcgcagagtctgtaggtgactggtacttcgaccgagcaaaaaatgtcaaagctatcgattgtccttacccttgtgacacaacatgtcacaatctgattttcgagtga

SEQ ID NO: 47759 - protein, 420 aa, Arabidopsis thaliana
  peptide (1)..(420): Ceres Seq. ID no. 13648404
MRSLLLWIAVVVCLLCSVAAVVQSGSSDGFGKPRDTETAISFLEYKLMAPSVPMIPLTLIHGADSKGAVCLDGTLPGYHLDRGFGSGANSWLIQLEGGGWCNNHRSCVYRKTSRRGSSKFMEKALAFTGILSNRSEENPDFFNWNRIKLRYCDGASFSGDSQDEFATFLSRTTNLASGYGRIPVFRHEASKPGLCISLSLSAGGLASILHCDEFRELLPSSTKVKCLSDAGMFLDSVDVSGGHSLRNMFQGVVTVQNLQKDLSSTCTNHLDPTSCFFPQNLVSDIKTPMFLLNTAYDSWQIQESLAPPTADPGGIWKACKSDHSRCNSSQIQFFQEFRNQMLFAVNSFSNSDQNGLYINSCFAHCQTERQDTWFAQDSPQLNGKRVAESVGDWYFDRAKNVKAIDCPYPCDTTCHNLIFE

SEQ ID NO: 47760 - protein, 373 aa, Arabidopsis thaliana
  peptide (1)..(373): Ceres Seq. ID no. 13648405
MAPSVPMIPLTLIHGADSKGAVCLDGTLPGYHLDRGFGSGANSWLIQLEGGGWCNNHRSCVYRKTSRRGSSKFMEKALAFTGILSNRSEENPDFFNWNRIKLRYCDGASFSGDSQDEFATFLSRTTNLASGYGRIPVFRHEASKPGLCISLSLSAGGLASILHCDEFRELLPSSTKVKCLSDAGMFLDSVDVSGGHSLRNMFQGVVTVQNLQKDLSSTCTNHLDPTSCFFPQNLVSDIKTPMFLLNTAYDSWQIQESLAPPTADPGGIWKACKSDHSRCNSSQIQFFQEFRNQMLFAVNSFSNSDQNGLYINSCFAHCQTERQDTWFAQDSPQLNGKRVAESVGDWYFDRAKNVKAIDCPYPCDTTCHNLIFE

SEQ ID NO: 47761 - protein, 367 aa, Arabidopsis thaliana
  peptide (1)..(367): Ceres Seq. ID no. 13648406
MIPLTLIHGADSKGAVCLDGTLPGYHLDRGFGSGANSWLIQLEGGGWCNNHRSCVYRKTSRRGSSKFMEKALAFTGILSNRSEENPDFFNWNRIKLRYCDGASFSGDSQDEFATFLSRTTNLASGYGRIPVFRHEASKPGLCISLSLSAGGLASILHCDEFRELLPSSTKVKCLSDAGMFLDSVDVSGGHSLRNMFQGVVTVQNLQKDLSSTCTNHLDPTSCFFPQNLVSDIKTPMFLLNTAYDSWQIQESLAPPTADPGGIWKACKSDHSRCNSSQIQFFQEFRNQMLFAVNSFSNSDQNGLYINSCFAHCQTERQDTWFAQDSPQLNGKRVAESVGDWYFDRAKNVKAIDCPYPCDTTCHNLIFE

SEQ ID NO: 47762 - DNA, 1496 bp, Arabidopsis thaliana
  misc_feature (1)..(1496): Ceres Seq. ID no. 13648407
  misc_feature (1)..(1496): Ortholog of  Ceres SEQ ID NO 14312817 as cited in SEQ ID NO 57207
  misc_feature (1)..(1496): Ortholog of  Ceres SEQ ID NO 14309678 as cited in SEQ ID NO 59014
ttcctttaacttcatttgaaaactttctttccctaaccaagaaaccaacaatgtcaatgtcgtctccttctttttgacttcaatcttacatttttttatgttttaacttccttgctaatttagaatcatgagttttctaaagctcctgtgaagattttgaatacagatttctcaaagttctctcctttaccattagacccgttaatggatccgacttcaagatccgacccgcgccgtcaattattgggggtttaaaagcttccgactttctttctttctcatctatcacggcggcgtcgatgaaacgatccgttagacctctcttcagtgctcttctcttcgccttcttcgccgctacactcatctgcagagtggcgattcgtcggagcagcttctccttcgcttccgccatcgctgagcttggttcctccggtctcatgactgaagatattgtattcaacgagacattgctcgagttcgccgccattgatcccggagaacctaacttcaaacaggaagtcgatttgatttccgattacgaccacactcggagaagccaccgtcgacatttcagctccatgtcaataagaccaagcgagcaacaacgccgtgtgagtagagacattgcttcctcctccaagtttccggtaacgcttcgttcttctcaggcttatcgttactggtcagagttcaaaagaaatttacggctttgggctcgtagaagagcttatgaacctaatatcatgttagatttgatcagattagttaagaatccgattgatgttcacaatggtgttgtttcgatttcgagtgaaagatacttatcttgtgcagtggttgggaatagtggtacattgctaaatagtcaatacggagatctcattgataagcatgagattgtgattcggttgaacaatgcgaaaacagagaggtttgagaagaaggttggatcgaaaacaaatatatctttcataaatagtaacattttgcatcaatgtgggagaagggagagttgctattgtcatccttatggtgaaacagtgcctattgtgatgtacatttgccaaccgattcatgttttggattacactttgtgtaaaccatctcatcgagctcctctgcttatcacggatccgaggttcgatgtcatgtgtgctagaatcgtgaagtattactcggtgaagaagttcttggaagagaagaaagcgaaagggtttgtcgattggagtaaagatcatgaaggctcgttgtttcactattcgtcgggtatgcaggctgtgatgcttgcagtggggatttgtgagaaagttagtgtcttcgggtttgggaagttgaattcaaccaagcaccattaccatactaatcagaaagcagagctgaagcttcatgactatgaagcagagtatagattgtatcgagacctggaaaacagtcccagggccattccattcttaccaaaagaattcaagatccctttggtacaagtttaccattga

SEQ ID NO: 47763 - protein, 398 aa, Arabidopsis thaliana
  peptide (1)..(398): Ceres Seq. ID no. 13648408
MKRSVRPLFSALLFAFFAATLICRVAIRRSSFSFASAIAELGSSGLMTEDIVFNETLLEFAAIDPGEPNFKQEVDLISDYDHTRRSHRRHFSSMSIRPSEQQRRVSRDIASSSKFPVTLRSSQAYRYWSEFKRNLRLWARRRAYEPNIMLDLIRLVKNPIDVHNGVVSISSERYLSCAVVGNSGTLLNSQYGDLIDKHEIVIRLNNAKTERFEKKVGSKTNISFINSNILHQCGRRESCYCHPYGETVPIVMYICQPIHVLDYTLCKPSHRAPLLITDPRFDVMCARIVKYYSVKKFLEEKKAKGFVDWSKDHEGSLFHYSSGMQAVMLAVGICEKVSVFGFGKLNSTKHHYHTNQKAELKLHDYEAEYRLYRDLENSPRAIPFLPKEFKIPLVQVYH

SEQ ID NO: 47764 - protein, 352 aa, Arabidopsis thaliana
  peptide (1)..(352): Ceres Seq. ID no. 13648409
MTEDIVFNETLLEFAAIDPGEPNFKQEVDLISDYDHTRRSHRRHFSSMSIRPSEQQRRVSRDIASSSKFPVTLRSSQAYRYWSEFKRNLRLWARRRAYEPNIMLDLIRLVKNPIDVHNGVVSISSERYLSCAVVGNSGTLLNSQYGDLIDKHEIVIRLNNAKTERFEKKVGSKTNISFINSNILHQCGRRESCYCHPYGETVPIVMYICQPIHVLDYTLCKPSHRAPLLITDPRFDVMCARIVKYYSVKKFLEEKKAKGFVDWSKDHEGSLFHYSSGMQAVMLAVGICEKVSVFGFGKLNSTKHHYHTNQKAELKLHDYEAEYRLYRDLENSPRAIPFLPKEFKIPLVQVYH

SEQ ID NO: 47765 - protein, 305 aa, Arabidopsis thaliana
  peptide (1)..(305): Ceres Seq. ID no. 13648410
MSIRPSEQQRRVSRDIASSSKFPVTLRSSQAYRYWSEFKRNLRLWARRRAYEPNIMLDLIRLVKNPIDVHNGVVSISSERYLSCAVVGNSGTLLNSQYGDLIDKHEIVIRLNNAKTERFEKKVGSKTNISFINSNILHQCGRRESCYCHPYGETVPIVMYICQPIHVLDYTLCKPSHRAPLLITDPRFDVMCARIVKYYSVKKFLEEKKAKGFVDWSKDHEGSLFHYSSGMQAVMLAVGICEKVSVFGFGKLNSTKHHYHTNQKAELKLHDYEAEYRLYRDLENSPRAIPFLPKEFKIPLVQVYH

SEQ ID NO: 47766 - DNA, 1972 bp, Arabidopsis thaliana
  misc_feature (1)..(1972): Ceres Seq. ID no. 12651188
  misc_feature (1)..(1972): Ortholog of  Ceres SEQ ID NO 15176759 as cited in SEQ ID NO 59678
  misc_feature (1)..(1972): Ortholog of  Ceres SEQ ID NO 15172875 as cited in SEQ ID NO 60423
  misc_feature (1)..(1972): Ortholog of  Ceres SEQ ID NO 14307904 as cited in SEQ ID NO 66440
  misc_feature (1)..(1972): Ortholog of  Ceres SEQ ID NO 13659971 as cited in SEQ ID NO 67565
aaagcaaaaaaagtaagagaagaaaaacacaaaaaaaaataaaacctttctatttctcttcctcctttgagctttgacctctcctccatctcccccacccttttatgcaacaatgggaaattgttgctctcacggacgggactcagccgataacggagacgcattggaaaacggagcttccgcttcaaatgctgccaattcgactggtccaaccgcggaagcttctgtaccacaatcaaaacatgcacctccttctcctcctcctgcaaccaaacaaggccctataggccctgtcttaggtcgacccatggaagatgtaaaagcttcatattctttagggaaagagctcgggcgaggccaatttggtgtcacacacctctgcacacagaaggcaacaggtcatcaatttgcttgcaagacgattgcaaaaagaaagcttgtaaacaaggaagacattgaggatgtaagaagagaagtgcagataatgcatcacttgactggtcaaccaaacattgtggagcttaaaggggcttatgaggataagcattccgtgcatttggttatggagctttgcgcaggtggagagttgttcgataggattattgctaaaggacattactcggagagagcagctgcttcgttgctaagaacgattgttcagattgtgcatacttgccattccatgggggtgattcacagggatttgaagccagagaactttctcttgctcaacaaagatgagaattctcctctcaaagctactgactttgggttgtcggttttctacaagccaggagaggtattcaaggatattgtggggagtgcttattacatcgcacctgaggttttgaaaagaaagtatggaccagaggcagatatttggagtattggtgtcatgttgtatatcctcttatgtggtgtcccgccattctgggctgagtcggagaacgggatattcaacgcaatccttaggggacatgttgatttctcaagtgatccatggccatccatctcgcctcaggcaaaggatcttgttaagaagatgctcaactctgatccaaagcaaagactaactgctgctcaagttctcaaccatccatggatcaaggaggatggagaggcaccagatgttcctcttgataatgcggtgatgtccaggctcaaacaattcaaagcaatgaacaatttcaagaaagttgcattacgggtgatagcaggctgcttatcagaggaagagatcatggggttgaaggagatgtttaaaggtatggatactgatagtagtggaacaattacactcgaggagttaagacaaggacttgctaagcaaggtacaaggttgtcagaatatgaagttcagcagttaatggaagctgctgatgctgatggtaatggaacaatagactatggcgagtttatcgcagccacaatgcatatcaacagacttgacagagaagaacatctttactcagccttccaacactttgacaaagacaacagtggatatatcacaatggaagagctagagcaagccctacgggagtttggcatgaatgatggcagagacattaaggagatcatttccgaggttgatggagacaatgatggtcggataaactatgatgaatttgtggcaatgatgagaaaaggaaacccggatccaatcccaaagaagcggcgtgaactttcattcaaatgaacacaattgttgaagtagaggaagagaggagatagaaagagagttacacacaggggtcgagaaactcatcttcctttcaaaatgagaaataaggcaaagcaaatatcaaagaaaattattctaaagtggaggagatctttaagggaggagaaggctcaagaaggaaaacaaaatcatttggggcatttggggggaggtgtttgatataatgtacattttcttttctagttgtctactactgcttaaagtgccatgggtttctcaatgtacttc

SEQ ID NO: 47767 - protein, 528 aa, Arabidopsis thaliana
  peptide (1)..(528): Ceres Seq. ID no. 12651189
MGNCCSHGRDSADNGDALENGASASNAANSTGPTAEASVPQSKHAPPSPPPATKQGPIGPVLGRPMEDVKASYSLGKELGRGQFGVTHLCTQKATGHQFACKTIAKRKLVNKEDIEDVRREVQIMHHLTGQPNIVELKGAYEDKHSVHLVMELCAGGELFDRIIAKGHYSERAAASLLRTIVQIVHTCHSMGVIHRDLKPENFLLLNKDENSPLKATDFGLSVFYKPGEVFKDIVGSAYYIAPEVLKRKYGPEADIWSIGVMLYILLCGVPPFWAESENGIFNAILRGHVDFSSDPWPSISPQAKDLVKKMLNSDPKQRLTAAQVLNHPWIKEDGEAPDVPLDNAVMSRLKQFKAMNNFKKVALRVIAGCLSEEEIMGLKEMFKGMDTDSSGTITLEELRQGLAKQGTRLSEYEVQQLMEAADADGNGTIDYGEFIAATMHINRLDREEHLYSAFQHFDKDNSGYITMEELEQALREFGMNDGRDIKEIISEVDGDNDGRINYDEFVAMMRKGNPDPIPKKRRELSFK

SEQ ID NO: 47768 - protein, 463 aa, Arabidopsis thaliana
  peptide (1)..(463): Ceres Seq. ID no. 12651190
MEDVKASYSLGKELGRGQFGVTHLCTQKATGHQFACKTIAKRKLVNKEDIEDVRREVQIMHHLTGQPNIVELKGAYEDKHSVHLVMELCAGGELFDRIIAKGHYSERAAASLLRTIVQIVHTCHSMGVIHRDLKPENFLLLNKDENSPLKATDFGLSVFYKPGEVFKDIVGSAYYIAPEVLKRKYGPEADIWSIGVMLYILLCGVPPFWAESENGIFNAILRGHVDFSSDPWPSISPQAKDLVKKMLNSDPKQRLTAAQVLNHPWIKEDGEAPDVPLDNAVMSRLKQFKAMNNFKKVALRVIAGCLSEEEIMGLKEMFKGMDTDSSGTITLEELRQGLAKQGTRLSEYEVQQLMEAADADGNGTIDYGEFIAATMHINRLDREEHLYSAFQHFDKDNSGYITMEELEQALREFGMNDGRDIKEIISEVDGDNDGRINYDEFVAMMRKGNPDPIPKKRRELSFK

SEQ ID NO: 47769 - protein, 404 aa, Arabidopsis thaliana
  peptide (1)..(404): Ceres Seq. ID no. 12651191
MHHLTGQPNIVELKGAYEDKHSVHLVMELCAGGELFDRIIAKGHYSERAAASLLRTIVQIVHTCHSMGVIHRDLKPENFLLLNKDENSPLKATDFGLSVFYKPGEVFKDIVGSAYYIAPEVLKRKYGPEADIWSIGVMLYILLCGVPPFWAESENGIFNAILRGHVDFSSDPWPSISPQAKDLVKKMLNSDPKQRLTAAQVLNHPWIKEDGEAPDVPLDNAVMSRLKQFKAMNNFKKVALRVIAGCLSEEEIMGLKEMFKGMDTDSSGTITLEELRQGLAKQGTRLSEYEVQQLMEAADADGNGTIDYGEFIAATMHINRLDREEHLYSAFQHFDKDNSGYITMEELEQALREFGMNDGRDIKEIISEVDGDNDGRINYDEFVAMMRKGNPDPIPKKRRELSFK

SEQ ID NO: 47770 - DNA, 1539 bp, Arabidopsis thaliana
  misc_feature (1)..(1539): Ceres Seq. ID no. 12667051
  misc_feature (1)..(1539): Ortholog of  Ceres SEQ ID NO 14309934 as cited in SEQ ID NO 20583
  misc_feature (1)..(1539): Ortholog of  Ceres SEQ ID NO 13654989 as cited in SEQ ID NO 63117
  misc_feature (1)..(1539): Ortholog of  Ceres SEQ ID NO 13584744 as cited in SEQ ID NO 69137
atgtcatctgagagttctctgagtgctgacatgtcgaagaaggtctcatttttaggtttgaagggtatgaaactgtgggtactgatttgtttagtagttggcacatttgtagttttggttttctgtatattatctctatggattgcattccgccggaaatcccggagatcatctcacaagctgttacccttcagtcaaataccacgcgtggcgaaagatatcagggttgatgatagagttgggtttcaaaatcataatgaaaatttatctatcacaaatgctgataaatctagtgacagaaactctgggaagatgatgtcttacttgggaagaacgaagtctagtgataatgatagtataagtcaatgtagctctgtgcatcatcatgagagagcttgtagttctcactctggtgaagatggaagctttggagctgcttggagacaaaattccctatcacagggcgggctagtaacagcatctcctttggttggtttgccagaaatatctcatcttggttggggacactggtttactcttagggatcttcagctagccaccaaccgttttgctgctgaaaatgtaatcggtgagggtggttatggagtagtttataagggtagactcatcaacggtaatgatgttgctgtaaagaagcttcttaacaatctgggacaggctgagaaggaattccgggttgaagttgaggctattggtcatgtacggcacaagaatcttgtaaggcttctaggatattgcatagagggtgttaataggatgcttgtttatgagtatgtgaatagtggtaacttagaacaatggctacatggagccatgggaaaacaaagcactctcacttgggaggctcgcatgaaaatccttgttggtactgcgcaggcgcttgcttatttacatgaagcaatagaaccaaaagtagtccacagagacataaaagcaagcaatatcctgattgacgatgacttcaatgcaaagctttctgattttgggttggccaagctcttagactcgggtgagagtcacatcacgaccagagtcatgggaacctttggatatgtcgcacccgaatatgctaatacaggtctattgaatgagaagagtgacatctatagctttggtgtcctgctgctagagactataactggaagagatccagttgactatgaacgtccagctaatgaggtgaatctggtcgaatggctaaagatgatggttggaacaagaagagctgaagaagttgttgactcaaggattgagcctccacccgctacacgtgctctgaaacgtgcacttcttgttgccctgagatgtgtggatcctgaagcacagaaacggcctaaaatgagccaggttgtgcggatgcttgaatccgatgaacacccttttcgtgaggagcggaggaacagaaagagtagaacagcgagtatggagattgttgaaaccactgaggaatcagctgacacaagcaaagggcctggtcactcagagaacactacaaaacctgagaagactcatgtatag

SEQ ID NO: 47771 - protein, 512 aa, Arabidopsis thaliana
  peptide (1)..(512): Ceres Seq. ID no. 12667052
MSSESSLSADMSKKVSFLGLKGMKLWVLICLVVGTFVVLVFCILSLWIAFRRKSRRSSHKLLPFSQIPRVAKDIRVDDRVGFQNHNENLSITNADKSSDRNSGKMMSYLGRTKSSDNDSISQCSSVHHHERACSSHSGEDGSFGAAWRQNSLSQGGLVTASPLVGLPEISHLGWGHWFTLRDLQLATNRFAAENVIGEGGYGVVYKGRLINGNDVAVKKLLNNLGQAEKEFRVEVEAIGHVRHKNLVRLLGYCIEGVNRMLVYEYVNSGNLEQWLHGAMGKQSTLTWEARMKILVGTAQALAYLHEAIEPKVVHRDIKASNILIDDDFNAKLSDFGLAKLLDSGESHITTRVMGTFGYVAPEYANTGLLNEKSDIYSFGVLLLETITGRDPVDYERPANEVNLVEWLKMMVGTRRAEEVVDSRIEPPPATRALKRALLVALRCVDPEAQKRPKMSQVVRMLESDEHPFREERRNRKSRTASMEIVETTEESADTSKGPGHSENTTKPEKTHV

SEQ ID NO: 47772 - protein, 502 aa, Arabidopsis thaliana
  peptide (1)..(502): Ceres Seq. ID no. 12667053
MSKKVSFLGLKGMKLWVLICLVVGTFVVLVFCILSLWIAFRRKSRRSSHKLLPFSQIPRVAKDIRVDDRVGFQNHNENLSITNADKSSDRNSGKMMSYLGRTKSSDNDSISQCSSVHHHERACSSHSGEDGSFGAAWRQNSLSQGGLVTASPLVGLPEISHLGWGHWFTLRDLQLATNRFAAENVIGEGGYGVVYKGRLINGNDVAVKKLLNNLGQAEKEFRVEVEAIGHVRHKNLVRLLGYCIEGVNRMLVYEYVNSGNLEQWLHGAMGKQSTLTWEARMKILVGTAQALAYLHEAIEPKVVHRDIKASNILIDDDFNAKLSDFGLAKLLDSGESHITTRVMGTFGYVAPEYANTGLLNEKSDIYSFGVLLLETITGRDPVDYERPANEVNLVEWLKMMVGTRRAEEVVDSRIEPPPATRALKRALLVALRCVDPEAQKRPKMSQVVRMLESDEHPFREERRNRKSRTASMEIVETTEESADTSKGPGHSENTTKPEKTHV

SEQ ID NO: 47773 - protein, 490 aa, Arabidopsis thaliana
  peptide (1)..(490): Ceres Seq. ID no. 12667054
MKLWVLICLVVGTFVVLVFCILSLWIAFRRKSRRSSHKLLPFSQIPRVAKDIRVDDRVGFQNHNENLSITNADKSSDRNSGKMMSYLGRTKSSDNDSISQCSSVHHHERACSSHSGEDGSFGAAWRQNSLSQGGLVTASPLVGLPEISHLGWGHWFTLRDLQLATNRFAAENVIGEGGYGVVYKGRLINGNDVAVKKLLNNLGQAEKEFRVEVEAIGHVRHKNLVRLLGYCIEGVNRMLVYEYVNSGNLEQWLHGAMGKQSTLTWEARMKILVGTAQALAYLHEAIEPKVVHRDIKASNILIDDDFNAKLSDFGLAKLLDSGESHITTRVMGTFGYVAPEYANTGLLNEKSDIYSFGVLLLETITGRDPVDYERPANEVNLVEWLKMMVGTRRAEEVVDSRIEPPPATRALKRALLVALRCVDPEAQKRPKMSQVVRMLESDEHPFREERRNRKSRTASMEIVETTEESADTSKGPGHSENTTKPEKTHV

SEQ ID NO: 47774 - DNA, 1573 bp, Arabidopsis thaliana
  misc_feature (1)..(1573): Ceres Seq. ID no. 13648419
  misc_feature (1)..(1573): Ortholog of  Ceres SEQ ID NO 14303604 as cited in SEQ ID NO 62525
gtttcttcttcgttctccagtttcgtcggataaatctaaaaagaggcaaaatcaaatcgaattctcgaagaagcaaataacgtctgcataaaggtttaaagtttatctcttccgaagaagttatgtctcttacatgcgttaatatgtccgaggatgtctggttgacttgcctcactcacgcattatccaccgagaccgaagagatcatgggtctccttctcggcgacatcgagtactcaaaggacgggggaagtgccacagctatgatctggggagcatcgcctcagtcacggtctgatcggcagaaggatagagttgaaaccaatcctgaacaactggctgctgcttctgctcaggctgatataatgacgatatcaacgggcagaactacacgggtcattggatggtaccactcccatcctcatattaccgttcttccttcccatgtcgatgttcgaacacaagctatgtatcagcttttagattctggttttattggcctcatcttttcctgttttagtgaagatgctaacaaggttggcagaatccaagttatcgctttccagtcttctgatggaaagccgaatagtattcctaaatcaatgagcctggttcttgcaaataaagattctgttatcgatttagaatcttcatttagttcttcggactcgatataccagagatcgtcttctgctcggggagacaatcctgagctcgacacaagtgatacagctacaacttccggatctaagggtggaggacgcgtttcagattttgaggctttctttgtgaacaatactgaggccaacaacaccagaagagatggaacaagtggaaactacagcagcacagcaatagaaattgactcgatggacatgtctgaaagtatgcaagaggcaatgcaccgctcaaatttagaaaccagtggtgtggggtatgttagaaaagaagtcccacttcatgttttgccgacttcatcccttcttcaactcaattcacctttagcatcttttaaaagcctgcaacgagtactctacgaggaggaacgagcagcgtaccaccaatccgtgcagcaaagcaagagagacgggagagttcatcctcttgctttcattcacaacacatcaacatatcaggcttccatgtgcaagttaatagaatactgcttgagtcctgccattaacgcacttcaagataggctgaaggagaacaagatccggttagcaatgctgatggatgaagctgaagttttggaagcacagaaactgaaaggagcagagacaagcgggggagcatctcgtctggttcacggttctggcagccgaagcagaagacgatcgtagaaagatctgtgactaaaggcacatgccttcctctttgtgtatgtttctatttggatatttgttttcttacaactgtatcataggcagacatctgttcttagtttactcatctgtagcattattggggttttttcattttcatggaagattaaccttttccaagagatctgtaatatatcaaattcataatggatatgaggtggaaaagaaaaagtgaaccttgattgcat

SEQ ID NO: 47775 - protein, 406 aa, Arabidopsis thaliana
  peptide (1)..(406): Ceres Seq. ID no. 13648420
MSLTCVNMSEDVWLTCLTHALSTETEEIMGLLLGDIEYSKDGGSATAMIWGASPQSRSDRQKDRVETNPEQLAAASAQADIMTISTGRTTRVIGWYHSHPHITVLPSHVDVRTQAMYQLLDSGFIGLIFSCFSEDANKVGRIQVIAFQSSDGKPNSIPKSMSLVLANKDSVIDLESSFSSSDSIYQRSSSARGDNPELDTSDTATTSGSKGGGRVSDFEAFFVNNTEANNTRRDGTSGNYSSTAIEIDSMDMSESMQEAMHRSNLETSGVGYVRKEVPLHVLPTSSLLQLNSPLASFKSLQRVLYEEERAAYHQSVQQSKRDGRVHPLAFIHNTSTYQASMCKLIEYCLSPAINALQDRLKENKIRLAMLMDEAEVLEAQKLKGAETSGGASRLVHGSGSRSRRRS

SEQ ID NO: 47776 - protein, 399 aa, Arabidopsis thaliana
  peptide (1)..(399): Ceres Seq. ID no. 13648421
MSEDVWLTCLTHALSTETEEIMGLLLGDIEYSKDGGSATAMIWGASPQSRSDRQKDRVETNPEQLAAASAQADIMTISTGRTTRVIGWYHSHPHITVLPSHVDVRTQAMYQLLDSGFIGLIFSCFSEDANKVGRIQVIAFQSSDGKPNSIPKSMSLVLANKDSVIDLESSFSSSDSIYQRSSSARGDNPELDTSDTATTSGSKGGGRVSDFEAFFVNNTEANNTRRDGTSGNYSSTAIEIDSMDMSESMQEAMHRSNLETSGVGYVRKEVPLHVLPTSSLLQLNSPLASFKSLQRVLYEEERAAYHQSVQQSKRDGRVHPLAFIHNTSTYQASMCKLIEYCLSPAINALQDRLKENKIRLAMLMDEAEVLEAQKLKGAETSGGASRLVHGSGSRSRRRS

SEQ ID NO: 47777 - protein, 378 aa, Arabidopsis thaliana
  peptide (1)..(378): Ceres Seq. ID no. 13648422
MGLLLGDIEYSKDGGSATAMIWGASPQSRSDRQKDRVETNPEQLAAASAQADIMTISTGRTTRVIGWYHSHPHITVLPSHVDVRTQAMYQLLDSGFIGLIFSCFSEDANKVGRIQVIAFQSSDGKPNSIPKSMSLVLANKDSVIDLESSFSSSDSIYQRSSSARGDNPELDTSDTATTSGSKGGGRVSDFEAFFVNNTEANNTRRDGTSGNYSSTAIEIDSMDMSESMQEAMHRSNLETSGVGYVRKEVPLHVLPTSSLLQLNSPLASFKSLQRVLYEEERAAYHQSVQQSKRDGRVHPLAFIHNTSTYQASMCKLIEYCLSPAINALQDRLKENKIRLAMLMDEAEVLEAQKLKGAETSGGASRLVHGSGSRSRRRS

SEQ ID NO: 47778 - DNA, 1267 bp, Arabidopsis thaliana
  misc_feature (1)..(1267): Ceres Seq. ID no. 13648432
  misc_feature (1)..(1267): Ortholog of  Ceres SEQ ID NO 13596816 as cited in SEQ ID NO 62287
gaacgaataagaaaagaagagaaacatcaaacatctttggtttgcttccctcgtacccgttcttcatacaagcacgcctttaattatggattgtcatagaaagacgttcttgttgaagtttttgtgcgtggcatttctgttaaactacagcaatgttggctttgtagacgcagcaacaaacattggcttgaactacggcctccttggagacaacctcccgcctccatctgaagttatcaacctctacaagtccttaagtgttaccaatattcggatcttcgacacaactacggatgtccttaacgcctttcgagggaatcgcaatatcggagttatggtagacgtgaagaaccaagacttagaggctctttcggtcagcgaagaagctgttaacacctggttcgtgaccaacattgagccttacttagctgatgtcaacatcacgttcattgctgtcgggaacgaagtcatcccaggggaaatcggctcttatgtgctacccgtcatgaaatctctcaccaacattgtcaagtcgaggagtctcccgatcttgatcagcaccacggtggctatgaccaaccttggccagtcatatccaccttcggccggagatttcatgcctcaagcacgtgaacaacttaccccggtgctgaagtttttgtctcaaacaaatacgcctatcctcgtcaacatctacccctacttcgcatatgctgctgatcctatcaacattcagctcgactatgccatcttcaacaccaacaaggtcgtggtccaagacgggccacttggttatacaaacatgttcgatgtgatatttgatgcgttcgtatgggcaatggagaaagaaggtgtgaaggatttaccaatggtggtaacagaaactggatggccatctgctggtaacggaaacttaacgactccagatatcgcatctatatacaataccaattttgttaaacatgtggaaagcggtaaagggacgccaaagagaccaaagagtggcattagtggatttctatttgcgacgttcaatgagaatcaaaagccagcgggaaccgaacaaaattttgggttatataatccaacagatatgaagcccatctacaagatgttttgatttttagattcttgattttatagactatcccaaatcattagtaaattaatgatgctctaatagttgtaatagagcgggataaaatcaagatctacaacaacattcattttatatgttgtatgatcttcttaaataaaaaaacttaag

SEQ ID NO: 47779 - protein, 344 aa, Arabidopsis thaliana
  peptide (1)..(344): Ceres Seq. ID no. 13648433
MDCHRKTFLLKFLCVAFLLNYSNVGFVDAATNIGLNYGLLGDNLPPPSEVINLYKSLSVTNIRIFDTTTDVLNAFRGNRNIGVMVDVKNQDLEALSVSEEAVNTWFVTNIEPYLADVNITFIAVGNEVIPGEIGSYVLPVMKSLTNIVKSRSLPILISTTVAMTNLGQSYPPSAGDFMPQAREQLTPVLKFLSQTNTPILVNIYPYFAYAADPINIQLDYAIFNTNKVVVQDGPLGYTNMFDVIFDAFVWAMEKEGVKDLPMVVTETGWPSAGNGNLTTPDIASIYNTNFVKHVESGKGTPKRPKSGISGFLFATFNENQKPAGTEQNFGLYNPTDMKPIYKMF

SEQ ID NO: 47780 - protein, 261 aa, Arabidopsis thaliana
  peptide (1)..(261): Ceres Seq. ID no. 13648434
MVDVKNQDLEALSVSEEAVNTWFVTNIEPYLADVNITFIAVGNEVIPGEIGSYVLPVMKSLTNIVKSRSLPILISTTVAMTNLGQSYPPSAGDFMPQAREQLTPVLKFLSQTNTPILVNIYPYFAYAADPINIQLDYAIFNTNKVVVQDGPLGYTNMFDVIFDAFVWAMEKEGVKDLPMVVTETGWPSAGNGNLTTPDIASIYNTNFVKHVESGKGTPKRPKSGISGFLFATFNENQKPAGTEQNFGLYNPTDMKPIYKMF

SEQ ID NO: 47781 - protein, 204 aa, Arabidopsis thaliana
  peptide (1)..(204): Ceres Seq. ID no. 13648435
MKSLTNIVKSRSLPILISTTVAMTNLGQSYPPSAGDFMPQAREQLTPVLKFLSQTNTPILVNIYPYFAYAADPINIQLDYAIFNTNKVVVQDGPLGYTNMFDVIFDAFVWAMEKEGVKDLPMVVTETGWPSAGNGNLTTPDIASIYNTNFVKHVESGKGTPKRPKSGISGFLFATFNENQKPAGTEQNFGLYNPTDMKPIYKMF

SEQ ID NO: 47782 - DNA, 1811 bp, Arabidopsis thaliana; identical to SEQ ID NO: 36414
  misc_feature (1)..(1811): Ceres Seq. ID no. 12329212
  misc_feature (1)..(1811): Ortholog of  Ceres SEQ ID NO 13594317 as cited in SEQ ID NO 57796

SEQ ID NO: 47783 - protein, 519 aa, Arabidopsis thaliana; identical to SEQ ID NO: 36415
  peptide (1)..(519): Ceres Seq. ID no. 12329213

SEQ ID NO: 47784 - protein, 512 aa, Arabidopsis thaliana; identical to SEQ ID NO: 36416
  peptide (1)..(512): Ceres Seq. ID no. 12329214

SEQ ID NO: 47785 - protein, 395 aa, Arabidopsis thaliana; identical to SEQ ID NO: 36417
  peptide (1)..(395): Ceres Seq. ID no. 12329215

SEQ ID NO: 47786 - DNA, 2179 bp, Arabidopsis thaliana; identical to SEQ ID NO: 44075
  misc_feature (1)..(2179): Ceres Seq. ID no. 13509312
  misc_feature (1)..(2179): Ortholog of  Ceres SEQ ID NO 13582619 as cited in SEQ ID NO 56520
  misc_feature (1)..(2179): Ortholog of  Ceres SEQ ID NO 13660872 as cited in SEQ ID NO 60830

SEQ ID NO: 47787 - protein, 489 aa, Arabidopsis thaliana; identical to SEQ ID NO: 44076
  peptide (1)..(489): Ceres Seq. ID no. 13509313

SEQ ID NO: 47788 - protein, 436 aa, Arabidopsis thaliana; identical to SEQ ID NO: 44077
  peptide (1)..(436): Ceres Seq. ID no. 13509314

SEQ ID NO: 47789 - protein, 362 aa, Arabidopsis thaliana; identical to SEQ ID NO: 44078
  peptide (1)..(362): Ceres Seq. ID no. 13509315

SEQ ID NO: 47790 - DNA, 1340 bp, Arabidopsis thaliana
  misc_feature (1)..(1340): Ceres Seq. ID no. 13649357
  misc_feature (1)..(1340): Ortholog of  Ceres SEQ ID NO 14310259 as cited in SEQ ID NO 20662
gtggcacacttttcacaaagaagatgggttcttcacaatctacgcaaatggaagacgaagaagaagaagaagaggaaactgacaatgaagaagaagaagaagaagataatggcagatcaaacacaagacaattagacaatctcctagtaaagaaagttctagaacaagagcctgagatgttaccatgtcacgcttcagcttcaccactctcaccacaactatcatctctcggtactccaaggcttggaccatcgattaaagtctgggatccttacaacgtcctctctccgccgccgcaaccgccgtctatcttctctcgaatcgtgtctggtgatgaagatcgagctgtgacagaggtttatctgattagccatggtgagtctgatcttaatcttaaacctgatttgattggtgggagatgtcatgtagctgctcttactgctaatggtaaacgtcaagctagggctcttgctgttttcttcaaatctcaaggtgttcggtttaattcggtttattcgtcacctctagatcgagctagatccatggctgtttctgtttgtcaggaaatgagttttccggaggagcatgtacaatcttcggatgctgttattgagatgagtttaggggattgggaaggctgtaatcaagcagagatttatagtcctgaaactttgagtttgattgaaaggtgccaacctgatttcacagctccatctggagaatcactgaggcaagtagagtttcgaatggttcagtttctaaacgggacagtctcaggagttgcagagaagcttaggtcagattattcttccactacgaatcacaatgaaactcatgagcgtgatggtggtgtgtcacttgcttcgactaactgggacttactacacaagcatcgtcccagtctcacaaggaagaaatctggtaaaagcaggcttcaagtgatgactaatcacgaacctgacgatggaaactccccaagggaagaagttaatcataatcacaatgacctaagtgattcgtcttccttaatcttgaattgtgtcggggttttcacgcattctttgcctataaagtgtcttttaaccggaatccttggttgcagtccggtaatgactcataagatctgtgtagaagactcttcagtgactgtgttacaacattcatggagaaacgggtggcagatcaaacgaatgaatgatactgctcatcttagattgttgtaactttatttaccgataaattatttggaaaaacgaggattcatatatgtttacaccatgaatctgcagaagctcaagaacaaaggttctgcagataatgaaatgccacggcctctttgt

SEQ ID NO: 47791 - protein, 406 aa, Arabidopsis thaliana
  peptide (1)..(406): Ceres Seq. ID no. 13649358
GTLFTKKMGSSQSTQMEDEEEEEEETDNEEEEEEDNGRSNTRQLDNLLVKKVLEQEPEMLPCHASASPLSPQLSSLGTPRLGPSIKVWDPYNVLSPPPQPPSIFSRIVSGDEDRAVTEVYLISHGESDLNLKPDLIGGRCHVAALTANGKRQARALAVFFKSQGVRFNSVYSSPLDRARSMAVSVCQEMSFPEEHVQSSDAVIEMSLGDWEGCNQAEIYSPETLSLIERCQPDFTAPSGESLRQVEFRMVQFLNGTVSGVAEKLRSDYSSTTNHNETHERDGGVSLASTNWDLLHKHRPSLTRKKSGKSRLQVMTNHEPDDGNSPREEVNHNHNDLSDSSSLILNCVGVFTHSLPIKCLLTGILGCSPVMTHKICVEDSSVTVLQHSWRNGWQIKRMNDTAHLRLL

SEQ ID NO: 47792 - protein, 399 aa, Arabidopsis thaliana
  peptide (1)..(399): Ceres Seq. ID no. 13649359
MGSSQSTQMEDEEEEEEETDNEEEEEEDNGRSNTRQLDNLLVKKVLEQEPEMLPCHASASPLSPQLSSLGTPRLGPSIKVWDPYNVLSPPPQPPSIFSRIVSGDEDRAVTEVYLISHGESDLNLKPDLIGGRCHVAALTANGKRQARALAVFFKSQGVRFNSVYSSPLDRARSMAVSVCQEMSFPEEHVQSSDAVIEMSLGDWEGCNQAEIYSPETLSLIERCQPDFTAPSGESLRQVEFRMVQFLNGTVSGVAEKLRSDYSSTTNHNETHERDGGVSLASTNWDLLHKHRPSLTRKKSGKSRLQVMTNHEPDDGNSPREEVNHNHNDLSDSSSLILNCVGVFTHSLPIKCLLTGILGCSPVMTHKICVEDSSVTVLQHSWRNGWQIKRMNDTAHLRLL

SEQ ID NO: 47793 - protein, 391 aa, Arabidopsis thaliana
  peptide (1)..(391): Ceres Seq. ID no. 13649360
MEDEEEEEEETDNEEEEEEDNGRSNTRQLDNLLVKKVLEQEPEMLPCHASASPLSPQLSSLGTPRLGPSIKVWDPYNVLSPPPQPPSIFSRIVSGDEDRAVTEVYLISHGESDLNLKPDLIGGRCHVAALTANGKRQARALAVFFKSQGVRFNSVYSSPLDRARSMAVSVCQEMSFPEEHVQSSDAVIEMSLGDWEGCNQAEIYSPETLSLIERCQPDFTAPSGESLRQVEFRMVQFLNGTVSGVAEKLRSDYSSTTNHNETHERDGGVSLASTNWDLLHKHRPSLTRKKSGKSRLQVMTNHEPDDGNSPREEVNHNHNDLSDSSSLILNCVGVFTHSLPIKCLLTGILGCSPVMTHKICVEDSSVTVLQHSWRNGWQIKRMNDTAHLRLL

SEQ ID NO: 47794 - DNA, 2024 bp, Arabidopsis thaliana; identical to SEQ ID NO: 44984
  misc_feature (1)..(2024): Ceres Seq. ID no. 12600277
  misc_feature (1)..(2024): Ortholog of  Ceres SEQ ID NO 14310841 as cited in SEQ ID NO 53666
  misc_feature (1)..(2024): Ortholog of  Ceres SEQ ID NO 15178736 as cited in SEQ ID NO 56439
  misc_feature (1)..(2024): Ortholog of  Ceres SEQ ID NO 14308493 as cited in SEQ ID NO 60320

SEQ ID NO: 47795 - protein, 545 aa, Arabidopsis thaliana; identical to SEQ ID NO: 44985
  peptide (1)..(545): Ceres Seq. ID no. 12600278

SEQ ID NO: 47796 - protein, 520 aa, Arabidopsis thaliana; identical to SEQ ID NO: 44986
  peptide (1)..(520): Ceres Seq. ID no. 12600279

SEQ ID NO: 47797 - protein, 499 aa, Arabidopsis thaliana; identical to SEQ ID NO: 44987
  peptide (1)..(499): Ceres Seq. ID no. 12600280

SEQ ID NO: 47798 - DNA, 537 bp, Arabidopsis thaliana
  misc_feature (1)..(537): Ceres Seq. ID no. 13648546
  misc_feature (1)..(537): Ortholog of  Ceres SEQ ID NO 15174406 as cited in SEQ ID NO 0
atcactacacnnnnctcctattgctaacgaacataaaacgctacctaagagatcaatatggctggagtgatgaaggtggtatgcttgctcttggcctgcatgattgaggccggtccaatcacatctaaggctgcgctaagctgtggctcaaataacatcgacttggcatcgcgaattgggtacgtgctccaaggtggagtcattcccccggcgtgttgctccggtgttagaaacctcaacagtataggcaagannnccccagacgcgtcngctagcttgcaattgcattcaaggtgccgctagagccttaggctctggtctcaacgctgggcgtgcaactggaattcctagggcatgtggagtcaatattccttacgaaatcagcaccagcaccaactgcaaaaccgtgaggtgatgagctnnnnacggcgagatgatgctactaccggaagattccaatccttattatataatggatgagattaatattaaataagatgatcgaatgtttgtttttagagatattaatttcttgtc

SEQ ID NO: 47799 - protein, 81 aa, Arabidopsis thaliana
  peptide (1)..(81): Ceres Seq. ID no. 13648547
  misc_feature (66)..(66): Xaa is any aa, unknown or other
  misc_feature (67)..(67): Xaa is any aa, unknown or other
  misc_feature (71)..(71): Xaa is any aa, unknown or other
MAGVMKVVCLLLACMIEAGPITSKAALSCGSNNIDLASRIGYVLQGGVIPPACCSGVRNLNSIGKXXPDAXASLQLHSRCR

SEQ ID NO: 47800 - protein, 77 aa, Arabidopsis thaliana
  peptide (1)..(77): Ceres Seq. ID no. 13648548
  misc_feature (62)..(62): Xaa is any aa, unknown or other
  misc_feature (63)..(63): Xaa is any aa, unknown or other
  misc_feature (67)..(67): Xaa is any aa, unknown or other
MKVVCLLLACMIEAGPITSKAALSCGSNNIDLASRIGYVLQGGVIPPACCSGVRNLNSIGKXXPDAXASLQLHSRCR

SEQ ID NO: 47801 - protein, 67 aa, Arabidopsis thaliana
  peptide (1)..(67): Ceres Seq. ID no. 13648549
  misc_feature (52)..(52): Xaa is any aa, unknown or other
  misc_feature (53)..(53): Xaa is any aa, unknown or other
  misc_feature (57)..(57): Xaa is any aa, unknown or other
MIEAGPITSKAALSCGSNNIDLASRIGYVLQGGVIPPACCSGVRNLNSIGKXXPDAXASLQLHSRCR

SEQ ID NO: 47802 - DNA, 1377 bp, Arabidopsis thaliana
  misc_feature (1)..(1377): Ceres Seq. ID no. 13648551
  misc_feature (1)..(1377): Ortholog of  Ceres SEQ ID NO 15169013 as cited in SEQ ID NO 58380
ttcaatctcttcctcaaatcactctttttggggttcgttttgtttgtgttgtaagcatccctgttgtgcatttcgtttatccaggtgaattcttgcaaagccttgagcagctttcagatgataaagactttggtctctccttatagtggatttggatctcagaagttgaagtttgacagatcttctgagaaagtgaagacgagagcagtaagaatggagctcacaatcactcaacctgatgattggcatcttcatctccgtgacggtgatcttcttcatgctgttgttccccacagtgcgagtaattttaagagagcgattgtgatgccgaatctgaagcctcctgtcacctccactgcagctgccattatttaccggaaatttatcatgaaagctttgccatctgagagtagctttgatccacttatgacactttatttgactgacaaaactctacctgaagagatcaggcttgcaagggaaagtggtgtggtttatgcggtgaagctgtaccctgccggagcaacaaccaactctcaagatggtgtcacggatctctttggaaaatgcttaccggtactagaagagatggtcaaacaaaacatgcctttgctggttcatggggaggtcacagatccgagtatcgatgtctttgaccgcgagaaaatcttcattgagacagttctgcagcctctaatccaacgccttccgcagctgaaagtagtgatggaacacatcacaaccatggatgctgtgaattttgttgaatcttgcaaagaagggtctgtgggtgcaacagtcacaccacaacatctccttctcaacaggaacgcccttttccaaggtggattacaacctcacaactactgtcttcccgttctcaaaagagaaatacatagagaagccattgtcaaagctgtaactagtggaagcaagaagttcttcctcggcacagatagtgctccacatgaacggagtagaaaagaatcatcctgcggatgtgctggtatttacagcgctcccattgccttgtccctatacgccaaggtctttgatgaggcgggtgcgctggacaagttggaagctttcaccagtttcaatggacctgatttctatggccttccgagaaactcgtcaaagatcacactgaagaaatctccttggaaggttccagacgttttcaacttcccattcggagagatcgtccctatgtttgctggagaaacccttcaatggcaaccgttgaaataatgtggtgatttgaagttgtcaaattttttctcccaaataagtgaactcgtgtaccttttggattgaattttcttacggctgagttatgccctgcattttttgaggaataaaagcaagatactgacc

SEQ ID NO: 47803 - protein, 377 aa, Arabidopsis thaliana
  peptide (1)..(377): Ceres Seq. ID no. 13648552
MIKTLVSPYSGFGSQKLKFDRSSEKVKTRAVRMELTITQPDDWHLHLRDGDLLHAVVPHSASNFKRAIVMPNLKPPVTSTAAAIIYRKFIMKALPSESSFDPLMTLYLTDKTLPEEIRLARESGVVYAVKLYPAGATTNSQDGVTDLFGKCLPVLEEMVKQNMPLLVHGEVTDPSIDVFDREKIFIETVLQPLIQRLPQLKVVMEHITTMDAVNFVESCKEGSVGATVTPQHLLLNRNALFQGGLQPHNYCLPVLKREIHREAIVKAVTSGSKKFFLGTDSAPHERSRKESSCGCAGIYSAPIALSLYAKVFDEAGALDKLEAFTSFNGPDFYGLPRNSSKITLKKSPWKVPDVFNFPFGEIVPMFAGETLQWQPLK

SEQ ID NO: 47804 - protein, 345 aa, Arabidopsis thaliana
  peptide (1)..(345): Ceres Seq. ID no. 13648553
MELTITQPDDWHLHLRDGDLLHAVVPHSASNFKRAIVMPNLKPPVTSTAAAIIYRKFIMKALPSESSFDPLMTLYLTDKTLPEEIRLARESGVVYAVKLYPAGATTNSQDGVTDLFGKCLPVLEEMVKQNMPLLVHGEVTDPSIDVFDREKIFIETVLQPLIQRLPQLKVVMEHITTMDAVNFVESCKEGSVGATVTPQHLLLNRNALFQGGLQPHNYCLPVLKREIHREAIVKAVTSGSKKFFLGTDSAPHERSRKESSCGCAGIYSAPIALSLYAKVFDEAGALDKLEAFTSFNGPDFYGLPRNSSKITLKKSPWKVPDVFNFPFGEIVPMFAGETLQWQPLK

SEQ ID NO: 47805 - protein, 308 aa, Arabidopsis thaliana
  peptide (1)..(308): Ceres Seq. ID no. 13648554
MPNLKPPVTSTAAAIIYRKFIMKALPSESSFDPLMTLYLTDKTLPEEIRLARESGVVYAVKLYPAGATTNSQDGVTDLFGKCLPVLEEMVKQNMPLLVHGEVTDPSIDVFDREKIFIETVLQPLIQRLPQLKVVMEHITTMDAVNFVESCKEGSVGATVTPQHLLLNRNALFQGGLQPHNYCLPVLKREIHREAIVKAVTSGSKKFFLGTDSAPHERSRKESSCGCAGIYSAPIALSLYAKVFDEAGALDKLEAFTSFNGPDFYGLPRNSSKITLKKSPWKVPDVFNFPFGEIVPMFAGETLQWQPLK

SEQ ID NO: 47806 - DNA, 1493 bp, Arabidopsis thaliana; identical to SEQ ID NO: 30101
  misc_feature (1)..(1493): Ceres Seq. ID no. 13648561
  misc_feature (1)..(1493): Ortholog of  Ceres SEQ ID NO 13598234 as cited in SEQ ID NO 63461
  misc_feature (1)..(1493): Ortholog of  Ceres SEQ ID NO 13597254 as cited in SEQ ID NO 63858
  misc_feature (1)..(1493): Ortholog of  Ceres SEQ ID NO 12622778 as cited in SEQ ID NO 67562

SEQ ID NO: 47807 - protein, 384 aa, Arabidopsis thaliana; identical to SEQ ID NO: 30102
  peptide (1)..(384): Ceres Seq. ID no. 13648562

SEQ ID NO: 47808 - protein, 343 aa, Arabidopsis thaliana; identical to SEQ ID NO: 30103
  peptide (1)..(343): Ceres Seq. ID no. 13648563

SEQ ID NO: 47809 - protein, 305 aa, Arabidopsis thaliana; identical to SEQ ID NO: 30104
  peptide (1)..(305): Ceres Seq. ID no. 13648564

SEQ ID NO: 47810 - DNA, 1459 bp, Arabidopsis thaliana; identical to SEQ ID NO: 23808
  misc_feature (1)..(1459): Ceres Seq. ID no. 12394733
  misc_feature (1)..(1459): Ortholog of  Ceres SEQ ID NO 15176514 as cited in SEQ ID NO 1114
  misc_feature (1)..(1459): Ortholog of  Ceres SEQ ID NO 15173688 as cited in SEQ ID NO 61918
  misc_feature (1)..(1459): Ortholog of  Ceres SEQ ID NO 12778345 as cited in SEQ ID NO 62792
  misc_feature (1)..(1459): Ortholog of  Ceres SEQ ID NO 13662513 as cited in SEQ ID NO 63303
  misc_feature (1)..(1459): Ortholog of  Ceres SEQ ID NO 12616929 as cited in SEQ ID NO 63962
  misc_feature (1)..(1459): Ortholog of  Ceres SEQ ID NO 15225803 as cited in SEQ ID NO 67623
  misc_feature (1)..(1459): Ortholog of  Ceres SEQ ID NO 15174088 as cited in SEQ ID NO 0

SEQ ID NO: 47811 - protein, 395 aa, Arabidopsis thaliana; identical to SEQ ID NO: 23809
  peptide (1)..(395): Ceres Seq. ID no. 12394734

SEQ ID NO: 47812 - protein, 260 aa, Arabidopsis thaliana; identical to SEQ ID NO: 23810
  peptide (1)..(260): Ceres Seq. ID no. 12394735

SEQ ID NO: 47813 - protein, 208 aa, Arabidopsis thaliana; identical to SEQ ID NO: 23811
  peptide (1)..(208): Ceres Seq. ID no. 12394736

SEQ ID NO: 47814 - DNA, 1369 bp, Arabidopsis thaliana
  misc_feature (1)..(1369): Ceres Seq. ID no. 13648719
  misc_feature (1)..(1369): Ortholog of  Ceres SEQ ID NO 14314511 as cited in SEQ ID NO 52424
acttcttcacaactgtgtcctgtcctctgctgatttctcacctttccatcattcatttcattctttcttttttcccatccgtttcttttattcttctttctccttaaatttaaaatctttgtattaaatttattggatgttgttgtttctaagcgtttctttcaacaaacccattttcttcttcttcttaagattctgaatcattcattgtttgatttagcttctcttcgaattcttgattttacaggatctgaaggaagctatggtttaaattttttgatgggcaatctctaacagttctttacgggtatatatatacacaaaaaacggttaagctctagagaagatgttgggaggcaacaatgataaccctgtgccgcaggttctaatgaacgacagccagtttcggtatcaatcaaacacatcgttgaatcagcttcacttgcttgggacgatgagagctggttgtactattgatcctgtaaactactttgctaatgataaccttgctcctatgatgcggcttaatagcacacgcggaagggaaactgaaaacaacaatattatgcagagacagcagaagctgcagatctctttgaattataactacaacaacaataatactgttgttcaagatgaagtcccaaagcagaacttagtgtcaactggtctgagactatcttatgatgatgatgagcgcaactcttctgtaacttcagcaaatggaagcataacaactccagtctatcagtcactcggtgacaatatcagattggacctcaatagacagaacgacgagcttgatcagtttatcaaattccgggcagatcaaatggcgaaaggtgtgagagatattaaacagagacatgtcacgtcctttgtcacggccttagagaaggatgtgagtaagaagcttcaagagaaagaccatgagattgaaagcatgaacaagaagaaccgggaactcgtggataagataaaacaagtggcagtggaagctcagaactggcattacaaagcaaaatacaatgaatctgtggttaatgccttaaaggtaaatttgcaacaagtgatgtcacatggaaacgacaacaatgcagtaggaggaggagttgctgatcatcatcaaatgaaagaagggtttggggatagtgagattgatgacgaagcagcttcttacaattacttgaacatcccggggatgccaagtactgggatgagatgtaagttgtgtaacgtaaagaatgtttcggtcttgctcgtgccatgtaggcacttgagtttgtgtaaagattgtgatgtgtttactggtgtttgtcctgtttgccagtctttgaaaacttctagcgttcaggtcttcttcttctga

SEQ ID NO: 47815 - protein, 340 aa, Arabidopsis thaliana
  peptide (1)..(340): Ceres Seq. ID no. 13648720
MLGGNNDNPVPQVLMNDSQFRYQSNTSLNQLHLLGTMRAGCTIDPVNYFANDNLAPMMRLNSTRGRETENNNIMQRQQKLQISLNYNYNNNNTVVQDEVPKQNLVSTGLRLSYDDDERNSSVTSANGSITTPVYQSLGDNIRLDLNRQNDELDQFIKFRADQMAKGVRDIKQRHVTSFVTALEKDVSKKLQEKDHEIESMNKKNRELVDKIKQVAVEAQNWHYKAKYNESVVNALKVNLQQVMSHGNDNNAVGGGVADHHQMKEGFGDSEIDDEAASYNYLNIPGMPSTGMRCKLCNVKNVSVLLVPCRHLSLCKDCDVFTGVCPVCQSLKTSSVQVFFF

SEQ ID NO: 47816 - protein, 326 aa, Arabidopsis thaliana
  peptide (1)..(326): Ceres Seq. ID no. 13648721
MNDSQFRYQSNTSLNQLHLLGTMRAGCTIDPVNYFANDNLAPMMRLNSTRGRETENNNIMQRQQKLQISLNYNYNNNNTVVQDEVPKQNLVSTGLRLSYDDDERNSSVTSANGSITTPVYQSLGDNIRLDLNRQNDELDQFIKFRADQMAKGVRDIKQRHVTSFVTALEKDVSKKLQEKDHEIESMNKKNRELVDKIKQVAVEAQNWHYKAKYNESVVNALKVNLQQVMSHGNDNNAVGGGVADHHQMKEGFGDSEIDDEAASYNYLNIPGMPSTGMRCKLCNVKNVSVLLVPCRHLSLCKDCDVFTGVCPVCQSLKTSSVQVFFF

SEQ ID NO: 47817 - protein, 304 aa, Arabidopsis thaliana
  peptide (1)..(304): Ceres Seq. ID no. 13648722
MRAGCTIDPVNYFANDNLAPMMRLNSTRGRETENNNIMQRQQKLQISLNYNYNNNNTVVQDEVPKQNLVSTGLRLSYDDDERNSSVTSANGSITTPVYQSLGDNIRLDLNRQNDELDQFIKFRADQMAKGVRDIKQRHVTSFVTALEKDVSKKLQEKDHEIESMNKKNRELVDKIKQVAVEAQNWHYKAKYNESVVNALKVNLQQVMSHGNDNNAVGGGVADHHQMKEGFGDSEIDDEAASYNYLNIPGMPSTGMRCKLCNVKNVSVLLVPCRHLSLCKDCDVFTGVCPVCQSLKTSSVQVFFF

SEQ ID NO: 47818 - DNA, 1554 bp, Arabidopsis thaliana
  misc_feature (1)..(1554): Ceres Seq. ID no. 12733198
  misc_feature (1)..(1554): Ortholog of  Ceres SEQ ID NO 15176053 as cited in SEQ ID NO 57792
  misc_feature (1)..(1554): Ortholog of  Ceres SEQ ID NO 14308023 as cited in SEQ ID NO 65865
  misc_feature (1)..(1554): Ortholog of  Ceres SEQ ID NO 14307972 as cited in SEQ ID NO 66436
  misc_feature (1)..(1554): Ortholog of  Ceres SEQ ID NO 12614670 as cited in SEQ ID NO 68565
atggagctcctgagcacgatcaatctcttagcaatagctctagtgcttcttgtagttccgaagatatatggagcttgtcggatccttgtttggcggccatggatgctatcgagaagattcaagaagcaaggaatctctggtccaaaatacaggatcttgtatgggaacctccgagagattaggaagatgaagaacgaagctaagcttatggttcttgatccaaactccaacgatatcgtccctcgcgtcttacctcatcttcagcaatggaagtctcaatatggagagacctttctttactggcaaggaacagatccaaggttgtgcatctcagatcatgagctcgcgaaacagatcttatcgaacaagtttgtttttttttctaaatcaaagacaaaacctgagatccttaaactttctggtaatggacttatcttcgtaaatggtcttgattgggttcgtcacagacgaatcttaaaccctgcattctctatggacaaactcaagctcatgacccaattgatggtggattgcacttttagaatgttccttgagtggaaaaaacagaggaatggtgtagaaacagagcaatttgtgttgattagcagagagtttaagagattgaccgctgatatcatagcgacggctgcgtttggaagcagttatgcggaaggaattgaagtatttaaatcacaattagagctccaaaagtgttgtgctgctgctcttactgacctctatttccctggaatccagtaccttcctacgccttcgaatcttcaaatatggaagcttgatatgaaagtgaatagctcgatcaaaagaatcatagatgcgaggttaacatcggaatccaaagattacggaaacgatcttctgggaatcatgttaacagctgcaagctctaacgagtctgagaaaaagatgagcattgatgagatcatagaagaatgcaagacgttcttcttcgcaggacacgaaactactgcgaatctattgacatggagtacaatgttgcttagcttgcaccaagattggcaagagaaactcagagaagaagttttcaatgaatgcggtaaagacaaaatcccagatgcagagacatgctccaaactaaaactgatgaacacggtgtttatggagtcccttcgtctatacggaccagtgttaaatctgctccgattagcatcagaagatatgaaattaggaaacctagagatccctaaaggcacgactataatcctcccgattgcgaagatgcacagagacaaagccgtttggggaagtgacgccgacaaattcaaccctatgcggtttgcaaacggtctttctcgggccgctaatcatccgaacgctctcctcgcgttttcaatgggaccaagagcttgcattggccaaaactttgcgataatggaagccaagaccgttctcgccatgattcttcaacggttccggctcaatctctccgccgattataaacatgcgccggcggatcacctcactcttcaacctcagtacgatctacctgtgatacttgaacctatcgacggttga

SEQ ID NO: 47819 - protein, 517 aa, Arabidopsis thaliana
  peptide (1)..(517): Ceres Seq. ID no. 12733199
MELLSTINLLAIALVLLVVPKIYGACRILVWRPWMLSRRFKKQGISGPKYRILYGNLREIRKMKNEAKLMVLDPNSNDIVPRVLPHLQQWKSQYGETFLYWQGTDPRLCISDHELAKQILSNKFVFFSKSKTKPEILKLSGNGLIFVNGLDWVRHRRILNPAFSMDKLKLMTQLMVDCTFRMFLEWKKQRNGVETEQFVLISREFKRLTADIIATAAFGSSYAEGIEVFKSQLELQKCCAAALTDLYFPGIQYLPTPSNLQIWKLDMKVNSSIKRIIDARLTSESKDYGNDLLGIMLTAASSNESEKKMSIDEIIEECKTFFFAGHETTANLLTWSTMLLSLHQDWQEKLREEVFNECGKDKIPDAETCSKLKLMNTVFMESLRLYGPVLNLLRLASEDMKLGNLEIPKGTTIILPIAKMHRDKAVWGSDADKFNPMRFANGLSRAANHPNALLAFSMGPRACIGQNFAIMEAKTVLAMILQRFRLNLSADYKHAPADHLTLQPQYDLPVILEPIDG

SEQ ID NO: 47820 - protein, 483 aa, Arabidopsis thaliana
  peptide (1)..(483): Ceres Seq. ID no. 12733200
MLSRRFKKQGISGPKYRILYGNLREIRKMKNEAKLMVLDPNSNDIVPRVLPHLQQWKSQYGETFLYWQGTDPRLCISDHELAKQILSNKFVFFSKSKTKPEILKLSGNGLIFVNGLDWVRHRRILNPAFSMDKLKLMTQLMVDCTFRMFLEWKKQRNGVETEQFVLISREFKRLTADIIATAAFGSSYAEGIEVFKSQLELQKCCAAALTDLYFPGIQYLPTPSNLQIWKLDMKVNSSIKRIIDARLTSESKDYGNDLLGIMLTAASSNESEKKMSIDEIIEECKTFFFAGHETTANLLTWSTMLLSLHQDWQEKLREEVFNECGKDKIPDAETCSKLKLMNTVFMESLRLYGPVLNLLRLASEDMKLGNLEIPKGTTIILPIAKMHRDKAVWGSDADKFNPMRFANGLSRAANHPNALLAFSMGPRACIGQNFAIMEAKTVLAMILQRFRLNLSADYKHAPADHLTLQPQYDLPVILEPIDG

SEQ ID NO: 47821 - protein, 455 aa, Arabidopsis thaliana
  peptide (1)..(455): Ceres Seq. ID no. 12733201
MKNEAKLMVLDPNSNDIVPRVLPHLQQWKSQYGETFLYWQGTDPRLCISDHELAKQILSNKFVFFSKSKTKPEILKLSGNGLIFVNGLDWVRHRRILNPAFSMDKLKLMTQLMVDCTFRMFLEWKKQRNGVETEQFVLISREFKRLTADIIATAAFGSSYAEGIEVFKSQLELQKCCAAALTDLYFPGIQYLPTPSNLQIWKLDMKVNSSIKRIIDARLTSESKDYGNDLLGIMLTAASSNESEKKMSIDEIIEECKTFFFAGHETTANLLTWSTMLLSLHQDWQEKLREEVFNECGKDKIPDAETCSKLKLMNTVFMESLRLYGPVLNLLRLASEDMKLGNLEIPKGTTIILPIAKMHRDKAVWGSDADKFNPMRFANGLSRAANHPNALLAFSMGPRACIGQNFAIMEAKTVLAMILQRFRLNLSADYKHAPADHLTLQPQYDLPVILEPIDG

SEQ ID NO: 47822 - DNA, 2124 bp, Arabidopsis thaliana
  misc_feature (1)..(2124): Ceres Seq. ID no. 13649412
  misc_feature (1)..(2124): Ortholog of  Ceres SEQ ID NO 15171943 as cited in SEQ ID NO 54306
  misc_feature (1)..(2124): Ortholog of  Ceres SEQ ID NO 13655812 as cited in SEQ ID NO 64743
  misc_feature (1)..(2124): Ortholog of  Ceres SEQ ID NO 15178828 as cited in SEQ ID NO 0
gaattttgatttatcaaagaaaactcctttgtgagagattatttatgtactcttgattcagagaggataatccaattccgagttttctgagtcgtaatttagagagaatccaattcgatggatttagatatgaacggaggaaacaagagagtctttcaaagactgggcggtggctctaatcggccgacgacggactcaaatcagaaggtttgtttccactggcgagctggccggtgcaatcgttacccatgcccttacctgcatagagaattgccgggtccgggttcgggtccagtagcagcttcttcaaataaaagggtcgctgatgaatctgggtttgcgggtccgagtcaccggagagggcctgggttcagcgggactgctaataactggggaagatttggtgggaacagaacggtgaccaagacggagaaactttgcaaattctgggttgatggaaattgcccttatggtgataaatgtagatacttgcattgctggagcaaaggagatagtttctccttgttgacgcagcttgacgggcatcagaaggttgttactgggattgctctgccttcaggatcagataagctttacacggcgagtaaagatgaaactgtgcgaatatgggattgtgcttctggacagtgtacaggtgtactcaatcttggtggggaagttggctgcatcattagtgaaggtccctggctattggttggcatgccaaatcttgttaaggcgtggaatatccaaaacaatgcagacctgagcctcaatggacctgttggccaagtatattcattggttgtgggtactgatctattgttcgctggcacacaagatggctctattttggtttggagatacaatagcaccactagctgttttgatccagctgcatcactattgggtcacacgcttgcagttgtctctttatatgttggggcaaacagactctattctggtgccatggacaattctataaaagtttggagcctggataatctgcagtgtattcaaacgcttacagagcatacatcagttgttatgtctctcatttgctgggatcagtttcttctgtcatgttcattggacaataccgtcaagatatgggctgctactgaaggtggaaacttagaagtgacatatactcacaaagaagaatacggcgtgctagctctctgtggcgtccatgatgcagaagccaagccagtattgctatgttcgtgcaatgacaattcgttgcacctctatgatttgccatccatgtcagaccaagaggctcctctgcgtaatggagtagaacacaagattttcgaagtacttccgtttgtggatgatgattacggtggagtcatcgtggagatgaaaactcctatggatactaagaatttcgttgcagcgcttagagattcattcgagcagtggcgcttacagggtaaaaagggagtctggttgaacttgcctctctcacacgtaaacctcgtggaacccgcggttaaggaaggtttccggtatcaccatgctgagccaacttacctgatgctagtttattggattccggaagccgagagtactattcctttgaatgcttcccatcgtgttcgtgtaggtgctgttgtcttgaaccataacaaagaggaaaaatacggttcattatgcggatcaggtatctggaagatcccaacaggagttgttgacgagggtgaggagattttcgccgcagccattagagaagtaaaagaagaaacaggcgtaagaagatccatatatcttaatatcgacactgagtttttggagattctagctttctgccaaacccacgagtcattttttgcaaagtcagatttattcttcgtttgtctcttgagacctacctccttcgatattcaaaaacaggacttagagatcgaagcagctcaatggatgcggttcgaggactctgcctctcaacctatcacacacaagaacgatctcttcaaagatattcaccacatttgctcaatgaaaatggagaagagctatagtggtttttcaaaaaaacctattacaactttctttgacgacaagttaggttatctctacttgaataaacaagaagatatggaacaacctatttcttaa

SEQ ID NO: 47823 - protein, 668 aa, Arabidopsis thaliana
  peptide (1)..(668): Ceres Seq. ID no. 13649413
MDLDMNGGNKRVFQRLGGGSNRPTTDSNQKVCFHWRAGRCNRYPCPYLHRELPGPGSGPVAASSNKRVADESGFAGPSHRRGPGFSGTANNWGRFGGNRTVTKTEKLCKFWVDGNCPYGDKCRYLHCWSKGDSFSLLTQLDGHQKVVTGIALPSGSDKLYTASKDETVRIWDCASGQCTGVLNLGGEVGCIISEGPWLLVGMPNLVKAWNIQNNADLSLNGPVGQVYSLVVGTDLLFAGTQDGSILVWRYNSTTSCFDPAASLLGHTLAVVSLYVGANRLYSGAMDNSIKVWSLDNLQCIQTLTEHTSVVMSLICWDQFLLSCSLDNTVKIWAATEGGNLEVTYTHKEEYGVLALCGVHDAEAKPVLLCSCNDNSLHLYDLPSMSDQEAPLRNGVEHKIFEVLPFVDDDYGGVIVEMKTPMDTKNFVAALRDSFEQWRLQGKKGVWLNLPLSHVNLVEPAVKEGFRYHHAEPTYLMLVYWIPEAESTIPLNASHRVRVGAVVLNHNKEEKYGSLCGSGIWKIPTGVVDEGEEIFAAAIREVKEETGVRRSIYLNIDTEFLEILAFCQTHESFFAKSDLFFVCLLRPTSFDIQKQDLEIEAAQWMRFEDSASQPITHKNDLFKDIHHICSMKMEKSYSGFSKKPITTFFDDKLGYLYLNKQEDMEQPIS

SEQ ID NO: 47824 - protein, 664 aa, Arabidopsis thaliana
  peptide (1)..(664): Ceres Seq. ID no. 13649414
MNGGNKRVFQRLGGGSNRPTTDSNQKVCFHWRAGRCNRYPCPYLHRELPGPGSGPVAASSNKRVADESGFAGPSHRRGPGFSGTANNWGRFGGNRTVTKTEKLCKFWVDGNCPYGDKCRYLHCWSKGDSFSLLTQLDGHQKVVTGIALPSGSDKLYTASKDETVRIWDCASGQCTGVLNLGGEVGCIISEGPWLLVGMPNLVKAWNIQNNADLSLNGPVGQVYSLVVGTDLLFAGTQDGSILVWRYNSTTSCFDPAASLLGHTLAVVSLYVGANRLYSGAMDNSIKVWSLDNLQCIQTLTEHTSVVMSLICWDQFLLSCSLDNTVKIWAATEGGNLEVTYTHKEEYGVLALCGVHDAEAKPVLLCSCNDNSLHLYDLPSMSDQEAPLRNGVEHKIFEVLPFVDDDYGGVIVEMKTPMDTKNFVAALRDSFEQWRLQGKKGVWLNLPLSHVNLVEPAVKEGFRYHHAEPTYLMLVYWIPEAESTIPLNASHRVRVGAVVLNHNKEEKYGSLCGSGIWKIPTGVVDEGEEIFAAAIREVKEETGVRRSIYLNIDTEFLEILAFCQTHESFFAKSDLFFVCLLRPTSFDIQKQDLEIEAAQWMRFEDSASQPITHKNDLFKDIHHICSMKMEKSYSGFSKKPITTFFDDKLGYLYLNKQEDMEQPIS

SEQ ID NO: 47825 - protein, 467 aa, Arabidopsis thaliana
  peptide (1)..(467): Ceres Seq. ID no. 13649415
MPNLVKAWNIQNNADLSLNGPVGQVYSLVVGTDLLFAGTQDGSILVWRYNSTTSCFDPAASLLGHTLAVVSLYVGANRLYSGAMDNSIKVWSLDNLQCIQTLTEHTSVVMSLICWDQFLLSCSLDNTVKIWAATEGGNLEVTYTHKEEYGVLALCGVHDAEAKPVLLCSCNDNSLHLYDLPSMSDQEAPLRNGVEHKIFEVLPFVDDDYGGVIVEMKTPMDTKNFVAALRDSFEQWRLQGKKGVWLNLPLSHVNLVEPAVKEGFRYHHAEPTYLMLVYWIPEAESTIPLNASHRVRVGAVVLNHNKEEKYGSLCGSGIWKIPTGVVDEGEEIFAAAIREVKEETGVRRSIYLNIDTEFLEILAFCQTHESFFAKSDLFFVCLLRPTSFDIQKQDLEIEAAQWMRFEDSASQPITHKNDLFKDIHHICSMKMEKSYSGFSKKPITTFFDDKLGYLYLNKQEDMEQPIS

SEQ ID NO: 47826 - DNA, 2246 bp, Arabidopsis thaliana
  misc_feature (1)..(2246): Ceres Seq. ID no. 13648723
  misc_feature (1)..(2246): Ortholog of  Ceres SEQ ID NO 13532807 as cited in SEQ ID NO 53012
  misc_feature (1)..(2246): Ortholog of  Ceres SEQ ID NO 13663060 as cited in SEQ ID NO 60964
  misc_feature (1)..(2246): Ortholog of  Ceres SEQ ID NO 13500573 as cited in SEQ ID NO 67431
  misc_feature (1)..(2246): Ortholog of  Ceres SEQ ID NO 13656501 as cited in SEQ ID NO 69206
agtagagaagaagaacatgttttcaactcctcgggagcaaaaaaaataattcagcaagagaaacggcgaataaggtggaaatgatttgacgaagaaacgcttggctgagagtaaaatcggaaaaacaaaatctgtaatttattattatcagcctctaaatcaatgggtggtggtggcaatctcgtcgacggtgttcgtcgttggcttttctttcaacgtcgtccttcttcttcttcttcttccaataatcacgatcagattcaaaatccccccaccgtttctaatcccaacgacgacgaagatttgaagaagcttaccgatccgtctaagctaagacagattaaggttcagcaacgaaatcacttacctatggagaagaagggaatacctaatgctgaattcttcacggagtatggagaagcaaatagatatcagattcaagaagtagttggcaaaggaagctatggagttgttggttctgctatagatactcacactggagaaagagttgctatcaaaaagattaacgatgtgtttgatcatatctctgatgcaaccaggattcttagggagattaagttgttacgcttgcttcttcatccagatgttgttgagattaaacatattatgcttcctccttctcgaagagagtttcgtgatgtttatgttgtctttgagttgatggaatctgatcttcatcaggttattaaagctaatgatgatttaactcctgagcatcatcagtttttcttgtatcagcttcttcgtggtttgaagtatgttcatgctgcgaatgtgtttcatcgggatttgaaaccaaagaacattcttgctaatgctgattgcaagttgaagatttgtgactttggtctagctcgtgtatcttttaatgatgcccctaccgctattttttggactgattatgttgctactcggtggtaccgtgcccctgaactctgtggatcatttttctcaaaatatacccctgcgattgatatttggagcgttggttgcatatttgctgaaatgctattagggaagccgctatttcctggcaaaaatgtggttcaccaattggatattatgaccgattttcttggcactccaccacctgaagccatatcaaagatcagaaatgataaggcgaggagatatcttggcaacatgaggaaaaaacagccagtcccattctctaaaaaattccctaaagcagatccttcggcccttcgcctgttggaacgcctgattgcctttgatccaaaagatcgtccatctgccgaagaagcattagctgatccatactttaatggtctgtcaagtaaagtgcgggaaccatcgacacagccgatttcaaagcttgaatttgagtttgagagaaagaaattgacaaaagatgatatcagagagttaatttaccgagaggtgatgagccttctatatatctcttctttggtttagattctcctctcttggtgattctaatggattacttaaaaaacatagatattagaatatcatcctcagatgctggaggaataccttcgtggtggcaatcagctcagcttcatgtaccccagtggggtagatcgatttaggaggcagtttgctcatcttgaagaaaatcaaggtccaggaggaagaagtaacgcacttcagagacagcatgcttccttaccaagagagcgagttccagcatccaagaatgaaacagtcgaagaaagaagcaacgatatcgagagaagaacaacagctgctgtagcttcaaccttagacagtcccaaagcttcacaacaagctgaaggtacagaaaatggaggaggaggagggtatagtgcgcgtaacctgatgaaaagctctagcattagtggttctaaatgcataggtgtacaatctaaaaccaacattgaggattccatagtagaggaacaagatgagactgttgctgtgaaagttgcatctctacacaattcttagtgtttttctttttctgtttaatttaagctataccccatagtagagttggagaagcaaaagtttggtttgtcactctcactcggggtttggggttttggttggtgtatttaatagttccggggagacattgtaaagaatatataaaacttggtaaccgatgtaattctttgcttttgtaaccgggtagatcattggttgaaactcgaaagtcgaaatcatgtaaaaatttggatatattcttgccagttttgttacttatattagttatattc

SEQ ID NO: 47827 - protein, 431 aa, Arabidopsis thaliana
  peptide (1)..(431): Ceres Seq. ID no. 15219572
MGGGGNLVDGVRRWLFFQRRPSSSSSSNNHDQIQNPPTVSNPNDDEDLKKLTDPSKLRQIKVQQRNHLPMEKKGIPNAEFFTEYGEANRYQIQEVVGKGSYGVVGSAIDTHTGERVAIKKINDVFDHISDATRILREIKLLRLLLHPDVVEIKHIMLPPSRREFRDVYVVFELMESDLHQVIKANDDLTPEHHQFFLYQLLRGLKYVHAANVFHRDLKPKNILANADCKLKICDFGLARVSFNDAPTAIFWTDYVATRWYRAPELCGSFFSKYTPAIDIWSVGCIFAEMLLGKPLFPGKNVVHQLDIMTDFLGTPPPEAISKIRNDKARRYLGNMRKKQPVPFSKKFPKADPSALRLLERLIAFDPKDRPSAEEALADPYFNGLSSKVREPSTQPISKLEFEFERKKLTKDDIRELIYREVMSLLYISSLV

SEQ ID NO: 47828 - protein, 362 aa, Arabidopsis thaliana
  peptide (1)..(362): Ceres Seq. ID no. 15219573
MEKKGIPNAEFFTEYGEANRYQIQEVVGKGSYGVVGSAIDTHTGERVAIKKINDVFDHISDATRILREIKLLRLLLHPDVVEIKHIMLPPSRREFRDVYVVFELMESDLHQVIKANDDLTPEHHQFFLYQLLRGLKYVHAANVFHRDLKPKNILANADCKLKICDFGLARVSFNDAPTAIFWTDYVATRWYRAPELCGSFFSKYTPAIDIWSVGCIFAEMLLGKPLFPGKNVVHQLDIMTDFLGTPPPEAISKIRNDKARRYLGNMRKKQPVPFSKKFPKADPSALRLLERLIAFDPKDRPSAEEALADPYFNGLSSKVREPSTQPISKLEFEFERKKLTKDDIRELIYREVMSLLYISSLV

SEQ ID NO: 47829 - protein, 276 aa, Arabidopsis thaliana
  peptide (1)..(276): Ceres Seq. ID no. 15219574
MLPPSRREFRDVYVVFELMESDLHQVIKANDDLTPEHHQFFLYQLLRGLKYVHAANVFHRDLKPKNILANADCKLKICDFGLARVSFNDAPTAIFWTDYVATRWYRAPELCGSFFSKYTPAIDIWSVGCIFAEMLLGKPLFPGKNVVHQLDIMTDFLGTPPPEAISKIRNDKARRYLGNMRKKQPVPFSKKFPKADPSALRLLERLIAFDPKDRPSAEEALADPYFNGLSSKVREPSTQPISKLEFEFERKKLTKDDIRELIYREVMSLLYISSLV

SEQ ID NO: 47830 - DNA, 1386 bp, Arabidopsis thaliana
  misc_feature (1)..(1386): Ceres Seq. ID no. 13648185
  misc_feature (1)..(1386): Ortholog of  Ceres SEQ ID NO 13654191 as cited in SEQ ID NO 68235
  misc_feature (1)..(1386): Ortholog of  Ceres SEQ ID NO 15179513 as cited in SEQ ID NO 0
gagtttagaaagtgtcaacccctaaaggaatgtttttagtttagaggaaagagagagaagaagaagcagcagcagaagttgttaatttgaagactatttgaggaaagacacctatatctaaatactcaaagttacaaaaatattacttcagaaaacagttccattagagagactcataaagcttctcatctaattatgagtggattgatgagttttggtgaattagaagaccaatttggtcagatttcagacactactatggaagagaagataccatttctgcaaatgcttcaatgcatagaacacccttttacaacaacagaaccaaatcagtttctccaatcacttctccagatccaaaccctagaatcaaagagctgtctcacccttgaaacaaacatcaaaagagatccgggtcaaacagatgacccggaaaaggatccaagaacagaaaacggagcagtaacggtcaaagaaaaaagaaaacggaaacgtacaagagctccaaagaacaaagacgaagttgaaaaccaaaggatgactcacattgccgtcgaacgtaatcgaagacgacaaatgaacgaacacttaaactctctccgatctctcatgcctccttcgtttcttcaacggggtgaccaagcttcgattgtaggaggggcaatagatttcatcaaggaactagagcaactcttgcaatctctagaagctgagaaacgaaaggatggaactgatgaaactcctaaaacggcgtcgtgttcttcatcttcgtctcttgcatgcactaactcttctatttctagcgtgtctacgacgtcggaaaatggatttacggcgagattcggcggtggagatacgacagaagtggaggctacggtgatacagaaccatgtgagcttaaaagttcggtgtaagagaggaaaacgacagatcttaaaagctattgtctcgattgaagaactaaagcttgcgattctacatctcactatctcttcttcctttgactttgtcatctactctttcaatctcaagatggaagatggttgtaaattaggatcagcagatgagatagcgacagccgttcatcagatcttcgagcaaatcaacggtgaagtcatgtggtcaaatcttagtcgaacttagttgacttttgactcctagtaacgtgtgtaaactttaggttacaaagaaaagggacgtgatataaataagaaaaaccaaagaggtgaaattttgggagttttaattattatcttatactttttggattttagattagtagcaaactcgcagtgttctacgatgacattattattggtcacatgaaggtttaggttattattgcctgtaatttttgaatataaactaacctatgagttcagtttg

SEQ ID NO: 47831 - protein, 315 aa, Arabidopsis thaliana
  peptide (1)..(315): Ceres Seq. ID no. 13648186
MSGLMSFGELEDQFGQISDTTMEEKIPFLQMLQCIEHPFTTTEPNQFLQSLLQIQTLESKSCLTLETNIKRDPGQTDDPEKDPRTENGAVTVKEKRKRKRTRAPKNKDEVENQRMTHIAVERNRRRQMNEHLNSLRSLMPPSFLQRGDQASIVGGAIDFIKELEQLLQSLEAEKRKDGTDETPKTASCSSSSSLACTNSSISSVSTTSENGFTARFGGGDTTEVEATVIQNHVSLKVRCKRGKRQILKAIVSIEELKLAILHLTISSSFDFVIYSFNLKMEDGCKLGSADEIATAVHQIFEQINGEVMWSNLSRT

SEQ ID NO: 47832 - protein, 311 aa, Arabidopsis thaliana
  peptide (1)..(311): Ceres Seq. ID no. 13648187
MSFGELEDQFGQISDTTMEEKIPFLQMLQCIEHPFTTTEPNQFLQSLLQIQTLESKSCLTLETNIKRDPGQTDDPEKDPRTENGAVTVKEKRKRKRTRAPKNKDEVENQRMTHIAVERNRRRQMNEHLNSLRSLMPPSFLQRGDQASIVGGAIDFIKELEQLLQSLEAEKRKDGTDETPKTASCSSSSSLACTNSSISSVSTTSENGFTARFGGGDTTEVEATVIQNHVSLKVRCKRGKRQILKAIVSIEELKLAILHLTISSSFDFVIYSFNLKMEDGCKLGSADEIATAVHQIFEQINGEVMWSNLSRT

SEQ ID NO: 47833 - protein, 294 aa, Arabidopsis thaliana
  peptide (1)..(294): Ceres Seq. ID no. 13648188
MEEKIPFLQMLQCIEHPFTTTEPNQFLQSLLQIQTLESKSCLTLETNIKRDPGQTDDPEKDPRTENGAVTVKEKRKRKRTRAPKNKDEVENQRMTHIAVERNRRRQMNEHLNSLRSLMPPSFLQRGDQASIVGGAIDFIKELEQLLQSLEAEKRKDGTDETPKTASCSSSSSLACTNSSISSVSTTSENGFTARFGGGDTTEVEATVIQNHVSLKVRCKRGKRQILKAIVSIEELKLAILHLTISSSFDFVIYSFNLKMEDGCKLGSADEIATAVHQIFEQINGEVMWSNLSRT

SEQ ID NO: 47834 - DNA, 501 bp, Arabidopsis thaliana
  misc_feature (1)..(501): Ceres Seq. ID no. 13649174
  misc_feature (1)..(501): Ortholog of  Ceres SEQ ID NO 13598124 as cited in SEQ ID NO 61531
gggctcattctctcatctctgtttcatatctaaattattgattgagaattcgacttgtggaaatgacaacagttgcatcaaatctcgcttgtatcggaaaagtaggatggaggttgcagataaattgcagaaagaaagagaaaggaagagatcagagtcattatccttacaaagtcattgaaatcactcctcctcctaaatctctcggcattcgttgccttcctcataaccttcaatgtggagagaacgtgatgatcgaagggcaaacgtacacaatctctgctgtgactcaccggtatcagctccggaaaggcaaatacgagccgagtgagaggcggctcgatgttctctctgctgctagatacgttttaaacctttacttcgacaatttgctccaaaactcctgacaacttttatttagctaaaaagtttggtctagaggattttcattgtatccatgaatgcttgtgaatttgttaagcaatgatttgtacttctctt

SEQ ID NO: 47835 - protein, 114 aa, Arabidopsis thaliana
  peptide (1)..(114): Ceres Seq. ID no. 13649175
MTTVASNLACIGKVGWRLQINCRKKEKGRDQSHYPYKVIEITPPPKSLGIRCLPHNLQCGENVMIEGQTYTISAVTHRYQLRKGKYEPSERRLDVLSAARYVLNLYFDNLLQNS

SEQ ID NO: 47836 - protein, 59 aa, Arabidopsis thaliana
  peptide (1)..(59): Ceres Seq. ID no. 13649176
GSFSHLCFISKLLIENSTCGNDNSCIKSRLYRKSRMEVADKLQKERERKRSESLSLQSH

SEQ ID NO: 47837 - DNA, 1688 bp, Arabidopsis thaliana
  misc_feature (1)..(1688): Ceres Seq. ID no. 13649428
  misc_feature (1)..(1688): Ortholog of  Ceres SEQ ID NO 14311287 as cited in SEQ ID NO 53177
tcggtaataaaaatctaaacgtcacgcgcgtgatgaaaaaacaggaagtaaatcgtcgacgtcgttattcaactaccatttctggatcacaactcccatacactcttttaaatcaaaacaaaatatctctttcctgttagagacaatggacggattgatcagaggtttggtcgactcgacgtggctatcggaggaaaccaacgccgcggcggagacgatggtggtgatgatgaaggcaactcgagggacgagagatccagatctacttgggctaatgtggtttccggtgaggaggaggatcagaatcgcgcgggaggatcgtcgcacggccgtcgccagaattcagaggagaatcaatgggagaagaagggcgaaaggcttcccacaagacattcacaatcacatgaggaggaccaggaagagaatacatatgcggctaaagtgagcgagaaacaagacttctcggagagccagcaagaggaaaatgatggttgggaaactgtgggcaaaaagaaacctgcaaggcaatcacataaggtccagaaggagcaatggcaagattacaaacgcccagcaagtgaacaacactactcagacgaagttgaaacttatggaaacctagaaccctcacaactagagctctcaggtctctcagaagcttgcaacaaactgtgggagctcgatttaaaccgccttgttcctggaagggattatcaaatcgactgcggagatgggaaaagggtccatgagagagctgatatggctgaaggactactgttctcttgggtgagcgaggaagtctctagaaaaccgactttcgccagattctgttcattgcttgacaactacaaccccaacgaaggttacaaagaagtggtcacagaagaagagaggcaagagcaagcggctttcattgaagaaattagcagaacctctgtgatcaagtaccttcacaggtaccttgtgctcaaggacgtcgctcctggaagctacttagagttcaagagaatgttgacaagtctctggttcgatctgtatggccgcggaggtacatctggctcatcttctgcgtttgagcatgtctttgtaggtgagatcaaacaatctggtgggaacaagtctctggattccataactggcttcagttttacttggaggaagccaaaggaactgtagattatcaaggctatatatttccccgacgtcgcggtgaaattcctgattcagagactcagctgctaacaatccaattcgagtggaacggtgttctaaaatcagtctcaagtactctagttggagtaagtccagagttcgagttggctctatacaccatgtgtttcttcatgggcacagaagataaccacattcagttgggtccatacaatgtcaatgtcaaatgttaccgacttggcaacaaccgtatcgcgctcagctttccccattgcagaatcttgaaacctctcttgatggctctggtcacaaaatatctgccccttgcgcagtactgtattgaattattgtgattgtcagatctttctgtctacatgtgtagactagaaatatcttcatgtgatatttatgggaaaccatgtcttgtcctttctgaaaatgatacaacataagaagagatgtaagagaaaatatcttctaataatttttatttcaaagagatatttaatttgttttgg

SEQ ID NO: 47838 - protein, 138 aa, Arabidopsis thaliana
  peptide (1)..(138): Ceres Seq. ID no. 13649429
MAEGLLFSWVSEEVSRKPTFARFCSLLDNYNPNEGYKEVVTEEERQEQAAFIEEISRTSVIKYLHRYLVLKDVAPGSYLEFKRMLTSLWFDLYGRGGTSGSSSAFEHVFVGEIKQSGGNKSLDSITGFSFTWRKPKEL

SEQ ID NO: 47839 - protein, 99 aa, Arabidopsis thaliana
  peptide (1)..(99): Ceres Seq. ID no. 13649430
MDGLIRGLVDSTWLSEETNAAAETMVVMMKATRGTRDPDLLGLMWFPVRRRIRIAREDRRTAVARIQRRINGRRRAKGFPQDIHNHMRRTRKRIHMRLK

SEQ ID NO: 47840 - protein, 75 aa, Arabidopsis thaliana
  peptide (1)..(75): Ceres Seq. ID no. 13649431
MVVMMKATRGTRDPDLLGLMWFPVRRRIRIAREDRRTAVARIQRRINGRRRAKGFPQDIHNHMRRTRKRIHMRLK

SEQ ID NO: 47841 - DNA, 1724 bp, Arabidopsis thaliana
  misc_feature (1)..(1724): Ceres Seq. ID no. 13649440
  misc_feature (1)..(1724): Ortholog of  Ceres SEQ ID NO 15168348 as cited in SEQ ID NO 58074
gagttgaacccagttgagtatttagccaatacgattagaggatttacttgttttttctcttttcatgttcttcatttgcttttgaagatcttctctttatgaaagctttagtcttttaccagtttgatccaattctgggtttcactgaaaaaaagttgggagtttgattcttctaactgtagaagaaacagagtcaacagaagaaaactaaaaaagttgagatttttctctcacgcgctcaagagcttgagtatgtcttcttctgtagcagtgttatgggttgctacttcttctctaaatccagacccaatgaacaattgtgggttggtaagggttctagaatcttctagactgttctctccttgtcagaatcagagactaaacaaaggtaagaagaagcagataccaacttggagttcttcttttgtaaggaaccgaagtagaagaattggtgttgtgtcttcaagcttagtagcaagtccttctggagagatagctctttcatctgaagagaaggtttacaatgttgtgttgaaacaagctgctttggtgaacaaacagctaaggtcttcttcttatgaccttgatgtgaagaaaccacaagatgttgttcttcctgggagtttgagtttgttgggtgaagcttatgatcgatgcggtgaagtttgcgctgaatatgctaagacgttttatcttggaactttgcttatgacacccgaaaggcgaaaggcgatttgggcaatctacgtttggtgtagaagaactgatgaacttgtggatgggccaaatgcttcacatataactcccatggctttagatagatgggaagcaaggttagaagatcttttccgtggtcgtcctttcgatatgcttgatgctgctctcgctgatacagttgctagatacccggtcgatattcagccatttcgagacatgatcgaaggaatgagaatggacttgaagaaatcgagataccagaacttcgatgatctatacctttactgctactacgtcgctggaaccgtcggattgatgagcgttccggttatgggaatcgatcctaagtcgaaagcaacaaccgaaagtgtttacaacgctgccttggcccttggtatagccaatcagcttactaacatactcagagacgtaggcgaagatgcgagaagaggaagggtttatctgcctcaggatgaattggctcaggctggtctttcagatgaagacatattcgccggaaaagtaactgataaatggagaaacttcatgaaaatgcagcttaaacgagcaagaatgttcttcgacgaagctgagaaaggcgtcaccgagctcagtgccgctagcagatggcctgtatgggcttcattgctattgtacaggagaatactggacgagattgaagcgaatgattacaacaattttactaagagagcttatgtggggaaagtcaagaaaattgcagctttgccattggcttatgctaaatcagtactaaagacttcaagttcaagactatcgatatgagagcgagaggaaagtggaacaaaaacaacctaagagcgctttttgtgattaagaaaaaacttaggctcgaatttattatgttaactaatatatacatattaatggggaagcaaattcttataatgttacattatctttctgaatgtaaaaaagtatttttttttttaattttattttagttatagttctcttggcctaatgag

SEQ ID NO: 47842 - protein, 422 aa, Arabidopsis thaliana
  peptide (1)..(422): Ceres Seq. ID no. 13649441
MSSSVAVLWVATSSLNPDPMNNCGLVRVLESSRLFSPCQNQRLNKGKKKQIPTWSSSFVRNRSRRIGVVSSSLVASPSGEIALSSEEKVYNVVLKQAALVNKQLRSSSYDLDVKKPQDVVLPGSLSLLGEAYDRCGEVCAEYAKTFYLGTLLMTPERRKAIWAIYVWCRRTDELVDGPNASHITPMALDRWEARLEDLFRGRPFDMLDAALADTVARYPVDIQPFRDMIEGMRMDLKKSRYQNFDDLYLYCYYVAGTVGLMSVPVMGIDPKSKATTESVYNAALALGIANQLTNILRDVGEDARRGRVYLPQDELAQAGLSDEDIFAGKVTDKWRNFMKMQLKRARMFFDEAEKGVTELSAASRWPVWASLLLYRRILDEIEANDYNNFTKRAYVGKVKKIAALPLAYAKSVLKTSSSRLSI

SEQ ID NO: 47843 - protein, 403 aa, Arabidopsis thaliana
  peptide (1)..(403): Ceres Seq. ID no. 13649442
MNNCGLVRVLESSRLFSPCQNQRLNKGKKKQIPTWSSSFVRNRSRRIGVVSSSLVASPSGEIALSSEEKVYNVVLKQAALVNKQLRSSSYDLDVKKPQDVVLPGSLSLLGEAYDRCGEVCAEYAKTFYLGTLLMTPERRKAIWAIYVWCRRTDELVDGPNASHITPMALDRWEARLEDLFRGRPFDMLDAALADTVARYPVDIQPFRDMIEGMRMDLKKSRYQNFDDLYLYCYYVAGTVGLMSVPVMGIDPKSKATTESVYNAALALGIANQLTNILRDVGEDARRGRVYLPQDELAQAGLSDEDIFAGKVTDKWRNFMKMQLKRARMFFDEAEKGVTELSAASRWPVWASLLLYRRILDEIEANDYNNFTKRAYVGKVKKIAALPLAYAKSVLKTSSSRLSI

SEQ ID NO: 47844 - protein, 270 aa, Arabidopsis thaliana; identical to SEQ ID NO: 29905
  peptide (1)..(270): Ceres Seq. ID no. 13649443

SEQ ID NO: 47845 - DNA, 1115 bp, Arabidopsis thaliana
  misc_feature (1)..(1115): Ceres Seq. ID no. 13648194
  misc_feature (1)..(1115): Ortholog of  Ceres SEQ ID NO 14310819 as cited in SEQ ID NO 53794
ccggtctctacgcggaaaaacaaaaaaatggggaggaagcggaagcacagtgagacggaagctccggcgccggtgaaaaagagcgatgagcctgctccggatagacccaaaaggactctattgggatggaaagataagagtgaaggtgaagctgagaaagctaaagctttgacttcatctggattcaagaacaaagagaaggttttggtgacttgttctcgtcgtatcagtttcaggtatcggagtttgatgttgaacattgtttcacttctaccacactgtaagaaagacagtaaagttgaagcaaagagtagcaaaggcgcgactttgaatgagctcattgagcttaagaattctaattcctgcttgttcttcgagtgtaggaaacataaagatctttacatgtggatggtcaaatcccctaatggaccatctgtgaagtttttggttaaagctgtgcacgcaatggaagagatgaaactcactggaaatcatctcaaagggtcacgtccacttttgacattctcatccaattttgataaagatgcgcactggaaactcttgaaggagatgcttactcaggtcttcggaattcctaaggaacacaggaaatctaagccttaccatgaccatgtatttgtcttttcaattgttgatgagcatatatggttccgaaattaccagatttcggttcctcacaatgagtcagataaaattgcaaaaggtggcctggataaaatgacccttatcgaggttggtccaaggttttgtctgaatccaatcaagatattcgcgggcagctttggaggtcctactctttatgagaacccgttatacgtatctccaaaccagattcgagcattggagaagagaaataaagctgggaaatttgctaagaagatcaaggcgaagacgaggaaaaagatgcatgagctctcaaacccgttggagcctgatgagtttgcagatatgtggaaagatgatgaatgatcagagttcaggaaaattgtatcacttcactttgtcttactgttattttagttttgtcttgttttcgctcactatcaaacataaacaaagttttgtcttgcaatgatatgtttctaagtttcttg

SEQ ID NO: 47846 - protein, 329 aa, Arabidopsis thaliana
  peptide (1)..(329): Ceres Seq. ID no. 13648195
PVSTRKNKKMGRKRKHSETEAPAPVKKSDEPAPDRPKRTLLGWKDKSEGEAEKAKALTSSGFKNKEKVLVTCSRRISFRYRSLMLNIVSLLPHCKKDSKVEAKSSKGATLNELIELKNSNSCLFFECRKHKDLYMWMVKSPNGPSVKFLVKAVHAMEEMKLTGNHLKGSRPLLTFSSNFDKDAHWKLLKEMLTQVFGIPKEHRKSKPYHDHVFVFSIVDEHIWFRNYQISVPHNESDKIAKGGLDKMTLIEVGPRFCLNPIKIFAGSFGGPTLYENPLYVSPNQIRALEKRNKAGKFAKKIKAKTRKKMHELSNPLEPDEFADMWKDDE

SEQ ID NO: 47847 - protein, 320 aa, Arabidopsis thaliana
  peptide (1)..(320): Ceres Seq. ID no. 13648196
MGRKRKHSETEAPAPVKKSDEPAPDRPKRTLLGWKDKSEGEAEKAKALTSSGFKNKEKVLVTCSRRISFRYRSLMLNIVSLLPHCKKDSKVEAKSSKGATLNELIELKNSNSCLFFECRKHKDLYMWMVKSPNGPSVKFLVKAVHAMEEMKLTGNHLKGSRPLLTFSSNFDKDAHWKLLKEMLTQVFGIPKEHRKSKPYHDHVFVFSIVDEHIWFRNYQISVPHNESDKIAKGGLDKMTLIEVGPRFCLNPIKIFAGSFGGPTLYENPLYVSPNQIRALEKRNKAGKFAKKIKAKTRKKMHELSNPLEPDEFADMWKDDE

SEQ ID NO: 47848 - protein, 246 aa, Arabidopsis thaliana
  peptide (1)..(246): Ceres Seq. ID no. 13648197
MLNIVSLLPHCKKDSKVEAKSSKGATLNELIELKNSNSCLFFECRKHKDLYMWMVKSPNGPSVKFLVKAVHAMEEMKLTGNHLKGSRPLLTFSSNFDKDAHWKLLKEMLTQVFGIPKEHRKSKPYHDHVFVFSIVDEHIWFRNYQISVPHNESDKIAKGGLDKMTLIEVGPRFCLNPIKIFAGSFGGPTLYENPLYVSPNQIRALEKRNKAGKFAKKIKAKTRKKMHELSNPLEPDEFADMWKDDE

SEQ ID NO: 47849 - DNA, 2123 bp, Arabidopsis thaliana; identical to SEQ ID NO: 45220
  misc_feature (1)..(2123): Ceres Seq. ID no. 13575963
  misc_feature (1)..(2123): Ortholog of  Ceres SEQ ID NO 13657008 as cited in SEQ ID NO 69164

SEQ ID NO: 47850 - protein, 537 aa, Arabidopsis thaliana; identical to SEQ ID NO: 45221
  peptide (1)..(537): Ceres Seq. ID no. 13575964

SEQ ID NO: 47851 - protein, 479 aa, Arabidopsis thaliana; identical to SEQ ID NO: 45222
  peptide (1)..(479): Ceres Seq. ID no. 13575965

SEQ ID NO: 47852 - protein, 453 aa, Arabidopsis thaliana; identical to SEQ ID NO: 45223
  peptide (1)..(453): Ceres Seq. ID no. 13575966

SEQ ID NO: 47853 - DNA, 1701 bp, Arabidopsis thaliana
  misc_feature (1)..(1701): Ceres Seq. ID no. 12562851
  misc_feature (1)..(1701): Ortholog of  Ceres SEQ ID NO 13664178 as cited in SEQ ID NO 61247
  misc_feature (1)..(1701): Ortholog of  Ceres SEQ ID NO 15179290 as cited in SEQ ID NO 0
atctctctaagcttcttcttctaccaatctaattcctctcttcagcttcttgtgttgtgacgcatactcgtcgcagtcttgagatatggccgccgcagtttccaccgtcggtgccatcaacagagctccgttgagcttgaacgggtcaggatcaggagctgtatcagccccagcttcaaccttcttgggaaagaaagttgtaactgtgtcgagattcgcacagagcaacaagaagagcaacggatcattcaaggtgttggctgtgaaagaagacaaacaaaccgatggagacagatggagaggtcttgcctacgacacttctgatgatcaacaagacatcaccagaggcaagggtatggttgactctgtcttccaagctcctatgggaaccggaactcaccacgctgtccttagctcatacgaatacgttagccaaggccttaggcagtacaacttggacaacatgatggatgggttttacattgctcctgctttcatggacaagcttgttgttcacatcaccaagaacttcttgactctgcctaacatcaaggttccacttattttgggtatatggggaggcaaaggtcaaggtaaatccttccagtgtgagcttgtcatggccaagatgggtatcaacccaatcatgatgagtgctggagagcttgagagtggaaacgcaggagaacccgcaaagcttatccgtcagaggtaccgtgaggcagctgacttgatcaagaagggaaagatgtgttgtctcttcatcaacgatcttgacgctggtgcgggtcgtatgggtggtactactcagtacactgtcaacaaccagatggttaacgcaacactcatgaacattgctgataacccaaccaacgtccagctcccaggaatgtacaacaaggaagagaacgcacgtgtccccatcatttgcactggtaacgatttctccaccctatacgctcctctcatccgtgatggacgtatggagaagttctactgggccccgacccgtgaagaccgtatcggtgtctgcaagggtatcttcagaactgacaagatcaaggacgaagacattgtcacacttgttgatcagttccctggtcaatctatcgatttcttcggtgctttgagggcgagagtgtacgatgatgaagtgaggaagttcgttgagagccttggagttgagaagatcggaaagaggctggttaactcaagggaaggacctcccgtgttcgagcaacccgagatgacttatgagaagcttatggaatacggaaacatgcttgtgatggaacaagagaatgtcaagagagtccaacttgccgagacctacctcagccaggctgctttgggagacgcaaacgctgacgccatcggccgcggaactttctacggtaaaacagaggaaaaggagcccagcaagtaaacctgccagttcctgaagggtgtactgatcctgtggctgaaaactttgatccaacggctagaagtgacgatggaacctgtgtctacaacttttgagcaatattatcctgcttattaatttgctgttttactcctattgtctcttttggtttatttttctcctttgtgtaattgtggattggatcttgtcctcttttgttccctttttttttttttatgatgtacaacacattggtaatttaaaattgccttgtcataaactacacttcttattcc

SEQ ID NO: 47854 - protein, 446 aa, Arabidopsis thaliana
  peptide (1)..(446): Ceres Seq. ID no. 12562852
MAAAVSTVGAINRAPLSLNGSGSGAVSAPASTFLGKKVVTVSRFAQSNKKSNGSFKVLAVKEDKQTDGDRWRGLAYDTSDDQQDITRGKGMVDSVFQAPMGTGTHHAVLSSYEYVSQGLRQYNLDNMMDGFYIAPAFMDKLVVHITKNFLTLPNIKVPLILGIWGGKGQGKSFQCELVMAKMGINPIMMSAGELESGNAGEPAKLIRQRYREAADLIKKGKMCCLFINDLDAGAGRMGGTTQYTVNNQMVNATLMNIADNPTNVQLPGMYNKEENARVPIICTGNDFSTLYAPLIRDGRMEKFYWAPTREDRIGVCKGIFRTDKIKDEDIVTLVDQFPGQSIDFFGALRARVYDDEVRKFVESLGVEKIGKRLVNSREGPPVFEQPEMTYEKLMEYGNMLVMEQENVKRVQLAETYLSQAALGDANADAIGRGTFYGKTEEKEPSK

SEQ ID NO: 47855 - protein, 356 aa, Arabidopsis thaliana
  peptide (1)..(356): Ceres Seq. ID no. 12562853
MVDSVFQAPMGTGTHHAVLSSYEYVSQGLRQYNLDNMMDGFYIAPAFMDKLVVHITKNFLTLPNIKVPLILGIWGGKGQGKSFQCELVMAKMGINPIMMSAGELESGNAGEPAKLIRQRYREAADLIKKGKMCCLFINDLDAGAGRMGGTTQYTVNNQMVNATLMNIADNPTNVQLPGMYNKEENARVPIICTGNDFSTLYAPLIRDGRMEKFYWAPTREDRIGVCKGIFRTDKIKDEDIVTLVDQFPGQSIDFFGALRARVYDDEVRKFVESLGVEKIGKRLVNSREGPPVFEQPEMTYEKLMEYGNMLVMEQENVKRVQLAETYLSQAALGDANADAIGRGTFYGKTEEKEPSK

SEQ ID NO: 47856 - protein, 347 aa, Arabidopsis thaliana
  peptide (1)..(347): Ceres Seq. ID no. 12562854
MGTGTHHAVLSSYEYVSQGLRQYNLDNMMDGFYIAPAFMDKLVVHITKNFLTLPNIKVPLILGIWGGKGQGKSFQCELVMAKMGINPIMMSAGELESGNAGEPAKLIRQRYREAADLIKKGKMCCLFINDLDAGAGRMGGTTQYTVNNQMVNATLMNIADNPTNVQLPGMYNKEENARVPIICTGNDFSTLYAPLIRDGRMEKFYWAPTREDRIGVCKGIFRTDKIKDEDIVTLVDQFPGQSIDFFGALRARVYDDEVRKFVESLGVEKIGKRLVNSREGPPVFEQPEMTYEKLMEYGNMLVMEQENVKRVQLAETYLSQAALGDANADAIGRGTFYGKTEEKEPSK

SEQ ID NO: 47857 - DNA, 1117 bp, Arabidopsis thaliana; identical to SEQ ID NO: 46816
  misc_feature (1)..(1117): Ceres Seq. ID no. 12601085
  misc_feature (1)..(1117): Ortholog of  Ceres SEQ ID NO 13595414 as cited in SEQ ID NO 56539
  misc_feature (1)..(1117): Ortholog of  Ceres SEQ ID NO 14314396 as cited in SEQ ID NO 60048

SEQ ID NO: 47858 - protein, 259 aa, Arabidopsis thaliana; identical to SEQ ID NO: 46817
  peptide (1)..(259): Ceres Seq. ID no. 12601086

SEQ ID NO: 47859 - protein, 174 aa, Arabidopsis thaliana; identical to SEQ ID NO: 46818
  peptide (1)..(174): Ceres Seq. ID no. 12601087

SEQ ID NO: 47860 - protein, 143 aa, Arabidopsis thaliana; identical to SEQ ID NO: 46819
  peptide (1)..(143): Ceres Seq. ID no. 12601088

SEQ ID NO: 47861 - DNA, 1027 bp, Arabidopsis thaliana
  misc_feature (1)..(1027): Ceres Seq. ID no. 13648227
  misc_feature (1)..(1027): Ortholog of  Ceres SEQ ID NO 12625980 as cited in SEQ ID NO 65586
ggagagagtgagaagaagcaattttgttatattcaagaaacaataaaaaataaagttatttttgtaatacagagaggaaagaaaatagaaagatgaagatttggtgtgctgtttgtgataaagaagaagcttcggtgttttgttgtgcggatgaagcagctctttgtaatggttgcgatcgccatgttcatttcgccaataaactagccgggaaacatctccggttctctctcacttctcctactttcaaagatgctcctctttgtgatatttgcggggagaggcgtgcattattattttgccaagaagacagagcaatactatgcagagaatgtgacattccaatacatcaagctaatgagcacactaagaaacacaatagattcctccttaccggcgttaagatctctgcctccccgtcagcctacccaagagcctccaattccaactctgctgctgcatttggtcgagccaaaacccgaccaaaatcagtatcgagcgaggtcccgagctcggcctccaatgaggtatttacgagctcttcttcgacgaccacgagcaattgctattatgggatagaagaaaactaccatcacgtgagcgattcggggtcgggatcgggttgtacaggtagtatatccgagtatttgatggagacattaccgggttggagagtggaggatttgcttgaacacccttcttgtgtctcctatgaggataacattattactaataacaataacagtgagtcttatagggtttatgatggttcttcacaattccatcatcaagggttttgggatcacaaacccttctcttgaacttatttctgtcgaattatagtcttttttttataagttggggtttgtaatcatgaatccaaaccaacttgttgttttcgttttttagtattgttgtttctatatttatctcacattatgattttaaatttattttgtcaaccaatcctcttttaatcttagtttctttttctttgaatttaatttcaggtatttgttgtattgat

SEQ ID NO: 47862 - protein, 242 aa, Arabidopsis thaliana
  peptide (1)..(242): Ceres Seq. ID no. 13648228
MKIWCAVCDKEEASVFCCADEAALCNGCDRHVHFANKLAGKHLRFSLTSPTFKDAPLCDICGERRALLFCQEDRAILCRECDIPIHQANEHTKKHNRFLLTGVKISASPSAYPRASNSNSAAAFGRAKTRPKSVSSEVPSSASNEVFTSSSSTTTSNCYYGIEENYHHVSDSGSGSGCTGSISEYLMETLPGWRVEDLLEHPSCVSYEDNIITNNNNSESYRVYDGSSQFHHQGFWDHKPFS

SEQ ID NO: 47863 - DNA, 1445 bp, Arabidopsis thaliana; identical to SEQ ID NO: 45315
  misc_feature (1)..(1445): Ceres Seq. ID no. 13593120
  misc_feature (1)..(1445): Ortholog of  Ceres SEQ ID NO 14314896 as cited in SEQ ID NO 54010
  misc_feature (1)..(1445): Ortholog of  Ceres SEQ ID NO 14308813 as cited in SEQ ID NO 55485
  misc_feature (1)..(1445): Ortholog of  Ceres SEQ ID NO 13655744 as cited in SEQ ID NO 64032
  misc_feature (1)..(1445): Ortholog of  Ceres SEQ ID NO 13590394 as cited in SEQ ID NO 66581

SEQ ID NO: 47864 - protein, 470 aa, Arabidopsis thaliana; identical to SEQ ID NO: 40875
  peptide (1)..(470): Ceres Seq. ID no. 15221202

SEQ ID NO: 47865 - protein, 449 aa, Arabidopsis thaliana; identical to SEQ ID NO: 27284
  peptide (1)..(449): Ceres Seq. ID no. 15221203

SEQ ID NO: 47866 - protein, 401 aa, Arabidopsis thaliana; identical to SEQ ID NO: 21437
  peptide (1)..(401): Ceres Seq. ID no. 15221204

SEQ ID NO: 47867 - DNA, 1657 bp, Arabidopsis thaliana
  misc_feature (1)..(1657): Ceres Seq. ID no. 13649470
  misc_feature (1)..(1657): Ortholog of  Ceres SEQ ID NO 14314363 as cited in SEQ ID NO 52272
gattgtaattacggatcgtgtctctgctgcttcttcttctttcaatccgatttcggacaaccttttactcagacaggagatttcagtttttttcagtccatgttagtacttgaaccgttgtcttgcagtgtgacttaagctggtttccgtgagccaataacttgatacttcttttcctccctctagtgtgaaactctgcaccagaggtgaaaggttatcattgcaaaagggagcacaagtggatagtgtttgctcaagtattagtacagaaactagtatggctgataccagttcaaggactgatgtctcaactgatggtgacacagatcatagagatctggggtctgatagagggcatatgcatgctgctgcctctgattccagtgatcgatcaaaggataagttggatcaaaagacccttcgtaggcttgctcaaaatcgtgaggcagcaagaaaaagcagattgaggaagaaggcgtatgttcagcagctggagaatagtcgattaaagctgactcaacttgagcaggagctgcaaagagcaagacagcagggagttttcatctcaagttcaggagaccaagctcattctactggtggcaatggggctttggcatttgatgcagaacactcacgatggcttgaagaaaagaacaggcaaatgaacgagctgagatctgccctgaatgctcatgcaggtgatactgagctccggataattgtggatggagtgatggctcactatgaggagcttttcaggattaagagcaatgcagctaagaatgatgtcttccacttgttatctggaatgtggaaaacaccagctgagcgatgtttcttgtggcttggcgggttccgctcatccgaacttctcaagcttcttgcgaatcagctagagcccatgacagaacgacaggtaatgggcatcaatagcttgcagcagacgtcgcagcaggcagaagatgctttatctcaagggatggagagtttacagcaatccctagctgatactttatccagtggaactcttggttccagttcatcggataatgtcgcgagctacatgggtcagatggccatggcaatggggcagttaggcaccctcgaaggattcatacgccaggctgataacttgaggctgcaaacactacaacagatgcttcgagtattaacaacacgtcagtcagctcgtgctcttcttgctatacacgattattcatctcgattacgtgctcttagttccttgtggcttgcccggccaagagagtgaaacagaagaatagtgctctactcagcagtcagccctatacataatcttatgactcagatcggcagggatactccttccaagagatcgatcacaaagcaaggcattctcagattcttaccaaaagcaatattttgggaaagaagactgcaggttttgaaattggtttcctgaggtccgcaagactcgagtgttgtgtgtgttgtaatttttagccatcaggttgcatagttttatagagtgaatgtttataggtctttgaatattcaaagcggataggtgatcagtgtaaggtcgcaattaccaacatgacagaagatgggatcctttcaggaacttggattgtatgatcataaactccagcagaccaaatcaatttatattgagagt

SEQ ID NO: 47868 - protein, 330 aa, Arabidopsis thaliana
  peptide (1)..(330): Ceres Seq. ID no. 13649471
MADTSSRTDVSTDGDTDHRDLGSDRGHMHAAASDSSDRSKDKLDQKTLRRLAQNREAARKSRLRKKAYVQQLENSRLKLTQLEQELQRARQQGVFISSSGDQAHSTGGNGALAFDAEHSRWLEEKNRQMNELRSALNAHAGDTELRIIVDGVMAHYEELFRIKSNAAKNDVFHLLSGMWKTPAERCFLWLGGFRSSELLKLLANQLEPMTERQVMGINSLQQTSQQAEDALSQGMESLQQSLADTLSSGTLGSSSSDNVASYMGQMAMAMGQLGTLEGFIRQADNLRLQTLQQMLRVLTTRQSARALLAIHDYSSRLRALSSLWLARPRE

SEQ ID NO: 47869 - protein, 303 aa, Arabidopsis thaliana
  peptide (1)..(303): Ceres Seq. ID no. 13649472
MHAAASDSSDRSKDKLDQKTLRRLAQNREAARKSRLRKKAYVQQLENSRLKLTQLEQELQRARQQGVFISSSGDQAHSTGGNGALAFDAEHSRWLEEKNRQMNELRSALNAHAGDTELRIIVDGVMAHYEELFRIKSNAAKNDVFHLLSGMWKTPAERCFLWLGGFRSSELLKLLANQLEPMTERQVMGINSLQQTSQQAEDALSQGMESLQQSLADTLSSGTLGSSSSDNVASYMGQMAMAMGQLGTLEGFIRQADNLRLQTLQQMLRVLTTRQSARALLAIHDYSSRLRALSSLWLARPRE

SEQ ID NO: 47870 - protein, 202 aa, Arabidopsis thaliana
  peptide (1)..(202): Ceres Seq. ID no. 13649473
MNELRSALNAHAGDTELRIIVDGVMAHYEELFRIKSNAAKNDVFHLLSGMWKTPAERCFLWLGGFRSSELLKLLANQLEPMTERQVMGINSLQQTSQQAEDALSQGMESLQQSLADTLSSGTLGSSSSDNVASYMGQMAMAMGQLGTLEGFIRQADNLRLQTLQQMLRVLTTRQSARALLAIHDYSSRLRALSSLWLARPRE

SEQ ID NO: 47871 - DNA, 1729 bp, Arabidopsis thaliana
  misc_feature (1)..(1729): Ceres Seq. ID no. 13648749
  misc_feature (1)..(1729): Ortholog of  Ceres SEQ ID NO 13656435 as cited in SEQ ID NO 65853
gggaaaatcctctcatttttgacttgctcaattttgcttccttaagacccaaaaatccaaacctaaccctaatcgacattttctccgatttctaaatcctcctccggtgaaaatgtctcaccttgatgatcttccttctactcccggaaagtacaaaaccgataaagttccaccgtacgggattctccaccaccaccgttacctccgtctctcaaaactcaccctttgggcttctctcttcctcgctctcttcctcttctacctcgttttatctcctcctccgtcaccatctcgccggaatctcaacgattcttcctccatttccgccgcgaaatacggcggctctcactgggagaaacaagtccgtaaatccgctcgtcctaggtctcacggcggtttaacggtattagtcaccggagcttccggattcgtcggtactcacgtctcgatcgcgttacgaagacgcggcgatggtgttctaggtctcgacaatttcaatcgatactacgatccaaagcttaaacgagcaagacaaggccttttagaaagatcaggtgttttcgtagtcgaaggcgatataaacgacgccgttttactcagaaagctctttgatgttgtcctcttcacacatgttatgcatctcgctgctcaagctggtgtgcgttacgcaatgcaaaaccctggctcatatgttaacagtaacattgctgggtttgtgaatctattagaagtatcgaaatcagcgaatccgcaacctgctatagtctgggcttcctctagctctgtttatggtctgaattcgaaagtacccttttcggagaaagaccgtaccgatcaaccagcgagtttgtacgcagctacgaagaaagcaggtgaaggaattgcgcatacttacaatcacatctacggattatcgttaacgggtttgcggtttttcactgtctatggaccttggggtagaccagatatggcgtatttcttctttactaaagatattcttaaagggaagacgattactgtgtttgaatctcctgataaaggtagtgttgctagggacttcacttacattgatgatattgtaaaaggttgtttaggtgcgttagatactgctgagaagagtactggtagtggtggtaagaagaaaggtcctgctatgtttaggatttataatttggggaatacttctcctgttcctgttactaagcttgtgactatattagagaagcttttgaagatgaaagctaagaaaaagatcatgcctctaccgaggaatggggatgttgagtttactcatgccaatatcacgttagcgcaagcagagctcggttataaacctgcggttgatcttgagacgggtttgaaaaagtttgtgaaatggtatatgggtttttacactggctcgaagaagaagagttcttggtgagctctgtctctctgcttaagtcatggtctctgtttccccttgttgagcttggagttcgctctaggttaagcttttgaaaccgagcacttgcattgccaggaaaaatcacttacgtatctgcattgtttctgtgttgctagattttgcttcatttatttgttagtagattttgagcaatgtacagcttcatcacttagatgtttcaattgtcgaaactcaattgtcttttccatcatgtcggaggaataaagtagcttggattttgatgcatatactctgtagtaattcaatctattgtcacttgtt

SEQ ID NO: 47872 - protein, 436 aa, Arabidopsis thaliana
  peptide (1)..(436): Ceres Seq. ID no. 13648750
MSHLDDLPSTPGKYKTDKVPPYGILHHHRYLRLSKLTLWASLFLALFLFYLVLSPPPSPSRRNLNDSSSISAAKYGGSHWEKQVRKSARPRSHGGLTVLVTGASGFVGTHVSIALRRRGDGVLGLDNFNRYYDPKLKRARQGLLERSGVFVVEGDINDAVLLRKLFDVVLFTHVMHLAAQAGVRYAMQNPGSYVNSNIAGFVNLLEVSKSANPQPAIVWASSSSVYGLNSKVPFSEKDRTDQPASLYAATKKAGEGIAHTYNHIYGLSLTGLRFFTVYGPWGRPDMAYFFFTKDILKGKTITVFESPDKGSVARDFTYIDDIVKGCLGALDTAEKSTGSGGKKKGPAMFRIYNLGNTSPVPVTKLVTILEKLLKMKAKKKIMPLPRNGDVEFTHANITLAQAELGYKPAVDLETGLKKFVKWYMGFYTGSKKKSSW

SEQ ID NO: 47873 - protein, 262 aa, Arabidopsis thaliana
  peptide (1)..(262): Ceres Seq. ID no. 13648751
MHLAAQAGVRYAMQNPGSYVNSNIAGFVNLLEVSKSANPQPAIVWASSSSVYGLNSKVPFSEKDRTDQPASLYAATKKAGEGIAHTYNHIYGLSLTGLRFFTVYGPWGRPDMAYFFFTKDILKGKTITVFESPDKGSVARDFTYIDDIVKGCLGALDTAEKSTGSGGKKKGPAMFRIYNLGNTSPVPVTKLVTILEKLLKMKAKKKIMPLPRNGDVEFTHANITLAQAELGYKPAVDLETGLKKFVKWYMGFYTGSKKKSSW

SEQ ID NO: 47874 - protein, 250 aa, Arabidopsis thaliana
  peptide (1)..(250): Ceres Seq. ID no. 13648752
MQNPGSYVNSNIAGFVNLLEVSKSANPQPAIVWASSSSVYGLNSKVPFSEKDRTDQPASLYAATKKAGEGIAHTYNHIYGLSLTGLRFFTVYGPWGRPDMAYFFFTKDILKGKTITVFESPDKGSVARDFTYIDDIVKGCLGALDTAEKSTGSGGKKKGPAMFRIYNLGNTSPVPVTKLVTILEKLLKMKAKKKIMPLPRNGDVEFTHANITLAQAELGYKPAVDLETGLKKFVKWYMGFYTGSKKKSSW

SEQ ID NO: 47875 - DNA, 2794 bp, Arabidopsis thaliana; identical to SEQ ID NO: 45068
  misc_feature (1)..(2794): Ceres Seq. ID no. 12600170
  misc_feature (1)..(2794): Ortholog of  Ceres SEQ ID NO 15176051 as cited in SEQ ID NO 53434
  misc_feature (1)..(2794): Ortholog of  Ceres SEQ ID NO 15170306 as cited in SEQ ID NO 58219
  misc_feature (1)..(2794): Ortholog of  Ceres SEQ ID NO 12465091 as cited in SEQ ID NO 65947

SEQ ID NO: 47876 - protein, 886 aa, Arabidopsis thaliana; identical to SEQ ID NO: 45069
  peptide (1)..(886): Ceres Seq. ID no. 12600171

SEQ ID NO: 47877 - protein, 864 aa, Arabidopsis thaliana; identical to SEQ ID NO: 45070
  peptide (1)..(864): Ceres Seq. ID no. 12600172

SEQ ID NO: 47878 - protein, 854 aa, Arabidopsis thaliana; identical to SEQ ID NO: 45071
  peptide (1)..(854): Ceres Seq. ID no. 12600173

SEQ ID NO: 47879 - DNA, 1907 bp, Arabidopsis thaliana
  misc_feature (1)..(1907): Ceres Seq. ID no. 13649492
  misc_feature (1)..(1907): Ortholog of  Ceres SEQ ID NO 14313743 as cited in SEQ ID NO 59555
gtaaactttttaagatcctttacattttctttaagtctttatcaaatacttgtcatattgtagattcttatataggtgtctatatacatgcacataaagctgtgtaatatgtaatcataagttagagaaacagatttggcttttcctctcttgttctctgttgagtattcttcttggcatctcctctatattaaactcgaaagagaaacaaaacagagaaacctctaaagctttcttttttgttctcatgacattttcttgtcacaaaccaaactcgagaagaaaagttcttgtatacaaatcaaccaacattcattgtttttaaaagggtcccatgacccattgtggagatagctttgttttcatcttccaacattaacacccaccccaaaatcttgattacttttgatagaaacatatgcaacaagtggaataattccaatacagataagatccacacaacacttttttctccttctattctcttgtatcttctcattatagtctcgatgaagatgctgagacttagaaagaagcaacatttggtgtttctactatgcgtgtggtgtttggtggtggattggagcaaagcagaaacagaggaaagtgatggaagtcccatggagaaaacagagcaagctgctctatactctaccattcaaggctttgttggtgaatcttggaatggctcttatctttatcctgacccttgtggctggactcctatccagggtgtgacttgtgatatctatgatgagctttggtatgtaactgctctaagctttgggactatgaaagacaactctcttgcttgttctgaaagtccagtgatcagaccacaactctttgagctcaagcacctcaagtctctctctcttttcaactgcttcacaacgcctaaccgatatctagcttcaatctccgatgaaaagtggttggatctctctaaaagcttggagagacttgagatcagatcaaacccgggactgataggtgaactcccttctgtcatcactaacctcaccaaccttcaatctctggtggtgctagaaaacaagttaacaggtccattgccagtgaatttggccaagttaaccagattgagacgtttagtactgtctggaaaccggttcacagggagaatacctgaggtctacgggttaaccggattgttgatattggatgtgagcaggaatttcttatctggggcgttgcctttaagcgttggaggattgtattctctgctgaaacttgatcttagtaacaattacttggaaggaaagttacctagagagctagagtccttgaagaatctcactctattggacttgagaaacaacagattatcaggtgggttgagtaaagagatccaagagatgacttctttggtagaactggttctgtccaataatcgcctagccggggacttgacaggaataaagtggagaaatctgaagaatttagtggttcttgatctctccaacacaggcttaaaaggggagattcctggttcaatcttggagctcaagaaactgaggtttttgggtttgagcaacaacaatctcggaggcaaactcattccacaaatggaaaccgaaatgcctagtctcagcgcgctttacgtgaatggaaataacatcagcggagagttggaattctctaggtacttttatgagagaatgggaaggagacttggtgtttgggggaaccctaatctgtgttacaacggagatgagaccaagaaccttagcgatcatgttcctttcggagtgaaccaatgtaagagaattaaggcagataaatattagaaccctcgttctgaatcaaagggtttgtgataacaaaaacttggaatgatacaaagctgtggtcttttcaattttgttattgcatcttatttctatagc

SEQ ID NO: 47880 - protein, 432 aa, Arabidopsis thaliana
  peptide (1)..(432): Ceres Seq. ID no. 13649493
MKMLRLRKKQHLVFLLCVWCLVVDWSKAETEESDGSPMEKTEQAALYSTIQGFVGESWNGSYLYPDPCGWTPIQGVTCDIYDELWYVTALSFGTMKDNSLACSESPVIRPQLFELKHLKSLSLFNCFTTPNRYLASISDEKWLDLSKSLERLEIRSNPGLIGELPSVITNLTNLQSLVVLENKLTGPLPVNLAKLTRLRRLVLSGNRFTGRIPEVYGLTGLLILDVSRNFLSGALPLSVGGLYSLLKLDLSNNYLEGKLPRELESLKNLTLLDLRNNRLSGGLSKEIQEMTSLVELVLSNNRLAGDLTGIKWRNLKNLVVLDLSNTGLKGEIPGSILELKKLRFLGLSNNNLGGKLIPQMETEMPSLSALYVNGNNISGELEFSRYFYERMGRRLGVWGNPNLCYNGDETKNLSDHVPFGVNQCKRIKADKY

SEQ ID NO: 47881 - protein, 430 aa, Arabidopsis thaliana
  peptide (1)..(430): Ceres Seq. ID no. 13649494
MLRLRKKQHLVFLLCVWCLVVDWSKAETEESDGSPMEKTEQAALYSTIQGFVGESWNGSYLYPDPCGWTPIQGVTCDIYDELWYVTALSFGTMKDNSLACSESPVIRPQLFELKHLKSLSLFNCFTTPNRYLASISDEKWLDLSKSLERLEIRSNPGLIGELPSVITNLTNLQSLVVLENKLTGPLPVNLAKLTRLRRLVLSGNRFTGRIPEVYGLTGLLILDVSRNFLSGALPLSVGGLYSLLKLDLSNNYLEGKLPRELESLKNLTLLDLRNNRLSGGLSKEIQEMTSLVELVLSNNRLAGDLTGIKWRNLKNLVVLDLSNTGLKGEIPGSILELKKLRFLGLSNNNLGGKLIPQMETEMPSLSALYVNGNNISGELEFSRYFYERMGRRLGVWGNPNLCYNGDETKNLSDHVPFGVNQCKRIKADKY

SEQ ID NO: 47882 - protein, 395 aa, Arabidopsis thaliana
  peptide (1)..(395): Ceres Seq. ID no. 13649495
MEKTEQAALYSTIQGFVGESWNGSYLYPDPCGWTPIQGVTCDIYDELWYVTALSFGTMKDNSLACSESPVIRPQLFELKHLKSLSLFNCFTTPNRYLASISDEKWLDLSKSLERLEIRSNPGLIGELPSVITNLTNLQSLVVLENKLTGPLPVNLAKLTRLRRLVLSGNRFTGRIPEVYGLTGLLILDVSRNFLSGALPLSVGGLYSLLKLDLSNNYLEGKLPRELESLKNLTLLDLRNNRLSGGLSKEIQEMTSLVELVLSNNRLAGDLTGIKWRNLKNLVVLDLSNTGLKGEIPGSILELKKLRFLGLSNNNLGGKLIPQMETEMPSLSALYVNGNNISGELEFSRYFYERMGRRLGVWGNPNLCYNGDETKNLSDHVPFGVNQCKRIKADKY

SEQ ID NO: 47883 - DNA, 2810 bp, Arabidopsis thaliana; identical to SEQ ID NO: 44848
  misc_feature (1)..(2810): Ceres Seq. ID no. 12650352
  misc_feature (1)..(2810): Ortholog of  Ceres SEQ ID NO 13598023 as cited in SEQ ID NO 66487

SEQ ID NO: 47884 - protein, 761 aa, Arabidopsis thaliana; identical to SEQ ID NO: 44849
  peptide (1)..(761): Ceres Seq. ID no. 12650353

SEQ ID NO: 47885 - protein, 556 aa, Arabidopsis thaliana; identical to SEQ ID NO: 44850
  peptide (1)..(556): Ceres Seq. ID no. 12650354

SEQ ID NO: 47886 - DNA, 1701 bp, Arabidopsis thaliana
  misc_feature (1)..(1701): Ceres Seq. ID no. 13648881
  misc_feature (1)..(1701): Ortholog of  Ceres SEQ ID NO 12608490 as cited in SEQ ID NO 60254
ctgcttcgtccaagttagtcgccggagacgacaaagagcacctgaattggtgcgagaaaagattcctacttctgagaccatcttcacaaacgtgtagcaaagacgaagcctttgagttttctctttctgttacttagaaaatagctgattttgaacctggagctgagttccgtgtgtgattacttaattcggttatggctgcaccaaacgttcgtagtagtagcagcttctctcgcaacatatcagttgtgtcatcgcctcaaattcctggtctcaaaagtggtcctaatggcacagcttttatatcgtcagggattcgtgatcttgacaggatactaggtggtgggtatcctttgggaagcttagtaatggtaatggaagatcctgaagcaccgcatcatatggatctgttaagaacttacatgtctcaggggcttgttaacaatcaaccacttctttatgctagtccttcaaaagatccaaaagggtttcttggtactttgccgcatcctgcatcatccaaagaggataagcctactgcgcccgaccctgatcagggagagagcttgaggattgcttggcagtatcggaagtatttggaaaaccagaagaatgctattgatgattactccaatgactttgatatgagaaagcccttggagaggcaatttctgagcggacggcccatagattgtgtcagtctgttagactcttcagatctttccattgctcaggaccactgtgctacgtttttatcaaaatttccaaggttgtgtggcatcctttcttatttgatctcaattactcgctctagtttcgaatcaataaattttgttggtcatacctatgcagcaaattctgctcaagctcaattctttttacatctctcttatacttccaagctcagtttgtttatattgttttagtttgttactgagtcagttattgttcaaattcttctcttatttactggctttgttaagtagattgtcctttttttcttaagaacctgtgtattgtttcccacagaaacagcagtaacattgcatctattggccgcatcgcaatccagtctttttgctctcccctgtgtgagtattctgaaaaggaatcagacatgctctcattcataagattgctgaaaagtatgcttatggtttcaaatgcggtagccattgttactttcccgccttccctgctctccccatcttcctctaaaagactgcagcatatggcagataccttgctctctatcaaagcaatcccagatggtgacaaggaattggagaaactcctcactggctacaaggatataaatggattcctcaacatacacaaggttgctcgtatcaacacacaggtgcctgtaattcttgaggcaaaaaccttctcaatgagcttgaagaagagaagattcttggctctagagtgtctgaatcaagcccctgtagacgggtccagtggaacatcgtatggcacatctggtagctgctcatccaaatccggagcactagatttttgagttgctgagttagtctttcttttcttcttcttagtttttttttttccctctccattgagttctctaagttcactcactaacctgagcagttacattattattatagtctttggtcttaaaaacagttttgacagcaatatgttttgtttttataatgaaatttatttcatttctgtatc

SEQ ID NO: 47887 - protein, 243 aa, Arabidopsis thaliana
  peptide (1)..(243): Ceres Seq. ID no. 15219387
MAAPNVRSSSSFSRNISVVSSPQIPGLKSGPNGTAFISSGIRDLDRILGGGYPLGSLVMVMEDPEAPHHMDLLRTYMSQGLVNNQPLLYASPSKDPKGFLGTLPHPASSKEDKPTAPDPDQGESLRIAWQYRKYLENQKNAIDDYSNDFDMRKPLERQFLSGRPIDCVSLLDSSDLSIAQDHCATFLSKFPRLCGILSYLISITRSSFESINFVGHTYAANSAQAQFFLHLSYTSKLSLFILF

SEQ ID NO: 47888 - protein, 185 aa, Arabidopsis thaliana
  peptide (1)..(185): Ceres Seq. ID no. 15219388
MVMEDPEAPHHMDLLRTYMSQGLVNNQPLLYASPSKDPKGFLGTLPHPASSKEDKPTAPDPDQGESLRIAWQYRKYLENQKNAIDDYSNDFDMRKPLERQFLSGRPIDCVSLLDSSDLSIAQDHCATFLSKFPRLCGILSYLISITRSSFESINFVGHTYAANSAQAQFFLHLSYTSKLSLFILF

SEQ ID NO: 47889 - protein, 183 aa, Arabidopsis thaliana
  peptide (1)..(183): Ceres Seq. ID no. 15219389
MEDPEAPHHMDLLRTYMSQGLVNNQPLLYASPSKDPKGFLGTLPHPASSKEDKPTAPDPDQGESLRIAWQYRKYLENQKNAIDDYSNDFDMRKPLERQFLSGRPIDCVSLLDSSDLSIAQDHCATFLSKFPRLCGILSYLISITRSSFESINFVGHTYAANSAQAQFFLHLSYTSKLSLFILF

SEQ ID NO: 47890 - DNA, 926 bp, Arabidopsis thaliana
  misc_feature (1)..(926): Ceres Seq. ID no. 13648882
  misc_feature (1)..(926): Ortholog of  Ceres SEQ ID NO 14307801 as cited in SEQ ID NO 59512
  misc_feature (1)..(926): Ortholog of  Ceres SEQ ID NO 14309110 as cited in SEQ ID NO 0
  misc_feature (1)..(926): Ortholog of  Ceres SEQ ID NO 15225903 as cited in SEQ ID NO 0
gacaaagtgttctcttccaatttgatgtcgagaggtcaataaagtgatgagctttttgtgattttttcctcattcaaaatctttgcactttttcactctccttcaatctcaaatttctgagtctttcttggttcactttccttaaacacgatttgacatggatgcaatttcatctcttggaaccaattgtgttctttctggggtttctccattttcacaagagaatcaatcaaaatcgaaactttctccgtttatgagtcttgatttgaaggaacatccaatggcttcagcagatttcaccaaccaaaccttaaccgctttctcttcttcctctgcgtctccttttcaggcaaagacatcatcgattggtatgagtagaggaatgagatggtgggagaagtcaacaaatcacaacatgttagagattcaatctgccaatcatcttgttgactctttgttaaacgctggagatagattggttgttcttgatttctactctcctggttgtggtggctgcaaatctctccacccaaagatatgtcaattggcagaaacaaacccaaatgtgatgtttctgaaagtgaatcaagaagagcttagaacaatgtgtcatggtctaaacgttcatgtgctgcctttctttaagttctatagaggagcagagggtaaagtctgtagcttcagctgcactattgcaactatcaataagttcaagaaagcgttggataagcacggtagtgaaagatgcagcctcggggatgcaaagggattagacgagaaggaactcgcggctttggcatcggttggtgaactgaaaatgaattctttaacaatgcatcaagctagcaacattggttataaaacagaggagcaatatcaaacgatggtgttataaagagatgacttttttcattaaggttcttatt

SEQ ID NO: 47891 - protein, 245 aa, Arabidopsis thaliana
  peptide (1)..(245): Ceres Seq. ID no. 13648883
MDAISSLGTNCVLSGVSPFSQENQSKSKLSPFMSLDLKEHPMASADFTNQTLTAFSSSSASPFQAKTSSIGMSRGMRWWEKSTNHNMLEIQSANHLVDSLLNAGDRLVVLDFYSPGCGGCKSLHPKICQLAETNPNVMFLKVNQEELRTMCHGLNVHVLPFFKFYRGAEGKVCSFSCTIATINKFKKALDKHGSERCSLGDAKGLDEKELAALASVGELKMNSLTMHQASNIGYKTEEQYQTMVL

SEQ ID NO: 47892 - protein, 213 aa, Arabidopsis thaliana
  peptide (1)..(213): Ceres Seq. ID no. 13648884
MSLDLKEHPMASADFTNQTLTAFSSSSASPFQAKTSSIGMSRGMRWWEKSTNHNMLEIQSANHLVDSLLNAGDRLVVLDFYSPGCGGCKSLHPKICQLAETNPNVMFLKVNQEELRTMCHGLNVHVLPFFKFYRGAEGKVCSFSCTIATINKFKKALDKHGSERCSLGDAKGLDEKELAALASVGELKMNSLTMHQASNIGYKTEEQYQTMVL

SEQ ID NO: 47893 - protein, 204 aa, Arabidopsis thaliana
  peptide (1)..(204): Ceres Seq. ID no. 13648885
MASADFTNQTLTAFSSSSASPFQAKTSSIGMSRGMRWWEKSTNHNMLEIQSANHLVDSLLNAGDRLVVLDFYSPGCGGCKSLHPKICQLAETNPNVMFLKVNQEELRTMCHGLNVHVLPFFKFYRGAEGKVCSFSCTIATINKFKKALDKHGSERCSLGDAKGLDEKELAALASVGELKMNSLTMHQASNIGYKTEEQYQTMVL

SEQ ID NO: 47894 - DNA, 1998 bp, Arabidopsis thaliana
  misc_feature (1)..(1998): Ceres Seq. ID no. 12667521
  misc_feature (1)..(1998): Ortholog of  Ceres SEQ ID NO 13504578 as cited in SEQ ID NO 59850
aaaaaaaaaaaaaaacttttgtctttcccttaatttctctaattttccctcgatttctctggcatcaacagtctcattctcattgatctttcttttttgtagcgagaaagatccatttttttcggttcgttctcttctgggttacgaatcaaagagctacacagacacagacacacactgtttcctgtttctccccggattgcaaacagaactagggtttgttttcacaaattttggatcttttttttgaagaaaagaacaaaatttggatgaaaggaaaccagaaagactcgtcggaaaaaccgatatgggatcggagctcatcaagtacatctatacccggaatgtggtctttaacccgacccggtccaaaacttatggtttggcttatctgtttcattgtcttcacttacattatctacatgcttaagcttgtctctacctcacgctcctgtgacgattccacttctttcaccaccgtctctgctctctccacaaacgtctcttcaaatgtctcgtctttatccacctccttagcttcacggcggcgtaattgggaggaggaagaagaagacacggtggtggataagctgacggatcttaaccacgtggtgtttgggatcgctgcgtcgtctaagctatggaaacagaggaaagagtatatcaagatctggtataaaccaaaacgcatgcgtggctacgtttggttagataaagaggttaaaaagagtcttagtgatgatgatgacgaaaagcttcttcctccggtgaaaatctccggtggaactgcttcgtttccttatactaacaaacaaggacaacgctctgcgttacggatctcgaggattgtttctgaaacgctgcgtttaggtccgaagaatgttaggtggtttgtgatgggtgatgatgatacggtgtttgttattgataatttgattagggtgttgaggaagtatgaccatgagcagatgtattacattgggagcttgtcggaatctcatttacagaacatatttttctcgtatggtatggcttatggtggaggtggatttgctataagctatccattggctaaagctttgagtaagatgcaagatcggtgtatacagaggtatcctgcattgtatggatcagatgatcgcatgcaagcttgtatggctgaacttggtgttccactcactaaagaactcggatttcaccagtacgacgtttacgggaacctctttggccttctcgctgcacacccagtaacaccgttcgtctcgatgcaccacctcgacgtggtggaaccgattttccctaacatgacacgtgtccgcgccctcaagaagattaccgaacctatgaagcttgactcagccgggcttctccagcagtcgatatgctacgacaagcacaagagctggaccatctcggtctcttggggctacgcggttcagatttttcgcggaatattctctccccgagaaatggaaatgccttctagaaccttcttgaattggtacaaacgggcggattacactgcttacgctttcaacactaggccggttagccggaacccgtgtcaaaaaccgtttgtgttttacatgtcgagcacgaaattcgatcagcagctgaacacgacggttagcgaatacacgatacaccgtgtttcacatccttcttgccgatggaagatgacaaacccagctgagattaataccatcgtcgtctacaagaaacccgaccctcatctatgggaaaggtcacctaggaggaattgttgcagagtattacaaacaaagaggaataatacgttatggatcaatgttggtgtatgtagagcaggtgaagtcactgaagttaagtaattttttaatatagtttatttttgtgaaagggaaggaaattagagtttttttaggctgttttaccgctcttaatttcttgccacgttatttaaaatttttattcattgagatcccgccctagttcttctctcagtatatgatcgttcat

SEQ ID NO: 47895 - protein, 526 aa, Arabidopsis thaliana
  peptide (1)..(526): Ceres Seq. ID no. 12667522
MKGNQKDSSEKPIWDRSSSSTSIPGMWSLTRPGPKLMVWLICFIVFTYIIYMLKLVSTSRSCDDSTSFTTVSALSTNVSSNVSSLSTSLASRRRNWEEEEEDTVVDKLTDLNHVVFGIAASSKLWKQRKEYIKIWYKPKRMRGYVWLDKEVKKSLSDDDDEKLLPPVKISGGTASFPYTNKQGQRSALRISRIVSETLRLGPKNVRWFVMGDDDTVFVIDNLIRVLRKYDHEQMYYIGSLSESHLQNIFFSYGMAYGGGGFAISYPLAKALSKMQDRCIQRYPALYGSDDRMQACMAELGVPLTKELGFHQYDVYGNLFGLLAAHPVTPFVSMHHLDVVEPIFPNMTRVRALKKITEPMKLDSAGLLQQSICYDKHKSWTISVSWGYAVQIFRGIFSPREMEMPSRTFLNWYKRADYTAYAFNTRPVSRNPCQKPFVFYMSSTKFDQQLNTTVSEYTIHRVSHPSCRWKMTNPAEINTIVVYKKPDPHLWERSPRRNCCRVLQTKRNNTLWINVGVCRAGEVTEVK

SEQ ID NO: 47896 - protein, 501 aa, Arabidopsis thaliana
  peptide (1)..(501): Ceres Seq. ID no. 12667523
MWSLTRPGPKLMVWLICFIVFTYIIYMLKLVSTSRSCDDSTSFTTVSALSTNVSSNVSSLSTSLASRRRNWEEEEEDTVVDKLTDLNHVVFGIAASSKLWKQRKEYIKIWYKPKRMRGYVWLDKEVKKSLSDDDDEKLLPPVKISGGTASFPYTNKQGQRSALRISRIVSETLRLGPKNVRWFVMGDDDTVFVIDNLIRVLRKYDHEQMYYIGSLSESHLQNIFFSYGMAYGGGGFAISYPLAKALSKMQDRCIQRYPALYGSDDRMQACMAELGVPLTKELGFHQYDVYGNLFGLLAAHPVTPFVSMHHLDVVEPIFPNMTRVRALKKITEPMKLDSAGLLQQSICYDKHKSWTISVSWGYAVQIFRGIFSPREMEMPSRTFLNWYKRADYTAYAFNTRPVSRNPCQKPFVFYMSSTKFDQQLNTTVSEYTIHRVSHPSCRWKMTNPAEINTIVVYKKPDPHLWERSPRRNCCRVLQTKRNNTLWINVGVCRAGEVTEVK

SEQ ID NO: 47897 - protein, 490 aa, Arabidopsis thaliana
  peptide (1)..(490): Ceres Seq. ID no. 12667524
MVWLICFIVFTYIIYMLKLVSTSRSCDDSTSFTTVSALSTNVSSNVSSLSTSLASRRRNWEEEEEDTVVDKLTDLNHVVFGIAASSKLWKQRKEYIKIWYKPKRMRGYVWLDKEVKKSLSDDDDEKLLPPVKISGGTASFPYTNKQGQRSALRISRIVSETLRLGPKNVRWFVMGDDDTVFVIDNLIRVLRKYDHEQMYYIGSLSESHLQNIFFSYGMAYGGGGFAISYPLAKALSKMQDRCIQRYPALYGSDDRMQACMAELGVPLTKELGFHQYDVYGNLFGLLAAHPVTPFVSMHHLDVVEPIFPNMTRVRALKKITEPMKLDSAGLLQQSICYDKHKSWTISVSWGYAVQIFRGIFSPREMEMPSRTFLNWYKRADYTAYAFNTRPVSRNPCQKPFVFYMSSTKFDQQLNTTVSEYTIHRVSHPSCRWKMTNPAEINTIVVYKKPDPHLWERSPRRNCCRVLQTKRNNTLWINVGVCRAGEVTEVK

SEQ ID NO: 47898 - DNA, 1611 bp, Arabidopsis thaliana
  misc_feature (1)..(1611): Ceres Seq. ID no. 13649515
  misc_feature (1)..(1611): Ortholog of  Ceres SEQ ID NO 15226223 as cited in SEQ ID NO 65500
aaatctcgtcgacgacggtgtcgggactgaaagcagagagaaagcaaagtaagctagcttagctaggtccaagatccaagctttggaattttgtaaattgtctccactcttagccgttttaatggaaactgttccaccatctcccattacatggccagatgggggagctctcactaacgactgggtacatgggcttatgtcgtgtttcgaatggtcttcatggaatctacctccttcccagttaccttcactattgcctgtcaacgtctttgattccctcgtcctcaccgctcataaaatcctccacaaagaacgtaactgcgttcatatcgatgatcttgactctgtatccaacgttgttgtggttggtgacattcatggtcagcttcatgaccttcttttcctattgaaagatactggctttccttgtcaaaaccggtgttatgttttcaacggagactatgtggatcgcggtgcttggggacttgaaaccttccttgttctcttgtcctggaaggttttgatgccggacagagtctacctactccgtggtaatcatgagtcaaagtattgtacatctatgtatggtttcgagaaggaagtgcttacaaaatacggagacaagggaaaacatgtgtaccggaaatgtttgggttgctttgaaggtcttcctttggcttccataatttctggacgtgtttatacagcacatggagggcttttccgcagcccagtcttgcctaagcgaacaacaagggggaaaaagaaccgtcgggtagttcttctggaacctgagccgagctcaatgaaactcggtaccttagatgagttgatgcaagctcgaagatcagttcttgatcctccttgggaaggttcaaacttgataccaggagacgttttatggtctgatccttcaatgactccgggcctttcaccaaatgaacagagaggcattggtcttctttggggtcccgattgtacagaggattttttgaagaaatatgaactgaaggtgacaccaaagtagatattgatgcttgtttgcttcccaaatactgatatggatgattggatcaaatgttttacacttattggtgcagttgatcatcagatcacatgaaggtccagatgctagagagaagagaactggtcttggtggaatggacaatggatatacaatagaccacaatgtcgaatccggaaagcttatcactattttcagtgcacctgactatccgcaattccaagcaacagaagagaggtacaaaaacaaaggagcatatattattttgcaggcgcctgatttctcggatcctcaatttcatagtttcgaagctgttaaaccgcgaccaaaggcgcatccatattatgactttgaaaatgtcattgattctgatgatgagatggataagtcagcaatggacaccaataacgaacaaccaaatagctgaccgaagctgaaaaggagtatcttgaattgatgttttttacagttgttgtgattgctcattatttgcaaacataaaatggaatcaaatgtaaagaaaagagatgaagaaaatcatttgtagaattcacatttaagttatgtatggaagatgaagaaataag

SEQ ID NO: 47899 - protein, 301 aa, Arabidopsis thaliana
  peptide (1)..(301): Ceres Seq. ID no. 13649516
METVPPSPITWPDGGALTNDWVHGLMSCFEWSSWNLPPSQLPSLLPVNVFDSLVLTAHKILHKERNCVHIDDLDSVSNVVVVGDIHGQLHDLLFLLKDTGFPCQNRCYVFNGDYVDRGAWGLETFLVLLSWKVLMPDRVYLLRGNHESKYCTSMYGFEKEVLTKYGDKGKHVYRKCLGCFEGLPLASIISGRVYTAHGGLFRSPVLPKRTTRGKKNRRVVLLEPEPSSMKLGTLDELMQARRSVLDPPWEGSNLIPGDVLWSDPSMTPGLSPNEQRGIGLLWGPDCTEDFLKKYELKVTPK

SEQ ID NO: 47900 - protein, 276 aa, Arabidopsis thaliana
  peptide (1)..(276): Ceres Seq. ID no. 13649517
MSCFEWSSWNLPPSQLPSLLPVNVFDSLVLTAHKILHKERNCVHIDDLDSVSNVVVVGDIHGQLHDLLFLLKDTGFPCQNRCYVFNGDYVDRGAWGLETFLVLLSWKVLMPDRVYLLRGNHESKYCTSMYGFEKEVLTKYGDKGKHVYRKCLGCFEGLPLASIISGRVYTAHGGLFRSPVLPKRTTRGKKNRRVVLLEPEPSSMKLGTLDELMQARRSVLDPPWEGSNLIPGDVLWSDPSMTPGLSPNEQRGIGLLWGPDCTEDFLKKYELKVTPK

SEQ ID NO: 47901 - protein, 167 aa, Arabidopsis thaliana
  peptide (1)..(167): Ceres Seq. ID no. 13649518
MPDRVYLLRGNHESKYCTSMYGFEKEVLTKYGDKGKHVYRKCLGCFEGLPLASIISGRVYTAHGGLFRSPVLPKRTTRGKKNRRVVLLEPEPSSMKLGTLDELMQARRSVLDPPWEGSNLIPGDVLWSDPSMTPGLSPNEQRGIGLLWGPDCTEDFLKKYELKVTPK

SEQ ID NO: 47902 - DNA, 1522 bp, Arabidopsis thaliana
  misc_feature (1)..(1522): Ceres Seq. ID no. 13650113
  misc_feature (1)..(1522): Ortholog of  Ceres SEQ ID NO 13532807 as cited in SEQ ID NO 53012
  misc_feature (1)..(1522): Ortholog of  Ceres SEQ ID NO 13663060 as cited in SEQ ID NO 60964
  misc_feature (1)..(1522): Ortholog of  Ceres SEQ ID NO 13598532 as cited in SEQ ID NO 65204
  misc_feature (1)..(1522): Ortholog of  Ceres SEQ ID NO 13656849 as cited in SEQ ID NO 65764
  misc_feature (1)..(1522): Ortholog of  Ceres SEQ ID NO 13500573 as cited in SEQ ID NO 67431
  misc_feature (1)..(1522): Ortholog of  Ceres SEQ ID NO 13656501 as cited in SEQ ID NO 69206
cgaatcgaatcgatctcatctccaaaaatcttgtattcaaagtttgattttctgggtttcttctgtattatctcgatatttgaaaaaaatggcgaaggaaattgaatcagcgacagatttaggtgatactaacatcaaaggagttcttgttcatggaggaagatattttcaatacaatgtttatggaaacttgtttgaagtttctaataagtatgttcctcctattcgacctattggtagaggagcttcggttttgtctgtgctgcagtagattcggagacacacgaagagattgcgataaagaagataggtaaagcctttgataataaagtagatgcaaagagaacattgagagagattaagctacttcgtcatttagaacacgagaacgttgttgttataaaagatatcattagaccaccaaagaaggaagatttcgttgatgtttatatagtttttgagttaatggatactgatcttcatcagattattcgatcaaaccaatctttgaatgatgatcattgtcagtacttcttgtatcagattctacgaggactcaaatatattcattcagcaaatgttttacatcgtgaccttaagccgagtaatttgcttttgaattcgaattgcgatcttaagattactgactttggtttggcaaggactacatcagaaacagagtatatgacagagtatgttgtaacacgatggtacagagcaccagagctgcttcttaatagttctgagtatacatctgctattgatgtatggtctgttggttgcatatttgctgagattatgacaagggaaccgcttttcccggggaaggattacgttcatcagcttaaacttatcactgagttgataggatcacctgatggagcgagtctagagtttctcagaagcgcgaacgcgagaaaatatgttaaggagctacctaagttcccaagacaaaacttttcagctaggtttcctagtatgaattctacagctatcgatctactagagaaaatgctcgtgtttgatccagtaaaacgtatcacggttgaggaagcactgtgttatccttacttgtcagctcttcacgaccttaacgacgagcctgtttgttccaaccatttcagtttccattttgaggatccgtcttccactgaagaagagataaaggagcttgtgtggctcgaatctgtgaagttcaatcctctgccgagcatttaaaacattatttaagaaggggaaagcaagttttatactctgacattgagcaaaacaaattagtagtgtttaagctctgtttctccttcatctcatgttgatcgttgtttaagctatttcactagttaaaaaagctgtcttgcaactcaagaaattgttctataaggatccttgtaacccaagacatatctttagtagttatgtccattcttattatcaggatgtcttagatagtgttctgtttcttctacatatcatgttgttatcttgtaactcaagaaattaaattaaaaagctatctttgttt

SEQ ID NO: 47903 - protein, 250 aa, Arabidopsis thaliana
  peptide (1)..(250): Ceres Seq. ID no. 15219605
MDTDLHQIIRSNQSLNDDHCQYFLYQILRGLKYIHSANVLHRDLKPSNLLLNSNCDLKITDFGLARTTSETEYMTEYVVTRWYRAPELLLNSSEYTSAIDVWSVGCIFAEIMTREPLFPGKDYVHQLKLITELIGSPDGASLEFLRSANARKYVKELPKFPRQNFSARFPSMNSTAIDLLEKMLVFDPVKRITVEEALCYPYLSALHDLNDEPVCSNHFSFHFEDPSSTEEEIKELVWLESVKFNPLPSI

SEQ ID NO: 47904 - protein, 177 aa, Arabidopsis thaliana
  peptide (1)..(177): Ceres Seq. ID no. 15219606
MTEYVVTRWYRAPELLLNSSEYTSAIDVWSVGCIFAEIMTREPLFPGKDYVHQLKLITELIGSPDGASLEFLRSANARKYVKELPKFPRQNFSARFPSMNSTAIDLLEKMLVFDPVKRITVEEALCYPYLSALHDLNDEPVCSNHFSFHFEDPSSTEEEIKELVWLESVKFNPLPSI

SEQ ID NO: 47905 - protein, 139 aa, Arabidopsis thaliana
  peptide (1)..(139): Ceres Seq. ID no. 15219607
MTREPLFPGKDYVHQLKLITELIGSPDGASLEFLRSANARKYVKELPKFPRQNFSARFPSMNSTAIDLLEKMLVFDPVKRITVEEALCYPYLSALHDLNDEPVCSNHFSFHFEDPSSTEEEIKELVWLESVKFNPLPSI

SEQ ID NO: 47906 - DNA, 2283 bp, Arabidopsis thaliana
  misc_feature (1)..(2283): Ceres Seq. ID no. 13649519
  misc_feature (1)..(2283): Ortholog of  Ceres SEQ ID NO 15225226 as cited in SEQ ID NO 58693
  misc_feature (1)..(2283): Ortholog of  Ceres SEQ ID NO 13654989 as cited in SEQ ID NO 63117
  misc_feature (1)..(2283): Ortholog of  Ceres SEQ ID NO 13655640 as cited in SEQ ID NO 63844
  misc_feature (1)..(2283): Ortholog of  Ceres SEQ ID NO 13584744 as cited in SEQ ID NO 69137
atgactacacctgcacaggctcctagggaggaggtgtcactgtctccatcattggcgtcccctccactaatggcgttgcctccaccgcagccttcgtttcccggtgataatgccacttccccaactagagagcccactaatggcaatccaccagagaccacaaacaccccagctcagtcttctcctcctcctgagactccactatcatcaccaccaccagaaccttctcccccatcaccttcactaactggacctcctccgacgacgattccagtatctcctccaccagaaccttctcccccaccacctttaccaactgaagctcctcctccagcgaatccagtatcatcacctccaccagaatcttctcccccgccacctccaccaactgaagctcctcctactactcctattacatcacccagcccgccaacaaatccaccaccaccaccggaaagccctccttcactacctgcaccagaccctccaagcaatccacttccaccacctaagttagtcccaccatcacattcacctccacgtcatttaccttccccgccagcctcagaaattcctcctcctccacgtcatttaccttccccaccagcctcagaacgtccttcaactcctccatcagattcagaacatccttctcctcctcctccagggcatccaaaacgtcgtgagcaacctcctccaccgggttctaaacgtcctactccatcacctccttctccaagtgactcaaaacgtcctgtgcatccttcacctccttctccaccagaggaaactctcccacctcccaagccaagtccagatcccttaccttctaattcgtcttcaccaccaacattgcttccaccatcgtcagttgtatccccgccttcgcctcctcgaaaatctgtgtcaggtcctgataatccatctccaaacaaccccactcctgtgacagataattccagcagttctggtattagtacagcggctgttgtgggtgtaagtattggagtggcccttgtgctgcttactctcattggagttgttgtctgttgcttaaagaaacggaaaaagaggctctcaaccattggtggtggctatgttatgccaacacctatggaatcctcctccccaagatcagattcagcgcttctgaagacgcagtcatccgcacctctagtgggaaatcgttctagcaatcgtacatacttatcacaatcagagcctggtggttttggtcaatcgagggaactgttctcatatgaagaacttgtcatagcaacaaatggattctctgatgaaaatctcttgggtgaaggtggatttggtcgtgtgtataaaggagttttaccagatgaaagagtggttgctgtgaaacaattaaaaataggtggaggacaaggtgaccgagagttcaaagccgaggttgataccataagcagggtacatcaccggaatttgctttctatggttggatactgcatttccgagaaccggagattgcttatttatgattatgtccctaacaacaacctttacttccatcttcacggaactccgggtctagactgggcaacacgtgttaaaattgctgctggtgcggctcgtggactagcttatctccatgaagattgtcaccctcgtatcatacatagggacatcaaatcatccaacattctcttagaaaataacttccatgccctggtttctgacttcggccttgcaaagctagctctcgactgtaacacacatattacaactcgggtcatgggaacattcggctacatggctccggaatatgcatcaagtggcaaattaaccgagaaatcagacgtattctcctttggggttgttctactggagttaatcactggacgtaagcctgtggatgcatcccaacctctgggagatgagagccttgttgaatgggctcgtcctttgcttagtaatgccactgaaaccgaagagtttacagctttagcagatcccaagctaggtagaaactatgttggtgttgaaatgtttagaatgattgaagcagcggcagcttgtattcgccattcagctacaaagagaccccgaatgagtcaaattgtgagagctttcgacagtctagctgaggaagacctcaccaatggaatgagactaggcgaaagcgaaataatcaactcagctcaacagtctgcagaaatcagattgtttagaagaatggcttttggcagccaaaactacagtacagattctttaactcgtaatagttatataagcaaagatgaaaacttgtaa

SEQ ID NO: 47907 - protein, 760 aa, Arabidopsis thaliana
  peptide (1)..(760): Ceres Seq. ID no. 13649520
MTTPAQAPREEVSLSPSLASPPLMALPPPQPSFPGDNATSPTREPTNGNPPETTNTPAQSSPPPETPLSSPPPEPSPPSPSLTGPPPTTIPVSPPPEPSPPPPLPTEAPPPANPVSSPPPESSPPPPPPTEAPPTTPITSPSPPTNPPPPPESPPSLPAPDPPSNPLPPPKLVPPSHSPPRHLPSPPASEIPPPPRHLPSPPASERPSTPPSDSEHPSPPPPGHPKRREQPPPPGSKRPTPSPPSPSDSKRPVHPSPPSPPEETLPPPKPSPDPLPSNSSSPPTLLPPSSVVSPPSPPRKSVSGPDNPSPNNPTPVTDNSSSSGISTAAVVGVSIGVALVLLTLIGVVVCCLKKRKKRLSTIGGGYVMPTPMESSSPRSDSALLKTQSSAPLVGNRSSNRTYLSQSEPGGFGQSRELFSYEELVIATNGFSDENLLGEGGFGRVYKGVLPDERVVAVKQLKIGGGQGDREFKAEVDTISRVHHRNLLSMVGYCISENRRLLIYDYVPNNNLYFHLHGTPGLDWATRVKIAAGAARGLAYLHEDCHPRIIHRDIKSSNILLENNFHALVSDFGLAKLALDCNTHITTRVMGTFGYMAPEYASSGKLTEKSDVFSFGVVLLELITGRKPVDASQPLGDESLVEWARPLLSNATETEEFTALADPKLGRNYVGVEMFRMIEAAAACIRHSATKRPRMSQIVRAFDSLAEEDLTNGMRLGESEIINSAQQSAEIRLFRRMAFGSQNYSTDSLTRNSYISKDENL

SEQ ID NO: 47908 - protein, 737 aa, Arabidopsis thaliana
  peptide (1)..(737): Ceres Seq. ID no. 13649521
MALPPPQPSFPGDNATSPTREPTNGNPPETTNTPAQSSPPPETPLSSPPPEPSPPSPSLTGPPPTTIPVSPPPEPSPPPPLPTEAPPPANPVSSPPPESSPPPPPPTEAPPTTPITSPSPPTNPPPPPESPPSLPAPDPPSNPLPPPKLVPPSHSPPRHLPSPPASEIPPPPRHLPSPPASERPSTPPSDSEHPSPPPPGHPKRREQPPPPGSKRPTPSPPSPSDSKRPVHPSPPSPPEETLPPPKPSPDPLPSNSSSPPTLLPPSSVVSPPSPPRKSVSGPDNPSPNNPTPVTDNSSSSGISTAAVVGVSIGVALVLLTLIGVVVCCLKKRKKRLSTIGGGYVMPTPMESSSPRSDSALLKTQSSAPLVGNRSSNRTYLSQSEPGGFGQSRELFSYEELVIATNGFSDENLLGEGGFGRVYKGVLPDERVVAVKQLKIGGGQGDREFKAEVDTISRVHHRNLLSMVGYCISENRRLLIYDYVPNNNLYFHLHGTPGLDWATRVKIAAGAARGLAYLHEDCHPRIIHRDIKSSNILLENNFHALVSDFGLAKLALDCNTHITTRVMGTFGYMAPEYASSGKLTEKSDVFSFGVVLLELITGRKPVDASQPLGDESLVEWARPLLSNATETEEFTALADPKLGRNYVGVEMFRMIEAAAACIRHSATKRPRMSQIVRAFDSLAEEDLTNGMRLGESEIINSAQQSAEIRLFRRMAFGSQNYSTDSLTRNSYISKDENL

SEQ ID NO: 47909 - protein, 393 aa, Arabidopsis thaliana
  peptide (1)..(393): Ceres Seq. ID no. 13649522
MPTPMESSSPRSDSALLKTQSSAPLVGNRSSNRTYLSQSEPGGFGQSRELFSYEELVIATNGFSDENLLGEGGFGRVYKGVLPDERVVAVKQLKIGGGQGDREFKAEVDTISRVHHRNLLSMVGYCISENRRLLIYDYVPNNNLYFHLHGTPGLDWATRVKIAAGAARGLAYLHEDCHPRIIHRDIKSSNILLENNFHALVSDFGLAKLALDCNTHITTRVMGTFGYMAPEYASSGKLTEKSDVFSFGVVLLELITGRKPVDASQPLGDESLVEWARPLLSNATETEEFTALADPKLGRNYVGVEMFRMIEAAAACIRHSATKRPRMSQIVRAFDSLAEEDLTNGMRLGESEIINSAQQSAEIRLFRRMAFGSQNYSTDSLTRNSYISKDENL

SEQ ID NO: 47910 - DNA, 1621 bp, Arabidopsis thaliana
  misc_feature (1)..(1621): Ceres Seq. ID no. 13649523
  misc_feature (1)..(1621): Ortholog of  Ceres SEQ ID NO 13587235 as cited in SEQ ID NO 0
aaaatcgcgtcaattctcaacccagttttcagatttggtttttggaagctaacttattgttggaggtggagagatatggctgactttgatgaatatatggctgatgagtatgacatggatgatctcgaggatgatatgaatgccgcgtttgatggaagagatatcgatgcttctgattccgaagtcgaagatttcgatcaattgaacaaggctgcagatacttctgctgctcaagcacggaatgggaaggatattcagggtataccgtgggatagtcttactcttactagaaaagattacagaaaaactaggctagaacaatataaaaactatgaaaatatacccaattctggtgatgaatctgccaagaaatgcatgaatactgagaaaggcagctctttctatgagttcagaaggaattctagatccgtgagatcaacgattctccattttcagttgaggaatttggtctgggctacctcaaaacacgatgtttatttattgtccaactactccatcagccactggtcttctttgacaggttgtaggagtgaaattcttaacgttaaaggtcatgtggctccgtctgagaaacatcccgagagtttgttggaaggatttacagagactcaagttagcactcttgcagtaaaagaaaggctactagttgctggtggattccaaggagaactcatttgcaagcatctcgatagacctggtgtgagcttctgctcacgcacaacttacaccgaaaacgctatcaccaatgcagtagatatatatagaaactccagcggcgcactgcatttcatggcctcaaataatgactgtggagtcagagactttgacatggagagatataagcttgtccaactcttccgttatctatggcccgtcaatcatagttccctaagtcctgatggaaaactagtagcagtcgttggagatgacccagatggtctactggtagacacaagtaacggacagacgatcgggacgctaaaaggtcacttagattattcatttgcatcagcttggcatccaaacggtgtaacatttgccacaggaaaccaagacaagacctgtcgtatttgggacacaaggaaactctcggaatcagtcgctgtcctaaaaggtaaccttggagccgtacggtccattaggttcacatctgacggacggtacgttgccatggccgagccagcagatttcgttcatatctatgacacaaaatcaggatacaaaaaggagcaagagattgatttctttggagagatttctgggatatcgtttagcccagatactgaatctctcttcatcggtgtttgggacaggacttatggaagtctcttggagtatggtcgaaccagagactacacttatctcgattcattactttgatggaaatttaagctaagcctaaagaaaaaaaacttacgtaaaaataatttgttatacgccgtcttggttaggtttcataatcatatcgacaaaagaaaagaaagagagaccatggttcgattcacaagctgttcatttatgtaatttgttgtaaaaattgtacattttccatgaacttgggaatttgtttttgggatcataagtcaaactcacattcttc

SEQ ID NO: 47911 - protein, 466 aa, Arabidopsis thaliana
  peptide (1)..(466): Ceres Seq. ID no. 13649524
KIASILNPVFRFGFWKLTYCWRWRDMADFDEYMADEYDMDDLEDDMNAAFDGRDIDASDSEVEDFDQLNKAADTSAAQARNGKDIQGIPWDSLTLTRKDYRKTRLEQYKNYENIPNSGDESAKKCMNTEKGSSFYEFRRNSRSVRSTILHFQLRNLVWATSKHDVYLLSNYSISHWSSLTGCRSEILNVKGHVAPSEKHPESLLEGFTETQVSTLAVKERLLVAGGFQGELICKHLDRPGVSFCSRTTYTENAITNAVDIYRNSSGALHFMASNNDCGVRDFDMERYKLVQLFRYLWPVNHSSLSPDGKLVAVVGDDPDGLLVDTSNGQTIGTLKGHLDYSFASAWHPNGVTFATGNQDKTCRIWDTRKLSESVAVLKGNLGAVRSIRFTSDGRYVAMAEPADFVHIYDTKSGYKKEQEIDFFGEISGISFSPDTESLFIGVWDRTYGSLLEYGRTRDYTYLDSLL

SEQ ID NO: 47912 - protein, 441 aa, Arabidopsis thaliana
  peptide (1)..(441): Ceres Seq. ID no. 13649525
MADFDEYMADEYDMDDLEDDMNAAFDGRDIDASDSEVEDFDQLNKAADTSAAQARNGKDIQGIPWDSLTLTRKDYRKTRLEQYKNYENIPNSGDESAKKCMNTEKGSSFYEFRRNSRSVRSTILHFQLRNLVWATSKHDVYLLSNYSISHWSSLTGCRSEILNVKGHVAPSEKHPESLLEGFTETQVSTLAVKERLLVAGGFQGELICKHLDRPGVSFCSRTTYTENAITNAVDIYRNSSGALHFMASNNDCGVRDFDMERYKLVQLFRYLWPVNHSSLSPDGKLVAVVGDDPDGLLVDTSNGQTIGTLKGHLDYSFASAWHPNGVTFATGNQDKTCRIWDTRKLSESVAVLKGNLGAVRSIRFTSDGRYVAMAEPADFVHIYDTKSGYKKEQEIDFFGEISGISFSPDTESLFIGVWDRTYGSLLEYGRTRDYTYLDSLL

SEQ ID NO: 47913 - protein, 434 aa, Arabidopsis thaliana
  peptide (1)..(434): Ceres Seq. ID no. 13649526
MADEYDMDDLEDDMNAAFDGRDIDASDSEVEDFDQLNKAADTSAAQARNGKDIQGIPWDSLTLTRKDYRKTRLEQYKNYENIPNSGDESAKKCMNTEKGSSFYEFRRNSRSVRSTILHFQLRNLVWATSKHDVYLLSNYSISHWSSLTGCRSEILNVKGHVAPSEKHPESLLEGFTETQVSTLAVKERLLVAGGFQGELICKHLDRPGVSFCSRTTYTENAITNAVDIYRNSSGALHFMASNNDCGVRDFDMERYKLVQLFRYLWPVNHSSLSPDGKLVAVVGDDPDGLLVDTSNGQTIGTLKGHLDYSFASAWHPNGVTFATGNQDKTCRIWDTRKLSESVAVLKGNLGAVRSIRFTSDGRYVAMAEPADFVHIYDTKSGYKKEQEIDFFGEISGISFSPDTESLFIGVWDRTYGSLLEYGRTRDYTYLDSLL

SEQ ID NO: 47914 - DNA, 997 bp, Arabidopsis thaliana
  misc_feature (1)..(997): Ceres Seq. ID no. 13648673
  misc_feature (1)..(997): Ortholog of  Ceres SEQ ID NO 13584023 as cited in SEQ ID NO 63516
ggggataagtttgagcggtggattttgtatggagccgccgagttcgagaccggaggaacctccgtcatgggaggacctttacaaaatcaatcttatgccatcggagctattccttaagttccgcaaagagcttcaaggccttcgcgtcggcgtcaatctcgagttatataacgaacccacgaatgattaccacgcaaagcttgttttgaagcctctatgtccagaaaggaagtggaagtttatatatgagccgctacaccaagaagttcgtgttttatcgaagaagattcctgtcaccagatttctaaacctccaggttggtgttggacataactttcaaatgaatgcaattggttggaaatggaagcttacttcatgtttgggtggagatggtgtgtctcggattcgaaataaaactactcttggtcttagtcctggtatcgatttccggtttggatggagagctgattttgtactcccagaggttactggggcccttggtactgaggaaccgttattcaacatgagctccgggcgtttagaggcatcactagacagagtagaggccattgtaacccattcagattatctatagccaatccgtacctttcgtgtgcaaacgaggacgagatcttgcattatcagaaggcaaacatgtgaaagcacaagcactttggtgttcacaaccaaaacataagaatgtccataagattttgcttcagagagatatgctgaaagcacaagcactagtgggtagtttcatcagttattatactatctggtaatcactagtttgatggacgttcatacaatgcatctaaagaaatgtataatcgttggatcgttgatacaagttaggttagataatgtatatgccaaatctagtatatggcatagcgttttctaaaataaaaccttggatttgcaggtttgtagatggttccgaaatgatcaaattgcaatgaaagtacaaatgtaaattagagatttgagagtg

SEQ ID NO: 47915 - protein, 197 aa, Arabidopsis thaliana
  peptide (1)..(197): Ceres Seq. ID no. 13648674
GISLSGGFCMEPPSSRPEEPPSWEDLYKINLMPSELFLKFRKELQGLRVGVNLELYNEPTNDYHAKLVLKPLCPERKWKFIYEPLHQEVRVLSKKIPVTRFLNLQVGVGHNFQMNAIGWKWKLTSCLGGDGVSRIRNKTTLGLSPGIDFRFGWRADFVLPEVTGALGTEEPLFNMSSGRLEASLDRVEAIVTHSDYL

SEQ ID NO: 47916 - protein, 188 aa, Arabidopsis thaliana
  peptide (1)..(188): Ceres Seq. ID no. 13648675
MEPPSSRPEEPPSWEDLYKINLMPSELFLKFRKELQGLRVGVNLELYNEPTNDYHAKLVLKPLCPERKWKFIYEPLHQEVRVLSKKIPVTRFLNLQVGVGHNFQMNAIGWKWKLTSCLGGDGVSRIRNKTTLGLSPGIDFRFGWRADFVLPEVTGALGTEEPLFNMSSGRLEASLDRVEAIVTHSDYL

SEQ ID NO: 47917 - protein, 166 aa, Arabidopsis thaliana
  peptide (1)..(166): Ceres Seq. ID no. 13648676
MPSELFLKFRKELQGLRVGVNLELYNEPTNDYHAKLVLKPLCPERKWKFIYEPLHQEVRVLSKKIPVTRFLNLQVGVGHNFQMNAIGWKWKLTSCLGGDGVSRIRNKTTLGLSPGIDFRFGWRADFVLPEVTGALGTEEPLFNMSSGRLEASLDRVEAIVTHSDYL

SEQ ID NO: 47918 - DNA, 1358 bp, Arabidopsis thaliana
  misc_feature (1)..(1358): Ceres Seq. ID no. 13648677
  misc_feature (1)..(1358): Ortholog of  Ceres SEQ ID NO 13596921 as cited in SEQ ID NO 62368
acaacagttgttgttgccattcatacgcgcttccatcaaccctttggtcttggaagccaaatcaaacctttccttcaatcctcaaattttcgaaaattttctcttttgctttacgttctctcaattcttatttgtaagaaagtttgttcctttaatcaatcaaatcaaagagacttttgaagattgtttcccaatttgcgtcaatcgggatcgagtcaaatctgaaatcttctccactcatcatctgactataagacttaatcaagggactttttgttcgggtttggttttaaacgtcttggattcgaagtggttaaggtatggatgaaaataatggaggttcaagctcacttccacctttccttactaaaacatatgaaatggttgatgattcttcttctgactcggtcgttgcttggagcgaaaacaacaaaagcttcatcgtcaagaatccagcagagttttcaagagaccttcttccgagattcttcaagcataagaatttctcaagtttcatccgtcagcttaatacatatggttttcgaaaagtagatcctgagaaatgggaattcttgaatgatgattttgttagaggtcgaccttaccttatgaagaacattcatagacgaaaaccggttcatagccactcgttagtgaatctacaagcgcaaaatcctttgacggaatcagaaagacggagcatggaggatcagatagaaagactgaaaaatgagaaagaaggccttcttgcggagttacagaaccaagagcaagaacggaaagagtttgagctgcaagtaacgacattgaaagatcggttacaacatatggaacaacatcagaaatcaatagtggcatatgtttcacaggttttgggaaaaccaggactttcactaaacctcgaaaaccatgagagaagaaaaagaagatttcaagagaactctcttcctccaagcagttcacacatagaacaggtcgaaaagttagaatcttcgctaacgttttgggagaatcttgtatcggaatcatgcgagaagagcggtttgcagtcatcaagcatggatcatgatgcagctgagtcaagtctaagtattggcgatacacgacccaaatcatcgaagattgatatgaactcagagccgcccgttaccgttactgcgcctgctccaaaaacaggcgttaacgatgacttttgggaacaatgtttgacagagaaccctggatcaaccgagcaacaagaagttcagtcagagagaagagatgtcggtaatgataataatggtaataagattggaaatcaaaggacgtattggtggaattcagggaatgtaaataacattacagagaaagcttcttga

SEQ ID NO: 47919 - protein, 345 aa, Arabidopsis thaliana
  peptide (1)..(345): Ceres Seq. ID no. 13648678
MDENNGGSSSLPPFLTKTYEMVDDSSSDSVVAWSENNKSFIVKNPAEFSRDLLPRFFKHKNFSSFIRQLNTYGFRKVDPEKWEFLNDDFVRGRPYLMKNIHRRKPVHSHSLVNLQAQNPLTESERRSMEDQIERLKNEKEGLLAELQNQEQERKEFELQVTTLKDRLQHMEQHQKSIVAYVSQVLGKPGLSLNLENHERRKRRFQENSLPPSSSHIEQVEKLESSLTFWENLVSESCEKSGLQSSSMDHDAAESSLSIGDTRPKSSKIDMNSEPPVTVTAPAPKTGVNDDFWEQCLTENPGSTEQQEVQSERRDVGNDNNGNKIGNQRTYWWNSGNVNNITEKAS

SEQ ID NO: 47920 - protein, 325 aa, Arabidopsis thaliana
  peptide (1)..(325): Ceres Seq. ID no. 13648679
MVDDSSSDSVVAWSENNKSFIVKNPAEFSRDLLPRFFKHKNFSSFIRQLNTYGFRKVDPEKWEFLNDDFVRGRPYLMKNIHRRKPVHSHSLVNLQAQNPLTESERRSMEDQIERLKNEKEGLLAELQNQEQERKEFELQVTTLKDRLQHMEQHQKSIVAYVSQVLGKPGLSLNLENHERRKRRFQENSLPPSSSHIEQVEKLESSLTFWENLVSESCEKSGLQSSSMDHDAAESSLSIGDTRPKSSKIDMNSEPPVTVTAPAPKTGVNDDFWEQCLTENPGSTEQQEVQSERRDVGNDNNGNKIGNQRTYWWNSGNVNNITEKAS

SEQ ID NO: 47921 - protein, 249 aa, Arabidopsis thaliana
  peptide (1)..(249): Ceres Seq. ID no. 13648680
MKNIHRRKPVHSHSLVNLQAQNPLTESERRSMEDQIERLKNEKEGLLAELQNQEQERKEFELQVTTLKDRLQHMEQHQKSIVAYVSQVLGKPGLSLNLENHERRKRRFQENSLPPSSSHIEQVEKLESSLTFWENLVSESCEKSGLQSSSMDHDAAESSLSIGDTRPKSSKIDMNSEPPVTVTAPAPKTGVNDDFWEQCLTENPGSTEQQEVQSERRDVGNDNNGNKIGNQRTYWWNSGNVNNITEKAS

SEQ ID NO: 47922 - DNA, 1379 bp, Arabidopsis thaliana; identical to SEQ ID NO: 46248
  misc_feature (1)..(1379): Ceres Seq. ID no. 13579157
  misc_feature (1)..(1379): Ortholog of  Ceres SEQ ID NO 13502943 as cited in SEQ ID NO 65097

SEQ ID NO: 47923 - protein, 413 aa, Arabidopsis thaliana; identical to SEQ ID NO: 46249
  peptide (1)..(413): Ceres Seq. ID no. 13579158

SEQ ID NO: 47924 - protein, 338 aa, Arabidopsis thaliana; identical to SEQ ID NO: 46250
  peptide (1)..(338): Ceres Seq. ID no. 13579159

SEQ ID NO: 47925 - protein, 311 aa, Arabidopsis thaliana; identical to SEQ ID NO: 46251
  peptide (1)..(311): Ceres Seq. ID no. 13579160

SEQ ID NO: 47926 - DNA, 822 bp, Arabidopsis thaliana
  misc_feature (1)..(822): Ceres Seq. ID no. 13648897
  misc_feature (1)..(822): Ortholog of  Ceres SEQ ID NO 13639514 as cited in SEQ ID NO 55736
  misc_feature (1)..(822): Ortholog of  Ceres SEQ ID NO 13595560 as cited in SEQ ID NO 56738
aaaatttaagctcccaatcaaaatctctcttagggttcttcttcttcaataaattgagtgactctttaattaccataaaaatccacagaaatggttagagaaggtgaagaagaagaagagatgatgatgatgatggcaacgaaacctgcatggcttgaaggtttaatggcggagactttcttctcaagctgtggaatccacgaaactcgccgtaaaagtgaaaagaacgttttttgcttactctgttatctcagtgtttgtcctcactgtctcccttctcatcgctctcatcctcttcttcaggtgagacgatacgtataccacgacgtcgttcggttgagtgatcttgagaagctcatagattgttcatatgttcagccatatacaattaatggagccaaagtgatattcttaaaccaaagaccacaatcacgagctaaggtttcttcaaatgtttgcttcacttgtgatagaatccttcaagaaccattccacttttgttccctctcttgcaaggtggattatttatcatatcaaggagatgatttatcaagcattctctatagaattgatgaatcagattttacgttcgagggtttgagaatggacggacatgatcagctcggagagatatcgacgatggaggatggggaggatatactggtaatttcagatgaatctgagcaaggtaacaatagtcataagaaagagaagaagaagagcaagaagaagaagccagagagcaattacttgcctgggatggttctttcatcacttggtaatagaagaaaaggtgctcctcatagggctcctttttcataa

SEQ ID NO: 47927 - protein, 243 aa, Arabidopsis thaliana
  peptide (1)..(243): Ceres Seq. ID no. 13648898
MVREGEEEEEMMMMMATKPAWLEGLMAETFFSSCGIHETRRKSEKNVFCLLCYLSVCPHCLPSHRSHPLLQVRRYVYHDVVRLSDLEKLIDCSYVQPYTINGAKVIFLNQRPQSRAKVSSNVCFTCDRILQEPFHFCSLSCKVDYLSYQGDDLSSILYRIDESDFTFEGLRMDGHDQLGEISTMEDGEDILVISDESEQGNNSHKKEKKKSKKKKPESNYLPGMVLSSLGNRRKGAPHRAPFS

SEQ ID NO: 47928 - protein, 233 aa, Arabidopsis thaliana
  peptide (1)..(233): Ceres Seq. ID no. 13648899
MMMMMATKPAWLEGLMAETFFSSCGIHETRRKSEKNVFCLLCYLSVCPHCLPSHRSHPLLQVRRYVYHDVVRLSDLEKLIDCSYVQPYTINGAKVIFLNQRPQSRAKVSSNVCFTCDRILQEPFHFCSLSCKVDYLSYQGDDLSSILYRIDESDFTFEGLRMDGHDQLGEISTMEDGEDILVISDESEQGNNSHKKEKKKSKKKKPESNYLPGMVLSSLGNRRKGAPHRAPFS

SEQ ID NO: 47929 - protein, 232 aa, Arabidopsis thaliana
  peptide (1)..(232): Ceres Seq. ID no. 13648900
MMMMATKPAWLEGLMAETFFSSCGIHETRRKSEKNVFCLLCYLSVCPHCLPSHRSHPLLQVRRYVYHDVVRLSDLEKLIDCSYVQPYTINGAKVIFLNQRPQSRAKVSSNVCFTCDRILQEPFHFCSLSCKVDYLSYQGDDLSSILYRIDESDFTFEGLRMDGHDQLGEISTMEDGEDILVISDESEQGNNSHKKEKKKSKKKKPESNYLPGMVLSSLGNRRKGAPHRAPFS

SEQ ID NO: 47930 - DNA, 1631 bp, Arabidopsis thaliana
  misc_feature (1)..(1631): Ceres Seq. ID no. 13648687
  misc_feature (1)..(1631): Ortholog of  Ceres SEQ ID NO 15177126 as cited in SEQ ID NO 59389
atgtccacacaaacaccttctctctcctctctctcacacacactcaagtgtcattttctcacatatacttcacacaaaagaaacaaccattcactacatactaccttgtcattgattttctctctccctctatatctctcaaaaatctttgcaaaatcttcttaacctcaaacaatataaacaacattctcaacaaaacccagaaatctcttcctcaaatcctcaatacccttttctattttcctccctatacccttaataaaaaaggatatctttctctttttatcttctttgtcctaattcaagaaaacaagaactagggttcatcatctgtggaaaccgactgaagaatctcttcaagaagaagttaaaggtctctttcatggagctgtttcctgctcagcccgatttatccttacaaataagtccaccaaacagtaaaccatcatcgacatggcagagaagaagatcaacaacagatcaagaagatcatgaagaactcgatttagggttttggagaagagctcttgattcaagaacatcttctctcgtctctaattccacctcaaaaacaatcaatcatccattccaagacctctcgctctctaacatctctcatcatcaacaacaacaacaacatcatcatccacaacttctccctaattgcaacagctctaacatcttgacctctttccaatttccgacacagcagcaacaacaacacttacaagggtttcttgctcacgaccttaatactcacttaagaccaataagaggaataccactttaccacaaccctcctccacatcatcatcctcaccgtccgccaccgccatgtttccctttcgacccgtcgtctctaataccctcttcctccacttcctcgccggctctaaccggaaacaacaatagctttaatactagtagcgttagtaaccctaattaccacaatcatcatcaccagactctaaacagagccagattcatgccaagattcccagctaaacgaagcatgagagctcctaggatgcgatggaccaccactcttcatgcccggttcgttcacgccgttgaattactcggtggccatgaaagagcaacacctaaatcagttcttgagctcatggatgtcaaagatctaaccttggctcatgttaagtcccatttacagatgtacagaacagtgaagacaaccgacaaagcagcagcttcgtcaggacaatctgatgtctatgaaaatggatcatcaggagataataactcagacgactggatgttcgatatgaatagaaaatcgagagatagcgaggaattgacgaatcctctagagaaatcaaatggtctatggaccaattcttccggagaagcacgtttgcatgggaagttaatcgataatgttgcagaaattatgctaccttctgagaaggaactagatggaaagtgctcaagttatgagagaatatcatcagaagagatgagctcatcaagcatctcgggaacaagccctttcaagccaaatcttgagtttactctgggtcgatctcactaaatttattgttgtagctaggtagtaattaattagtatcaattaacttatattttggctactgactagtttcgatattcatatc

SEQ ID NO: 47931 - protein, 388 aa, Arabidopsis thaliana
  peptide (1)..(388): Ceres Seq. ID no. 13648688
MELFPAQPDLSLQISPPNSKPSSTWQRRRSTTDQEDHEELDLGFWRRALDSRTSSLVSNSTSKTINHPFQDLSLSNISHHQQQQQHHHPQLLPNCNSSNILTSFQFPTQQQQQHLQGFLAHDLNTHLRPIRGIPLYHNPPPHHHPHRPPPPCFPFDPSSLIPSSSTSSPALTGNNNSFNTSSVSNPNYHNHHHQTLNRARFMPRFPAKRSMRAPRMRWTTTLHARFVHAVELLGGHERATPKSVLELMDVKDLTLAHVKSHLQMYRTVKTTDKAAASSGQSDVYENGSSGDNNSDDWMFDMNRKSRDSEELTNPLEKSNGLWTNSSGEARLHGKLIDNVAEIMLPSEKELDGKCSSYERISSEEMSSSSISGTSPFKPNLEFTLGRSH

SEQ ID NO: 47932 - DNA, 2398 bp, Arabidopsis thaliana
  misc_feature (1)..(2398): Ceres Seq. ID no. 13649543
  misc_feature (1)..(2398): Ortholog of  Ceres SEQ ID NO 13584744 as cited in SEQ ID NO 69137
atcatcatcatcatcatcattcataaccacttagccacagatgcgattttcttctccttcttcattgtgctcttcaacacttatgaacaagagcaccaccaccacgacaacgacgactacaaagaccaaagctttcgttttgtgtttctgattttgattcgattttgatgctcatcgaagagaacccttgattttgttgctgtagttcatagagattttacacattttgtggaatttagtggatttatgatgatgggtaggttagtttttgtaatctggctctataattgtctctgtttgctgctactctcgagcttggttgacgcggatcaggccaacatagattgcttaaggacctttaaatctcaagtagaggatccaaatagatatttatcgacttgggtttttggcaacgagactgctggttatatctgcaagttcagtggtgtgacttgttggcatgatgatgagaatagggttttgagtattaagctatctggttatggtcttagaggagtgtttcctcctgcggttaagctatgtgctgatctcactggtttagatctttctagaaacaacttctctggacctttaccagccaacattagcaccttgattccacttgttacgattctagacctctcctacaatagcttctctggtgaaatccctatgttgatctccaacattacctttttgaacactcttatgcttcagcataaccagttcacgggtactcttcctccccagctagcgcaacttggacggctcaaaacattctctgtgtctgacaatcgtctcgttggtcctatcccaaatttcaaccaaaccttgcagtttaagcaggaattgtttgctaataacctggatctgtgtggtaagcctctagatgactgtaagagtgcttctagctctcgtggtaaagttgttattatagcggcagttggtggactgactgcagcagcattagtcgttggggttgttttgttcttctatttccgtaaattgggtgctgttcggaagaagcaggatgatcctgaaggaaacagatgggcaaagagcttgaaaggacagaaaggtgttaaggttttcatgtttaagaaatcggtttcaaagatgaaattaagcgatcttatgaaggcaacagaggaattcaagaaagataatatcattgcaacaggaagaacaggaactatgtacaaaggtaggcttgaagacgggtctctacttatgataaagaggttgcaggattctcaacgctctgagaaagagtttgatgcagagatgaagactttgggctctgttaaaaacagaaacttagtccctctcttgggctattgtgttgccaataaggagaggcttctaatgtatgagtacatggcaaacggttacctttatgatcagttacatcctgcagatgaagaatccttcaagcccttggattggccttcaaggctgaaaatcgcgattgggacggcaaaaggattggcatggcttcatcatagctgcaacccgagaatcatccatcgcaacataagctcgaaatgcatattgttgactgcagagtttgagccaaagatctcggatttcggtctagctaggctgatgaacccaattgatacccatttaagcacattcgtcaatggagaatttggggatttcggttatgttgctcccgagtattcaagaaccatggttgcaactccaaaaggagatgtctacagcttcggtgttgtgcttctagagctagtaacgggccaaaaagcaacgagtgtaacaaaagtatctgaagaaaaagctgaggaagaaaacttcaagggtaacctcgtggaatggattacaaagctatcaagtgaatcaaaactgcaggaagcaatcgacaggtccttacttgggaacggtgtggatgatgaaatcttcaaagtactcaaagtagcatgcaactgcgttctaccggaaatagcaaagcagaggccaaccatgtttgaagtttatcagcttctaagagccattggagagagctacaacttcaccgccgatgatgatatcttaatcccatctgaatcaggtgaaggcgatttcattgaagagctcatagttgctcgttgatcaagaggaagggtaagaattgtgaaacaaacatctctagtcgtagcagtccaaagatatatataatgtataagtattgtttttattttatttttgggttctcgtcgtcgatggtgtgttgtaatatgatatattgttagatgcactctcttattactatgtactaagctttgggtgtgtggtacagtcactgttttggttttgccactacgtctttgctgccttatattttgcagcactaatttggttgaggagaatacagtcatcacgtgggatatctttgaagact

SEQ ID NO: 47933 - protein, 620 aa, Arabidopsis thaliana
  peptide (1)..(620): Ceres Seq. ID no. 13649544
MMMGRLVFVIWLYNCLCLLLLSSLVDADQANIDCLRTFKSQVEDPNRYLSTWVFGNETAGYICKFSGVTCWHDDENRVLSIKLSGYGLRGVFPPAVKLCADLTGLDLSRNNFSGPLPANISTLIPLVTILDLSYNSFSGEIPMLISNITFLNTLMLQHNQFTGTLPPQLAQLGRLKTFSVSDNRLVGPIPNFNQTLQFKQELFANNLDLCGKPLDDCKSASSSRGKVVIIAAVGGLTAAALVVGVVLFFYFRKLGAVRKKQDDPEGNRWAKSLKGQKGVKVFMFKKSVSKMKLSDLMKATEEFKKDNIIATGRTGTMYKGRLEDGSLLMIKRLQDSQRSEKEFDAEMKTLGSVKNRNLVPLLGYCVANKERLLMYEYMANGYLYDQLHPADEESFKPLDWPSRLKIAIGTAKGLAWLHHSCNPRIIHRNISSKCILLTAEFEPKISDFGLARLMNPIDTHLSTFVNGEFGDFGYVAPEYSRTMVATPKGDVYSFGVVLLELVTGQKATSVTKVSEEKAEEENFKGNLVEWITKLSSESKLQEAIDRSLLGNGVDDEIFKVLKVACNCVLPEIAKQRPTMFEVYQLLRAIGESYNFTADDDILIPSESGEGDFIEELIVAR

SEQ ID NO: 47934 - protein, 619 aa, Arabidopsis thaliana
  peptide (1)..(619): Ceres Seq. ID no. 13649545
MMGRLVFVIWLYNCLCLLLLSSLVDADQANIDCLRTFKSQVEDPNRYLSTWVFGNETAGYICKFSGVTCWHDDENRVLSIKLSGYGLRGVFPPAVKLCADLTGLDLSRNNFSGPLPANISTLIPLVTILDLSYNSFSGEIPMLISNITFLNTLMLQHNQFTGTLPPQLAQLGRLKTFSVSDNRLVGPIPNFNQTLQFKQELFANNLDLCGKPLDDCKSASSSRGKVVIIAAVGGLTAAALVVGVVLFFYFRKLGAVRKKQDDPEGNRWAKSLKGQKGVKVFMFKKSVSKMKLSDLMKATEEFKKDNIIATGRTGTMYKGRLEDGSLLMIKRLQDSQRSEKEFDAEMKTLGSVKNRNLVPLLGYCVANKERLLMYEYMANGYLYDQLHPADEESFKPLDWPSRLKIAIGTAKGLAWLHHSCNPRIIHRNISSKCILLTAEFEPKISDFGLARLMNPIDTHLSTFVNGEFGDFGYVAPEYSRTMVATPKGDVYSFGVVLLELVTGQKATSVTKVSEEKAEEENFKGNLVEWITKLSSESKLQEAIDRSLLGNGVDDEIFKVLKVACNCVLPEIAKQRPTMFEVYQLLRAIGESYNFTADDDILIPSESGEGDFIEELIVAR

SEQ ID NO: 47935 - protein, 618 aa, Arabidopsis thaliana
  peptide (1)..(618): Ceres Seq. ID no. 13649546
MGRLVFVIWLYNCLCLLLLSSLVDADQANIDCLRTFKSQVEDPNRYLSTWVFGNETAGYICKFSGVTCWHDDENRVLSIKLSGYGLRGVFPPAVKLCADLTGLDLSRNNFSGPLPANISTLIPLVTILDLSYNSFSGEIPMLISNITFLNTLMLQHNQFTGTLPPQLAQLGRLKTFSVSDNRLVGPIPNFNQTLQFKQELFANNLDLCGKPLDDCKSASSSRGKVVIIAAVGGLTAAALVVGVVLFFYFRKLGAVRKKQDDPEGNRWAKSLKGQKGVKVFMFKKSVSKMKLSDLMKATEEFKKDNIIATGRTGTMYKGRLEDGSLLMIKRLQDSQRSEKEFDAEMKTLGSVKNRNLVPLLGYCVANKERLLMYEYMANGYLYDQLHPADEESFKPLDWPSRLKIAIGTAKGLAWLHHSCNPRIIHRNISSKCILLTAEFEPKISDFGLARLMNPIDTHLSTFVNGEFGDFGYVAPEYSRTMVATPKGDVYSFGVVLLELVTGQKATSVTKVSEEKAEEENFKGNLVEWITKLSSESKLQEAIDRSLLGNGVDDEIFKVLKVACNCVLPEIAKQRPTMFEVYQLLRAIGESYNFTADDDILIPSESGEGDFIEELIVAR

SEQ ID NO: 47936 - DNA, 1285 bp, Arabidopsis thaliana
  misc_feature (1)..(1285): Ceres Seq. ID no. 12666374
  misc_feature (1)..(1285): Ortholog of  Ceres SEQ ID NO 13598416 as cited in SEQ ID NO 63371
  misc_feature (1)..(1285): Ortholog of  Ceres SEQ ID NO 13584271 as cited in SEQ ID NO 63893
atcgcaaatgttaaactattatacacatataaatttctgtatatacaaaacaaacgaagaagacgaatctctcagtttcgtcgttcgtttcgaagttgtgcgttggtgaaatttgaaatctgaatacactcattgcaaaccttagaagaagaagaagaagaagaagaagaagcttccatagattccgttgggcttttactgtgtttgattgatcggatcgattgcgattacggagaagatatggctcaggctgtagaagaatggtataaacagatgccgattatcactcgctcttatctcacggcggctgttatcaccaccgtcggatgttccctcgatatcatatctccatataacctttatttgaatccgacacttgtggtgaagcaataccaatattggcgtctcgttactaatttcttgtatttccggaagatggatttggacttcatgttccatatgttctttctcgcacgatactgcaaactccttgaagaaaactcattcaggggaaagactgctgatttcctatacatgctcctatttggagcatctgttttaaccggtattgtacttatcggtggaatgataccatacttgtcagcatcatttgctaaaatcatcttcctcagcaactcattaactttcatgatggtctatgtatggagcaaacaaaatccttatattcacatgagtttccttggtctgttcaccttcacagcagcttacctaccatgggtgcttcttggcttctctatccttgttggtgccagtgcttgggtggatcttttgggtatgatagcaggtcacgcttactactttctggctgaggtttatccgcgaatgactaatcgtcgtccattaaagactccatcattcctcaaagcgttatttgcagatgaaccagttgtggttgcacggccagaagatgtgaggtttgctgctgcgcctttcgatgaaatccaccaagactgattctgtcatcttacatttcccaaacctaaacacccgaatcagtagtttggcttgtggatcagatataaatggtgcaaaggcagatgatacacaaaagtctattttgactctgacacgtagttgcgacccacacaccctagtttctagtagttgggtgtgttttggttccttctctttcctcccatctcttcatctttttgtgtatacaaacatcgtttgcttttagtggttattgatatgaacacactcaatttgtacacaacctctactagtgtcgcaatgttttagcgagggaacatgttttgaattc

SEQ ID NO: 47937 - protein, 244 aa, Arabidopsis thaliana
  peptide (1)..(244): Ceres Seq. ID no. 12666375
MAQAVEEWYKQMPIITRSYLTAAVITTVGCSLDIISPYNLYLNPTLVVKQYQYWRLVTNFLYFRKMDLDFMFHMFFLARYCKLLEENSFRGKTADFLYMLLFGASVLTGIVLIGGMIPYLSASFAKIIFLSNSLTFMMVYVWSKQNPYIHMSFLGLFTFTAAYLPWVLLGFSILVGASAWVDLLGMIAGHAYYFLAEVYPRMTNRRPLKTPSFLKALFADEPVVVARPEDVRFAAAPFDEIHQD

SEQ ID NO: 47938 - protein, 233 aa, Arabidopsis thaliana
  peptide (1)..(233): Ceres Seq. ID no. 12666376
MPIITRSYLTAAVITTVGCSLDIISPYNLYLNPTLVVKQYQYWRLVTNFLYFRKMDLDFMFHMFFLARYCKLLEENSFRGKTADFLYMLLFGASVLTGIVLIGGMIPYLSASFAKIIFLSNSLTFMMVYVWSKQNPYIHMSFLGLFTFTAAYLPWVLLGFSILVGASAWVDLLGMIAGHAYYFLAEVYPRMTNRRPLKTPSFLKALFADEPVVVARPEDVRFAAAPFDEIHQD

SEQ ID NO: 47939 - protein, 179 aa, Arabidopsis thaliana
  peptide (1)..(179): Ceres Seq. ID no. 12666377
MDLDFMFHMFFLARYCKLLEENSFRGKTADFLYMLLFGASVLTGIVLIGGMIPYLSASFAKIIFLSNSLTFMMVYVWSKQNPYIHMSFLGLFTFTAAYLPWVLLGFSILVGASAWVDLLGMIAGHAYYFLAEVYPRMTNRRPLKTPSFLKALFADEPVVVARPEDVRFAAAPFDEIHQD

SEQ ID NO: 47940 - DNA, 1330 bp, Arabidopsis thaliana
  misc_feature (1)..(1330): Ceres Seq. ID no. 13648763
  misc_feature (1)..(1330): Ortholog of  Ceres SEQ ID NO 14308615 as cited in SEQ ID NO 58538
  misc_feature (1)..(1330): Ortholog of  Ceres SEQ ID NO 13585342 as cited in SEQ ID NO 63601
agctctcaaacaaagatattgctactgcctcaccaaattttcctccggaaagagagtgagaaaatttccaagagaaagaggagagagaatggctggagaagaaatagagagggagaagaaatctgcagcatctgcaagaactcacaccagaaacaacactcaacaaagttcttcttctggttatctgaaaacgcttctcctggtaacgttcgtcggagttttagcatgggtttatcaaacaatccaaccaccacccgccaaaatcgtcggctctcccggtggacccaccgtgacatcaccgaggatcaaactgagagacggaagacatctggcttacacagaattcggaatccctagagacgaagccaagttcaagatcataaacatccacggcttcgattcttgtatgcgagactcgcatttcgccaatttcttatcgccggctcttgtggaggaattgaggatatacattgtgtcttttgatcgtcctggttatggagagagtgatcctaacctgaatgggtcaccaagaagcatagcattggatatagaagagcttgctgatgggttaggactaggacctcagttctatctctttggttactccatgggtggtgaaattacatgggcatgccttaactacattcctcacaggttagcaggagctgcccttgtagctccagcgattaactattggtggagaaacttaccgggagatttaacaagagaagctttctctcttatgcatcctgcagatcaatggtcacttcgagtagctcattatgctccttggcttacatattggtggaacactcagaaatggttcccaatctccaatgtgattgccggtaatcccattattttctcacgtcaggacatggagatcttgtcgaagctcggattcgtcaatccaaatcgggcatacataagacaacaaggtgaatatgtaagcttacaccgagatttgaatgtcgcattttcaagctgggagtttgatccgttagaccttcaagatccgttcccgaacaacaatggctcagttcacgtatggaatggcgatgaggataagtttgtgccagtaaagcttcaacggtatgtcgcgtcaaagctgccatggattcgttaccatgaaatatctggatcaggacattttgtaccatttgtggaaggtatgactgataagatcatcaagtcacttttggttggggaagaagatgtaagtgagagtagagaagcctctgtttaagtcaatgtggtttttaagaataattaattgcttgcaatgctaaactagttatgatcaacaatcaaatcaaagcaactttagtcg

SEQ ID NO: 47941 - protein, 414 aa, Arabidopsis thaliana
  peptide (1)..(414): Ceres Seq. ID no. 13648764
ALKQRYCYCLTKFSSGKRVRKFPRERGERMAGEEIEREKKSAASARTHTRNNTQQSSSSGYLKTLLLVTFVGVLAWVYQTIQPPPAKIVGSPGGPTVTSPRIKLRDGRHLAYTEFGIPRDEAKFKIINIHGFDSCMRDSHFANFLSPALVEELRIYIVSFDRPGYGESDPNLNGSPRSIALDIEELADGLGLGPQFYLFGYSMGGEITWACLNYIPHRLAGAALVAPAINYWWRNLPGDLTREAFSLMHPADQWSLRVAHYAPWLTYWWNTQKWFPISNVIAGNPIIFSRQDMEILSKLGFVNPNRAYIRQQGEYVSLHRDLNVAFSSWEFDPLDLQDPFPNNNGSVHVWNGDEDKFVPVKLQRYVASKLPWIRYHEISGSGHFVPFVEGMTDKIIKSLLVGEEDVSESREASV

SEQ ID NO: 47942 - protein, 385 aa, Arabidopsis thaliana
  peptide (1)..(385): Ceres Seq. ID no. 13648765
MAGEEIEREKKSAASARTHTRNNTQQSSSSGYLKTLLLVTFVGVLAWVYQTIQPPPAKIVGSPGGPTVTSPRIKLRDGRHLAYTEFGIPRDEAKFKIINIHGFDSCMRDSHFANFLSPALVEELRIYIVSFDRPGYGESDPNLNGSPRSIALDIEELADGLGLGPQFYLFGYSMGGEITWACLNYIPHRLAGAALVAPAINYWWRNLPGDLTREAFSLMHPADQWSLRVAHYAPWLTYWWNTQKWFPISNVIAGNPIIFSRQDMEILSKLGFVNPNRAYIRQQGEYVSLHRDLNVAFSSWEFDPLDLQDPFPNNNGSVHVWNGDEDKFVPVKLQRYVASKLPWIRYHEISGSGHFVPFVEGMTDKIIKSLLVGEEDVSESREASV

SEQ ID NO: 47943 - protein, 279 aa, Arabidopsis thaliana
  peptide (1)..(279): Ceres Seq. ID no. 13648766
MRDSHFANFLSPALVEELRIYIVSFDRPGYGESDPNLNGSPRSIALDIEELADGLGLGPQFYLFGYSMGGEITWACLNYIPHRLAGAALVAPAINYWWRNLPGDLTREAFSLMHPADQWSLRVAHYAPWLTYWWNTQKWFPISNVIAGNPIIFSRQDMEILSKLGFVNPNRAYIRQQGEYVSLHRDLNVAFSSWEFDPLDLQDPFPNNNGSVHVWNGDEDKFVPVKLQRYVASKLPWIRYHEISGSGHFVPFVEGMTDKIIKSLLVGEEDVSESREASV

SEQ ID NO: 47944 - DNA, 2765 bp, Arabidopsis thaliana; identical to SEQ ID NO: 46527
  misc_feature (1)..(2765): Ceres Seq. ID no. 13579248
  misc_feature (1)..(2765): Ortholog of  Ceres SEQ ID NO 13590241 as cited in SEQ ID NO 63878
  misc_feature (1)..(2765): Ortholog of  Ceres SEQ ID NO 13660597 as cited in SEQ ID NO 67655
  misc_feature (1)..(2765): Ortholog of  Ceres SEQ ID NO 15179308 as cited in SEQ ID NO 0

SEQ ID NO: 47945 - protein, 829 aa, Arabidopsis thaliana; identical to SEQ ID NO: 46528
  peptide (1)..(829): Ceres Seq. ID no. 13579249

SEQ ID NO: 47946 - protein, 712 aa, Arabidopsis thaliana; identical to SEQ ID NO: 46529
  peptide (1)..(712): Ceres Seq. ID no. 13579250

SEQ ID NO: 47947 - protein, 658 aa, Arabidopsis thaliana; identical to SEQ ID NO: 46530
  peptide (1)..(658): Ceres Seq. ID no. 13579251

SEQ ID NO: 47948 - DNA, 2063 bp, Arabidopsis thaliana
  misc_feature (1)..(2063): Ceres Seq. ID no. 13648772
  misc_feature (1)..(2063): Ortholog of  Ceres SEQ ID NO 14308095 as cited in SEQ ID NO 55286
cttcttcttcctattaactacttcttccttttttctctcttatctttctcttactctcttccctatccgtgaaagatttcatacttgtttatatgcatatatccgtgtgcatatgtgtttgtggttatagagattggagatatacgtatttcagtttgtttgcacatctttctatgaataattaatttgcatgggaaaattattattgttgtatattatagctcaaaaacactttttctcagccttttcatgttattaatcattaattatatttgagaaactaatggagatattagaagaaagtcatgatttgtatttaccctttgttcttggtgttcatctattttcgttttccacgagatcctatatacatagttctatagaatatctaataaggaaaatctaatgttcatgtttcatttttctgtttaattagtgcttaaaattgcaaagcatcgtgcgaactaaccatatgttttaattagcttattatataacttatgtatcaattatggtctatacataattaatatacatgtacattgggtttcaattaagctctaattaactctttaaaattcaaatttttagggttttcaagaaatgatgaacgttaaaccaatggagcagatcatgattcctaataacaacacacatcaaccaaacaccacatccaatgcaaggccaaacaccattctcacatctaacggcgtctcaactgctggagcaaccgtctccggcgtaagcaacaacaataacaatacggcggttgtggcggagaggaaagcaagaccacaagagaaactaaattgtccaagatgcaactcaaccaacacaaagttttgttactacaacaactatagtctcacacaaccaagatacttctgcaaaggttgtcgaaggtattggaccgaaggtggatctcttaggaatgttcctgtgggaggaagctcaagaaagaacaagagatcatcttcatcttcttcatcaaacatccttcagacaataccatcttcacttccagatctaaacccgccaatactcttctcaaaccaaatccataataaatcgaaagggtcatcacaagatctcaacttgttgtctttcccagtcatgcaagatcaacatcatcatcatgtccatatgtctcagtttcttcagatgcctaagatggagggaaatggtaacataactcatcagcagcagccttcatcatcttcttctgtctatggttcctcgtcgtctcctgtttcagctcttgaacttttaagaaccggagttaatgtttcttcaagatcagggattaactcatcgttcatgccttccggttcaatgatggattcaaacactgtgctttacacttcttcagggtttccaacaatggtggattacaagccaagtaatctctccttctctaccgatcatcaagggcttggacacaatagcaacaataggtctgaagctcttcatagtgatcatcaccaacaaggtagagttttgtttccatttggggatcaaatgaaggagctttcatcaagcataacacaagaagttgatcatgatgataatcaacaacagaagagtcatggaaataataataataataataactcaagccctaataatggatattggagtgggatgttcagtactacaggaggaggatcttcatggtgaagcaaaatgatcaaaaggagattatgaaattagctttctaattctctttttatgatctcttgcctcacatgggttactttagttaaagttgtcagaacttagctaacacaacatagtctttttattcttcctttccttttttttttttttttttttttttgttaaaatcaatatttattttctaaatgttttgtagtttggtttgatgataatttgggttggtttttcattttggtttgttgattaattagtatataaatcacggcgttatgtatgggtagaagaatatgtgaatacgaatctctcgagtgtttcatatatggtatatggtatgcactatgtaactatgtattcatcgcttcttctatctgtataagtgttttcat

SEQ ID NO: 47949 - protein, 357 aa, Arabidopsis thaliana
  peptide (1)..(357): Ceres Seq. ID no. 13648773
MMNVKPMEQIMIPNNNTHQPNTTSNARPNTILTSNGVSTAGATVSGVSNNNNNTAVVAERKARPQEKLNCPRCNSTNTKFCYYNNYSLTQPRYFCKGCRRYWTEGGSLRNVPVGGSSRKNKRSSSSSSSNILQTIPSSLPDLNPPILFSNQIHNKSKGSSQDLNLLSFPVMQDQHHHHVHMSQFLQMPKMEGNGNITHQQQPSSSSSVYGSSSSPVSALELLRTGVNVSSRSGINSSFMPSGSMMDSNTVLYTSSGFPTMVDYKPSNLSFSTDHQGLGHNSNNRSEALHSDHHQQGRVLFPFGDQMKELSSSITQEVDHDDNQQQKSHGNNNNNNNSSPNNGYWSGMFSTTGGGSSW

SEQ ID NO: 47950 - protein, 356 aa, Arabidopsis thaliana
  peptide (1)..(356): Ceres Seq. ID no. 13648774
MNVKPMEQIMIPNNNTHQPNTTSNARPNTILTSNGVSTAGATVSGVSNNNNNTAVVAERKARPQEKLNCPRCNSTNTKFCYYNNYSLTQPRYFCKGCRRYWTEGGSLRNVPVGGSSRKNKRSSSSSSSNILQTIPSSLPDLNPPILFSNQIHNKSKGSSQDLNLLSFPVMQDQHHHHVHMSQFLQMPKMEGNGNITHQQQPSSSSSVYGSSSSPVSALELLRTGVNVSSRSGINSSFMPSGSMMDSNTVLYTSSGFPTMVDYKPSNLSFSTDHQGLGHNSNNRSEALHSDHHQQGRVLFPFGDQMKELSSSITQEVDHDDNQQQKSHGNNNNNNNSSPNNGYWSGMFSTTGGGSSW

SEQ ID NO: 47951 - protein, 351 aa, Arabidopsis thaliana
  peptide (1)..(351): Ceres Seq. ID no. 13648775
MEQIMIPNNNTHQPNTTSNARPNTILTSNGVSTAGATVSGVSNNNNNTAVVAERKARPQEKLNCPRCNSTNTKFCYYNNYSLTQPRYFCKGCRRYWTEGGSLRNVPVGGSSRKNKRSSSSSSSNILQTIPSSLPDLNPPILFSNQIHNKSKGSSQDLNLLSFPVMQDQHHHHVHMSQFLQMPKMEGNGNITHQQQPSSSSSVYGSSSSPVSALELLRTGVNVSSRSGINSSFMPSGSMMDSNTVLYTSSGFPTMVDYKPSNLSFSTDHQGLGHNSNNRSEALHSDHHQQGRVLFPFGDQMKELSSSITQEVDHDDNQQQKSHGNNNNNNNSSPNNGYWSGMFSTTGGGSSW

SEQ ID NO: 47952 - DNA, 2417 bp, Arabidopsis thaliana
  misc_feature (1)..(2417): Ceres Seq. ID no. 12658953
  misc_feature (1)..(2417): Ortholog of  Ceres SEQ ID NO 14311511 as cited in SEQ ID NO 51444
  misc_feature (1)..(2417): Ortholog of  Ceres SEQ ID NO 13654854 as cited in SEQ ID NO 62466
  misc_feature (1)..(2417): Ortholog of  Ceres SEQ ID NO 13565116 as cited in SEQ ID NO 0
aataaagctttcatttttcaatctcatcagagagaaattaagctatggcgaagaagattggagtaacgatggaagttgggaacgatggtgttgctgtcatcaccatttctaaccctcctgttaactctttagccagtccaattatttctgggttgaaggagaagtttcgtgacgccaatcaaaggaatgatgttaaggccatcgtgttgatcgggaacaatggaagattttcgggtggttttgatatcaatgtctttcagcaagttcataagactggggatttatcgcttatgcctgaagtatctgttgagcttgtgtgtaacctgatggaagactccaggaagccggttgttgctgcagttgaaggattagctcttggtggtggtttggaacttgcaatggcgtgtcatgccagagttgctgctccgaaagctcaattaggcttaccagaactgactcttggagtgattcctggttttggaggaacccaacgtcttccaaggttagtaggccttgcaaaagcaacggatatgatactgctttctaagtcaatatcctcagaagaggggcacaaactgggtctcattgatgccttggtgccacctggagatgtgttgagcacatccagaaagtgggctctagacattgcagagggacgtaaaccctttctgcagtcactgcacagaaccgacaaaattggttctttatctgaagctcgtgctatattgaagaattcaagacagctagccaagaagattgccccaaatatgcctcagcaccatgcttgcattgaggtgattgaagaaggaatcatccatggaggatacagtggggttctcaaggaagcagaagttttcaagcaactagtactgtcagacactgcaaagggtcttgttcatgttttctttgcacaacgtgcaacatcaaaagtgcctaatgtaactgacgttggattgaaaccaaggccgataaaaaaagttgcagttattggtggcggtctgatgggttcaggcatcgctacggctctacttctaagcaatataagagttgtgctcaaagaaataaactcagaattccttatgaagggaataaaatcagttgaagcaaatatgaaaagcttggtatctagggggaaactgacacaagataaagcaggaaaggccctctctttgttcaagggagtacttgattacacagaattcaatgatgtggacatggtcatagaggcagtgattgaaaacattcaattgaaacaaaacatattcaaagaaatcgaaaaggtttgttcaccccactgcattttggcgagtaatacatctactatcgacctcgatgtaattggtgaaaagactaactcaaaagatcgcattgttggcgcacatttcttcagtccggcccatctgatgccccttctcgagattgttcgttcaaagaatacttctgctcaggtgattctggatctcatggcggttggaaaggccataaagaaagttcccgtggtggttggaaactgcataggctttgcagtgaataggacattctttccttattcacaagctgcacatatgttggccaatctaggtgttgacttgttcagaattgacagcgttattacctctttcggcttgccattgggccctttccagcttggtgatttggctggacacgggattggattagcagttgggccgatatatgccaaggtctatggtgaccgcatgttcagatctccaatgacagagcttcttcttaagagcgggcgaaatggaaaaatcaacggaagaggatactatatatacgaaaagggaagcaaaccaaaacctgatccatcagtgctttcaattgttgagaaatcaaggaaactgaccaatatcatgcctggtgggaagcctatatcagtaactgataaagaaattgtagagatgatcttattccctgttgtcaacgaggcatgccgcgtcctagatgaaggagttgtgatccgagcctcagacttggacattgcgtctgtccttggaatgagttttccttcttaccggggaggaattgttttctgggcagacactgttggaccaaagtacatatatgagaggctcaagaaattgtcggagacttatggcagctttttcaaaccatcgaggtatctggaggaaagagcaatgaatggaatgcttttgagtgaatcgaaatcgtcgaggtccaaattgtgaagcgtttaattaagtatatgcagaaggagaggctgaaggtgttagtcactaaatgaaaataaatcagtctctcttgttgtttcaaagttcaaagttaaaatgctattaaggtgtggttgttgttaacactcttaaaataaacaattttctgctcttaataaatgtttgtagtgacgtcagtttcataaagttatgatttgttctagc

SEQ ID NO: 47953 - protein, 721 aa, Arabidopsis thaliana
  peptide (1)..(721): Ceres Seq. ID no. 12658954
MAKKIGVTMEVGNDGVAVITISNPPVNSLASPIISGLKEKFRDANQRNDVKAIVLIGNNGRFSGGFDINVFQQVHKTGDLSLMPEVSVELVCNLMEDSRKPVVAAVEGLALGGGLELAMACHARVAAPKAQLGLPELTLGVIPGFGGTQRLPRLVGLAKATDMILLSKSISSEEGHKLGLIDALVPPGDVLSTSRKWALDIAEGRKPFLQSLHRTDKIGSLSEARAILKNSRQLAKKIAPNMPQHHACIEVIEEGIIHGGYSGVLKEAEVFKQLVLSDTAKGLVHVFFAQRATSKVPNVTDVGLKPRPIKKVAVIGGGLMGSGIATALLLSNIRVVLKEINSEFLMKGIKSVEANMKSLVSRGKLTQDKAGKALSLFKGVLDYTEFNDVDMVIEAVIENIQLKQNIFKEIEKVCSPHCILASNTSTIDLDVIGEKTNSKDRIVGAHFFSPAHLMPLLEIVRSKNTSAQVILDLMAVGKAIKKVPVVVGNCIGFAVNRTFFPYSQAAHMLANLGVDLFRIDSVITSFGLPLGPFQLGDLAGHGIGLAVGPIYAKVYGDRMFRSPMTELLLKSGRNGKINGRGYYIYEKGSKPKPDPSVLSIVEKSRKLTNIMPGGKPISVTDKEIVEMILFPVVNEACRVLDEGVVIRASDLDIASVLGMSFPSYRGGIVFWADTVGPKYIYERLKKLSETYGSFFKPSRYLEERAMNGMLLSESKSSRSKL

SEQ ID NO: 47954 - protein, 713 aa, Arabidopsis thaliana
  peptide (1)..(713): Ceres Seq. ID no. 12658955
MEVGNDGVAVITISNPPVNSLASPIISGLKEKFRDANQRNDVKAIVLIGNNGRFSGGFDINVFQQVHKTGDLSLMPEVSVELVCNLMEDSRKPVVAAVEGLALGGGLELAMACHARVAAPKAQLGLPELTLGVIPGFGGTQRLPRLVGLAKATDMILLSKSISSEEGHKLGLIDALVPPGDVLSTSRKWALDIAEGRKPFLQSLHRTDKIGSLSEARAILKNSRQLAKKIAPNMPQHHACIEVIEEGIIHGGYSGVLKEAEVFKQLVLSDTAKGLVHVFFAQRATSKVPNVTDVGLKPRPIKKVAVIGGGLMGSGIATALLLSNIRVVLKEINSEFLMKGIKSVEANMKSLVSRGKLTQDKAGKALSLFKGVLDYTEFNDVDMVIEAVIENIQLKQNIFKEIEKVCSPHCILASNTSTIDLDVIGEKTNSKDRIVGAHFFSPAHLMPLLEIVRSKNTSAQVILDLMAVGKAIKKVPVVVGNCIGFAVNRTFFPYSQAAHMLANLGVDLFRIDSVITSFGLPLGPFQLGDLAGHGIGLAVGPIYAKVYGDRMFRSPMTELLLKSGRNGKINGRGYYIYEKGSKPKPDPSVLSIVEKSRKLTNIMPGGKPISVTDKEIVEMILFPVVNEACRVLDEGVVIRASDLDIASVLGMSFPSYRGGIVFWADTVGPKYIYERLKKLSETYGSFFKPSRYLEERAMNGMLLSESKSSRSKL

SEQ ID NO: 47955 - protein, 639 aa, Arabidopsis thaliana
  peptide (1)..(639): Ceres Seq. ID no. 12658956
MPEVSVELVCNLMEDSRKPVVAAVEGLALGGGLELAMACHARVAAPKAQLGLPELTLGVIPGFGGTQRLPRLVGLAKATDMILLSKSISSEEGHKLGLIDALVPPGDVLSTSRKWALDIAEGRKPFLQSLHRTDKIGSLSEARAILKNSRQLAKKIAPNMPQHHACIEVIEEGIIHGGYSGVLKEAEVFKQLVLSDTAKGLVHVFFAQRATSKVPNVTDVGLKPRPIKKVAVIGGGLMGSGIATALLLSNIRVVLKEINSEFLMKGIKSVEANMKSLVSRGKLTQDKAGKALSLFKGVLDYTEFNDVDMVIEAVIENIQLKQNIFKEIEKVCSPHCILASNTSTIDLDVIGEKTNSKDRIVGAHFFSPAHLMPLLEIVRSKNTSAQVILDLMAVGKAIKKVPVVVGNCIGFAVNRTFFPYSQAAHMLANLGVDLFRIDSVITSFGLPLGPFQLGDLAGHGIGLAVGPIYAKVYGDRMFRSPMTELLLKSGRNGKINGRGYYIYEKGSKPKPDPSVLSIVEKSRKLTNIMPGGKPISVTDKEIVEMILFPVVNEACRVLDEGVVIRASDLDIASVLGMSFPSYRGGIVFWADTVGPKYIYERLKKLSETYGSFFKPSRYLEERAMNGMLLSESKSSRSKL

SEQ ID NO: 47956 - DNA, 1614 bp, Arabidopsis thaliana
  misc_feature (1)..(1614): Ceres Seq. ID no. 13649559
  misc_feature (1)..(1614): Ortholog of  Ceres SEQ ID NO 13639636 as cited in SEQ ID NO 60184
  misc_feature (1)..(1614): Ortholog of  Ceres SEQ ID NO 15180447 as cited in SEQ ID NO 0
ggcagaagaagctcagatacagaaactgactaccaagaacaaagctttttccttcgagcaaagaaagttcttttttcttttcttttgctcttcgtaacccaaccaacaagactttcataagctattaaatcagaaccctggaagacaaaaaaggggaaaaaccattatccttaaagtaaccaacacttctctctctctttcttcaatggatttgcaactgaaacaatggagaagccagcagcagcaacaacatcagacagagtcagaagaacaaccttctgcagctaagataccaaaacatgtctttgaccagattcattctcacactgcaacttctactgctcttcctctctttacccctgagcctacttcttctaaactctcctctttgtctcctgattcttcctccaggttccccaagatggggagcttctttagctgggcacagtggcaagaacttgaactacaagctctgatctacaggtacatgttggctggtgctgctgttcctcaggagctccttttaccaatcaagaaaagccttctccatctatctccttcctactttcttcaccatcctcttcaacacctacctcattaccaacctgcttggtatttgggaagggcagcgatggatcctgagccaggcagatgcaggagaacggatggtaagaagtggagatgttcaagagacgtcttcgctggccacaagtattgcgagcgccacatgcaccgtggccgcaaccgttcaagaaagcctgtggaaactccaaccaccgtcaatgcaactgccacgtccatggcttcatcagtagcagccgcagccaccactacaacagcaacaacaacatctacgtttgcttttggtggtggtggtggtagtgaggaagtggttggtcaaggaggatctttcttcttctctggctcttctaactcttcatctgaacttctccaccttagtcaaagttgttcggagatgaagcaagaaagcaacaacatgaacaacaagaggccatacgagtcccacatcggattcagtaacaacagatcagatggaggacacatcctgaggcccttctttgacgattggcctcgttcttcgctccaagaagctgacaatagttcaagccccatgagctcagccacttgtctctccatctccatgcccgggaactcttcctcagacgtctctctgaagctgtccacaggcaacgaagagggagcccggagcaacaacaatgggagagatcagcaaaacatgagctggtggagcggtggaggttccaaccaccatcatcacaacatgggcggaccattggccgaagccctgagatcttcttcctcatcttccccaaccagtgttctccatcagcttggtgtctcgacacaagcctttcattgaccagtgtaaaaccaacacaacaatgcggtttttactgtgtttttggtttttatccaaatttcctgtataaagaggggaggcttttgttgtcctcttccctttttcttttaagatttcccttgtatctgtagcctttctctgcagattttatatcctcaaagatttgtttttggaaattcatgtctaaataggatctacgatgaagcttaggc

SEQ ID NO: 47957 - protein, 398 aa, Arabidopsis thaliana
  peptide (1)..(398): Ceres Seq. ID no. 13649560
MDLQLKQWRSQQQQQHQTESEEQPSAAKIPKHVFDQIHSHTATSTALPLFTPEPTSSKLSSLSPDSSSRFPKMGSFFSWAQWQELELQALIYRYMLAGAAVPQELLLPIKKSLLHLSPSYFLHHPLQHLPHYQPAWYLGRAAMDPEPGRCRRTDGKKWRCSRDVFAGHKYCERHMHRGRNRSRKPVETPTTVNATATSMASSVAAAATTTTATTTSTFAFGGGGGSEEVVGQGGSFFFSGSSNSSSELLHLSQSCSEMKQESNNMNNKRPYESHIGFSNNRSDGGHILRPFFDDWPRSSLQEADNSSSPMSSATCLSISMPGNSSSDVSLKLSTGNEEGARSNNNGRDQQNMSWWSGGGSNHHHHNMGGPLAEALRSSSSSSPTSVLHQLGVSTQAFH

SEQ ID NO: 47958 - protein, 326 aa, Arabidopsis thaliana
  peptide (1)..(326): Ceres Seq. ID no. 13649561
MGSFFSWAQWQELELQALIYRYMLAGAAVPQELLLPIKKSLLHLSPSYFLHHPLQHLPHYQPAWYLGRAAMDPEPGRCRRTDGKKWRCSRDVFAGHKYCERHMHRGRNRSRKPVETPTTVNATATSMASSVAAAATTTTATTTSTFAFGGGGGSEEVVGQGGSFFFSGSSNSSSELLHLSQSCSEMKQESNNMNNKRPYESHIGFSNNRSDGGHILRPFFDDWPRSSLQEADNSSSPMSSATCLSISMPGNSSSDVSLKLSTGNEEGARSNNNGRDQQNMSWWSGGGSNHHHHNMGGPLAEALRSSSSSSPTSVLHQLGVSTQAFH

SEQ ID NO: 47959 - protein, 304 aa, Arabidopsis thaliana
  peptide (1)..(304): Ceres Seq. ID no. 13649562
MLAGAAVPQELLLPIKKSLLHLSPSYFLHHPLQHLPHYQPAWYLGRAAMDPEPGRCRRTDGKKWRCSRDVFAGHKYCERHMHRGRNRSRKPVETPTTVNATATSMASSVAAAATTTTATTTSTFAFGGGGGSEEVVGQGGSFFFSGSSNSSSELLHLSQSCSEMKQESNNMNNKRPYESHIGFSNNRSDGGHILRPFFDDWPRSSLQEADNSSSPMSSATCLSISMPGNSSSDVSLKLSTGNEEGARSNNNGRDQQNMSWWSGGGSNHHHHNMGGPLAEALRSSSSSSPTSVLHQLGVSTQAFH

SEQ ID NO: 47960 - DNA, 638 bp, Arabidopsis thaliana
  misc_feature (1)..(638): Ceres Seq. ID no. 13648784
  misc_feature (1)..(638): Ortholog of  Ceres SEQ ID NO 12584790 as cited in SEQ ID NO 62648
taagtcttggttcttcttctctctaatacgagaagaaaaaggcgaaaacctcgccaatccgattacgcgaaaaatcaaaggtttttggatatggcgtcgaagcggatcttgaaggaattgaaggatctccagaaggatccacctacatcatgtagcgcaggtcctgttgctgaagacatgtttcactggcaggcaacgataatgggtccttcagagagtccttatgctggaggtgttttccttgtaaccatccatttccctccggattacccattcaagcctcctaaggtgattccaatattttgagaattgttatcaagtggcctttaggaccaaggtgttccatcccaacattaacagcaacggtagcatttgcctcgacatcttgaaggagcagtggagtcctgcgctcaccatttccaaggtgctgctatcgatctgttctttgttaaccgatccaaacccggatgatcctttggtgcccgagatagctcacatgtacaagactgacaagaacaagtacgagtccactgcacgaagctggactcagaagtatgccatggggctaatggaaaatcccacctactaaattatctctttatgaagaaaaaaatctgccttaatttctatgtatgatt

SEQ ID NO: 47961 - protein, 71 aa, Arabidopsis thaliana
  peptide (1)..(71): Ceres Seq. ID no. 13648785
MASKRILKELKDLQKDPPTSCSAGPVAEDMFHWQATIMGPSESPYAGGVFLVTIHFPPDYPFKPPKVIPIF

SEQ ID NO: 47962 - protein, 42 aa, Arabidopsis thaliana
  peptide (1)..(42): Ceres Seq. ID no. 13648786
MFHWQATIMGPSESPYAGGVFLVTIHFPPDYPFKPPKVIPIF

SEQ ID NO: 47963 - protein, 36 aa, Arabidopsis thaliana
  peptide (1)..(36): Ceres Seq. ID no. 13648787
KSWFFFSLIREEKGENLANPITRKIKGFWIWRRSGS

SEQ ID NO: 47964 - DNA, 1338 bp, Arabidopsis thaliana
  misc_feature (1)..(1338): Ceres Seq. ID no. 13649184
  misc_feature (1)..(1338): Ortholog of  Ceres SEQ ID NO 14315626 as cited in SEQ ID NO 52943
  misc_feature (1)..(1338): Ortholog of  Ceres SEQ ID NO 13584616 as cited in SEQ ID NO 65234
  misc_feature (1)..(1338): Ortholog of  Ceres SEQ ID NO 14302742 as cited in SEQ ID NO 66899
  misc_feature (1)..(1338): Ortholog of  Ceres SEQ ID NO 14313536 as cited in SEQ ID NO 67925
  misc_feature (1)..(1338): Ortholog of  Ceres SEQ ID NO 15178939 as cited in SEQ ID NO 0
atgcagacaccaaacaacaacggttcaacagattcagtgttaccaccaacatcagccggaacaacaccaccaccaccgttgcagcaatcaacaccaccaccgcagcagcaacaacaacaacagtggcaacaacaacaacaatggatggctgcgatgcagcaataccctgcagctgctatggctatgatgcaacaacaacagatgatgatgtatcctcaccctcaatacgctccttacaatcaagctgcttatcaacagcatcctcagtttcaatacgctgcttatcaacagcagcagcagcaacatcaccagagtcagcagcagccacgcggtggatctggtggtgatgatgtcaagactctttgggttggtgatcttcttcattggatggatgagacttatctccatacctgtttctctcacaccaatgaggtttcttctgtgaaagttatacgcaacaagcaaacttgtcaatctgaaggatatgggtttgttgagtttctttcacgttcagcagctgaggaagctcttcagagctttagcggtgttacaatgccgaacgcggaacagcctttccgtttaaactgggcatctttcagtactggtgagaaaagagcatcagagaatggtcctgacctatccatatttgttggagatttggctccagatgtgagtgatgctgtcttgcttgagacttttgctggtagatatccatctgtcaaaggtgctaaagttgtgattgattccaacactgggcgttccaaaggttacgggtttgttaggtttggtgatgagaatgagcgatcaagagctatgacagaaatgaatggtgctttctgttcaagcaggcaaatgcgtgttggtatcgcaaccccgaaaagggctgctgcttacggccaacaaaatggttcacaagctcttacacttgctggtggacatggagggaatggttcaatgtctgatggagaatcaaataactcaacaatatttgttggcggtcttgatgctgatgttactgaagaagacctcatgcaacctttttccgattttggggaggttgtttcagtgaagatcccagtagggaaaggatgtggctttgtccaatttgctaacaggcaaagtgctgaggaagccatcgggaacttgaacgggacagtcattgggaagaacactgtccgcctttcatggggaagaagccccaacaaacagtggagaagtgactctggcaaccaatggaatggaggatattcaagaggtcaaggatacaacaatggatatgccaatcaggactcaaacatgtacgctactgcagcggctgcagtcccgggagcttcttga

SEQ ID NO: 47965 - protein, 445 aa, Arabidopsis thaliana
  peptide (1)..(445): Ceres Seq. ID no. 13649185
MQTPNNNGSTDSVLPPTSAGTTPPPPLQQSTPPPQQQQQQQWQQQQQWMAAMQQYPAAAMAMMQQQQMMMYPHPQYAPYNQAAYQQHPQFQYAAYQQQQQQHHQSQQQPRGGSGGDDVKTLWVGDLLHWMDETYLHTCFSHTNEVSSVKVIRNKQTCQSEGYGFVEFLSRSAAEEALQSFSGVTMPNAEQPFRLNWASFSTGEKRASENGPDLSIFVGDLAPDVSDAVLLETFAGRYPSVKGAKVVIDSNTGRSKGYGFVRFGDENERSRAMTEMNGAFCSSRQMRVGIATPKRAAAYGQQNGSQALTLAGGHGGNGSMSDGESNNSTIFVGGLDADVTEEDLMQPFSDFGEVVSVKIPVGKGCGFVQFANRQSAEEAIGNLNGTVIGKNTVRLSWGRSPNKQWRSDSGNQWNGGYSRGQGYNNGYANQDSNMYATAAAAVPGAS

SEQ ID NO: 47966 - protein, 397 aa, Arabidopsis thaliana
  peptide (1)..(397): Ceres Seq. ID no. 13649186
MAAMQQYPAAAMAMMQQQQMMMYPHPQYAPYNQAAYQQHPQFQYAAYQQQQQQHHQSQQQPRGGSGGDDVKTLWVGDLLHWMDETYLHTCFSHTNEVSSVKVIRNKQTCQSEGYGFVEFLSRSAAEEALQSFSGVTMPNAEQPFRLNWASFSTGEKRASENGPDLSIFVGDLAPDVSDAVLLETFAGRYPSVKGAKVVIDSNTGRSKGYGFVRFGDENERSRAMTEMNGAFCSSRQMRVGIATPKRAAAYGQQNGSQALTLAGGHGGNGSMSDGESNNSTIFVGGLDADVTEEDLMQPFSDFGEVVSVKIPVGKGCGFVQFANRQSAEEAIGNLNGTVIGKNTVRLSWGRSPNKQWRSDSGNQWNGGYSRGQGYNNGYANQDSNMYATAAAAVPGAS

SEQ ID NO: 47967 - protein, 394 aa, Arabidopsis thaliana
  peptide (1)..(394): Ceres Seq. ID no. 13649187
MQQYPAAAMAMMQQQQMMMYPHPQYAPYNQAAYQQHPQFQYAAYQQQQQQHHQSQQQPRGGSGGDDVKTLWVGDLLHWMDETYLHTCFSHTNEVSSVKVIRNKQTCQSEGYGFVEFLSRSAAEEALQSFSGVTMPNAEQPFRLNWASFSTGEKRASENGPDLSIFVGDLAPDVSDAVLLETFAGRYPSVKGAKVVIDSNTGRSKGYGFVRFGDENERSRAMTEMNGAFCSSRQMRVGIATPKRAAAYGQQNGSQALTLAGGHGGNGSMSDGESNNSTIFVGGLDADVTEEDLMQPFSDFGEVVSVKIPVGKGCGFVQFANRQSAEEAIGNLNGTVIGKNTVRLSWGRSPNKQWRSDSGNQWNGGYSRGQGYNNGYANQDSNMYATAAAAVPGAS

SEQ ID NO: 47968 - DNA, 2828 bp, Arabidopsis thaliana; identical to SEQ ID NO: 44938
  misc_feature (1)..(2828): Ceres Seq. ID no. 13646314
  misc_feature (1)..(2828): Ortholog of  Ceres SEQ ID NO 13598023 as cited in SEQ ID NO 66487

SEQ ID NO: 47969 - protein, 814 aa, Arabidopsis thaliana; identical to SEQ ID NO: 44939
  peptide (1)..(814): Ceres Seq. ID no. 13646315

SEQ ID NO: 47970 - protein, 697 aa, Arabidopsis thaliana; identical to SEQ ID NO: 44940
  peptide (1)..(697): Ceres Seq. ID no. 13646316

SEQ ID NO: 47971 - protein, 678 aa, Arabidopsis thaliana; identical to SEQ ID NO: 44941
  peptide (1)..(678): Ceres Seq. ID no. 13646317

SEQ ID NO: 47972 - DNA, 1266 bp, Arabidopsis thaliana
  misc_feature (1)..(1266): Ceres Seq. ID no. 13649024
  misc_feature (1)..(1266): Ortholog of  Ceres SEQ ID NO 13594037 as cited in SEQ ID NO 55666
  misc_feature (1)..(1266): Ortholog of  Ceres SEQ ID NO 13657707 as cited in SEQ ID NO 66407
gattaagttccttttatcctttccctctcaaacccctaaatcaaccaatcaaagtttcacagaattatcttctattattcaggtatgaaaataatctcattatccatatccataggtatcgcaataattgccgttctggcatctaaaactctctttaaaacacatcctgaagcttttggtatcaaagcaatatcatattcattcaagaaatccttatgtgatcaccatcaccatcatcatcatcatcatcatcaccaccaccggcataaaccttcggataccaaaagaaaggtatcaatatgcgacgatttccctaaaaatatacctccattggacaccgacacaacatcctatctctgcgtggataagaacggttgctgcaatttcacgacggtgcaatcggccgtggacgcagtggggaatttcagtcaaagaaggaacgtgatttggataaactccggcatgtactatgaaaaagtggtgattccgaagactaaaccaaacataacgttgcaaggacaaggcttcgacattacagccattgcgtggaacgacactgcctactcagctaatggcacattttattgtgccacggtccaagtctttggttctcagttcgtcgctaagaacatcagtttcatgaacgtggcaccgataccaaagccaggagacgtaggagctcaggcggtggcaataagaatcgccggagatgaatcagcgtttgtgggatgcggtttcttcggagcacaagacactcttcatgacgatagaggtcgtcattacttcaaggattgttacattcaaggatccattgatttcatcttcggcaacgctaagtctctctatcaggactgtcgaataatatcaatggctaatcaattgagcccaggttcaaaagcagttaacggagccgtgactgcaaatgggcgtagctccaaggacgagaacagtggcttctccttcgtcaactgcacaatcggtggaactggtcacgtgtggctaggtcgtgcatggcggccttactcacgtgtggttttcgtttccactactatgaccgatgttatcgcacccgaaggctggaacaacttcaacgatccctctagggacgcgactatattttatggagagtataattgttcgggtccaggagcagatatgtcaaagagagcaccatatgttcaaaaacttaatgagactcaagttgctctattaattaacacgtcttttattgatggagatcaatggttacagttttctgacctttaa

SEQ ID NO: 47973 - protein, 393 aa, Arabidopsis thaliana
  peptide (1)..(393): Ceres Seq. ID no. 13649025
MKIISLSISIGIAIIAVLASKTLFKTHPEAFGIKAISYSFKKSLCDHHHHHHHHHHHHHRHKPSDTKRKVSICDDFPKNIPPLDTDTTSYLCVDKNGCCNFTTVQSAVDAVGNFSQRRNVIWINSGMYYEKVVIPKTKPNITLQGQGFDITAIAWNDTAYSANGTFYCATVQVFGSQFVAKNISFMNVAPIPKPGDVGAQAVAIRIAGDESAFVGCGFFGAQDTLHDDRGRHYFKDCYIQGSIDFIFGNAKSLYQDCRIISMANQLSPGSKAVNGAVTANGRSSKDENSGFSFVNCTIGGTGHVWLGRAWRPYSRVVFVSTTMTDVIAPEGWNNFNDPSRDATIFYGEYNCSGPGADMSKRAPYVQKLNETQVALLINTSFIDGDQWLQFSDL

SEQ ID NO: 47974 - protein, 267 aa, Arabidopsis thaliana
  peptide (1)..(267): Ceres Seq. ID no. 13649026
MYYEKVVIPKTKPNITLQGQGFDITAIAWNDTAYSANGTFYCATVQVFGSQFVAKNISFMNVAPIPKPGDVGAQAVAIRIAGDESAFVGCGFFGAQDTLHDDRGRHYFKDCYIQGSIDFIFGNAKSLYQDCRIISMANQLSPGSKAVNGAVTANGRSSKDENSGFSFVNCTIGGTGHVWLGRAWRPYSRVVFVSTTMTDVIAPEGWNNFNDPSRDATIFYGEYNCSGPGADMSKRAPYVQKLNETQVALLINTSFIDGDQWLQFSDL

SEQ ID NO: 47975 - protein, 208 aa, Arabidopsis thaliana
  peptide (1)..(208): Ceres Seq. ID no. 13649027
MNVAPIPKPGDVGAQAVAIRIAGDESAFVGCGFFGAQDTLHDDRGRHYFKDCYIQGSIDFIFGNAKSLYQDCRIISMANQLSPGSKAVNGAVTANGRSSKDENSGFSFVNCTIGGTGHVWLGRAWRPYSRVVFVSTTMTDVIAPEGWNNFNDPSRDATIFYGEYNCSGPGADMSKRAPYVQKLNETQVALLINTSFIDGDQWLQFSDL

SEQ ID NO: 47976 - DNA, 3652 bp, Arabidopsis thaliana; identical to SEQ ID NO: 37223
  misc_feature (1)..(3652): Ceres Seq. ID no. 13648943
  misc_feature (1)..(3652): Ortholog of  Ceres SEQ ID NO 14303524 as cited in SEQ ID NO 59500
  misc_feature (1)..(3652): Ortholog of  Ceres SEQ ID NO 14313220 as cited in SEQ ID NO 66007
  misc_feature (1)..(3652): Ortholog of  Ceres SEQ ID NO 13658778 as cited in SEQ ID NO 66511

SEQ ID NO: 47977 - protein, 1065 aa, Arabidopsis thaliana; identical to SEQ ID NO: 37224
  peptide (1)..(1065): Ceres Seq. ID no. 13648944

SEQ ID NO: 47978 - protein, 1054 aa, Arabidopsis thaliana; identical to SEQ ID NO: 37225
  peptide (1)..(1054): Ceres Seq. ID no. 13648945

SEQ ID NO: 47979 - protein, 959 aa, Arabidopsis thaliana; identical to SEQ ID NO: 37226
  peptide (1)..(959): Ceres Seq. ID no. 13648946

SEQ ID NO: 47980 - DNA, 1050 bp, Arabidopsis thaliana
  misc_feature (1)..(1050): Ceres Seq. ID no. 13649040
  misc_feature (1)..(1050): Ortholog of  Ceres SEQ ID NO 14311671 as cited in SEQ ID NO 51251
  misc_feature (1)..(1050): Ortholog of  Ceres SEQ ID NO 14307355 as cited in SEQ ID NO 54610
  misc_feature (1)..(1050): Ortholog of  Ceres SEQ ID NO 13594298 as cited in SEQ ID NO 57803
  misc_feature (1)..(1050): Ortholog of  Ceres SEQ ID NO 14301894 as cited in SEQ ID NO 61677
  misc_feature (1)..(1050): Ortholog of  Ceres SEQ ID NO 13503476 as cited in SEQ ID NO 61978
  misc_feature (1)..(1050): Ortholog of  Ceres SEQ ID NO 12578438 as cited in SEQ ID NO 62201
  misc_feature (1)..(1050): Ortholog of  Ceres SEQ ID NO 12617675 as cited in SEQ ID NO 64656
gacaaaccaatctaactcaatacaagaatatctacaatctctagaaaatggcgatcacttacttgcttcctctgtttctttctcttatcatcacctcctctgtttcagctaatttccaaagagacgttgagatcacttggggtgatggtcgtggacagatcaagaacaatggagagcttctcactttatctctagataaatcctctggttctggattccaatccaaaaacgagtacttgtttggtaaagtctccatgcaaatgaagcttgtccctggaaactccgcaggaacagtcacaacactttacttgaaatcacctggaacaacatgggacgagatagatttcgagtttttagggaattcaagtggagaaccttacacacttcacacaaatgtctacacacaaggcaaaggagacaaagaacaacaattcaaactctggtttgatccaacagctaatttccacacttacactattctctggaacccacaaagaatcattttcaccgtcgatggaactccgatcagagaattcaagaacatggagtctctaggcactctgtttcccaagaacaaaccaatgagaatgtactcgagtctttggaacgctgatgattgggcaacgagaggtggtttggtcaaaaccgattggtctaaagctcctttcactgcttcttaccgtggctttcaacaagaagcttgtgtttggtcaaacggcaagtcttcttgtcctaatgcctcgaaacaggggactactactggctcgtggttgtcacaagagcttgactcaacagctcaacaaaggatgagatgggtgcagaggaactacatgatctataattattgtacggatgcgaagaggttccctcaaggtcttcctaaagagtgcttagctgcatagagagagtaaagagttgagagaggaacaagattttatttttctttgtggttataaaattctattcattttattgtagatcacgtgaattttattgatttgttttgtagtatactctatagttcgttaaagttataatattctctttgtt

SEQ ID NO: 47981 - protein, 284 aa, Arabidopsis thaliana
  peptide (1)..(284): Ceres Seq. ID no. 13649041
MAITYLLPLFLSLIITSSVSANFQRDVEITWGDGRGQIKNNGELLTLSLDKSSGSGFQSKNEYLFGKVSMQMKLVPGNSAGTVTTLYLKSPGTTWDEIDFEFLGNSSGEPYTLHTNVYTQGKGDKEQQFKLWFDPTANFHTYTILWNPQRIIFTVDGTPIREFKNMESLGTLFPKNKPMRMYSSLWNADDWATRGGLVKTDWSKAPFTASYRGFQQEACVWSNGKSSCPNASKQGTTTGSWLSQELDSTAQQRMRWVQRNYMIYNYCTDAKRFPQGLPKECLAA

SEQ ID NO: 47982 - protein, 215 aa, Arabidopsis thaliana
  peptide (1)..(215): Ceres Seq. ID no. 13649042
MQMKLVPGNSAGTVTTLYLKSPGTTWDEIDFEFLGNSSGEPYTLHTNVYTQGKGDKEQQFKLWFDPTANFHTYTILWNPQRIIFTVDGTPIREFKNMESLGTLFPKNKPMRMYSSLWNADDWATRGGLVKTDWSKAPFTASYRGFQQEACVWSNGKSSCPNASKQGTTTGSWLSQELDSTAQQRMRWVQRNYMIYNYCTDAKRFPQGLPKECLAA

SEQ ID NO: 47983 - protein, 213 aa, Arabidopsis thaliana
  peptide (1)..(213): Ceres Seq. ID no. 13649043
MKLVPGNSAGTVTTLYLKSPGTTWDEIDFEFLGNSSGEPYTLHTNVYTQGKGDKEQQFKLWFDPTANFHTYTILWNPQRIIFTVDGTPIREFKNMESLGTLFPKNKPMRMYSSLWNADDWATRGGLVKTDWSKAPFTASYRGFQQEACVWSNGKSSCPNASKQGTTTGSWLSQELDSTAQQRMRWVQRNYMIYNYCTDAKRFPQGLPKECLAA

SEQ ID NO: 47984 - DNA, 1608 bp, Arabidopsis thaliana
  misc_feature (1)..(1608): Ceres Seq. ID no. 13649586
  misc_feature (1)..(1608): Ortholog of  Ceres SEQ ID NO 12612314 as cited in SEQ ID NO 51420
gatcatcttccttcttctcttaagcacaaatggcgactctttatagtcaagttccttctgtatcagcagttttctctctttacacatctttttccgcaatcacgatgctttttcgaacaatcctcaacgagattgtgcctaaaagaatcagagagtacatagctatgaaagctgtagacttcttctcttcttactttcaatctgatttcacttttgtgatagagcaacgttgggagtttgttgagaatcagacgttccgtgctgctgaagtttacttacctacctgtctcgccggactttctacaggcaaacttcttgtgggttcaagtaatcttaagaatccagctgctgagccaaaacttggtatccctgtgaacactaagatcattgataactttgaagggattcatctagaatggactcttcactctgttgaaactaagaagtatctacccgaaaaacggtactttcatttgacatgtaagaaggagtttcgtgagaagataatgacggattacttcacttacttagcgaaatcagcggagaagataatgagccatcgcgagaatctcaagatctatacttataaccaagaccggtctaaatgggaatctgctatcttcgagcatcacacgacctttgagacgttagctgttgagccagacctaaagaagactttgattgacgatcttgatgctttctctaaaggaaaagacttcttcaagagcgtaggacgtgcttggaagcgaggatatcttctttacggtccaccgggaaccgggaagtcttctatggtagctgccattgctaatcatatgaagtatcatatctatgatcttcagattcaaagtgttagagatgatggtgagttgcgggagattcttacttcgaccaagaaccggtcgattcttcttattgaagatattgattgtggagctgatgcttctcgtagacgtcagagtaagaagaaggaagaagatggtggagaagatgatggtgagccacaaaagaggaagaagaagtttgaagttgggatatctttgtctggtctattgaactttgttgatggactttggtcaagttgtggagaagagaaaatcataattttcactactaatcacaaggagaagctcgacccggcgttgcttagaccaggacggatggatgttcatattctcatggacaattgtactccctttgtgttcaagaagcttgtggctttgtaccttaaaaccgatgagcatgtcttgtttgatcccattgagaagctcattcttgaagtgagttcgactcccgctgaagtcacgcagcagctcatggcgagtaagaacgctgatatcgcgcttaaaggccttgctgaattcttggagaacaagaagttgaaaaagggagaagattctagtgtggaggaagagggagagattgaagatgctgagactaaagaagcagaaacataagactttattagaagtaactctagtgtttcagctccttttggtaataaatatcattgctttagaccagatgaaacaaaatgtagctaaaactacatgttgatgtatgaacaattaggggacatagagtctcataaatatatctttcttttat

SEQ ID NO: 47985 - protein, 475 aa, Arabidopsis thaliana
  peptide (1)..(475): Ceres Seq. ID no. 13649587
MATLYSQVPSVSAVFSLYTSFSAITMLFRTILNEIVPKRIREYIAMKAVDFFSSYFQSDFTFVIEQRWEFVENQTFRAAEVYLPTCLAGLSTGKLLVGSSNLKNPAAEPKLGIPVNTKIIDNFEGIHLEWTLHSVETKKYLPEKRYFHLTCKKEFREKIMTDYFTYLAKSAEKIMSHRENLKIYTYNQDRSKWESAIFEHHTTFETLAVEPDLKKTLIDDLDAFSKGKDFFKSVGRAWKRGYLLYGPPGTGKSSMVAAIANHMKYHIYDLQIQSVRDDGELREILTSTKNRSILLIEDIDCGADASRRRQSKKKEEDGGEDDGEPQKRKKKFEVGISLSGLLNFVDGLWSSCGEEKIIIFTTNHKEKLDPALLRPGRMDVHILMDNCTPFVFKKLVALYLKTDEHVLFDPIEKLILEVSSTPAEVTQQLMASKNADIALKGLAEFLENKKLKKGEDSSVEEEGEIEDAETKEAET

SEQ ID NO: 47986 - protein, 450 aa, Arabidopsis thaliana
  peptide (1)..(450): Ceres Seq. ID no. 13649588
MLFRTILNEIVPKRIREYIAMKAVDFFSSYFQSDFTFVIEQRWEFVENQTFRAAEVYLPTCLAGLSTGKLLVGSSNLKNPAAEPKLGIPVNTKIIDNFEGIHLEWTLHSVETKKYLPEKRYFHLTCKKEFREKIMTDYFTYLAKSAEKIMSHRENLKIYTYNQDRSKWESAIFEHHTTFETLAVEPDLKKTLIDDLDAFSKGKDFFKSVGRAWKRGYLLYGPPGTGKSSMVAAIANHMKYHIYDLQIQSVRDDGELREILTSTKNRSILLIEDIDCGADASRRRQSKKKEEDGGEDDGEPQKRKKKFEVGISLSGLLNFVDGLWSSCGEEKIIIFTTNHKEKLDPALLRPGRMDVHILMDNCTPFVFKKLVALYLKTDEHVLFDPIEKLILEVSSTPAEVTQQLMASKNADIALKGLAEFLENKKLKKGEDSSVEEEGEIEDAETKEAET

SEQ ID NO: 47987 - protein, 430 aa, Arabidopsis thaliana
  peptide (1)..(430): Ceres Seq. ID no. 13649589
MKAVDFFSSYFQSDFTFVIEQRWEFVENQTFRAAEVYLPTCLAGLSTGKLLVGSSNLKNPAAEPKLGIPVNTKIIDNFEGIHLEWTLHSVETKKYLPEKRYFHLTCKKEFREKIMTDYFTYLAKSAEKIMSHRENLKIYTYNQDRSKWESAIFEHHTTFETLAVEPDLKKTLIDDLDAFSKGKDFFKSVGRAWKRGYLLYGPPGTGKSSMVAAIANHMKYHIYDLQIQSVRDDGELREILTSTKNRSILLIEDIDCGADASRRRQSKKKEEDGGEDDGEPQKRKKKFEVGISLSGLLNFVDGLWSSCGEEKIIIFTTNHKEKLDPALLRPGRMDVHILMDNCTPFVFKKLVALYLKTDEHVLFDPIEKLILEVSSTPAEVTQQLMASKNADIALKGLAEFLENKKLKKGEDSSVEEEGEIEDAETKEAET

SEQ ID NO: 47988 - DNA, 1901 bp, Arabidopsis thaliana
  misc_feature (1)..(1901): Ceres Seq. ID no. 12663273
  misc_feature (1)..(1901): Ortholog of  Ceres SEQ ID NO 15176499 as cited in SEQ ID NO 52857
gttcagctttctctttccaaaatcaaaagctctccgatcagtttctccggcttaggaaattaattgaaggaaggtgatgagaggtactactgagaatacggatctgttcgatcccaaaacccaaatggatcctgacttcactcgtcatggttcttcctccgacggcgattttggattcgcttttaacgacagtaacttctctgatcgtttgcttcggatcgagatcatgggtggaccttcggattctcggtctgaagttgaagggtgtacgagtatcgctgattgggctcgtcatcgcaagagaagaagagaagatatcaagaaggaatctggtgtcacgatttcagacattgtggcatgtcctgaggagcagattttaactgatgaacaacctgacatggatggatgtcctggtggtgagaatcctgatgatgaaggaggagaggcaatggttgaagaagctttatcaggtgatgaagaggaaacgtctagtgagccaaactggggaatggattgttctacagttgttagggttaaagaacttcatattagttctcctattttagctgccaaaagccctttcttttacaagttgttctccaatggaatgagggaatctgagcaaaggcatgtcacccttaggattaatgcatcagaggaagctgctttgatggagcttttaaactttatgtatagcaatgcggtatctgtcaccacagcacctgccttattagatgtgttgatggctgctgataagtttgaagttgcctcttgtatgaggtactgcagtagacttctccgtaatatgcctatgactccagagtctgccctgctctatctcgagcttccctctagtgttctaatggccaaagctgttcagcctttaactgatgctgcaaaacagttccttgcagcccgctacaaggatattaccaagtttcatgaggaggtaatgtctctacctttggctggaattgaggcaattctatcaagcgatgaactccaaattgcatcagaggatgcagtttatgattttatcttgaagtgggcaagggcgcaatacccttgtttggaagagcgaagagagattctcgggtcacgccttgcactctccatccgcttcccattcatgacatgccgaaagctgaagaaagtgctgacttgcagtgactttgagcatgaaatagcatcaaagcttgttctagaagctcttttcttcaaagcagaagccccacacagacaacgtagcctagcctccgaagaatctgcatccctgaaccgccgcctgatagagagggcttacaaatacagacccgtcaaagtggtcgagtttgagcttcctagaccgcagtgtgtagtctacctagacttgaaaagagaagaatgtgggggactgttcccgtcgggtagagtgtattcgcaggcctttcacttgggaggtcaagggtttttcctgtcagctcactgcaacatggaccaacagagctcgttccactgtttcgggctgttcctagggatgcaggagaaagggtcggtgagtttcggagtggactatgaattctcggcaaggtcaaagcccgcagaggatttcataagcaaatacaaagggaactacacattcacaggagggaaagcagtaggttacagaaacctgtttggggtcccatggacgtcttttatagcggaagatagtcaatacttcatcaatggcattctccatctcagagcagagcttaccatcaaaaggcttgaagaagactaataaagcttataaaagtaaggttaaaaacgtttcgacgacaacgttataagaagaatgtaaatgcgttctttttttctatctacccttactcttttggctttggattataagtttaactcttcaatgaaattcttagcgt

SEQ ID NO: 47989 - protein, 561 aa, Arabidopsis thaliana
  peptide (1)..(561): Ceres Seq. ID no. 12663274
MRGTTENTDLFDPKTQMDPDFTRHGSSSDGDFGFAFNDSNFSDRLLRIEIMGGPSDSRSEVEGCTSIADWARHRKRRREDIKKESGVTISDIVACPEEQILTDEQPDMDGCPGGENPDDEGGEAMVEEALSGDEEETSSEPNWGMDCSTVVRVKELHISSPILAAKSPFFYKLFSNGMRESEQRHVTLRINASEEAALMELLNFMYSNAVSVTTAPALLDVLMAADKFEVASCMRYCSRLLRNMPMTPESALLYLELPSSVLMAKAVQPLTDAAKQFLAARYKDITKFHEEVMSLPLAGIEAILSSDELQIASEDAVYDFILKWARAQYPCLEERREILGSRLALSIRFPFMTCRKLKKVLTCSDFEHEIASKLVLEALFFKAEAPHRQRSLASEESASLNRRLIERAYKYRPVKVVEFELPRPQCVVYLDLKREECGGLFPSGRVYSQAFHLGGQGFFLSAHCNMDQQSSFHCFGLFLGMQEKGSVSFGVDYEFSARSKPAEDFISKYKGNYTFTGGKAVGYRNLFGVPWTSFIAEDSQYFINGILHLRAELTIKRLEED

SEQ ID NO: 47990 - protein, 545 aa, Arabidopsis thaliana
  peptide (1)..(545): Ceres Seq. ID no. 12663275
MDPDFTRHGSSSDGDFGFAFNDSNFSDRLLRIEIMGGPSDSRSEVEGCTSIADWARHRKRRREDIKKESGVTISDIVACPEEQILTDEQPDMDGCPGGENPDDEGGEAMVEEALSGDEEETSSEPNWGMDCSTVVRVKELHISSPILAAKSPFFYKLFSNGMRESEQRHVTLRINASEEAALMELLNFMYSNAVSVTTAPALLDVLMAADKFEVASCMRYCSRLLRNMPMTPESALLYLELPSSVLMAKAVQPLTDAAKQFLAARYKDITKFHEEVMSLPLAGIEAILSSDELQIASEDAVYDFILKWARAQYPCLEERREILGSRLALSIRFPFMTCRKLKKVLTCSDFEHEIASKLVLEALFFKAEAPHRQRSLASEESASLNRRLIERAYKYRPVKVVEFELPRPQCVVYLDLKREECGGLFPSGRVYSQAFHLGGQGFFLSAHCNMDQQSSFHCFGLFLGMQEKGSVSFGVDYEFSARSKPAEDFISKYKGNYTFTGGKAVGYRNLFGVPWTSFIAEDSQYFINGILHLRAELTIKRLEED

SEQ ID NO: 47991 - protein, 511 aa, Arabidopsis thaliana
  peptide (1)..(511): Ceres Seq. ID no. 12663276
MGGPSDSRSEVEGCTSIADWARHRKRRREDIKKESGVTISDIVACPEEQILTDEQPDMDGCPGGENPDDEGGEAMVEEALSGDEEETSSEPNWGMDCSTVVRVKELHISSPILAAKSPFFYKLFSNGMRESEQRHVTLRINASEEAALMELLNFMYSNAVSVTTAPALLDVLMAADKFEVASCMRYCSRLLRNMPMTPESALLYLELPSSVLMAKAVQPLTDAAKQFLAARYKDITKFHEEVMSLPLAGIEAILSSDELQIASEDAVYDFILKWARAQYPCLEERREILGSRLALSIRFPFMTCRKLKKVLTCSDFEHEIASKLVLEALFFKAEAPHRQRSLASEESASLNRRLIERAYKYRPVKVVEFELPRPQCVVYLDLKREECGGLFPSGRVYSQAFHLGGQGFFLSAHCNMDQQSSFHCFGLFLGMQEKGSVSFGVDYEFSARSKPAEDFISKYKGNYTFTGGKAVGYRNLFGVPWTSFIAEDSQYFINGILHLRAELTIKRLEED

SEQ ID NO: 47992 - DNA, 1346 bp, Arabidopsis thaliana; identical to SEQ ID NO: 42742
  misc_feature (1)..(1346): Ceres Seq. ID no. 13648951
  misc_feature (1)..(1346): Ortholog of  Ceres SEQ ID NO 15177328 as cited in SEQ ID NO 52523
  misc_feature (1)..(1346): Ortholog of  Ceres SEQ ID NO 13655881 as cited in SEQ ID NO 64426

SEQ ID NO: 47993 - protein, 292 aa, Arabidopsis thaliana; identical to SEQ ID NO: 42743
  peptide (1)..(292): Ceres Seq. ID no. 13648952

SEQ ID NO: 47994 - protein, 269 aa, Arabidopsis thaliana; identical to SEQ ID NO: 42744
  peptide (1)..(269): Ceres Seq. ID no. 13648953

SEQ ID NO: 47995 - protein, 262 aa, Arabidopsis thaliana; identical to SEQ ID NO: 42745
  peptide (1)..(262): Ceres Seq. ID no. 13648954

SEQ ID NO: 47996 - DNA, 2438 bp, Arabidopsis thaliana
  misc_feature (1)..(2438): Ceres Seq. ID no. 13593104
  misc_feature (1)..(2438): Ortholog of  Ceres SEQ ID NO 12465083 as cited in SEQ ID NO 68239
gatctagaatcttccctcaacctctagaaaacaactttcgtatccttcaaaaaccctaaaccctagcttttgcacagacgcaatttcatcgcatcattttgcaattttcctttactgatctgtcaccacctcttgaatttcgaaaccatggctaccgcagctctcctccgctctattcgacgccgtgaagtcgtttcctctcctttctcagcttacagatgcctttcaagcagtgggaaagcatcattgaacagttcctatctgggtcagaattttagaagcttttccagagcctttagctcgaagcctgctggaaacgatgtcattggtattgatttgggtactactaattcatgtgttgccgtcatggaggggaagaatccgaaagtcattgaaaatgctgaaggtgctcgaaccactccatcagttgtagcattcaacacgaaaggagaacttcttgtgggtacaccagccaagcgacaagctgtcactaatcctacaaacacagtatctggaacgaaacgtttgattgggagaaagttcgacgatccacaaactcagaaagaaatgaagatggtgccttacaagattgtgcgtgcacctaatggcgatgcgtgggttgaagccaatggtcagcagtattctcctagtcagattggagcgtttatcttgacgaagatgaaagagacggccgaagcttaccttggaaaatctgtcacgaaagctgttgtcactgttccagcttactttaatgatgctcagagacaagcaacaaaagatgctggtagaattgctggtcttgatgttgagagaatcataaatgaaccgacggctgctgctctgtcctatggaatgaccaacaaggaggggttgattgctgtgtttgatcttggtggtgggacatttgatgtatctgttttggagatttctaatggggtattcgaggtgaaagccaccaatggtgataccttcttgggaggtgaggatttcgacaatgctctgctagacttcttggttaatgagttcaagaccactgagggaatagacctagccaaagacagacttgctctgcagaggcttagagaagccgctgagaaagcgaagattgaactgtcatctacttctcaaactgaaattaatctcccatttatcacagccgatgcatctggagcaaagcatttcaacatcaccctaacaaggtcaaggtttgaaactcttgtgaatcacttgattgagaggacccgcgatccttgcaagaactgtctcaaggatgctggtataagtgctaaggaagttgatgaggttcttctagttggaggaatgacgcgtgtccccaaggttcagtctattgttgcggagatctttggaaagagtccaagcaaaggtgtcaatcctgatgaggctgttgctatgggagctgcacttcaaggtggtatcctccgcggtgatgtcaaagaattgttgcttctggatgtcacacctctatcgctcggtattgaaacacttggtggtgtctttacgagactgatcacccgaaatacaaccatccccacaaagaagagtcaggtgttctcaactgcagccgataatcagactcaagttgggatcagggtgcttcaaggtgagcgtgaaatggcaacagacaacaagctcttgggagaatttgatctagttggcattccaccatctccaagaggagtccctcagatcgaagtgacatttgacattgatgccaatggcattgtcactgtttccgccaaggacaagacgactggtaaagtacaacagatcacaatccgatcctctggtgggctctcagaggatgatatccagaagatggtgagagaagcagagttgcatgctcagaaagacaaagaaagaaaagaattgatcgacaccaagaacacagctgacacaacaatttacagcatagagaagagtcttggtgaatacagagagaagatcccaagtgaaatcgccaaggagattgaagatgctgtggcagatctaaggagcgcttcctctggggatgatctcaacgagatcaaggccaagattgaggcggcaaacaaagctgtttctaagattggggagcacatgtctggtggttctggtggaggctctgcaccaggaggaggatctgagggaggcagtgatcaagctccagaagcagagtacgaggaagtgaaaaagtgaggagatttggtaaattcttgccacttgggttttaagagattaggtttagatcatggtgggttctatgtccaaggaacttttgccttttagaacaacgagcagtggatatgtttctggaataagcttttgtcagggaactaaacttaatgtttctctgctaaaaaacctttgttatgtaatgtgatggttaaagagaagaagttttcaaaattttgtcactttatactttatagtttattttc

SEQ ID NO: 47997 - protein, 682 aa, Arabidopsis thaliana
  peptide (1)..(682): Ceres Seq. ID no. 13593105
MATAALLRSIRRREVVSSPFSAYRCLSSSGKASLNSSYLGQNFRSFSRAFSSKPAGNDVIGIDLGTTNSCVAVMEGKNPKVIENAEGARTTPSVVAFNTKGELLVGTPAKRQAVTNPTNTVSGTKRLIGRKFDDPQTQKEMKMVPYKIVRAPNGDAWVEANGQQYSPSQIGAFILTKMKETAEAYLGKSVTKAVVTVPAYFNDAQRQATKDAGRIAGLDVERIINEPTAAALSYGMTNKEGLIAVFDLGGGTFDVSVLEISNGVFEVKATNGDTFLGGEDFDNALLDFLVNEFKTTEGIDLAKDRLALQRLREAAEKAKIELSSTSQTEINLPFITADASGAKHFNITLTRSRFETLVNHLIERTRDPCKNCLKDAGISAKEVDEVLLVGGMTRVPKVQSIVAEIFGKSPSKGVNPDEAVAMGAALQGGILRGDVKELLLLDVTPLSLGIETLGGVFTRLITRNTTIPTKKSQVFSTAADNQTQVGIRVLQGEREMATDNKLLGEFDLVGIPPSPRGVPQIEVTFDIDANGIVTVSAKDKTTGKVQQITIRSSGGLSEDDIQKMVREAELHAQKDKERKELIDTKNTADTTIYSIEKSLGEYREKIPSEIAKEIEDAVADLRSASSGDDLNEIKAKIEAANKAVSKIGEHMSGGSGGGSAPGGGSEGGSDQAPEAEYEEVKK

SEQ ID NO: 47998 - protein, 609 aa, Arabidopsis thaliana
  peptide (1)..(609): Ceres Seq. ID no. 13593106
MEGKNPKVIENAEGARTTPSVVAFNTKGELLVGTPAKRQAVTNPTNTVSGTKRLIGRKFDDPQTQKEMKMVPYKIVRAPNGDAWVEANGQQYSPSQIGAFILTKMKETAEAYLGKSVTKAVVTVPAYFNDAQRQATKDAGRIAGLDVERIINEPTAAALSYGMTNKEGLIAVFDLGGGTFDVSVLEISNGVFEVKATNGDTFLGGEDFDNALLDFLVNEFKTTEGIDLAKDRLALQRLREAAEKAKIELSSTSQTEINLPFITADASGAKHFNITLTRSRFETLVNHLIERTRDPCKNCLKDAGISAKEVDEVLLVGGMTRVPKVQSIVAEIFGKSPSKGVNPDEAVAMGAALQGGILRGDVKELLLLDVTPLSLGIETLGGVFTRLITRNTTIPTKKSQVFSTAADNQTQVGIRVLQGEREMATDNKLLGEFDLVGIPPSPRGVPQIEVTFDIDANGIVTVSAKDKTTGKVQQITIRSSGGLSEDDIQKMVREAELHAQKDKERKELIDTKNTADTTIYSIEKSLGEYREKIPSEIAKEIEDAVADLRSASSGDDLNEIKAKIEAANKAVSKIGEHMSGGSGGGSAPGGGSEGGSDQAPEAEYEEVKK

SEQ ID NO: 47999 - protein, 542 aa, Arabidopsis thaliana
  peptide (1)..(542): Ceres Seq. ID no. 13593107
MKMVPYKIVRAPNGDAWVEANGQQYSPSQIGAFILTKMKETAEAYLGKSVTKAVVTVPAYFNDAQRQATKDAGRIAGLDVERIINEPTAAALSYGMTNKEGLIAVFDLGGGTFDVSVLEISNGVFEVKATNGDTFLGGEDFDNALLDFLVNEFKTTEGIDLAKDRLALQRLREAAEKAKIELSSTSQTEINLPFITADASGAKHFNITLTRSRFETLVNHLIERTRDPCKNCLKDAGISAKEVDEVLLVGGMTRVPKVQSIVAEIFGKSPSKGVNPDEAVAMGAALQGGILRGDVKELLLLDVTPLSLGIETLGGVFTRLITRNTTIPTKKSQVFSTAADNQTQVGIRVLQGEREMATDNKLLGEFDLVGIPPSPRGVPQIEVTFDIDANGIVTVSAKDKTTGKVQQITIRSSGGLSEDDIQKMVREAELHAQKDKERKELIDTKNTADTTIYSIEKSLGEYREKIPSEIAKEIEDAVADLRSASSGDDLNEIKAKIEAANKAVSKIGEHMSGGSGGGSAPGGGSEGGSDQAPEAEYEEVKK

SEQ ID NO: 48000 - DNA, 1542 bp, Arabidopsis thaliana
  misc_feature (1)..(1542): Ceres Seq. ID no. 12665720
  misc_feature (1)..(1542): Ortholog of  Ceres SEQ ID NO 13594380 as cited in SEQ ID NO 58039
  misc_feature (1)..(1542): Ortholog of  Ceres SEQ ID NO 13597407 as cited in SEQ ID NO 64106
  misc_feature (1)..(1542): Ortholog of  Ceres SEQ ID NO 15180690 as cited in SEQ ID NO 0
atggcaggagggtcgtttggtccgaccggtgtggctaaggagagagcagaacaataccaagggaaagtcactagttatgttataatcgcttgccttgttgcagctattggtggatccatctttggatatgacattggaatctcaggaggagttacatcgatggatgagtttcttgaggagtttttccacacggtttatgagaagaagaagcaagctcatgaaagtaattactgcaaatatgataatcaaggcttagctgctttcacttcttcactctacttagctggtttggtttcgactctcgtggcttcacccatcactaggaactacggtaggcgtgcgagtattgtttgtggtggaatcagctttcttattggatctggtttgaatgctggagctgtgaacttagctatgcttcttgccggacggatcatgcttggtgttggtattggatttggaaatcaggcggttcctttgtatttatcagaagtggcaccaactcatctacgaggtggtttaaacatgatgtttcagctagctacaactatcgggatctttacagcgaacatggttaattacggtactcaacagcttaagccttggggatggagactctctcttggtttagctgcttttccagctctgcttatgacgcttggcgggtatttcttacccgagacaccaaacagtttggtcgaaagaggattaacagagagaggtcgacgagtcttagtgaagctaagaggaacagaaaacgtcaacgccgagcttcaagacatggtagatgcgagtgagcttgcgaattccatcaaacatccattcagaaacatcttgcagaaacgacacaggcctcagctagttatggctatttgcatgccaatgtttcagatactcacagggataaactccattctcttctacgcacctgttctgttccagacaatggggtttggaggaaacgcatctctctattcatcagctttaacaggagctgttcttgtcctatcaacatttatttccataggattagtagacagattgggacgaagagctcttctcataactggaggaatacaaatgataatctgtcaagtcatagtagcagtgatcttaggagtgaaatttggagacaaccaagagctatcaaaagggtactcagtgatcgtagtcatcttcatctgcctctttgttgtagcgttcggatggtcatggggtcctctaggttggaccatacctagcgaaatctttccgttagagactcgttcagcggggcagagtatcacagtagctgtaaatctcctcttcactttcatcatagctcaagctttccttggtctcctctgtgcattcaagtttggaatcttcctcttctttgctggttgggtgacagtaatgactatctttgtgtatttcctgttgcctgaaaccaaaggagttccaatagaagagatgacactcttatggagtaaacattggttctggaaaaaagtattacctgatgcaacaaatcttgaagatgagagcaagaatgtatctgtttaa

SEQ ID NO: 48001 - protein, 513 aa, Arabidopsis thaliana
  peptide (1)..(513): Ceres Seq. ID no. 12665721
MAGGSFGPTGVAKERAEQYQGKVTSYVIIACLVAAIGGSIFGYDIGISGGVTSMDEFLEEFFHTVYEKKKQAHESNYCKYDNQGLAAFTSSLYLAGLVSTLVASPITRNYGRRASIVCGGISFLIGSGLNAGAVNLAMLLAGRIMLGVGIGFGNQAVPLYLSEVAPTHLRGGLNMMFQLATTIGIFTANMVNYGTQQLKPWGWRLSLGLAAFPALLMTLGGYFLPETPNSLVERGLTERGRRVLVKLRGTENVNAELQDMVDASELANSIKHPFRNILQKRHRPQLVMAICMPMFQILTGINSILFYAPVLFQTMGFGGNASLYSSALTGAVLVLSTFISIGLVDRLGRRALLITGGIQMIICQVIVAVILGVKFGDNQELSKGYSVIVVIFICLFVVAFGWSWGPLGWTIPSEIFPLETRSAGQSITVAVNLLFTFIIAQAFLGLLCAFKFGIFLFFAGWVTVMTIFVYFLLPETKGVPIEEMTLLWSKHWFWKKVLPDATNLEDESKNVSV

SEQ ID NO: 48002 - protein, 460 aa, Arabidopsis thaliana
  peptide (1)..(460): Ceres Seq. ID no. 12665722
MDEFLEEFFHTVYEKKKQAHESNYCKYDNQGLAAFTSSLYLAGLVSTLVASPITRNYGRRASIVCGGISFLIGSGLNAGAVNLAMLLAGRIMLGVGIGFGNQAVPLYLSEVAPTHLRGGLNMMFQLATTIGIFTANMVNYGTQQLKPWGWRLSLGLAAFPALLMTLGGYFLPETPNSLVERGLTERGRRVLVKLRGTENVNAELQDMVDASELANSIKHPFRNILQKRHRPQLVMAICMPMFQILTGINSILFYAPVLFQTMGFGGNASLYSSALTGAVLVLSTFISIGLVDRLGRRALLITGGIQMIICQVIVAVILGVKFGDNQELSKGYSVIVVIFICLFVVAFGWSWGPLGWTIPSEIFPLETRSAGQSITVAVNLLFTFIIAQAFLGLLCAFKFGIFLFFAGWVTVMTIFVYFLLPETKGVPIEEMTLLWSKHWFWKKVLPDATNLEDESKNVSV

SEQ ID NO: 48003 - protein, 376 aa, Arabidopsis thaliana
  peptide (1)..(376): Ceres Seq. ID no. 12665723
MLLAGRIMLGVGIGFGNQAVPLYLSEVAPTHLRGGLNMMFQLATTIGIFTANMVNYGTQQLKPWGWRLSLGLAAFPALLMTLGGYFLPETPNSLVERGLTERGRRVLVKLRGTENVNAELQDMVDASELANSIKHPFRNILQKRHRPQLVMAICMPMFQILTGINSILFYAPVLFQTMGFGGNASLYSSALTGAVLVLSTFISIGLVDRLGRRALLITGGIQMIICQVIVAVILGVKFGDNQELSKGYSVIVVIFICLFVVAFGWSWGPLGWTIPSEIFPLETRSAGQSITVAVNLLFTFIIAQAFLGLLCAFKFGIFLFFAGWVTVMTIFVYFLLPETKGVPIEEMTLLWSKHWFWKKVLPDATNLEDESKNVSV

SEQ ID NO: 48004 - DNA, 1953 bp, Arabidopsis thaliana
  misc_feature (1)..(1953): Ceres Seq. ID no. 12729258
  misc_feature (1)..(1953): Ortholog of  Ceres SEQ ID NO 13590780 as cited in SEQ ID NO 68149
  misc_feature (1)..(1953): Ortholog of  Ceres SEQ ID NO 13599756 as cited in SEQ ID NO 0
atggcctcttctcattctcttctcttttcttcttccttcctctctaaaccctcttctttcacttcttctctgagacggtttgtttaccttcccactcgccaattttggccaaggcagcgacatggtttctctaccgtcttcgccgtcgccaccgagccagctatctccagcagcggtcctaagaaagcagagccatcgacggtcgtgcttcctagtaatgaatcatctgataagcttctcaaaattcgacacacgtgtgcgcatgtaatggcaatggcagttcagaaactcttcccggatgcaaaagtgacgataggtccttggattgataatggtttctactatgattttgatatggagcctttaacagataaagaccttaagaggatcaagaaagagatggatcgtatcattagtcggaatttaccacttttaagagaagaagtatctagagaagaagcgaagaaaaggatcatggcgataaatgagccttataagatggagattttggatggtattaaggaagaacccatcaccgtttatcatatcggtaatgaatggtgggatctttgtgcgggtcctcatgtcgagaccacagggaagataaacaagaaagcagttgaactagaatctgttgctggtgcatactggagaggagatgaaaagaggcaaatgcttcagaggatatacggaacagcttgggagagcgaagagcaactgaaagcatatcttcattttaaagaagaagctaaacgcagggatcatagacgcatcggccaagaccttgatctgttttctatccaggatgaagctggaggagggttagtgttttggcatccgaaaggtgcaattgttagaaacataattgaagaatcgtggaagaaaatgcatgttgaacatggttatgatttgatctatactcctcatgttgccaaagctgacctgtggaagatcagtggtcacttggacttctacagagagaatatgtatgatcaaatggagatcgaggatgagctttatcaactccgaccaatgaattgcccttaccacatcttgctttaccaaagaaagcgtcaatcatatcgagatttgcccataagagttgcagagctcggtacagtttacagatatgagttgtctggtagcttgcacggtctcttccgtgtcagagggttcacacaggacgatgcacacatattttgtttagaggatcagatcaaagatgagatcagaggtgttctagatctcacagaagagatattgtcgaggtttggattcaacaagtatgaggttaacttatcaactagacctgaaaaatcagttggaggtgatgatatatgggagaaggcgacctgtgcccttagagatgctttagatgataagggatggagctatgaggttgacgaaggaggtggcgccttttacggcccaaagatcgaccttaagattgaagatgcattgggtagaaaatggcagtgctcaactattcaggtcgacttcaatcttcctcagagatttgacattacctatgtagacacaaactcagataagaaacgtcctataatgatccacagagcggttttaggatcattagaaagatttttcggtgttctcatagaacactacgcaggggatttcccgttatggctctctcctgttcaagtccgggtcttacctgtcacagacaatcagttggagttttgtaaggaagtgagtaagaaactgagagcttgtggagtgagggctgagttgtgccatggggagagactgcctaagctcataaggaacgcagagacgcagaagatcccgttaatggcggttgttggacccaaagaagtcgagaccggaactgttaccgttagatcgaggtttggaggagagcttggaaccattcctgttgatgacctcatcaacaaaatcaacattgcagttgaaaccagaactgctctgtaa

SEQ ID NO: 48005 - protein, 650 aa, Arabidopsis thaliana
  peptide (1)..(650): Ceres Seq. ID no. 12729259
MASSHSLLFSSSFLSKPSSFTSSLRRFVYLPTRQFWPRQRHGFSTVFAVATEPAISSSGPKKAEPSTVVLPSNESSDKLLKIRHTCAHVMAMAVQKLFPDAKVTIGPWIDNGFYYDFDMEPLTDKDLKRIKKEMDRIISRNLPLLREEVSREEAKKRIMAINEPYKMEILDGIKEEPITVYHIGNEWWDLCAGPHVETTGKINKKAVELESVAGAYWRGDEKRQMLQRIYGTAWESEEQLKAYLHFKEEAKRRDHRRIGQDLDLFSIQDEAGGGLVFWHPKGAIVRNIIEESWKKMHVEHGYDLIYTPHVAKADLWKISGHLDFYRENMYDQMEIEDELYQLRPMNCPYHILLYQRKRQSYRDLPIRVAELGTVYRYELSGSLHGLFRVRGFTQDDAHIFCLEDQIKDEIRGVLDLTEEILSRFGFNKYEVNLSTRPEKSVGGDDIWEKATCALRDALDDKGWSYEVDEGGGAFYGPKIDLKIEDALGRKWQCSTIQVDFNLPQRFDITYVDTNSDKKRPIMIHRAVLGSLERFFGVLIEHYAGDFPLWLSPVQVRVLPVTDNQLEFCKEVSKKLRACGVRAELCHGERLPKLIRNAETQKIPLMAVVGPKEVETGTVTVRSRFGGELGTIPVDDLINKINIAVETRTAL

SEQ ID NO: 48006 - protein, 561 aa, Arabidopsis thaliana
  peptide (1)..(561): Ceres Seq. ID no. 12729260
MAMAVQKLFPDAKVTIGPWIDNGFYYDFDMEPLTDKDLKRIKKEMDRIISRNLPLLREEVSREEAKKRIMAINEPYKMEILDGIKEEPITVYHIGNEWWDLCAGPHVETTGKINKKAVELESVAGAYWRGDEKRQMLQRIYGTAWESEEQLKAYLHFKEEAKRRDHRRIGQDLDLFSIQDEAGGGLVFWHPKGAIVRNIIEESWKKMHVEHGYDLIYTPHVAKADLWKISGHLDFYRENMYDQMEIEDELYQLRPMNCPYHILLYQRKRQSYRDLPIRVAELGTVYRYELSGSLHGLFRVRGFTQDDAHIFCLEDQIKDEIRGVLDLTEEILSRFGFNKYEVNLSTRPEKSVGGDDIWEKATCALRDALDDKGWSYEVDEGGGAFYGPKIDLKIEDALGRKWQCSTIQVDFNLPQRFDITYVDTNSDKKRPIMIHRAVLGSLERFFGVLIEHYAGDFPLWLSPVQVRVLPVTDNQLEFCKEVSKKLRACGVRAELCHGERLPKLIRNAETQKIPLMAVVGPKEVETGTVTVRSRFGGELGTIPVDDLINKINIAVETRTAL

SEQ ID NO: 48007 - protein, 559 aa, Arabidopsis thaliana
  peptide (1)..(559): Ceres Seq. ID no. 12729261
MAVQKLFPDAKVTIGPWIDNGFYYDFDMEPLTDKDLKRIKKEMDRIISRNLPLLREEVSREEAKKRIMAINEPYKMEILDGIKEEPITVYHIGNEWWDLCAGPHVETTGKINKKAVELESVAGAYWRGDEKRQMLQRIYGTAWESEEQLKAYLHFKEEAKRRDHRRIGQDLDLFSIQDEAGGGLVFWHPKGAIVRNIIEESWKKMHVEHGYDLIYTPHVAKADLWKISGHLDFYRENMYDQMEIEDELYQLRPMNCPYHILLYQRKRQSYRDLPIRVAELGTVYRYELSGSLHGLFRVRGFTQDDAHIFCLEDQIKDEIRGVLDLTEEILSRFGFNKYEVNLSTRPEKSVGGDDIWEKATCALRDALDDKGWSYEVDEGGGAFYGPKIDLKIEDALGRKWQCSTIQVDFNLPQRFDITYVDTNSDKKRPIMIHRAVLGSLERFFGVLIEHYAGDFPLWLSPVQVRVLPVTDNQLEFCKEVSKKLRACGVRAELCHGERLPKLIRNAETQKIPLMAVVGPKEVETGTVTVRSRFGGELGTIPVDDLINKINIAVETRTAL

SEQ ID NO: 48008 - DNA, 1598 bp, Arabidopsis thaliana
  misc_feature (1)..(1598): Ceres Seq. ID no. 12680832
  misc_feature (1)..(1598): Ortholog of  Ceres SEQ ID NO 13597546 as cited in SEQ ID NO 65017
  misc_feature (1)..(1598): Ortholog of  Ceres SEQ ID NO 13654353 as cited in SEQ ID NO 68318
atatccaaaagactaggaaaaagaaaataacttaacatatggtagaggtttatgagttctgggccgtgatagtttcactcatagtggtaaagctgtgtcactggatctaccagtggaaaaatccaaaaggaaatggaaaacttcctccaggatctatgggttatccaatcatcggagagactttcgagttcatgaagcttcatgatgctattcagttaccaacattcgttaaggagaaattactcagacatggaccagtttttaggacaagcttatttggaggcaaagttatcatttcgactgatattggattgaacatggagatcgcaaagacaaatcatattcccggtatgccgaagagcttagagcggttatttggggcaaccaacttgtttgtgaataaggatactcataaacatgcccgcagcttgacaaaccagtttttaggttcgcaagctttaaaattaaggatgattcaagacatcgatttcttggctcgcacacacatgaaggaaggagctaggaaaggctgccttgacgtcaaggaaactgcaagcaagatcgttattgaatgtctttcgaagaaagtaatgggagagatggaaccagaggcagcaaaggaactcacactctgttggacatttttcccaagggattggtttcgattcgcttggaatttcccggggactggtgtctatcgcatagtgaaggcaagaaatcgtatgatgaaggttataaaggagacagtagttaaaaaaagagcatcaggaaagaaattgggggagtttttcgagaccatctttggagatacggaaagtgtaactatgagcatagagattgcgactgagtacatatttactctgtttgtgcttgctaacgaaacaacaccaggggtccttgcggcaacaataaagctcataagtgataaccctaaagtcatgcaggagttacggagagaacatgaaggaatcgtccaagataagattaagaaggatgagacagctgacctaacttgggaagactacaaatcaatgacttttacccagatggtgataaatgagtcgcttaggatcacaagcacggtaccaacggtgcttagaataattgatcatgagatccaatttggtgattatacaattccggctggttggatctttatgggttatccttatgtgcatttcaatccagagaagtatgatgaccctttagcttttaatccatggcgctggaagacttgagcacgatcgtctccaagacttaccttccctttggctctggtactagactatgtgtgggagctgaattcgttaagttgcaaatggccatttttatccatcatttgtttagatacaggtggtcaatgaaggcagagactactttacttcgaagatttatacttgtgcttccacgtggatctgatgttcaaatctcataagacaccaaacaggataactctgtatagtgttatgagagaataataaaattcagtttctatacctttcactctttctccttataacttttcatgtagttttggtatcatagccaatttcgatttttctagtatttgctttataaaaaatatatgttattgaaag

SEQ ID NO: 48009 - protein, 399 aa, Arabidopsis thaliana
  peptide (1)..(399): Ceres Seq. ID no. 12680833
MVEVYEFWAVIVSLIVVKLCHWIYQWKNPKGNGKLPPGSMGYPIIGETFEFMKLHDAIQLPTFVKEKLLRHGPVFRTSLFGGKVIISTDIGLNMEIAKTNHIPGMPKSLERLFGATNLFVNKDTHKHARSLTNQFLGSQALKLRMIQDIDFLARTHMKEGARKGCLDVKETASKIVIECLSKKVMGEMEPEAAKELTLCWTFFPRDWFRFAWNFPGTGVYRIVKARNRMMKVIKETVVKKRASGKKLGEFFETIFGDTESVTMSIEIATEYIFTLFVLANETTPGVLAATIKLISDNPKVMQELRREHEGIVQDKIKKDETADLTWEDYKSMTFTQMVINESLRITSTVPTVLRIIDHEIQFGDYTIPAGWIFMGYPYVHFNPEKYDDPLAFNPWRWKT

SEQ ID NO: 48010 - protein, 360 aa, Arabidopsis thaliana
  peptide (1)..(360): Ceres Seq. ID no. 12680834
MGYPIIGETFEFMKLHDAIQLPTFVKEKLLRHGPVFRTSLFGGKVIISTDIGLNMEIAKTNHIPGMPKSLERLFGATNLFVNKDTHKHARSLTNQFLGSQALKLRMIQDIDFLARTHMKEGARKGCLDVKETASKIVIECLSKKVMGEMEPEAAKELTLCWTFFPRDWFRFAWNFPGTGVYRIVKARNRMMKVIKETVVKKRASGKKLGEFFETIFGDTESVTMSIEIATEYIFTLFVLANETTPGVLAATIKLISDNPKVMQELRREHEGIVQDKIKKDETADLTWEDYKSMTFTQMVINESLRITSTVPTVLRIIDHEIQFGDYTIPAGWIFMGYPYVHFNPEKYDDPLAFNPWRWKT

SEQ ID NO: 48011 - protein, 348 aa, Arabidopsis thaliana
  peptide (1)..(348): Ceres Seq. ID no. 12680835
MKLHDAIQLPTFVKEKLLRHGPVFRTSLFGGKVIISTDIGLNMEIAKTNHIPGMPKSLERLFGATNLFVNKDTHKHARSLTNQFLGSQALKLRMIQDIDFLARTHMKEGARKGCLDVKETASKIVIECLSKKVMGEMEPEAAKELTLCWTFFPRDWFRFAWNFPGTGVYRIVKARNRMMKVIKETVVKKRASGKKLGEFFETIFGDTESVTMSIEIATEYIFTLFVLANETTPGVLAATIKLISDNPKVMQELRREHEGIVQDKIKKDETADLTWEDYKSMTFTQMVINESLRITSTVPTVLRIIDHEIQFGDYTIPAGWIFMGYPYVHFNPEKYDDPLAFNPWRWKT

SEQ ID NO: 48012 - DNA, 2322 bp, Arabidopsis thaliana
  misc_feature (1)..(2322): Ceres Seq. ID no. 12730151
  misc_feature (1)..(2322): Ortholog of  Ceres SEQ ID NO 14315434 as cited in SEQ ID NO 58671
atggttaaagaaatagcttcttggttattgatactatcaatggtggtgtttgtttctccggttttagctataaacggcggtggttatccacgatgtaactgcgaagacgaaggaaacagtttctggagtacagagaacattctagaaactcaaagagtaagcgatttcttaatcgcagtagcttatttctcaatccctattgagttactttacttcgtgagttgttccaatgttccattcaaatgggttctctttgagtttatcgccttcattgttctttgtggtatgactcatcttcttcatggttggacttactctgctcatccatttagattaatgatggcgtttactgttttcaagatgttgactgctttagtctcttgtgctactgcgattacgcttattactttgattcctctgcttttgaaagttaaagttagagagtttatgcttaagaagaaagctcatgagcttggtcgtgaagttggtttgattttgattaagaaagagactggctttcatgttcgtatgcttactcaagagattcgtaagtctttggatcgtcatacgattctttatactactttggttgagctttcgaagactttagggttgcagaattgtgcggtttggatgccgaatgacggtggaacggagatggatttgactcatgagttgagagggagaggtggttatggtggttgttctgtttctatggaggatttggatgttgttaggattagggagagtgatgaagtgaatgtgttgagtgttgactcgtccattgctcgagctagtggtggtggtggggatgttagtgagattggtgccgtggctgctattagaatgccgatgcttcgtgtttcggattttaatggagagctaagttatgcgatacttgtttgtgttttaccgggcgggacgcctcgggattggacttatcaggagattgagattgttaaagttgtggcggatcaagtaaccgttgcgttagatcatgcagcggttcttgaagagtctcagcttatgagggagaagctggcggaacagaacagggcgttgcagatggcgaagagagacgcgttgagagcgagccaagcgaggaatgcgtttcagaaaacgatgagcgaagggatgaggcgtcctatgcattcgatactcggtcttttgtcgatgattcaggacgagaagttgagtgacgagcagaaaatgattgttgatacgatggttaaaacagggaatgttatgtcgaatttggtgggggactctatggatgtgcctgacggtagatttggtacggagatgaaaccatttagtctgcatcgtacgatccatgaagcagcttgtatggcgagatgtttgtgtctatgcaatggaattaggttcttggttgacgcggagaagtctctacctgataatgtagtaggtgatgaaagaagggtctttcaagtgatacttcatatagttggtagtttagtaaagcctagaaaacgtcaagaaggatcttcattgatgtttaaggttttgaaagaaagaggaagcttggataggagtgatcatagatgggctgcttggagatcaccggcttcttcagcagatggagatgtgtatataagatttgaaatgaatgtagagaatgatgattcaagttctcaatcatttgcttctgtttcctccagagatcaagaagttggtgatgttagattctccggcggctatgggttaggacaagatctaagctttggtgtttgtaagaaagtggtgcagttgattcatgggaatatctcggtggtccctggctcggatggttcaccggagaccatgtcgttgctccttcggtttcgacgtagaccctccatatctgtccatggatccagcgagtcgccagctcctgaccaccacgctcacccacattcgaattctctgttacgtggcttacaagttttattggtagacaccaacgattcgaaccgggcagttacacgtaaactcttagagaaactcgggtgcgatgtaaccgcggtttcctctggattcgattgccttaccgccattgctcccggctcgtcctcgccttctacttcgtttcaagtggtggtgcttgatcttcaaatggcagagatggacggttatgaagtggccatgaggatcaggagtcgatcttggccgttgattgtggcgacgacagtgagcttggatgaagaaatgtgggacaagtgtgcacagattggaatcaatggagttgtgagaaagccagtggtgttaagagctatggagagtgagctccgaagagtattgttgcaagctgaccaacttctctaa

SEQ ID NO: 48013 - protein, 773 aa, Arabidopsis thaliana
  peptide (1)..(773): Ceres Seq. ID no. 12730152
MVKEIASWLLILSMVVFVSPVLAINGGGYPRCNCEDEGNSFWSTENILETQRVSDFLIAVAYFSIPIELLYFVSCSNVPFKWVLFEFIAFIVLCGMTHLLHGWTYSAHPFRLMMAFTVFKMLTALVSCATAITLITLIPLLLKVKVREFMLKKKAHELGREVGLILIKKETGFHVRMLTQEIRKSLDRHTILYTTLVELSKTLGLQNCAVWMPNDGGTEMDLTHELRGRGGYGGCSVSMEDLDVVRIRESDEVNVLSVDSSIARASGGGGDVSEIGAVAAIRMPMLRVSDFNGELSYAILVCVLPGGTPRDWTYQEIEIVKVVADQVTVALDHAAVLEESQLMREKLAEQNRALQMAKRDALRASQARNAFQKTMSEGMRRPMHSILGLLSMIQDEKLSDEQKMIVDTMVKTGNVMSNLVGDSMDVPDGRFGTEMKPFSLHRTIHEAACMARCLCLCNGIRFLVDAEKSLPDNVVGDERRVFQVILHIVGSLVKPRKRQEGSSLMFKVLKERGSLDRSDHRWAAWRSPASSADGDVYIRFEMNVENDDSSSQSFASVSSRDQEVGDVRFSGGYGLGQDLSFGVCKKVVQLIHGNISVVPGSDGSPETMSLLLRFRRRPSISVHGSSESPAPDHHAHPHSNSLLRGLQVLLVDTNDSNRAVTRKLLEKLGCDVTAVSSGFDCLTAIAPGSSSPSTSFQVVVLDLQMAEMDGYEVAMRIRSRSWPLIVATTVSLDEEMWDKCAQIGINGVVRKPVVLRAMESELRRVLLQADQLL

SEQ ID NO: 48014 - protein, 760 aa, Arabidopsis thaliana
  peptide (1)..(760): Ceres Seq. ID no. 12730153
MVVFVSPVLAINGGGYPRCNCEDEGNSFWSTENILETQRVSDFLIAVAYFSIPIELLYFVSCSNVPFKWVLFEFIAFIVLCGMTHLLHGWTYSAHPFRLMMAFTVFKMLTALVSCATAITLITLIPLLLKVKVREFMLKKKAHELGREVGLILIKKETGFHVRMLTQEIRKSLDRHTILYTTLVELSKTLGLQNCAVWMPNDGGTEMDLTHELRGRGGYGGCSVSMEDLDVVRIRESDEVNVLSVDSSIARASGGGGDVSEIGAVAAIRMPMLRVSDFNGELSYAILVCVLPGGTPRDWTYQEIEIVKVVADQVTVALDHAAVLEESQLMREKLAEQNRALQMAKRDALRASQARNAFQKTMSEGMRRPMHSILGLLSMIQDEKLSDEQKMIVDTMVKTGNVMSNLVGDSMDVPDGRFGTEMKPFSLHRTIHEAACMARCLCLCNGIRFLVDAEKSLPDNVVGDERRVFQVILHIVGSLVKPRKRQEGSSLMFKVLKERGSLDRSDHRWAAWRSPASSADGDVYIRFEMNVENDDSSSQSFASVSSRDQEVGDVRFSGGYGLGQDLSFGVCKKVVQLIHGNISVVPGSDGSPETMSLLLRFRRRPSISVHGSSESPAPDHHAHPHSNSLLRGLQVLLVDTNDSNRAVTRKLLEKLGCDVTAVSSGFDCLTAIAPGSSSPSTSFQVVVLDLQMAEMDGYEVAMRIRSRSWPLIVATTVSLDEEMWDKCAQIGINGVVRKPVVLRAMESELRRVLLQADQLL

SEQ ID NO: 48015 - protein, 678 aa, Arabidopsis thaliana
  peptide (1)..(678): Ceres Seq. ID no. 12730154
MTHLLHGWTYSAHPFRLMMAFTVFKMLTALVSCATAITLITLIPLLLKVKVREFMLKKKAHELGREVGLILIKKETGFHVRMLTQEIRKSLDRHTILYTTLVELSKTLGLQNCAVWMPNDGGTEMDLTHELRGRGGYGGCSVSMEDLDVVRIRESDEVNVLSVDSSIARASGGGGDVSEIGAVAAIRMPMLRVSDFNGELSYAILVCVLPGGTPRDWTYQEIEIVKVVADQVTVALDHAAVLEESQLMREKLAEQNRALQMAKRDALRASQARNAFQKTMSEGMRRPMHSILGLLSMIQDEKLSDEQKMIVDTMVKTGNVMSNLVGDSMDVPDGRFGTEMKPFSLHRTIHEAACMARCLCLCNGIRFLVDAEKSLPDNVVGDERRVFQVILHIVGSLVKPRKRQEGSSLMFKVLKERGSLDRSDHRWAAWRSPASSADGDVYIRFEMNVENDDSSSQSFASVSSRDQEVGDVRFSGGYGLGQDLSFGVCKKVVQLIHGNISVVPGSDGSPETMSLLLRFRRRPSISVHGSSESPAPDHHAHPHSNSLLRGLQVLLVDTNDSNRAVTRKLLEKLGCDVTAVSSGFDCLTAIAPGSSSPSTSFQVVVLDLQMAEMDGYEVAMRIRSRSWPLIVATTVSLDEEMWDKCAQIGINGVVRKPVVLRAMESELRRVLLQADQLL

SEQ ID NO: 48016 - DNA, 1655 bp, Arabidopsis thaliana
  misc_feature (1)..(1655): Ceres Seq. ID no. 12664856
  misc_feature (1)..(1655): Ortholog of  Ceres SEQ ID NO 13596816 as cited in SEQ ID NO 62287
atcttaaaatcacattctgatcatcaccaacacattgcaaaccaaaccagacacaaacacaaagacatgtctcttcttgctttcttcctcttcaccatccttgtcttttcaagttcatgttgttccgcaactcggttccaagggcacaggtacatgcagaggaaaacaatgctagatttggctagcaagattggtatcaactatggaagaagaggaaacaacctcccatctccatatcaatccatcaacttcatcaaatctatcaaagctggtcatgtcaagctctatgacgccgatccagagagtctcacactcctctctcaaaccaatctctacgtcaccataaccgtccctaaccaccaaatcaccgccctcagctctaaccaaaccatagctgacgaatgggtcagaactaacatcctcccttactatccacaaacacaaatccgttttgtccttgtcggaaacgaaatcctcagctacaattctgggaatgtctctgtgaatcttgtaccggcgatgcgcaaaatcgttaactcactcagattacatgggattcacaacatcaaagttgggacacctctagctatggattctctccggtcgtcgtttcctccatcgaacggaacattccgggaagaaatcaccggaccggtgatgttaccgttgctgaagtttctcaacggaacaaactcttacttcttccttaatgttcatccttacttccgttggtcaagaaaccccatgaacaccagtttggattttgctctgttccaaggacactcaacctataccgatcctcaaaccggtttggtttaccgtaatcttctagaccaaatgttggattcggttctcttcgccatgaccaaactcggttatccacatatgcgcctcgcgatctctgaaaccggatggcctaatttcggtgacatcgacgaaaccggagccaacattctcaacgcagctacctataaccgtaatctgatcaagaagatgagcgcaagtcctccaatcggtacaccatcaagacccggtttaccaataccgacatttgttttctccttattcaacgaaaaccagaaatccggttcggggacacagagacattggggaatcttgcatcccgacggttcaccaatctacgacgtagatttcaccggtcaaacacccttaaccggtttcaacccgttacctaaaccgacgaacaacgttccttacaaaggtcaagtgtggtgcgtaccagtcgaaggagccaacgagactgagcttgaagaaacattgaggatggcttgtgcccaaagcaacaccacttgtgcagctttagctcctgggagagaatgttacgaaccagtctccatttattggcatgcaagctacgcgcttaattcgtactgggctcagtttcgtaaccaaagcattcaatgtttcttcaatggattggctcatgagacaacaaccaaccctggaaatgatcgttgcaagtttccgagcgttactctgtgaggaggacttgaggaagaagacacatgattaaagctggattattcgtataactcaatattgttccttatcttttttttattataccttttctgcttcaagtttcgctatgttgagaaaaaaaattcaaataattaataaatagtaattttttt

SEQ ID NO: 48017 - protein, 500 aa, Arabidopsis thaliana
  peptide (1)..(500): Ceres Seq. ID no. 12664857
ILKSHSDHHQHIANQTRHKHKDMSLLAFFLFTILVFSSSCCSATRFQGHRYMQRKTMLDLASKIGINYGRRGNNLPSPYQSINFIKSIKAGHVKLYDADPESLTLLSQTNLYVTITVPNHQITALSSNQTIADEWVRTNILPYYPQTQIRFVLVGNEILSYNSGNVSVNLVPAMRKIVNSLRLHGIHNIKVGTPLAMDSLRSSFPPSNGTFREEITGPVMLPLLKFLNGTNSYFFLNVHPYFRWSRNPMNTSLDFALFQGHSTYTDPQTGLVYRNLLDQMLDSVLFAMTKLGYPHMRLAISETGWPNFGDIDETGANILNAATYNRNLIKKMSASPPIGTPSRPGLPIPTFVFSLFNENQKSGSGTQRHWGILHPDGSPIYDVDFTGQTPLTGFNPLPKPTNNVPYKGQVWCVPVEGANETELEETLRMACAQSNTTCAALAPGRECYEPVSIYWHASYALNSYWAQFRNQSIQCFFNGLAHETTTNPGNDRCKFPSVTL

SEQ ID NO: 48018 - protein, 478 aa, Arabidopsis thaliana
  peptide (1)..(478): Ceres Seq. ID no. 12664858
MSLLAFFLFTILVFSSSCCSATRFQGHRYMQRKTMLDLASKIGINYGRRGNNLPSPYQSINFIKSIKAGHVKLYDADPESLTLLSQTNLYVTITVPNHQITALSSNQTIADEWVRTNILPYYPQTQIRFVLVGNEILSYNSGNVSVNLVPAMRKIVNSLRLHGIHNIKVGTPLAMDSLRSSFPPSNGTFREEITGPVMLPLLKFLNGTNSYFFLNVHPYFRWSRNPMNTSLDFALFQGHSTYTDPQTGLVYRNLLDQMLDSVLFAMTKLGYPHMRLAISETGWPNFGDIDETGANILNAATYNRNLIKKMSASPPIGTPSRPGLPIPTFVFSLFNENQKSGSGTQRHWGILHPDGSPIYDVDFTGQTPLTGFNPLPKPTNNVPYKGQVWCVPVEGANETELEETLRMACAQSNTTCAALAPGRECYEPVSIYWHASYALNSYWAQFRNQSIQCFFNGLAHETTTNPGNDRCKFPSVTL

SEQ ID NO: 48019 - protein, 449 aa, Arabidopsis thaliana
  peptide (1)..(449): Ceres Seq. ID no. 12664859
MQRKTMLDLASKIGINYGRRGNNLPSPYQSINFIKSIKAGHVKLYDADPESLTLLSQTNLYVTITVPNHQITALSSNQTIADEWVRTNILPYYPQTQIRFVLVGNEILSYNSGNVSVNLVPAMRKIVNSLRLHGIHNIKVGTPLAMDSLRSSFPPSNGTFREEITGPVMLPLLKFLNGTNSYFFLNVHPYFRWSRNPMNTSLDFALFQGHSTYTDPQTGLVYRNLLDQMLDSVLFAMTKLGYPHMRLAISETGWPNFGDIDETGANILNAATYNRNLIKKMSASPPIGTPSRPGLPIPTFVFSLFNENQKSGSGTQRHWGILHPDGSPIYDVDFTGQTPLTGFNPLPKPTNNVPYKGQVWCVPVEGANETELEETLRMACAQSNTTCAALAPGRECYEPVSIYWHASYALNSYWAQFRNQSIQCFFNGLAHETTTNPGNDRCKFPSVTL

SEQ ID NO: 48020 - DNA, 1003 bp, Arabidopsis thaliana
  misc_feature (1)..(1003): Ceres Seq. ID no. 12661707
  misc_feature (1)..(1003): Ortholog of  Ceres SEQ ID NO 13598499 as cited in SEQ ID NO 64013
attgctcttctccacaagacaacatttctctggctcagaatcgacgccatggaaatgtaaagaagaaacaaagacgagctctcaaatccagcagcaatggcttttcttctttctaatctatcatctccgtcaatccatcttcaaaccggaaaatacccaaaccttaaacccattttcagtcaatctctatcgtcttcgtcttctgttagctacgaatttgtagaagagaatctatctacactctctctattgagcatccagtctcctcctcttaaagacacgcaagttcagacaagacacagttcgcaagataagcataataaccacgacagagatgaattctatatcaatcttggtgtcgctgtccgtacacttcgtgaagatttgcctttgctcttcactagagatcttaattacgacatctacagggatgatataacatttgtggatccgatgaacacattcactgggatggacaactacaagattatcttctgggcactcagatttcatgggaagatattgttcagagatatctcacttgagatcttcagagtatggcaaccatcagagaacatgattctcatcaggtggaatctcaagggtgtgcctagagttccatgggaagctaaaggagagtttcaaggcacttctcggtataaactcgaccgtaatggcaaaatctatgagcataaagtcgataacttggccttcaatttccctcaacagctcaaacctgcagcttcggttttggatttggtgactgcttcccctgcaagcagtcctaatcctacgttctttttcagtcctgtggactcttattcatcttcatgggttaagttttatcaagcggtgagagggacattggagacagaggatatgtttgtaacaacagactgtttagtcacatgctcatagtggaagtagagttgcgatatagacactcaaggtcacacttctcaggtgtatatagtttttacattaaaggtttcatatatatgag

SEQ ID NO: 48021 - protein, 273 aa, Arabidopsis thaliana
  peptide (1)..(273): Ceres Seq. ID no. 12661708
MAFLLSNLSSPSIHLQTGKYPNLKPIFSQSLSSSSSVSYEFVEENLSTLSLLSIQSPPLKDTQVQTRHSSQDKHNNHDRDEFYINLGVAVRTLREDLPLLFTRDLNYDIYRDDITFVDPMNTFTGMDNYKIIFWALRFHGKILFRDISLEIFRVWQPSENMILIRWNLKGVPRVPWEAKGEFQGTSRYKLDRNGKIYEHKVDNLAFNFPQQLKPAASVLDLVTASPASSPNPTFFFSPVDSYSSSWVKFYQAVRGTLETEDMFVTTDCLVTCS

SEQ ID NO: 48022 - protein, 154 aa, Arabidopsis thaliana
  peptide (1)..(154): Ceres Seq. ID no. 12661709
MNTFTGMDNYKIIFWALRFHGKILFRDISLEIFRVWQPSENMILIRWNLKGVPRVPWEAKGEFQGTSRYKLDRNGKIYEHKVDNLAFNFPQQLKPAASVLDLVTASPASSPNPTFFFSPVDSYSSSWVKFYQAVRGTLETEDMFVTTDCLVTCS

SEQ ID NO: 48023 - protein, 148 aa, Arabidopsis thaliana
  peptide (1)..(148): Ceres Seq. ID no. 12661710
MDNYKIIFWALRFHGKILFRDISLEIFRVWQPSENMILIRWNLKGVPRVPWEAKGEFQGTSRYKLDRNGKIYEHKVDNLAFNFPQQLKPAASVLDLVTASPASSPNPTFFFSPVDSYSSSWVKFYQAVRGTLETEDMFVTTDCLVTCS

SEQ ID NO: 48024 - DNA, 2764 bp, Arabidopsis thaliana; identical to SEQ ID NO: 44816
  misc_feature (1)..(2764): Ceres Seq. ID no. 13646330
  misc_feature (1)..(2764): Ortholog of  Ceres SEQ ID NO 15169142 as cited in SEQ ID NO 58748

SEQ ID NO: 48025 - protein, 772 aa, Arabidopsis thaliana; identical to SEQ ID NO: 44817
  peptide (1)..(772): Ceres Seq. ID no. 13646331

SEQ ID NO: 48026 - protein, 697 aa, Arabidopsis thaliana; identical to SEQ ID NO: 44818
  peptide (1)..(697): Ceres Seq. ID no. 13646332

SEQ ID NO: 48027 - protein, 691 aa, Arabidopsis thaliana; identical to SEQ ID NO: 44819
  peptide (1)..(691): Ceres Seq. ID no. 13646333

SEQ ID NO: 48028 - DNA, 1693 bp, Arabidopsis thaliana
  misc_feature (1)..(1693): Ceres Seq. ID no. 13649623
  misc_feature (1)..(1693): Ortholog of  Ceres SEQ ID NO 14313514 as cited in SEQ ID NO 65029
atgaagccctcccttaaacgacgtcttcttcttctttctcgaaaattcgccaaagcttcgatccgaaaacttcttcgccaatcttccttttcttctcacgaatttctccttcaagctccgttcccagcaatgtcatggtacagaagaacaaaactcgtattcgattccctgcgacgcaacataaacccgaagattctacctcgatctcatgttacttcgagaatcaacaatccaattgggtcttctaatccctcagctaagttctcttcaatctcttcgcgagaagtaggattaagatcatggacatctctcggccgaaacacgaacagaatcgcgtataatccgtttctgagtcaacccaagagatattactacgttgatcgataccaagttcgtcatttcaagccacgaggaccaggacggtggtttcaaaaccctagaactgtgtttacggtggtgctcgttggttccgttggtctgatcactttgattgttgggaatacagaaacgattccgtacacaaagagaacacatttcattctcttatcgaaacctatggagaagcttcttggtgaaactcaatttgagcagattaagaaaacttaccaagggaaaattcttcctgcgactcatcctgagagtatcagggttagattgatagctaaagaggttattgatgcgttacagagaggtttgagtaatgagcgtgtatggagtgatttggggtatgcttctactgagagtagtttgggaggtggtagtgataaaggagttaaggaaatggaaatggctatgagtggtgaagatactatgactgatatgaaatggtctaaagaagatcaggttcttgatgatcaatggattcaaaagagtaggaagaaagattcaaaggctcatgcagcgactagtcatcttgaaggtattagttgggaggttcttgtggttaatgagcctattgttaacgcgttttgtttgcctgctgggaagattgtggtgttcactgggctgcttaatcatttcaagtcagatgctgaagttgccactgtgattgggcatgaggttggtcatgcggtggcccgacatgtagctgagggaataactaagaacttgtggtttgctatccttcaactggtcctatatcagtttgtcatgcctgatcttgtgaacactatgtccgcccttttcttgaggcttcctttctccagaaagatggagatagaagcagactacatcggtttgctgttacttgcatctgcgggctatgacccacgagtagctcccacagtgtatgagaagctgggaaagctcggtggagacgcactcggagattatctatcgacccatccgtcgggaaaaaagagatcaaaacttttggctcaagccaatgtgatggaagaagcactaatgatatatagagaagtccaagcaggtcgtactggcgttgaaggctttctttagctcttcaccattcatctcgtctgcttctgtacattatttctcctccacctccattaatcatgtggaatgttatgttagtatgtttatgtcgttaaattgattggtgcaatagaatgattccgattgagacgtatagttggatattttggtctaaataaacattttagacatagaacatgcaaatggtgaaaataggaacctgaaatagaatagttataagtattgaattcacgac

SEQ ID NO: 48029 - protein, 485 aa, Arabidopsis thaliana
  peptide (1)..(485): Ceres Seq. ID no. 13649624
MKPSLKRRLLLLSRKFAKASIRKLLRQSSFSSHEFLLQAPFPAMSWYRRTKLVFDSLRRNINPKILPRSHVTSRINNPIGSSNPSAKFSSISSREVGLRSWTSLGRNTNRIAYNPFLSQPKRYYYVDRYQVRHFKPRGPGRWFQNPRTVFTVVLVGSVGLITLIVGNTETIPYTKRTHFILLSKPMEKLLGETQFEQIKKTYQGKILPATHPESIRVRLIAKEVIDALQRGLSNERVWSDLGYASTESSLGGGSDKGVKEMEMAMSGEDTMTDMKWSKEDQVLDDQWIQKSRKKDSKAHAATSHLEGISWEVLVVNEPIVNAFCLPAGKIVVFTGLLNHFKSDAEVATVIGHEVGHAVARHVAEGITKNLWFAILQLVLYQFVMPDLVNTMSALFLRLPFSRKMEIEADYIGLLLLASAGYDPRVAPTVYEKLGKLGGDALGDYLSTHPSGKKRSKLLAQANVMEEALMIYREVQAGRTGVEGFL

SEQ ID NO: 48030 - protein, 442 aa, Arabidopsis thaliana
  peptide (1)..(442): Ceres Seq. ID no. 13649625
MSWYRRTKLVFDSLRRNINPKILPRSHVTSRINNPIGSSNPSAKFSSISSREVGLRSWTSLGRNTNRIAYNPFLSQPKRYYYVDRYQVRHFKPRGPGRWFQNPRTVFTVVLVGSVGLITLIVGNTETIPYTKRTHFILLSKPMEKLLGETQFEQIKKTYQGKILPATHPESIRVRLIAKEVIDALQRGLSNERVWSDLGYASTESSLGGGSDKGVKEMEMAMSGEDTMTDMKWSKEDQVLDDQWIQKSRKKDSKAHAATSHLEGISWEVLVVNEPIVNAFCLPAGKIVVFTGLLNHFKSDAEVATVIGHEVGHAVARHVAEGITKNLWFAILQLVLYQFVMPDLVNTMSALFLRLPFSRKMEIEADYIGLLLLASAGYDPRVAPTVYEKLGKLGGDALGDYLSTHPSGKKRSKLLAQANVMEEALMIYREVQAGRTGVEGFL

SEQ ID NO: 48031 - protein, 300 aa, Arabidopsis thaliana
  peptide (1)..(300): Ceres Seq. ID no. 13649626
MEKLLGETQFEQIKKTYQGKILPATHPESIRVRLIAKEVIDALQRGLSNERVWSDLGYASTESSLGGGSDKGVKEMEMAMSGEDTMTDMKWSKEDQVLDDQWIQKSRKKDSKAHAATSHLEGISWEVLVVNEPIVNAFCLPAGKIVVFTGLLNHFKSDAEVATVIGHEVGHAVARHVAEGITKNLWFAILQLVLYQFVMPDLVNTMSALFLRLPFSRKMEIEADYIGLLLLASAGYDPRVAPTVYEKLGKLGGDALGDYLSTHPSGKKRSKLLAQANVMEEALMIYREVQAGRTGVEGFL

SEQ ID NO: 48032 - DNA, 1944 bp, Arabidopsis thaliana
  misc_feature (1)..(1944): Ceres Seq. ID no. 13649263
  misc_feature (1)..(1944): Ortholog of  Ceres SEQ ID NO 13656177 as cited in SEQ ID NO 64997
ggcttcacaaaaccttccgataaacctcacaaccctcttcctcctcacactacagtaagaaaaacacgcgcgaaagctatggtaggagcttcaagaacaatcctatccctatctctatcatcttccctcttcaccttctccaaaatccctcacgtttttccatttctccgcctccacaaacccagattccaccacgcgtttcgtcctctttactccgccgccgcaacaacttcttctccgacgacggagactaatgttacagatccggatcaattgaaacatacgatcttactagagaggcttaggcttcgacatttgaaagaatcagcgaaaccaccacaacagagaccaagtagtgttgttggtgtagaggaagagagtagtattaggaagaagagtaagaagttagttgagaattttcaggaattgggtttaagtgaagaagttatgggagctttacaagagttgaatattgaggttcctactgagattcagtgtatcggaatacctgcggttatggaacgtaagagcgttgtattgggttcgcataccggttctggcaagactcttgcttacttgttgcctattgttcagctgatgagagaagatgaagcaaaccttggtaaaaaaacaaagcctagacgtcccaggactgttgttctttgtcctacaagagaactatctgagcaggtttaccgtgtggcgaagtccataagtcatcacgcgaggtttagatctatattggttagtggtggttctcggataagaccccaggaggattctttgaacaatgcaatagatatggttgttggaacccctggtaggattcttcagcatatcgaagaaggaaacatggtgtatggagatatcgcatatttggtattggatgaggcagatactatgtttgatcgtggctttggtcccgaaattcgtaaattccttgccccactgaatcaacgtgcgttgaaaacaaatgaccaaggatttcaaaccgtcttagtgactgctactatgacaatggctgttcagaagttagtcgatgaggagtttcaagggatagagcatttgcgtacatcaacactgcataaaaagatagcaaacgctcgccatgacttcatcaagctttcaggtggtgaagataagctagaagcacttctacaggttcttgaacctagcctagccaaagggagcaaggtgatggtcttctgtaacactttgaactccagtcgcgctgttgatcactatctttctgaaaaccagatctccactgtaaattatcacggtgaagttccagcagaacaaagggttgagaatttgaaaaagttcaaggacgaagaaggagactgtcccacgctagtgtgcacggatttggctgcaaggggtctggacctcgacgttgatcatgtagtcatgtttgatttcccaaagaactcgattgactaccttcatcgcactggaagaacagctcggatgggtgctaaaggaaaagtgacaagtctagtgagcaggaaggaccaaatgttagcagcacgaatcgaagaagcaatgagaaacaacgagagcttagaatcactcacgactgataatgtgaggagagacgccgcaagaacccatatcactcaagagaaaggaagaagcgttaagcagatcagagaagtgagcaagcaacgaaactccagagacaaaccatcatcatcatctcctcctgcaagatcgacaggtgggaagacacccgtgagaaagtcaagttcaagttcgttttcgaaaccaagaaaagcatcatctcctccagagaaatcttcaaagccaaaaagaaaaatattaaaaacggttggatccagatcgattgctgcgagggggaagacgggttcagatagaagaccaggaaagaaactaagtgttgttggtttccggggcaagtcttcttcggcaagagcctcttga

SEQ ID NO: 48033 - protein, 647 aa, Arabidopsis thaliana
  peptide (1)..(647): Ceres Seq. ID no. 13649264
GFTKPSDKPHNPLPPHTTVRKTRAKAMVGASRTILSLSLSSSLFTFSKIPHVFPFLRLHKPRFHHAFRPLYSAAATTSSPTTETNVTDPDQLKHTILLERLRLRHLKESAKPPQQRPSSVVGVEEESSIRKKSKKLVENFQELGLSEEVMGALQELNIEVPTEIQCIGIPAVMERKSVVLGSHTGSGKTLAYLLPIVQLMREDEANLGKKTKPRRPRTVVLCPTRELSEQVYRVAKSISHHARFRSILVSGGSRIRPQEDSLNNAIDMVVGTPGRILQHIEEGNMVYGDIAYLVLDEADTMFDRGFGPEIRKFLAPLNQRALKTNDQGFQTVLVTATMTMAVQKLVDEEFQGIEHLRTSTLHKKIANARHDFIKLSGGEDKLEALLQVLEPSLAKGSKVMVFCNTLNSSRAVDHYLSENQISTVNYHGEVPAEQRVENLKKFKDEEGDCPTLVCTDLAARGLDLDVDHVVMFDFPKNSIDYLHRTGRTARMGAKGKVTSLVSRKDQMLAARIEEAMRNNESLESLTTDNVRRDAARTHITQEKGRSVKQIREVSKQRNSRDKPSSSSPPARSTGGKTPVRKSSSSSFSKPRKASSPPEKSSKPKRKILKTVGSRSIAARGKTGSDRRPGKKLSVVGFRGKSSSARAS

SEQ ID NO: 48034 - protein, 621 aa, Arabidopsis thaliana
  peptide (1)..(621): Ceres Seq. ID no. 13649265
MVGASRTILSLSLSSSLFTFSKIPHVFPFLRLHKPRFHHAFRPLYSAAATTSSPTTETNVTDPDQLKHTILLERLRLRHLKESAKPPQQRPSSVVGVEEESSIRKKSKKLVENFQELGLSEEVMGALQELNIEVPTEIQCIGIPAVMERKSVVLGSHTGSGKTLAYLLPIVQLMREDEANLGKKTKPRRPRTVVLCPTRELSEQVYRVAKSISHHARFRSILVSGGSRIRPQEDSLNNAIDMVVGTPGRILQHIEEGNMVYGDIAYLVLDEADTMFDRGFGPEIRKFLAPLNQRALKTNDQGFQTVLVTATMTMAVQKLVDEEFQGIEHLRTSTLHKKIANARHDFIKLSGGEDKLEALLQVLEPSLAKGSKVMVFCNTLNSSRAVDHYLSENQISTVNYHGEVPAEQRVENLKKFKDEEGDCPTLVCTDLAARGLDLDVDHVVMFDFPKNSIDYLHRTGRTARMGAKGKVTSLVSRKDQMLAARIEEAMRNNESLESLTTDNVRRDAARTHITQEKGRSVKQIREVSKQRNSRDKPSSSSPPARSTGGKTPVRKSSSSSFSKPRKASSPPEKSSKPKRKILKTVGSRSIAARGKTGSDRRPGKKLSVVGFRGKSSSARAS

SEQ ID NO: 48035 - protein, 498 aa, Arabidopsis thaliana
  peptide (1)..(498): Ceres Seq. ID no. 13649266
MGALQELNIEVPTEIQCIGIPAVMERKSVVLGSHTGSGKTLAYLLPIVQLMREDEANLGKKTKPRRPRTVVLCPTRELSEQVYRVAKSISHHARFRSILVSGGSRIRPQEDSLNNAIDMVVGTPGRILQHIEEGNMVYGDIAYLVLDEADTMFDRGFGPEIRKFLAPLNQRALKTNDQGFQTVLVTATMTMAVQKLVDEEFQGIEHLRTSTLHKKIANARHDFIKLSGGEDKLEALLQVLEPSLAKGSKVMVFCNTLNSSRAVDHYLSENQISTVNYHGEVPAEQRVENLKKFKDEEGDCPTLVCTDLAARGLDLDVDHVVMFDFPKNSIDYLHRTGRTARMGAKGKVTSLVSRKDQMLAARIEEAMRNNESLESLTTDNVRRDAARTHITQEKGRSVKQIREVSKQRNSRDKPSSSSPPARSTGGKTPVRKSSSSSFSKPRKASSPPEKSSKPKRKILKTVGSRSIAARGKTGSDRRPGKKLSVVGFRGKSSSARAS

SEQ ID NO: 48036 - DNA, 2765 bp, Arabidopsis thaliana; identical to SEQ ID NO: 46527
  misc_feature (1)..(2765): Ceres Seq. ID no. 13579248
  misc_feature (1)..(2765): Ortholog of  Ceres SEQ ID NO 13590241 as cited in SEQ ID NO 63878
  misc_feature (1)..(2765): Ortholog of  Ceres SEQ ID NO 13660597 as cited in SEQ ID NO 67655
  misc_feature (1)..(2765): Ortholog of  Ceres SEQ ID NO 15179308 as cited in SEQ ID NO 0

SEQ ID NO: 48037 - protein, 829 aa, Arabidopsis thaliana; identical to SEQ ID NO: 46528
  peptide (1)..(829): Ceres Seq. ID no. 13579249

SEQ ID NO: 48038 - protein, 712 aa, Arabidopsis thaliana; identical to SEQ ID NO: 46529
  peptide (1)..(712): Ceres Seq. ID no. 13579250

SEQ ID NO: 48039 - protein, 658 aa, Arabidopsis thaliana; identical to SEQ ID NO: 46530
  peptide (1)..(658): Ceres Seq. ID no. 13579251

SEQ ID NO: 48040 - DNA, 1527 bp, Arabidopsis thaliana
  misc_feature (1)..(1527): Ceres Seq. ID no. 12659104
  misc_feature (1)..(1527): Ortholog of  Ceres SEQ ID NO 13594380 as cited in SEQ ID NO 58039
  misc_feature (1)..(1527): Ortholog of  Ceres SEQ ID NO 13597407 as cited in SEQ ID NO 64106
  misc_feature (1)..(1527): Ortholog of  Ceres SEQ ID NO 15180690 as cited in SEQ ID NO 0
atgccttcagtcggaattgtcatcggagatggcaaaaaagaatatcctggtaaactcactctttacgtcaccgtgacatgtattgtcgccgccatgggtggtctcatcttcggttacgacatcggtatctccggtggagtgacgacaatggattcgtttcagcaaaagttcttcccgtcggtttacgagaaacagaagaaggatcatgattcaaaccaatactgcagatttgacagcgtttctctcactctcttcacttcctctctttacctcgccgcactctgctcctccctcgttgcctcttacgttacccgtcagtttggccggaaaatttcgatgcttctcggtggagttctcttctgcgccggagctcttcttaacggtttcgcaactgccgtttggatgctcatcgttggtcgtttgttactcggtttcggtatcggcttcaccaatcagtctgtgccgttgtatctctcggagatggcaccgtataaatacagaggagcattgaacatcggattccagctctcaatcaccattggtatccttgtcgccaacgttttgaacttcttcttctccaaaatcagttggggttggagactcagtctcggcggcgccgtcgttccggcactcatcatcaccgtcggttctcttatcctcccggacacaccaaactccatgatcgagagaggtcaatttaggctagcggaagcgaaactccgtaagattcgtggcgtcgacgacattgatgacgagatcaacgatttgatcatcgccagtgaagcttcgaagctcgttgagcatccatggaggaatctgttgcagaggaagtatagaccacatctaacgatggcgattctgattccggcatttcagcagcttaccggaatcaatgttataatgttctacgcgccggttctgtttcaaacgattggatttggtagcgacgcggctctgatttcggcggttgtgaccggtttggttaacgttggagccaccgtggtgtcaatctatggcgttgataaatggggaagacgatttctattccttgaaggaggattccaaatgctaatttctcaggtagctgttgcggcggcgatcggagctaagttcggtgtcgatggaaccccaggcgttttaccaaaatggtacgccattgttgtggttttgttcatatgcatctacgtggcggcgtttgcttggtcgtggggtccactaggatggttagtgccatcggagatttttccgttggaaatccgatcagcggctcagagcataacggtgtcggtgaacatgatcttcacgttcttgattgcacaagtgtttttgatgatgctttgccacttgaagttcgggttgttcatattcttcgcgtttttcgtggtggtgatgtcgattttcgtctatcttttcttaccggagacaagaggagtgccgatcgaggagatgaatcgggtctggagatcacattggtattggtcgaagttcgttgacgccgagaagaatctaacgaaagttgttatctag

SEQ ID NO: 48041 - protein, 508 aa, Arabidopsis thaliana
  peptide (1)..(508): Ceres Seq. ID no. 12659105
MPSVGIVIGDGKKEYPGKLTLYVTVTCIVAAMGGLIFGYDIGISGGVTTMDSFQQKFFPSVYEKQKKDHDSNQYCRFDSVSLTLFTSSLYLAALCSSLVASYVTRQFGRKISMLLGGVLFCAGALLNGFATAVWMLIVGRLLLGFGIGFTNQSVPLYLSEMAPYKYRGALNIGFQLSITIGILVANVLNFFFSKISWGWRLSLGGAVVPALIITVGSLILPDTPNSMIERGQFRLAEAKLRKIRGVDDIDDEINDLIIASEASKLVEHPWRNLLQRKYRPHLTMAILIPAFQQLTGINVIMFYAPVLFQTIGFGSDAALISAVVTGLVNVGATVVSIYGVDKWGRRFLFLEGGFQMLISQVAVAAAIGAKFGVDGTPGVLPKWYAIVVVLFICIYVAAFAWSWGPLGWLVPSEIFPLEIRSAAQSITVSVNMIFTFLIAQVFLMMLCHLKFGLFIFFAFFVVVMSIFVYLFLPETRGVPIEEMNRVWRSHWYWSKFVDAEKNLTKVVI

SEQ ID NO: 48042 - protein, 477 aa, Arabidopsis thaliana
  peptide (1)..(477): Ceres Seq. ID no. 12659106
MGGLIFGYDIGISGGVTTMDSFQQKFFPSVYEKQKKDHDSNQYCRFDSVSLTLFTSSLYLAALCSSLVASYVTRQFGRKISMLLGGVLFCAGALLNGFATAVWMLIVGRLLLGFGIGFTNQSVPLYLSEMAPYKYRGALNIGFQLSITIGILVANVLNFFFSKISWGWRLSLGGAVVPALIITVGSLILPDTPNSMIERGQFRLAEAKLRKIRGVDDIDDEINDLIIASEASKLVEHPWRNLLQRKYRPHLTMAILIPAFQQLTGINVIMFYAPVLFQTIGFGSDAALISAVVTGLVNVGATVVSIYGVDKWGRRFLFLEGGFQMLISQVAVAAAIGAKFGVDGTPGVLPKWYAIVVVLFICIYVAAFAWSWGPLGWLVPSEIFPLEIRSAAQSITVSVNMIFTFLIAQVFLMMLCHLKFGLFIFFAFFVVVMSIFVYLFLPETRGVPIEEMNRVWRSHWYWSKFVDAEKNLTKVVI

SEQ ID NO: 48043 - protein, 459 aa, Arabidopsis thaliana
  peptide (1)..(459): Ceres Seq. ID no. 12659107
MDSFQQKFFPSVYEKQKKDHDSNQYCRFDSVSLTLFTSSLYLAALCSSLVASYVTRQFGRKISMLLGGVLFCAGALLNGFATAVWMLIVGRLLLGFGIGFTNQSVPLYLSEMAPYKYRGALNIGFQLSITIGILVANVLNFFFSKISWGWRLSLGGAVVPALIITVGSLILPDTPNSMIERGQFRLAEAKLRKIRGVDDIDDEINDLIIASEASKLVEHPWRNLLQRKYRPHLTMAILIPAFQQLTGINVIMFYAPVLFQTIGFGSDAALISAVVTGLVNVGATVVSIYGVDKWGRRFLFLEGGFQMLISQVAVAAAIGAKFGVDGTPGVLPKWYAIVVVLFICIYVAAFAWSWGPLGWLVPSEIFPLEIRSAAQSITVSVNMIFTFLIAQVFLMMLCHLKFGLFIFFAFFVVVMSIFVYLFLPETRGVPIEEMNRVWRSHWYWSKFVDAEKNLTKVVI

SEQ ID NO: 48044 - DNA, 1027 bp, Arabidopsis thaliana
  misc_feature (1)..(1027): Ceres Seq. ID no. 12482406
  misc_feature (1)..(1027): Ortholog of  Ceres SEQ ID NO 12617391 as cited in SEQ ID NO 64114
  misc_feature (1)..(1027): Ortholog of  Ceres SEQ ID NO 13595922 as cited in SEQ ID NO 69293
  misc_feature (1)..(1027): Ortholog of  Ceres SEQ ID NO 12635496 as cited in SEQ ID NO 0
atgcagtaatctgataaaaccctccacagagatttccaacaaaacaggaactaaaacacaagatgaagattatgatgatgattaagctctgcttcttctccatgtccctcatctgcattgcacctgcagatgctcagacagaaggagtagtgtttggatataaaggcaaaaatggaccaaaccaatggggacacttaaaccctcacttcaccacatgcgcggtcggtaaattgcaatctccaattgatattcaaaggaggcaaatattttacaaccacaaattgaattcaatacaccgtgaatactacttcacaaacgcaacactagtgaaccacgtctgtaatgttgccatgttcttcggggagggagcaggagatgtgataatagaaaacaagaactataccttactgcaaatgcattggcacactccttctgaacatcacctccatggagtccaatatgcagctgagctgcacatggtacaccaagcaaaagatggaagctttgctgtggtggcaagtctcttcaaaatcggcactgaagagcctttcctctctcagatgaaggagaaattggtgaagctaaaggaagagagactcaaagggaaccacacagcacaagtggaagtaggaagaatcgacacaagacacattgaacgtaagactcgaaagtactacagatacattggttcactcactactcctccttgctccgagaacgtttcttggaccatccttggcaaggtgaggtcaatgtcaaaggaacaagtagaactactcagatctccattggacacttctttcaagaacaattcaagaccgtgtcaacccctcaacggccggagagttgagatgttccacgaccacgagcgtgtcgataaaaaagaaaccggtaacaaaaagaaaaaacccaattaaaatagttttacattgtctattggtttgtttagaaccctaattagctttgtaaaactaataatctcttatgtagtactgtgttgttgtttacgacttgatatacgatttcc

SEQ ID NO: 48045 - protein, 284 aa, Arabidopsis thaliana
  peptide (1)..(284): Ceres Seq. ID no. 12482407
MKIMMMIKLCFFSMSLICIAPADAQTEGVVFGYKGKNGPNQWGHLNPHFTTCAVGKLQSPIDIQRRQIFYNHKLNSIHREYYFTNATLVNHVCNVAMFFGEGAGDVIIENKNYTLLQMHWHTPSEHHLHGVQYAAELHMVHQAKDGSFAVVASLFKIGTEEPFLSQMKEKLVKLKEERLKGNHTAQVEVGRIDTRHIERKTRKYYRYIGSLTTPPCSENVSWTILGKVRSMSKEQVELLRSPLDTSFKNNSRPCQPLNGRRVEMFHDHERVDKKETGNKKKKPN

SEQ ID NO: 48046 - protein, 281 aa, Arabidopsis thaliana
  peptide (1)..(281): Ceres Seq. ID no. 12482408
MMMIKLCFFSMSLICIAPADAQTEGVVFGYKGKNGPNQWGHLNPHFTTCAVGKLQSPIDIQRRQIFYNHKLNSIHREYYFTNATLVNHVCNVAMFFGEGAGDVIIENKNYTLLQMHWHTPSEHHLHGVQYAAELHMVHQAKDGSFAVVASLFKIGTEEPFLSQMKEKLVKLKEERLKGNHTAQVEVGRIDTRHIERKTRKYYRYIGSLTTPPCSENVSWTILGKVRSMSKEQVELLRSPLDTSFKNNSRPCQPLNGRRVEMFHDHERVDKKETGNKKKKPN

SEQ ID NO: 48047 - protein, 280 aa, Arabidopsis thaliana
  peptide (1)..(280): Ceres Seq. ID no. 12482409
MMIKLCFFSMSLICIAPADAQTEGVVFGYKGKNGPNQWGHLNPHFTTCAVGKLQSPIDIQRRQIFYNHKLNSIHREYYFTNATLVNHVCNVAMFFGEGAGDVIIENKNYTLLQMHWHTPSEHHLHGVQYAAELHMVHQAKDGSFAVVASLFKIGTEEPFLSQMKEKLVKLKEERLKGNHTAQVEVGRIDTRHIERKTRKYYRYIGSLTTPPCSENVSWTILGKVRSMSKEQVELLRSPLDTSFKNNSRPCQPLNGRRVEMFHDHERVDKKETGNKKKKPN

SEQ ID NO: 48048 - DNA, 2941 bp, Arabidopsis thaliana; identical to SEQ ID NO: 45965
  misc_feature (1)..(2941): Ceres Seq. ID no. 12600180
  misc_feature (1)..(2941): Ortholog of  Ceres SEQ ID NO 12465083 as cited in SEQ ID NO 68239

SEQ ID NO: 48049 - protein, 736 aa, Arabidopsis thaliana; identical to SEQ ID NO: 45966
  peptide (1)..(736): Ceres Seq. ID no. 12600181

SEQ ID NO: 48050 - protein, 680 aa, Arabidopsis thaliana; identical to SEQ ID NO: 45967
  peptide (1)..(680): Ceres Seq. ID no. 12600182

SEQ ID NO: 48051 - protein, 679 aa, Arabidopsis thaliana; identical to SEQ ID NO: 45968
  peptide (1)..(679): Ceres Seq. ID no. 12600183

SEQ ID NO: 48052 - DNA, 910 bp, Arabidopsis thaliana
  misc_feature (1)..(910): Ceres Seq. ID no. 12640571
  misc_feature (1)..(910): Ortholog of  Ceres SEQ ID NO 13599328 as cited in SEQ ID NO 1002
  misc_feature (1)..(910): Ortholog of  Ceres SEQ ID NO 14302544 as cited in SEQ ID NO 56628
  misc_feature (1)..(910): Ortholog of  Ceres SEQ ID NO 14302529 as cited in SEQ ID NO 59789
  misc_feature (1)..(910): Ortholog of  Ceres SEQ ID NO 13584819 as cited in SEQ ID NO 64536
  misc_feature (1)..(910): Ortholog of  Ceres SEQ ID NO 13663748 as cited in SEQ ID NO 67516
  misc_feature (1)..(910): Ortholog of  Ceres SEQ ID NO 12635897 as cited in SEQ ID NO 0
atactcttttaggtttcaacagcagcttagtctctctgatctctctacctccctcacaccctaaaactcagcaacaatggccgttaccttttcagatctacacacagaggagggtgtcaaatccgtggaggagcacctcgccggaaaaacctacatctccggagatcaattgtctgtggatgatgtcaaggtttacgctgccgttccagtgaaacccagcgatgccttccccaatgctagcaagtggtacgagtccgtggcttcccaacttgctaaaagtttccctggaaaggccgttggagtacaattcggtggctctgctgctgctgctccagctgttgaagctgaggcacctgcagctgcagctgatgatgatgatgacatggatctctttggtgacgagaccgaagaagaaaagaaagctgcagaggagagggaggctgctaagaaggacaccaagaagcctaaagagagtggaaagtcttctgtgctcatggatgttaagccatgggatgatgaaaccgacatgaagaaactggaagaggctgttcgtggtgttgagatgcctggtcttttctggggagcctcaaaacttgtaccagttggttatgggatcaagaaactcacaattatgttcacgattgttgatgacctcgtgtccccggacaacctcattgaagacttcctcacctcagagcctaacaacgagtacatccagagttgtgacattgtcgctttcaacaagatttagagacttcaaatttctccttaccgaaacatatctgaatttcaagttttgttttcgtttgtgttgtttaccgaaatgtttctttcctagttgcaagaccgctttcatgttacaataacactaaattttcaatggttactattccgttgcatcattgttaag

SEQ ID NO: 48053 - protein, 224 aa, Arabidopsis thaliana
  peptide (1)..(224): Ceres Seq. ID no. 12640572
MAVTFSDLHTEEGVKSVEEHLAGKTYISGDQLSVDDVKVYAAVPVKPSDAFPNASKWYESVASQLAKSFPGKAVGVQFGGSAAAAPAVEAEAPAAAADDDDDMDLFGDETEEEKKAAEEREAAKKDTKKPKESGKSSVLMDVKPWDDETDMKKLEEAVRGVEMPGLFWGASKLVPVGYGIKKLTIMFTIVDDLVSPDNLIEDFLTSEPNNEYIQSCDIVAFNKI

SEQ ID NO: 48054 - protein, 122 aa, Arabidopsis thaliana; identical to SEQ ID NO: 36256
  peptide (1)..(122): Ceres Seq. ID no. 12640573

SEQ ID NO: 48055 - DNA, 1501 bp, Arabidopsis thaliana
  misc_feature (1)..(1501): Ceres Seq. ID no. 12726486
  misc_feature (1)..(1501): Ortholog of  Ceres SEQ ID NO 14316239 as cited in SEQ ID NO 54472
  misc_feature (1)..(1501): Ortholog of  Ceres SEQ ID NO 13654809 as cited in SEQ ID NO 62798
actgttttagctacggtcagcttttctctagcgtcggggcctcgatctcttgatttgagcttttcttaggtctgtctctctctgtacactctctccgccgtcgtatctcgccgtcgatttcaatttttccgacgatatgaagctcaccgttaaaactctcaagggcagtcattttgaaattagggttttaccctccgatacgataatggcggtgaagaagaatatagaagattcacaaggaaaagacaattatccatgtgggcagcaattgttgattcacaatggaaaagttttgaaagatgaaactagcctggtggagaacaaagttacggaggaaggatttctcgtcgttatgcttagcaagagcaaatctggaggttcagctggtcaggcttcggttcagcctgtttccgctaccacatcttcgactaagcctgcagctccatctacaacccagtcttcacctgttcctgcttcacctattcctgctcaagaacaaccggcggcacagactgacacctatggacaagctgcgtcaacattagttagtggtagtagtcttgagcaaatggtccaacagataatggaaatgggaggtggaagttgggacaaagaaacagttactcgtgcacttcgtgcagcttataacaaccctgagagagcagtggattatttgtactctggaattcctcaaactgctgaagtagctgtgccagtacctgaggctcagattgcaggatccggtgcagcccctgttgcacctgcatctggaggacctaactcatctcctttggatttatttcctcaggaaacagttgctgctgctggctctggagatcttgggacacttgaatttcttagaaacaatgaccagttccaacaattacgcaccatggtccattccaaccctcaaattcttcagcccatgcttcaggaacttggaaagcaaaaccctcaacttctgaggctaattcaagaaaaccaggcagagtttcttcagttagtaaatgagccctatgagggttctgacggggagggggacatgttcgatcaacccgagcaagaaatgccacatgccattaacgttaccccagcagaacaagaagcgattcaacggctcgaggcaatgggatttgatagagccttagtaatagaagcgttcctcgcatgtgaccgaaatgaagaattggcagctaactatctattggagaactcaggtgactttgaagactgagttcacaaaacgttatctcttcttcgaaaaagttttggctcttttcttacgttgaattacatatcttccgtgaattaatgtgtgggatttgatctctctctctctgtgacttagtttgtcctttttttgttttgaatattattttctccgtttgcgatgggggcggttgttacgtttgtgatagatattgaagcagagagatacaaaagtgtgatcacataattctcgagggataaacataaagtgtaatcgatagatatttatcct

SEQ ID NO: 48056 - protein, 365 aa, Arabidopsis thaliana
  peptide (1)..(365): Ceres Seq. ID no. 12726487
MKLTVKTLKGSHFEIRVLPSDTIMAVKKNIEDSQGKDNYPCGQQLLIHNGKVLKDETSLVENKVTEEGFLVVMLSKSKSGGSAGQASVQPVSATTSSTKPAAPSTTQSSPVPASPIPAQEQPAAQTDTYGQAASTLVSGSSLEQMVQQIMEMGGGSWDKETVTRALRAAYNNPERAVDYLYSGIPQTAEVAVPVPEAQIAGSGAAPVAPASGGPNSSPLDLFPQETVAAAGSGDLGTLEFLRNNDQFQQLRTMVHSNPQILQPMLQELGKQNPQLLRLIQENQAEFLQLVNEPYEGSDGEGDMFDQPEQEMPHAINVTPAEQEAIQRLEAMGFDRALVIEAFLACDRNEELAANYLLENSGDFED

SEQ ID NO: 48057 - protein, 342 aa, Arabidopsis thaliana
  peptide (1)..(342): Ceres Seq. ID no. 12726488
MAVKKNIEDSQGKDNYPCGQQLLIHNGKVLKDETSLVENKVTEEGFLVVMLSKSKSGGSAGQASVQPVSATTSSTKPAAPSTTQSSPVPASPIPAQEQPAAQTDTYGQAASTLVSGSSLEQMVQQIMEMGGGSWDKETVTRALRAAYNNPERAVDYLYSGIPQTAEVAVPVPEAQIAGSGAAPVAPASGGPNSSPLDLFPQETVAAAGSGDLGTLEFLRNNDQFQQLRTMVHSNPQILQPMLQELGKQNPQLLRLIQENQAEFLQLVNEPYEGSDGEGDMFDQPEQEMPHAINVTPAEQEAIQRLEAMGFDRALVIEAFLACDRNEELAANYLLENSGDFED

SEQ ID NO: 48058 - protein, 293 aa, Arabidopsis thaliana
  peptide (1)..(293): Ceres Seq. ID no. 12726489
MLSKSKSGGSAGQASVQPVSATTSSTKPAAPSTTQSSPVPASPIPAQEQPAAQTDTYGQAASTLVSGSSLEQMVQQIMEMGGGSWDKETVTRALRAAYNNPERAVDYLYSGIPQTAEVAVPVPEAQIAGSGAAPVAPASGGPNSSPLDLFPQETVAAAGSGDLGTLEFLRNNDQFQQLRTMVHSNPQILQPMLQELGKQNPQLLRLIQENQAEFLQLVNEPYEGSDGEGDMFDQPEQEMPHAINVTPAEQEAIQRLEAMGFDRALVIEAFLACDRNEELAANYLLENSGDFED

SEQ ID NO: 48059 - DNA, 2467 bp, Arabidopsis thaliana
  misc_feature (1)..(2467): Ceres Seq. ID no. 12651461
  misc_feature (1)..(2467): Ortholog of  Ceres SEQ ID NO 15173102 as cited in SEQ ID NO 61106
attttcctccaaaatatgaatcttcagttgactctaatctccttactcttcttcacttccgccatagctgaaaccttcaaaaacctcgattctcatccacagttcccttgtaaacctcctcattttagctcttatcccttctgcaatgtctctttatccataaaacaacgagcaatttctctcgtctccctcctcatgctcccagagaagataggtcagctctcaaacacagctgcttcagtaccccgtctcggtattcctccgtacgagtggtggtcggagtctttacacggactcgccgataacggtcccggagtttccttcaacggttcgatctccgccgctactagttttcctcaggtaatcgtatctgctgcatctttcaatagaacgctatggtacgagattggatctgctgttgcggtggaaggtcgggctatgtacaacggtggtcaagctgggttgacgttttgggctccgaatataaatgtgtttagggatccgagatggggaagaggacaggagactcctggtgaggatccgaaggtagtttccgagtatggagttgagttcgttagagggtttcaagagaagaagaaaaggaaggttttgaaaagaagatttagtgatgatgttgatgatgatcgtcatgatgatgatgctgatgggaagctcatgttatctgcttgttgtaagcatttcactgcctatgatttggaaaaatgggggaatttcactagatacgacttcaatgctgtggtcacagaacaggacatggaagacacatatcagcccccatttgagacttgtataagagatggtaaagctagctgcttgatgtgttcatataatgcagttaatggggtccctgcttgtgcgcaaggagacttattacaaaaagctcgagttgagtggggatttgaagggtacattacatcagactgtgatgctgtggcaactatttttgcgtaccaaggatataccaagtcacctgaggaagctgttgctgatgccataaaagcaggggtggatataaattgtggaacatacatgcttcggcacacacaatctgcgattgagcaggggaaggtgagcgaagaactagtagaccgagctctgctaaatctctttgctgttcaacttcgtcttggactttttgatggtgatccaagaagaggacagtacggaaagttaggatcaaatgacatttgtagctcagaccacagaaaattggcactggaagcaacaagacagggtatcgtgctcctgaaaaatgatcacaagttgttgcctttgaacaaaaaccatgtttcttcattagcaatcgttggtccaatggcgaataatataagcaatatgggcggtacttatacaggaaagccgtgtcaacgaaagactttgttcacggaacttctggagtatgtgaagaagacatcttatgcgtctggttgctcagacgtgtcttgtgattctgataccggatttggagaagctgtggccatcgccaagggagcggattttgtcatagtagttgcaggattagatctctctcaagaaaccgaggataaggatcgagttagtctttctttgcctggtaaacagaaagatcttgtgtctcatgttgctgctgtgagcaaaaaaccggtgattcttgttctaaccggtggaggaccagtggatgtaacgtttgctaaaaatgacccgagaatcggaagcattatctggattggttatccaggtgaaactggtggacaagcactcgctgaaatcatatttggagacttcaatccaggtggtagattaccgacaacgtggtatccggagtcattcacggatgtggcaatgtcggatatgcacatgagagccaattcatctcgtggatatccaggaagaacgtacagattctataccggacctcaagtttacagttttgggaccggtttaagctacacgaaattcgagtacaagatcttatcagcaccaatcagacttagcttatcggaacttcttccacaacagtcttctcacaagaaacaactacaacatggagaagaacttcgatacttacagctcgatgatgtgattgttaactcttgcgaatctctgcggtttaacgttcgtgttcatgtgagcaataccggagaaatcgacggtagtcatgttgtgatgctgttttcgaaaatgccaccggttttatctggtgttccggagaagcagctgattggttatgatcgtgttcatgttcgttccaatgaaatgatggaaacagtgttcgtaatcgatccttgcaagcagctaagcgtagcgaatgatgtcgggaagagagtgattcctctggggagtcatgtcttgttcttgggagatttacaacattctctctctgttgaattctaaaacactgtaatccgaaaaaatttcattactgtttatttccttctagaatgatctatatatatacttttgaaac

SEQ ID NO: 48060 - protein, 797 aa, Arabidopsis thaliana
  peptide (1)..(797): Ceres Seq. ID no. 12651462
IFLQNMNLQLTLISLLFFTSAIAETFKNLDSHPQFPCKPPHFSSYPFCNVSLSIKQRAISLVSLLMLPEKIGQLSNTAASVPRLGIPPYEWWSESLHGLADNGPGVSFNGSISAATSFPQVIVSAASFNRTLWYEIGSAVAVEGRAMYNGGQAGLTFWAPNINVFRDPRWGRGQETPGEDPKVVSEYGVEFVRGFQEKKKRKVLKRRFSDDVDDDRHDDDADGKLMLSACCKHFTAYDLEKWGNFTRYDFNAVVTEQDMEDTYQPPFETCIRDGKASCLMCSYNAVNGVPACAQGDLLQKARVEWGFEGYITSDCDAVATIFAYQGYTKSPEEAVADAIKAGVDINCGTYMLRHTQSAIEQGKVSEELVDRALLNLFAVQLRLGLFDGDPRRGQYGKLGSNDICSSDHRKLALEATRQGIVLLKNDHKLLPLNKNHVSSLAIVGPMANNISNMGGTYTGKPCQRKTLFTELLEYVKKTSYASGCSDVSCDSDTGFGEAVAIAKGADFVIVVAGLDLSQETEDKDRVSLSLPGKQKDLVSHVAAVSKKPVILVLTGGGPVDVTFAKNDPRIGSIIWIGYPGETGGQALAEIIFGDFNPGGRLPTTWYPESFTDVAMSDMHMRANSSRGYPGRTYRFYTGPQVYSFGTGLSYTKFEYKILSAPIRLSLSELLPQQSSHKKQLQHGEELRYLQLDDVIVNSCESLRFNVRVHVSNTGEIDGSHVVMLFSKMPPVLSGVPEKQLIGYDRVHVRSNEMMETVFVIDPCKQLSVANDVGKRVIPLGSHVLFLGDLQHSLSVEF

SEQ ID NO: 48061 - protein, 792 aa, Arabidopsis thaliana
  peptide (1)..(792): Ceres Seq. ID no. 12651463
MNLQLTLISLLFFTSAIAETFKNLDSHPQFPCKPPHFSSYPFCNVSLSIKQRAISLVSLLMLPEKIGQLSNTAASVPRLGIPPYEWWSESLHGLADNGPGVSFNGSISAATSFPQVIVSAASFNRTLWYEIGSAVAVEGRAMYNGGQAGLTFWAPNINVFRDPRWGRGQETPGEDPKVVSEYGVEFVRGFQEKKKRKVLKRRFSDDVDDDRHDDDADGKLMLSACCKHFTAYDLEKWGNFTRYDFNAVVTEQDMEDTYQPPFETCIRDGKASCLMCSYNAVNGVPACAQGDLLQKARVEWGFEGYITSDCDAVATIFAYQGYTKSPEEAVADAIKAGVDINCGTYMLRHTQSAIEQGKVSEELVDRALLNLFAVQLRLGLFDGDPRRGQYGKLGSNDICSSDHRKLALEATRQGIVLLKNDHKLLPLNKNHVSSLAIVGPMANNISNMGGTYTGKPCQRKTLFTELLEYVKKTSYASGCSDVSCDSDTGFGEAVAIAKGADFVIVVAGLDLSQETEDKDRVSLSLPGKQKDLVSHVAAVSKKPVILVLTGGGPVDVTFAKNDPRIGSIIWIGYPGETGGQALAEIIFGDFNPGGRLPTTWYPESFTDVAMSDMHMRANSSRGYPGRTYRFYTGPQVYSFGTGLSYTKFEYKILSAPIRLSLSELLPQQSSHKKQLQHGEELRYLQLDDVIVNSCESLRFNVRVHVSNTGEIDGSHVVMLFSKMPPVLSGVPEKQLIGYDRVHVRSNEMMETVFVIDPCKQLSVANDVGKRVIPLGSHVLFLGDLQHSLSVEF

SEQ ID NO: 48062 - protein, 732 aa, Arabidopsis thaliana
  peptide (1)..(732): Ceres Seq. ID no. 12651464
MLPEKIGQLSNTAASVPRLGIPPYEWWSESLHGLADNGPGVSFNGSISAATSFPQVIVSAASFNRTLWYEIGSAVAVEGRAMYNGGQAGLTFWAPNINVFRDPRWGRGQETPGEDPKVVSEYGVEFVRGFQEKKKRKVLKRRFSDDVDDDRHDDDADGKLMLSACCKHFTAYDLEKWGNFTRYDFNAVVTEQDMEDTYQPPFETCIRDGKASCLMCSYNAVNGVPACAQGDLLQKARVEWGFEGYITSDCDAVATIFAYQGYTKSPEEAVADAIKAGVDINCGTYMLRHTQSAIEQGKVSEELVDRALLNLFAVQLRLGLFDGDPRRGQYGKLGSNDICSSDHRKLALEATRQGIVLLKNDHKLLPLNKNHVSSLAIVGPMANNISNMGGTYTGKPCQRKTLFTELLEYVKKTSYASGCSDVSCDSDTGFGEAVAIAKGADFVIVVAGLDLSQETEDKDRVSLSLPGKQKDLVSHVAAVSKKPVILVLTGGGPVDVTFAKNDPRIGSIIWIGYPGETGGQALAEIIFGDFNPGGRLPTTWYPESFTDVAMSDMHMRANSSRGYPGRTYRFYTGPQVYSFGTGLSYTKFEYKILSAPIRLSLSELLPQQSSHKKQLQHGEELRYLQLDDVIVNSCESLRFNVRVHVSNTGEIDGSHVVMLFSKMPPVLSGVPEKQLIGYDRVHVRSNEMMETVFVIDPCKQLSVANDVGKRVIPLGSHVLFLGDLQHSLSVEF

SEQ ID NO: 48063 - DNA, 805 bp, Arabidopsis thaliana
  misc_feature (1)..(805): Ceres Seq. ID no. 13649014
  misc_feature (1)..(805): Ortholog of  Ceres SEQ ID NO 12473977 as cited in SEQ ID NO 133
  misc_feature (1)..(805): Ortholog of  Ceres SEQ ID NO 15225932 as cited in SEQ ID NO 60016
  misc_feature (1)..(805): Ortholog of  Ceres SEQ ID NO 12585294 as cited in SEQ ID NO 63023
gaagaaaaatagctaaactttgaaatccgtcagatcgatttctctctatatcggagccgtcatgaatcatcgtcggagctcgatcgtactattgatcctctcaattttatctcccgtgacactctctatacgatacgagctactttctgggcacacgaaatgcatctcagaggagattcacgcaaacgcaatgaccatcggaaaatacagcattataaaccctcacgaggatcatcctcttccttcttcccataaagtcaccgtcagggtcacatcgccacaagggacggcttatcacgaatcggacggagtagaatcgggacaattctcgtttgtagctgtggaaacaggggattacataagttgcttctccgccgtcgatcacaaaccagagacgacgctgatcattgactttgattggaggacgggtattcataccaaggattggtcgaatgtggcaaagaagagccaagtcgaaacgatggagtttgaggttaagaagttatttgaaaccgtgaatggaatccacgatgagatgttctatctccgcgacagggaagaagaaatgcacaatctgaacatagcgacaaattcgaagatggcatggttgagtttcgtgtcgcttgcagtttgtttatcggtcgcaggtcttcagttttggcacttgaagactttcttccagaaaaagaagcttatctgaaaaccattaccatctcctgagggcagagattgtattgaaaaccctatgactatagctttattacactactgaactcatttttcattttgttactgaatttttcgg

SEQ ID NO: 48064 - protein, 212 aa, Arabidopsis thaliana
  peptide (1)..(212): Ceres Seq. ID no. 13649015
MNHRRSSIVLLILSILSPVTLSIRYELLSGHTKCISEEIHANAMTIGKYSIINPHEDHPLPSSHKVTVRVTSPQGTAYHESDGVESGQFSFVAVETGDYISCFSAVDHKPETTLIIDFDWRTGIHTKDWSNVAKKSQVETMEFEVKKLFETVNGIHDEMFYLRDREEEMHNLNIATNSKMAWLSFVSLAVCLSVAGLQFWHLKTFFQKKKLI

SEQ ID NO: 48065 - protein, 169 aa, Arabidopsis thaliana
  peptide (1)..(169): Ceres Seq. ID no. 13649016
MTIGKYSIINPHEDHPLPSSHKVTVRVTSPQGTAYHESDGVESGQFSFVAVETGDYISCFSAVDHKPETTLIIDFDWRTGIHTKDWSNVAKKSQVETMEFEVKKLFETVNGIHDEMFYLRDREEEMHNLNIATNSKMAWLSFVSLAVCLSVAGLQFWHLKTFFQKKKLI

SEQ ID NO: 48066 - DNA, 2965 bp, Arabidopsis thaliana; identical to SEQ ID NO: 44820
  misc_feature (1)..(2965): Ceres Seq. ID no. 12562108
  misc_feature (1)..(2965): Ortholog of  Ceres SEQ ID NO 14303430 as cited in SEQ ID NO 54795
  misc_feature (1)..(2965): Ortholog of  Ceres SEQ ID NO 12465083 as cited in SEQ ID NO 68239

SEQ ID NO: 48067 - protein, 867 aa, Arabidopsis thaliana; identical to SEQ ID NO: 44821
  peptide (1)..(867): Ceres Seq. ID no. 12562109

SEQ ID NO: 48068 - protein, 811 aa, Arabidopsis thaliana; identical to SEQ ID NO: 44822
  peptide (1)..(811): Ceres Seq. ID no. 12562110

SEQ ID NO: 48069 - protein, 771 aa, Arabidopsis thaliana; identical to SEQ ID NO: 44823
  peptide (1)..(771): Ceres Seq. ID no. 12562111

SEQ ID NO: 48070 - DNA, 1980 bp, Arabidopsis thaliana
  misc_feature (1)..(1980): Ceres Seq. ID no. 13649295
  misc_feature (1)..(1980): Ortholog of  Ceres SEQ ID NO 15169474 as cited in SEQ ID NO 66139
gtctagaagtcagacatggctgtttcagttagtaagcagtacatgacaagtcttgtagtgatcttgctcttcatctccttatcatctctctctccaacttcaacttcacacagctgtgaccctgtcgaagaagaagaagaagcctcctccttcggttacgtttgccactcaaacctccaaaagtgccacactttcgccattctcagagccaaacctcccttctattccctctcggacctgagtcgccatcttggtctcgacgcagacgacgagtatgttccgaaaggtcagttactcttgatcccaatagagtgcaggtgtaatggaagcatctacgaggccagtctcattaaaaattgcgttaaaggagacacctttcgctctgtctctcagtctctgcaaggcttgaccacctgcctatctatcagagagaagaatccacatatttccgaagacaagcttggcgacaacattaaactgcgtttggcgatcaggtgctcttgtccacaagaaggcgtttcaaacgctagttttctcgttacgtatccggtgggcgtccgcgacagcgtttcaagcctggcggttaggtttaacacaacagaggatgccattgtctctgcaaacaacaaatctggtgtggttccactcaagcctgctctcatccctcttgatcacaaaccagagaaacaaggatcccggaaaagaaatccatccaagaagaaacggtcaaagatgaagctcatgatcgctgtgagcagcgcgattgctggagtttgcggtcttgtcactctcatggtgtttggttacttacactggaagaaagagacgcagattcaaacgcaaacgcaaaagtggattagcaacaaagaccccgagacgcggcagctgagtctgagcatccgaaccacgagtgacaagaaaatctcgtttgaagggtcgcaggacggttccatcttggattctcacaacaccgtcggcaccacaacgccccgaaaacccgttctggagatttacgcgtttgaagagttagagaaggccacggagaatttcagttcaagcaatcacatcaaaggttcggtttatttcggttcgctcaaaggcaaagacttggctataaagcaagtcaatgcagatgaaatgaaaagattcgatttcgggcttctcaatgatcagtcacactactataaccacaatgtgattagggttcttggaacatgttttagagaaatcgatcaagattcttatctggttttcgagtatgcaaggaatgggtccctgtgggattggattcagaacaaattggccatcaagaatcaattcatcgagtcttgttactgtttcttggcatggaaacagaggatcaagatatgtcacgatgtcgccatcgcgttaaagtatatgcatcggatcaactacgtccacggcaacatcaagagcagaaacatcttcttgaacgaagatctcagaggtaaagtcggaaactttgggatgtcaaagtgcgtaaccaatgaattagccacagaagagaaccttatagagagttcactgtctccagcttctgacatatttgcttacgggataatcgtaatggaggttttgtctggacaaaccccagatatgttgcttggattgcaagaagtagagacaacatcccttgggacacaagaaacttttgtttccgaatggagtagattaagaaggcttctcggggacaaggaaaagctgagggaagtgatggacagcacattgggagagagctattcggttgattctgcgtttgaaatcgcaagtattgcaagagattgtactgcagaagaagccgagtcaaggccgagcgcggttgagattgcagagagggtttcaagattggtggatgacgatgaagatgaagaagatgaggcagtaatagatagagagagtaccttaatttcagagagttcatacaagcctttggtaaagaagagtagtataatagattaa

SEQ ID NO: 48071 - protein, 654 aa, Arabidopsis thaliana
  peptide (1)..(654): Ceres Seq. ID no. 13649296
MAVSVSKQYMTSLVVILLFISLSSLSPTSTSHSCDPVEEEEEASSFGYVCHSNLQKCHTFAILRAKPPFYSLSDLSRHLGLDADDEYVPKGQLLLIPIECRCNGSIYEASLIKNCVKGDTFRSVSQSLQGLTTCLSIREKNPHISEDKLGDNIKLRLAIRCSCPQEGVSNASFLVTYPVGVRDSVSSLAVRFNTTEDAIVSANNKSGVVPLKPALIPLDHKPEKQGSRKRNPSKKKRSKMKLMIAVSSAIAGVCGLVTLMVFGYLHWKKETQIQTQTQKWISNKDPETRQLSLSIRTTSDKKISFEGSQDGSILDSHNTVGTTTPRKPVLEIYAFEELEKATENFSSSNHIKGSVYFGSLKGKDLAIKQVNADEMKRFDFGLLNDQSHYYNHNVIRVLGTCFREIDQDSYLVFEYARNGSLWDWIQNKLAIKNQFIESCYCFLAWKQRIKICHDVAIALKYMHRINYVHGNIKSRNIFLNEDLRGKVGNFGMSKCVTNELATEENLIESSLSPASDIFAYGIIVMEVLSGQTPDMLLGLQEVETTSLGTQETFVSEWSRLRRLLGDKEKLREVMDSTLGESYSVDSAFEIASIARDCTAEEAESRPSAVEIAERVSRLVDDDEDEEDEAVIDRESTLISESSYKPLVKKSSIID

SEQ ID NO: 48072 - protein, 645 aa, Arabidopsis thaliana
  peptide (1)..(645): Ceres Seq. ID no. 13649297
MTSLVVILLFISLSSLSPTSTSHSCDPVEEEEEASSFGYVCHSNLQKCHTFAILRAKPPFYSLSDLSRHLGLDADDEYVPKGQLLLIPIECRCNGSIYEASLIKNCVKGDTFRSVSQSLQGLTTCLSIREKNPHISEDKLGDNIKLRLAIRCSCPQEGVSNASFLVTYPVGVRDSVSSLAVRFNTTEDAIVSANNKSGVVPLKPALIPLDHKPEKQGSRKRNPSKKKRSKMKLMIAVSSAIAGVCGLVTLMVFGYLHWKKETQIQTQTQKWISNKDPETRQLSLSIRTTSDKKISFEGSQDGSILDSHNTVGTTTPRKPVLEIYAFEELEKATENFSSSNHIKGSVYFGSLKGKDLAIKQVNADEMKRFDFGLLNDQSHYYNHNVIRVLGTCFREIDQDSYLVFEYARNGSLWDWIQNKLAIKNQFIESCYCFLAWKQRIKICHDVAIALKYMHRINYVHGNIKSRNIFLNEDLRGKVGNFGMSKCVTNELATEENLIESSLSPASDIFAYGIIVMEVLSGQTPDMLLGLQEVETTSLGTQETFVSEWSRLRRLLGDKEKLREVMDSTLGESYSVDSAFEIASIARDCTAEEAESRPSAVEIAERVSRLVDDDEDEEDEAVIDRESTLISESSYKPLVKKSSIID

SEQ ID NO: 48073 - protein, 415 aa, Arabidopsis thaliana
  peptide (1)..(415): Ceres Seq. ID no. 13649298
MKLMIAVSSAIAGVCGLVTLMVFGYLHWKKETQIQTQTQKWISNKDPETRQLSLSIRTTSDKKISFEGSQDGSILDSHNTVGTTTPRKPVLEIYAFEELEKATENFSSSNHIKGSVYFGSLKGKDLAIKQVNADEMKRFDFGLLNDQSHYYNHNVIRVLGTCFREIDQDSYLVFEYARNGSLWDWIQNKLAIKNQFIESCYCFLAWKQRIKICHDVAIALKYMHRINYVHGNIKSRNIFLNEDLRGKVGNFGMSKCVTNELATEENLIESSLSPASDIFAYGIIVMEVLSGQTPDMLLGLQEVETTSLGTQETFVSEWSRLRRLLGDKEKLREVMDSTLGESYSVDSAFEIASIARDCTAEEAESRPSAVEIAERVSRLVDDDEDEEDEAVIDRESTLISESSYKPLVKKSSIID

SEQ ID NO: 48074 - DNA, 1254 bp, Arabidopsis thaliana
  misc_feature (1)..(1254): Ceres Seq. ID no. 13649385
  misc_feature (1)..(1254): Ortholog of  Ceres SEQ ID NO 15177557 as cited in SEQ ID NO 53220
  misc_feature (1)..(1254): Ortholog of  Ceres SEQ ID NO 14313123 as cited in SEQ ID NO 54602
ccggcaggtgtttgtttatagcgggaactctcacccaaagtaatttcatctccgattttttttttttttggttgttgttcgcatctctgtgtaataaaaagagtaaaaccaaaaccctagaaaaaaaatctccatctttttttattccgccattggaagatcgatcactgagaaggatgagtatggagatggagttgtttgtcactccagagaagcagaggcaacatccttcagtgagcgttgagaaaactccagtgagaaggaaattgattgttgatgatgattctgaaattggatcagagaagaaagggcaatcaagaacttctggaggcgggcttcgtcaattcagtgttatggtttgtcagaagttggaagccaagaagataactacttacaaggaggttgcagacgaaattatttcagattttgccacaattaagcaaaacgcagagaagcctttgaatgaaaatgagtacaatgagaagaacataaggcggagagtctacgatgcgctcaatgtgttcatggcgttggatattattgcaagggataaaaaggaaatccggtggaaaggacttcctattacctgcaaaaaggatgtggaagaagtcaagatggatcgtaataaagttatgagcagtgtgcaaaagaaggctgcttttcttaaagagttgagagaaaaggtctcaagtcttgagagtcttatgtcgagaaatcaagagatggttgtgaagactcaaggcccagcagaaggatttaccttaccattcattctacttgagacaaaccctcacgcagtagtcgaaatcgagatttctgaagatatgcaacttgtacacctcgacttcaatagcacacctttctcggtccatgatgatgcttacattttgaaactgatgcaagaacagaagcaagaacagaacagagtatcttcttcttcatctacacatcaccaatctcaacatagctccgctcattcttcatccagttcttgcattgcttctggaacctcaggcccggtttgctggaactcgggatccattgatactcgctgaccgagcttctattcccaaattcttcaagaagaagaagtaatgatctaattggtatactaaaaaattatacatctggtttagtgttcaattgagagagactgtaaaatcaattcataggccaacaaatgtttgtttatccaattttcctttttattcgaacttgatgcgatatttcaacggaaacagaaactattgtttt

SEQ ID NO: 48075 - protein, 350 aa, Arabidopsis thaliana
  peptide (1)..(350): Ceres Seq. ID no. 13649386
GRCLFIAGTLTQSNFISDFFFFWLLFASLCNKKSKTKTLEKKSPSFFIPPLEDRSLRRMSMEMELFVTPEKQRQHPSVSVEKTPVRRKLIVDDDSEIGSEKKGQSRTSGGGLRQFSVMVCQKLEAKKITTYKEVADEIISDFATIKQNAEKPLNENEYNEKNIRRRVYDALNVFMALDIIARDKKEIRWKGLPITCKKDVEEVKMDRNKVMSSVQKKAAFLKELREKVSSLESLMSRNQEMVVKTQGPAEGFTLPFILLETNPHAVVEIEISEDMQLVHLDFNSTPFSVHDDAYILKLMQEQKQEQNRVSSSSSTHHQSQHSSAHSSSSSCIASGTSGPVCWNSGSIDTR

SEQ ID NO: 48076 - protein, 292 aa, Arabidopsis thaliana
  peptide (1)..(292): Ceres Seq. ID no. 13649387
MSMEMELFVTPEKQRQHPSVSVEKTPVRRKLIVDDDSEIGSEKKGQSRTSGGGLRQFSVMVCQKLEAKKITTYKEVADEIISDFATIKQNAEKPLNENEYNEKNIRRRVYDALNVFMALDIIARDKKEIRWKGLPITCKKDVEEVKMDRNKVMSSVQKKAAFLKELREKVSSLESLMSRNQEMVVKTQGPAEGFTLPFILLETNPHAVVEIEISEDMQLVHLDFNSTPFSVHDDAYILKLMQEQKQEQNRVSSSSSTHHQSQHSSAHSSSSSCIASGTSGPVCWNSGSIDTR

SEQ ID NO: 48077 - protein, 290 aa, Arabidopsis thaliana
  peptide (1)..(290): Ceres Seq. ID no. 13649388
MEMELFVTPEKQRQHPSVSVEKTPVRRKLIVDDDSEIGSEKKGQSRTSGGGLRQFSVMVCQKLEAKKITTYKEVADEIISDFATIKQNAEKPLNENEYNEKNIRRRVYDALNVFMALDIIARDKKEIRWKGLPITCKKDVEEVKMDRNKVMSSVQKKAAFLKELREKVSSLESLMSRNQEMVVKTQGPAEGFTLPFILLETNPHAVVEIEISEDMQLVHLDFNSTPFSVHDDAYILKLMQEQKQEQNRVSSSSSTHHQSQHSSAHSSSSSCIASGTSGPVCWNSGSIDTR

SEQ ID NO: 48078 - DNA, 1972 bp, Arabidopsis thaliana
  misc_feature (1)..(1972): Ceres Seq. ID no. 13647613
  misc_feature (1)..(1972): Ortholog of  Ceres SEQ ID NO 14310547 as cited in SEQ ID NO 55132
  misc_feature (1)..(1972): Ortholog of  Ceres SEQ ID NO 13596261 as cited in SEQ ID NO 67817
  misc_feature (1)..(1972): Ortholog of  Ceres SEQ ID NO 13662360 as cited in SEQ ID NO 68830
actttttcgtctagatacattcttcgtgaagaaatccaagtgcacacattcattagtgttggacggacccattttattttggatttttttgtataattctttggggtttttttgttaataattcacttctgtctataatatgattatgattgttcatcatattttagctgtaatttcctctcttgaacaaaattattattttcgtgatgtttttaagtacgtgacgaaagatcatttggtgatctcactgacatgatttgcccagcctgtcaggtttacctatggtcaaatatcattttctcgattttgccccaaacggtcaaggcatatatccccaatcttcaaagggtatttatgtacttttcgctattaaccgtgtggctatatgaagccgattcctcataacaactacaaaaaaggaaagcttcttccctccggcaaattcttacgtttctccggcggttagaaaaatgacaccacagatcaaaactcatctcttgccgaagcaagaaccttcttcgtctgagaaccatggatcatcaacctccggcatcgttttcaacgtgtcaacgagtataatcggagccggaataatgtcgatgccggcggcgtttaaagttcttggaatagttccagcgtttttgattatcacgatcatagcttggctttccacaatttccgttggatttctgatgaaatcaactctcgccggagaatcaactacttacgccggagttatgaaagagtcgtttggtaaaacaggatccatcgctgtacagattgctacgatggttgctacttttggttgtatgattatattttcgattattataggagatgtgctttctggtaatgaaaatggtggtcctgaacatattggagttttgcaagaatggtttggttcttactggtggaacacgagaatcttcgctttgttatttgtctacggctttgtcttgcttccattggtcctgcgtagacgagtcgaaagactggcaattagttccgctgtatcgtttcttcttgcggttctatttgttgtcataagctcggtgctggcgatttccgcgctggtgaatggacaaacgaagaatccaagactgtttccggagttgagcaatggaggatcgttctggcaactcttcacagcttcccctgttatagttacagccttcacgtttcacttcaatgttcatccaattggattcgagctcaaagatccattacaagtgatcccagcaactaagatctctgtcatcttgtgtgctgctatctacttcgcaactggactctttggttaccttctctttggagatgcaactatgtcggatattctagtgaactttgaccagagctctggttcttccattggttctcttctcaacgacattgtcagactcagctacgtgcttcacctcatgctggtctttcctctcctgaacttctcattgagagcaaatctcgacgaactcttgtaccccaagaagccgtccttggaaaaagacacaaaaagattcatcggactcactctggctctactgatttgctgtttcttgtctgcaatcgctgtaccagacatttggtacttctttcagttcatgggatcaaccatcacagtctccatagcattcatatttccagccgccattgttctaaggaatatccatggtgtatcaacctcaagagagaagatcgtagctgcaataatgcttgttcttgctgttgccactagcattattgctatctcgacaaatttatacagcctcgcagcaaactagtcgttgaaaaaagttttgcaaacagtcccttccatgatcacttcaaagaaatctgtaaaattattagcttgccgtagcattcatatttatatctttgtgaaataggtttgtcagaaaatgcaatgtaatagctatacaaagtgcaatttttgttgctgcttgaaacagagaaagaggaaatgaacaactcttct

SEQ ID NO: 48079 - protein, 435 aa, Arabidopsis thaliana
  peptide (1)..(435): Ceres Seq. ID no. 13647614
MTPQIKTHLLPKQEPSSSENHGSSTSGIVFNVSTSIIGAGIMSMPAAFKVLGIVPAFLIITIIAWLSTISVGFLMKSTLAGESTTYAGVMKESFGKTGSIAVQIATMVATFGCMIIFSIIIGDVLSGNENGGPEHIGVLQEWFGSYWWNTRIFALLFVYGFVLLPLVLRRRVERLAISSAVSFLLAVLFVVISSVLAISALVNGQTKNPRLFPELSNGGSFWQLFTASPVIVTAFTFHFNVHPIGFELKDPLQVIPATKISVILCAAIYFATGLFGYLLFGDATMSDILVNFDQSSGSSIGSLLNDIVRLSYVLHLMLVFPLLNFSLRANLDELLYPKKPSLEKDTKRFIGLTLALLICCFLSAIAVPDIWYFFQFMGSTITVSIAFIFPAAIVLRNIHGVSTSREKIVAAIMLVLAVATSIIAISTNLYSLAAN

SEQ ID NO: 48080 - protein, 394 aa, Arabidopsis thaliana
  peptide (1)..(394): Ceres Seq. ID no. 13647615
MSMPAAFKVLGIVPAFLIITIIAWLSTISVGFLMKSTLAGESTTYAGVMKESFGKTGSIAVQIATMVATFGCMIIFSIIIGDVLSGNENGGPEHIGVLQEWFGSYWWNTRIFALLFVYGFVLLPLVLRRRVERLAISSAVSFLLAVLFVVISSVLAISALVNGQTKNPRLFPELSNGGSFWQLFTASPVIVTAFTFHFNVHPIGFELKDPLQVIPATKISVILCAAIYFATGLFGYLLFGDATMSDILVNFDQSSGSSIGSLLNDIVRLSYVLHLMLVFPLLNFSLRANLDELLYPKKPSLEKDTKRFIGLTLALLICCFLSAIAVPDIWYFFQFMGSTITVSIAFIFPAAIVLRNIHGVSTSREKIVAAIMLVLAVATSIIAISTNLYSLAAN

SEQ ID NO: 48081 - protein, 392 aa, Arabidopsis thaliana
  peptide (1)..(392): Ceres Seq. ID no. 13647616
MPAAFKVLGIVPAFLIITIIAWLSTISVGFLMKSTLAGESTTYAGVMKESFGKTGSIAVQIATMVATFGCMIIFSIIIGDVLSGNENGGPEHIGVLQEWFGSYWWNTRIFALLFVYGFVLLPLVLRRRVERLAISSAVSFLLAVLFVVISSVLAISALVNGQTKNPRLFPELSNGGSFWQLFTASPVIVTAFTFHFNVHPIGFELKDPLQVIPATKISVILCAAIYFATGLFGYLLFGDATMSDILVNFDQSSGSSIGSLLNDIVRLSYVLHLMLVFPLLNFSLRANLDELLYPKKPSLEKDTKRFIGLTLALLICCFLSAIAVPDIWYFFQFMGSTITVSIAFIFPAAIVLRNIHGVSTSREKIVAAIMLVLAVATSIIAISTNLYSLAAN

SEQ ID NO: 48082 - DNA, 1677 bp, Arabidopsis thaliana
  misc_feature (1)..(1677): Ceres Seq. ID no. 13649087
  misc_feature (1)..(1677): Ortholog of  Ceres SEQ ID NO 14311553 as cited in SEQ ID NO 51462
  misc_feature (1)..(1677): Ortholog of  Ceres SEQ ID NO 13599003 as cited in SEQ ID NO 0
gaagaaggcgaagaaaatcatcaccaccgtcaacttttctcttgcggacaagacgattctccgattatccccaagaggagaatcctcataatcattttctccgattcgattcgtcttccttggtcctggattgcttcatgaatttctaggacaacaatggaggctcgtccagttcatagatcaggttcgagagacctcacacgcacttcttcaatcccatctacacaaaaaccttcaccagtagaagatagtttcatgagatcagataacaacagtcagttaatgtctagaccattaggacaaacctaccatttactttcatctagtaacggtggagctgttggacatatatgttcttcttcatcatctggttttgcaaccaatctccattactcaactatggtatctcatgagaaacaacaacactacacaggaagcagcagtaataatgctgtgcagacaccaagcaacaacgatagtgcttggtgtcatgattcattgccaggagggtttcttgacttccatgaaaccaacccggcgattcaaaacaactgtcagattgaggatggtggcattgcggctgcttttgatgacattcaaaaacgaagtgattggcatgaatgggctgaccatttgatcactgatgatgatcctttgatgtctactaactggaatgatctcttgcttgaaacaaattccaattcagattcaaaggaccagaagacactgcaaattccgcaacctcagattgttcagcagcaaccttctccgtctgtggaattgcgacctgttagcacaacatcttcaaacagcaataacggaacgggcaaggcacgaatgcgttggacgccagagcttcacgaggcttttgttgaggctgtcaacagtcttggcggtagtgaaagagctactcctaaaggggtactgaagattatgaaagttgaaggcttgactatatatcatgttaaaagccatttacagaaatataggacagctagatatcggccagaaccatcagaaactggttcgccagaaaggaagttgacaccgcttgaacatataacatctcttgatttgaaaggtgggataggtattacagaggctctacgacttcagatggaagtacagaagcaactccatgagcagctcgagattcaaagaaacctgcaactccgaatagaagaacaaggcaagtacctgcaaatgatgttcgagaagcaaaactctggtcttaccaaagggacagcctcaacatcagattccgcagccaaatctgaacaagaagacaagaagactgctgattcgaaggaggttccagaagaagaaaccaggaaatgtgaggaactagaatctccacagccaaagcgtcccaaaatcgataattgaaagtattggtcttttgctggataatctcggagtttcagagttaacagtgatagagagaacgagctcttatcttgaggttcttcaggacttctctctttactgtttaactatttttctgatggaagactctcaactcagctgtgtagacaaacaacagatccccaaggaagaaacaaaacaaaaataaaaagttagtttgggagaatcttcatcattcagtgtaatctaaatgcttaactcatcattagttttacagctacagatttcttatgttaatcttttttagaatat

SEQ ID NO: 48083 - protein, 409 aa, Arabidopsis thaliana
  peptide (1)..(409): Ceres Seq. ID no. 13649088
MEARPVHRSGSRDLTRTSSIPSTQKPSPVEDSFMRSDNNSQLMSRPLGQTYHLLSSSNGGAVGHICSSSSSGFATNLHYSTMVSHEKQQHYTGSSSNNAVQTPSNNDSAWCHDSLPGGFLDFHETNPAIQNNCQIEDGGIAAAFDDIQKRSDWHEWADHLITDDDPLMSTNWNDLLLETNSNSDSKDQKTLQIPQPQIVQQQPSPSVELRPVSTTSSNSNNGTGKARMRWTPELHEAFVEAVNSLGGSERATPKGVLKIMKVEGLTIYHVKSHLQKYRTARYRPEPSETGSPERKLTPLEHITSLDLKGGIGITEALRLQMEVQKQLHEQLEIQRNLQLRIEEQGKYLQMMFEKQNSGLTKGTASTSDSAAKSEQEDKKTADSKEVPEEETRKCEELESPQPKRPKIDN

SEQ ID NO: 48084 - protein, 376 aa, Arabidopsis thaliana
  peptide (1)..(376): Ceres Seq. ID no. 13649089
MRSDNNSQLMSRPLGQTYHLLSSSNGGAVGHICSSSSSGFATNLHYSTMVSHEKQQHYTGSSSNNAVQTPSNNDSAWCHDSLPGGFLDFHETNPAIQNNCQIEDGGIAAAFDDIQKRSDWHEWADHLITDDDPLMSTNWNDLLLETNSNSDSKDQKTLQIPQPQIVQQQPSPSVELRPVSTTSSNSNNGTGKARMRWTPELHEAFVEAVNSLGGSERATPKGVLKIMKVEGLTIYHVKSHLQKYRTARYRPEPSETGSPERKLTPLEHITSLDLKGGIGITEALRLQMEVQKQLHEQLEIQRNLQLRIEEQGKYLQMMFEKQNSGLTKGTASTSDSAAKSEQEDKKTADSKEVPEEETRKCEELESPQPKRPKIDN

SEQ ID NO: 48085 - protein, 367 aa, Arabidopsis thaliana
  peptide (1)..(367): Ceres Seq. ID no. 13649090
MSRPLGQTYHLLSSSNGGAVGHICSSSSSGFATNLHYSTMVSHEKQQHYTGSSSNNAVQTPSNNDSAWCHDSLPGGFLDFHETNPAIQNNCQIEDGGIAAAFDDIQKRSDWHEWADHLITDDDPLMSTNWNDLLLETNSNSDSKDQKTLQIPQPQIVQQQPSPSVELRPVSTTSSNSNNGTGKARMRWTPELHEAFVEAVNSLGGSERATPKGVLKIMKVEGLTIYHVKSHLQKYRTARYRPEPSETGSPERKLTPLEHITSLDLKGGIGITEALRLQMEVQKQLHEQLEIQRNLQLRIEEQGKYLQMMFEKQNSGLTKGTASTSDSAAKSEQEDKKTADSKEVPEEETRKCEELESPQPKRPKIDN

SEQ ID NO: 48086 - DNA, 1457 bp, Arabidopsis thaliana
  misc_feature (1)..(1457): Ceres Seq. ID no. 13649393
  misc_feature (1)..(1457): Ortholog of  Ceres SEQ ID NO 13654583 as cited in SEQ ID NO 68599
ggatcaatttctgtttctttcttttaccgaacagaagtgaatccttcaaggcttcaatggcggcacttagcttttgcagctcttctcctcctcgaattcttcataaacaatccaaatcgagttttttcccttcttctgcctcttcttctttcacacaaaccgtcggagaattatttgcgaaccccttctctgtctcaagacgatttcgtggcgccgttaactccaccgtagtttccgatgaatcgggaaacgcgaaacttccatcttctccggcgaagaagctaaggaatattatgcaatcccctggtgttcttcagggtccatgttgcttcgatgctcttagtgccaaactcatcgaacgagctgggtttccttactgtatcacctctgggttctcgatttcagcgtctcggcttggtttaccggataagggtctaatttcttatggagaaatggttgatcaaggtcaacaaattactcaatctgtatcaattccggtgattggagacggtggcaatggatacggtaatgccatgaatgttaagagaaccgtcaaaggatatattaaagctggctttgcaggaattatcatcaatgatgaagtttgttgtgaaaatactaagagtgagagaagagtggtttctagagaggaagcagtgatgcgtgttaaagctgcggttgatgcacgtagagagtgtgattcggacattgtaattgtagctcaaactgattcccgtgaagcgatatctctggaggaatcactcattagggcaagagcttttacagatgctggagctgatgttctctccgttgattctcttgtttctagagaagagatgaaagcattctgcaatgtctatccactagttcctaaattggctaatatgcttgaaagcggaggaaaaattccaattctaaacccgctggagctagaagagattggatataagctagtggcgtatccaatttcattgattggagtatctattcaagcaatgcaggacgctctattggcaatcaagggtgggcgaattcctccaccaggaagcatggcgtctttagaagaaattggagagattcttggttttgacacttacgaggaagaagagaagcggtacgctacctcgtcatcagatagagaagtgagcagcagtagcgtctatcgtaatcaacgggtggctaaagatgatccagaacagagagaggacctgattgttgaagtcataacacctgaggtttataatgaaccaagaaaccccttttcgcggatctggtcacgatctttgaggatcaaaatcatcggacgcgatgggtttgagaaactcgatgtcagaattccggtaagtccactttcgagggccatttttcgtgttttatctgagctgatgcaaaacttgtcttatggttggaacaggccggattcttggaaggtgtcacaaacattgttccagctttag

SEQ ID NO: 48087 - protein, 484 aa, Arabidopsis thaliana
  peptide (1)..(484): Ceres Seq. ID no. 13649394
INFCFFLLPNRSESFKASMAALSFCSSSPPRILHKQSKSSFFPSSASSSFTQTVGELFANPFSVSRRFRGAVNSTVVSDESGNAKLPSSPAKKLRNIMQSPGVLQGPCCFDALSAKLIERAGFPYCITSGFSISASRLGLPDKGLISYGEMVDQGQQITQSVSIPVIGDGGNGYGNAMNVKRTVKGYIKAGFAGIIINDEVCCENTKSERRVVSREEAVMRVKAAVDARRECDSDIVIVAQTDSREAISLEESLIRARAFTDAGADVLSVDSLVSREEMKAFCNVYPLVPKLANMLESGGKIPILNPLELEEIGYKLVAYPISLIGVSIQAMQDALLAIKGGRIPPPGSMASLEEIGEILGFDTYEEEEKRYATSSSDREVSSSSVYRNQRVAKDDPEQREDLIVEVITPEVYNEPRNPFSRIWSRSLRIKIIGRDGFEKLDVRIPVSPLSRAIFRVLSELMQNLSYGWNRPDSWKVSQTLFQL

SEQ ID NO: 48088 - protein, 466 aa, Arabidopsis thaliana
  peptide (1)..(466): Ceres Seq. ID no. 13649395
MAALSFCSSSPPRILHKQSKSSFFPSSASSSFTQTVGELFANPFSVSRRFRGAVNSTVVSDESGNAKLPSSPAKKLRNIMQSPGVLQGPCCFDALSAKLIERAGFPYCITSGFSISASRLGLPDKGLISYGEMVDQGQQITQSVSIPVIGDGGNGYGNAMNVKRTVKGYIKAGFAGIIINDEVCCENTKSERRVVSREEAVMRVKAAVDARRECDSDIVIVAQTDSREAISLEESLIRARAFTDAGADVLSVDSLVSREEMKAFCNVYPLVPKLANMLESGGKIPILNPLELEEIGYKLVAYPISLIGVSIQAMQDALLAIKGGRIPPPGSMASLEEIGEILGFDTYEEEEKRYATSSSDREVSSSSVYRNQRVAKDDPEQREDLIVEVITPEVYNEPRNPFSRIWSRSLRIKIIGRDGFEKLDVRIPVSPLSRAIFRVLSELMQNLSYGWNRPDSWKVSQTLFQL

SEQ ID NO: 48089 - protein, 387 aa, Arabidopsis thaliana
  peptide (1)..(387): Ceres Seq. ID no. 13649396
MQSPGVLQGPCCFDALSAKLIERAGFPYCITSGFSISASRLGLPDKGLISYGEMVDQGQQITQSVSIPVIGDGGNGYGNAMNVKRTVKGYIKAGFAGIIINDEVCCENTKSERRVVSREEAVMRVKAAVDARRECDSDIVIVAQTDSREAISLEESLIRARAFTDAGADVLSVDSLVSREEMKAFCNVYPLVPKLANMLESGGKIPILNPLELEEIGYKLVAYPISLIGVSIQAMQDALLAIKGGRIPPPGSMASLEEIGEILGFDTYEEEEKRYATSSSDREVSSSSVYRNQRVAKDDPEQREDLIVEVITPEVYNEPRNPFSRIWSRSLRIKIIGRDGFEKLDVRIPVSPLSRAIFRVLSELMQNLSYGWNRPDSWKVSQTLFQL

SEQ ID NO: 48090 - DNA, 1179 bp, Arabidopsis thaliana
  misc_feature (1)..(1179): Ceres Seq. ID no. 13649654
  misc_feature (1)..(1179): Ortholog of  Ceres SEQ ID NO 12636774 as cited in SEQ ID NO 372
  misc_feature (1)..(1179): Ortholog of  Ceres SEQ ID NO 14310917 as cited in SEQ ID NO 53231
  misc_feature (1)..(1179): Ortholog of  Ceres SEQ ID NO 13582350 as cited in SEQ ID NO 56734
  misc_feature (1)..(1179): Ortholog of  Ceres SEQ ID NO 12476493 as cited in SEQ ID NO 58163
  misc_feature (1)..(1179): Ortholog of  Ceres SEQ ID NO 12578315 as cited in SEQ ID NO 62451
  misc_feature (1)..(1179): Ortholog of  Ceres SEQ ID NO 13597295 as cited in SEQ ID NO 63743
  misc_feature (1)..(1179): Ortholog of  Ceres SEQ ID NO 12617090 as cited in SEQ ID NO 64005
  misc_feature (1)..(1179): Ortholog of  Ceres SEQ ID NO 13597233 as cited in SEQ ID NO 64370
gatctcctcgcaatactactactcactttactataatctctcaaaatggccgtaagtttcgtaacaacatctcctgaggaagaagacaaaccgaagctaggccttggaaatattcaaactccgttaatcttcaacccttcaatgcttaaccttcaagccaatatcccaaaccaattcatctggcctgacgacgaaaaaccttccatcaacgttctcgagcttgatgttcctctcatcgaccttcaaaaccttctctctgatccatcctccactttagatgcttcgagactgatctctgaggcctgtaagaagcacggtttcttcctcgtggtcaatcacggcatcagcgaggagcttatttcagacgctcatgaatacacgagccgcttctttgatatgcctctctccgaaaaacagagggttcttagaaaatccggtgagagtgttggctacgcaagcagtttcaccggacgcttctccaccaagcttccatggaaggagaccctttctttccggttttgcgacgacatgagccgctcaaaatccgttcaagattacttctgcgatgcgttgggacatgggtttcagccatttgggaaggtgtatcaagagtattgtgaagcaatgagttctctatcactgaagatcatggagcttctggggctaagtttaggcgtaaaacgggactactttagagagtttttcgaagaaaacgattcaataatgagactgaattactaccctccatgtataaaaccagatctcacactaggaacaggacctcattgtgatccaacatctcttaccatccttcaccaagaccatgttaatggccttcaagtctttgtggaaaatcaatggcgctccattcgtcccaaccccaaggcctttgtggtcaatatcggcgatactttcatggctctatcgaacgatagatacaagagctgcttgcaccgggcggtggtgaacagcgagagcgagaggaaatcacttgcattcttcttgtgtccgaaaaaagacagagtagtgacgccaccgagagagcttttggacagcatcacatcaagaagataccctgacttcacatggtctatgttccttgagttcactcagaaacattatagagcagacatgaacactctccaagccttttcagattggctcaccaaacccatctaa

SEQ ID NO: 48091 - protein, 377 aa, Arabidopsis thaliana
  peptide (1)..(377): Ceres Seq. ID no. 13649655
MAVSFVTTSPEEEDKPKLGLGNIQTPLIFNPSMLNLQANIPNQFIWPDDEKPSINVLELDVPLIDLQNLLSDPSSTLDASRLISEACKKHGFFLVVNHGISEELISDAHEYTSRFFDMPLSEKQRVLRKSGESVGYASSFTGRFSTKLPWKETLSFRFCDDMSRSKSVQDYFCDALGHGFQPFGKVYQEYCEAMSSLSLKIMELLGLSLGVKRDYFREFFEENDSIMRLNYYPPCIKPDLTLGTGPHCDPTSLTILHQDHVNGLQVFVENQWRSIRPNPKAFVVNIGDTFMALSNDRYKSCLHRAVVNSESERKSLAFFLCPKKDRVVTPPRELLDSITSRRYPDFTWSMFLEFTQKHYRADMNTLQAFSDWLTKPI

SEQ ID NO: 48092 - protein, 345 aa, Arabidopsis thaliana
  peptide (1)..(345): Ceres Seq. ID no. 13649656
MLNLQANIPNQFIWPDDEKPSINVLELDVPLIDLQNLLSDPSSTLDASRLISEACKKHGFFLVVNHGISEELISDAHEYTSRFFDMPLSEKQRVLRKSGESVGYASSFTGRFSTKLPWKETLSFRFCDDMSRSKSVQDYFCDALGHGFQPFGKVYQEYCEAMSSLSLKIMELLGLSLGVKRDYFREFFEENDSIMRLNYYPPCIKPDLTLGTGPHCDPTSLTILHQDHVNGLQVFVENQWRSIRPNPKAFVVNIGDTFMALSNDRYKSCLHRAVVNSESERKSLAFFLCPKKDRVVTPPRELLDSITSRRYPDFTWSMFLEFTQKHYRADMNTLQAFSDWLTKPI

SEQ ID NO: 48093 - protein, 260 aa, Arabidopsis thaliana
  peptide (1)..(260): Ceres Seq. ID no. 13649657
MPLSEKQRVLRKSGESVGYASSFTGRFSTKLPWKETLSFRFCDDMSRSKSVQDYFCDALGHGFQPFGKVYQEYCEAMSSLSLKIMELLGLSLGVKRDYFREFFEENDSIMRLNYYPPCIKPDLTLGTGPHCDPTSLTILHQDHVNGLQVFVENQWRSIRPNPKAFVVNIGDTFMALSNDRYKSCLHRAVVNSESERKSLAFFLCPKKDRVVTPPRELLDSITSRRYPDFTWSMFLEFTQKHYRADMNTLQAFSDWLTKPI

SEQ ID NO: 48094 - DNA, 1596 bp, Arabidopsis thaliana
  misc_feature (1)..(1596): Ceres Seq. ID no. 12575533
  misc_feature (1)..(1596): Ortholog of  Ceres SEQ ID NO 13594345 as cited in SEQ ID NO 58043
  misc_feature (1)..(1596): Ortholog of  Ceres SEQ ID NO 12614112 as cited in SEQ ID NO 60891
  misc_feature (1)..(1596): Ortholog of  Ceres SEQ ID NO 13597574 as cited in SEQ ID NO 64677
  misc_feature (1)..(1596): Ortholog of  Ceres SEQ ID NO 14302832 as cited in SEQ ID NO 64926
  misc_feature (1)..(1596): Ortholog of  Ceres SEQ ID NO 13597678 as cited in SEQ ID NO 65375
  misc_feature (1)..(1596): Ortholog of  Ceres SEQ ID NO 13662880 as cited in SEQ ID NO 65422
  misc_feature (1)..(1596): Ortholog of  Ceres SEQ ID NO 13596180 as cited in SEQ ID NO 67941
  misc_feature (1)..(1596): Ortholog of  Ceres SEQ ID NO 13591190 as cited in SEQ ID NO 68044
  misc_feature (1)..(1596): Ortholog of  Ceres SEQ ID NO 13596089 as cited in SEQ ID NO 68373
aggagacacaatatcaacaacttattgttcctttggttcgaacaattttaccaaaaaaatgagtgaagcaaagaagggtcacgtactgttttttccatatccattacaaggccacattaacccaatgatccaactcgctaaacgcttatccaaaaagggcatcaccagcacactcatcatcgcctccaaagaccaccgtgaaccttacacctccgacgactactccatcaccgtccacaccatccacgacggtttctttccacatgaacaccctcacgccaagttcgtagatcttgaccgtttccacaactctacttctcgaagcctgaccgatttcatctctagtgcgaagttgtcggacaatcctccaaaagctctgatctatgatccatttatgccctttgcattggacatagccaaggacttggatctatacgtagtggcatatttcactcaaccatggttggctagtcttgtttactaccatatcaacgaaggcacctacgatgttcccgttgatagacacgagaacccaacacttgcatcgtttcctggtttcccattgttaagccaagatgatctgccttcgttcgcctgcgaaaaagggtcgtaccctcttctacacgagtttgtggttaggcaattctctaatttattgcaagctgattgcattctctgcaacacttttgatcaacttgaaccaaaggtagtgaaatggatgaatgatcaatggccggtgaagaacattggaccggtggttccatcgaagttcttggataaccggttgccagaagacaaagattacgaactcgagaactccaagacagagccagacgagtctgttttgaagtggttgggaaacaggccggcgaagtcggtggtttacgtggcgtttgggacattggtggctttgagcgaaaaacagatgaaggaaattgcaatggcgattagccaaaccggatatcacttcttgtggtctgttagagaatccgagagaagcaaactaccctctggttttatcgaagaggcagaggagaaagactctggacttgtggctaagtgggttcctcagctagaggttttagcacatgaatcaatcgggtgtttcgtgtcacactgtggatggaactcgacattggaggcactatgcttaggggttccaatggtgggcgtgcctcagtggactgatcagcccacaaatgctaagtttatagaggatgtgtggaagattggggttagagtgaggaccgatggagaagggctttcgagtaaagaagagattgcgagatgcattgttgaggtcatggaaggagagagagggaaagagataaggaagaatgttgagaagcttaaggtgttggctcgcgaagctatctctgaaggaggtagttccgacaagaagattgatgagtttgttgctcttttgacttaacaatttgaaactgagatgtcatcagtttgttagttgattacctaataacggcttctttgtcatctaaatttgaattatcctgttggttccattggttgtcccctgcgaacaaatccatatatgaactctgtattaaaaaacggagatgtttgaatttgaagcat

SEQ ID NO: 48095 - protein, 476 aa, Arabidopsis thaliana
  peptide (1)..(476): Ceres Seq. ID no. 12575534
GDTISTTYCSFGSNNFTKKMSEAKKGHVLFFPYPLQGHINPMIQLAKRLSKKGITSTLIIASKDHREPYTSDDYSITVHTIHDGFFPHEHPHAKFVDLDRFHNSTSRSLTDFISSAKLSDNPPKALIYDPFMPFALDIAKDLDLYVVAYFTQPWLASLVYYHINEGTYDVPVDRHENPTLASFPGFPLLSQDDLPSFACEKGSYPLLHEFVVRQFSNLLQADCILCNTFDQLEPKVVKWMNDQWPVKNIGPVVPSKFLDNRLPEDKDYELENSKTEPDESVLKWLGNRPAKSVVYVAFGTLVALSEKQMKEIAMAISQTGYHFLWSVRESERSKLPSGFIEEAEEKDSGLVAKWVPQLEVLAHESIGCFVSHCGWNSTLEALCLGVPMVGVPQWTDQPTNAKFIEDVWKIGVRVRTDGEGLSSKEEIARCIVEVMEGERGKEIRKNVEKLKVLAREAISEGGSSDKKIDEFVALLT

SEQ ID NO: 48096 - protein, 457 aa, Arabidopsis thaliana
  peptide (1)..(457): Ceres Seq. ID no. 12575535
MSEAKKGHVLFFPYPLQGHINPMIQLAKRLSKKGITSTLIIASKDHREPYTSDDYSITVHTIHDGFFPHEHPHAKFVDLDRFHNSTSRSLTDFISSAKLSDNPPKALIYDPFMPFALDIAKDLDLYVVAYFTQPWLASLVYYHINEGTYDVPVDRHENPTLASFPGFPLLSQDDLPSFACEKGSYPLLHEFVVRQFSNLLQADCILCNTFDQLEPKVVKWMNDQWPVKNIGPVVPSKFLDNRLPEDKDYELENSKTEPDESVLKWLGNRPAKSVVYVAFGTLVALSEKQMKEIAMAISQTGYHFLWSVRESERSKLPSGFIEEAEEKDSGLVAKWVPQLEVLAHESIGCFVSHCGWNSTLEALCLGVPMVGVPQWTDQPTNAKFIEDVWKIGVRVRTDGEGLSSKEEIARCIVEVMEGERGKEIRKNVEKLKVLAREAISEGGSSDKKIDEFVALLT

SEQ ID NO: 48097 - protein, 435 aa, Arabidopsis thaliana
  peptide (1)..(435): Ceres Seq. ID no. 12575536
MIQLAKRLSKKGITSTLIIASKDHREPYTSDDYSITVHTIHDGFFPHEHPHAKFVDLDRFHNSTSRSLTDFISSAKLSDNPPKALIYDPFMPFALDIAKDLDLYVVAYFTQPWLASLVYYHINEGTYDVPVDRHENPTLASFPGFPLLSQDDLPSFACEKGSYPLLHEFVVRQFSNLLQADCILCNTFDQLEPKVVKWMNDQWPVKNIGPVVPSKFLDNRLPEDKDYELENSKTEPDESVLKWLGNRPAKSVVYVAFGTLVALSEKQMKEIAMAISQTGYHFLWSVRESERSKLPSGFIEEAEEKDSGLVAKWVPQLEVLAHESIGCFVSHCGWNSTLEALCLGVPMVGVPQWTDQPTNAKFIEDVWKIGVRVRTDGEGLSSKEEIARCIVEVMEGERGKEIRKNVEKLKVLAREAISEGGSSDKKIDEFVALLT

SEQ ID NO: 48098 - DNA, 2537 bp, Arabidopsis thaliana
  misc_feature (1)..(2537): Ceres Seq. ID no. 13649091
  misc_feature (1)..(2537): Ortholog of  Ceres SEQ ID NO 13657677 as cited in SEQ ID NO 66119
aaaacgataattaaaaaaaaaaaaaaaaagcttacgaacgccattggagaagagcacgaaaaagaagaagaagactatgcttctcttgcaacaaccaccactggtttcaactagatttcactctctctacttcctcactcaccaccaccaccaccaccaccgcttcttccaaccaccaatctcagctttctctgcaacaacctctgcttctttaccttcaccatctccatcttcttcttcttcttacttctcctcatggaatggtttagatacaaatgaagaagaagacaatgaattctcctccgaggttcaccgtcgctacgacttctctccactcctaaaattcctctcaagattcggaccagtcgagttagctctagattcggaatcggaatcagaagcttcaccggaatcgcttaatccggtagagttcgatctcgtcgagtcatacagagcagtaccagcaccatactggcactctctgataaaatcgttaacctcatcaacatcatctcttggtttagcttacgctgtagtgtcatggctacaaaaacataacctctgtttctcctacgagcttctttactcgattctcatccacgcgcttggccgttccgagaagctttacgaggcgtttcttctctctcagaaacaaacgttaacaccattgacatacaatgccttgattggtgcttgtgctcggaacaacgatatcgaaaaagctcttaatttgatcgctaagatgcgtcaagacggttatcaatccgattttgttaactatagtttggttattcagtcgttgactcgtagcaataagattgattctgttatgttgttgagattgtataaagagattgaaagagataagcttgagcttgatgtgcagttagttaatgatattattatgggttttgctaagtctggtgatccttctaaggctttgcagcttcttggtatggctcaagcgacgggtttgagtgcgaaaaccgctactcttgtatcgattatctctgcgttggcggattcagggaggactttggaggctgaagctttgtttgaggagttgagacagagtgggattaagcctagaacgagagcttacaatgcgttgcttaaagggtatgtgaagacgggtcctttgaaagacgcagagtcaatggtttctgagatggagaagcgaggtgtttcgcctgatgaacatacgtatagtctgcttatcgatgcgtatgttaatgcaggtagatgggaaagtgcgagaattgtgttgaaagagatggaagctggtgatgtacagcctaattcttttgttttcagtagactcttagctggttttcgcgatagaggtgaatggcagaagacatttcaagttcttaaagagatgaagagtatcggtgttaagcccgatagacagttttataacgtggtgatcgatacctttgggaagtttaattgtcttgatcatgccatgacgactttcgatagaatgttaagcgaaggtattgaaccagatagggtgacttggaatacgcttattgattgtcattgtaagcatggtcggcatatcgtagcggaagagatgttcgaggcgatggagaggcgagggtgtttgccttgtgctacaacttataacattatgatcaatagttatggtgatcaagaaagatgggatgatatgaaaagattgttgggaaagatgaagagccaaggtatcctgcctaatgttgtgacacacactacacttgtcgacgtttatggcaaatcgggtaggtttaatgatgcgatagagtgcttggaagagatgaagtcggttgggttgaaaccatcatcgaccatgtacaatgccctcatcaatgcatatgcacaaaggggtttatcggaacaagctgtgaatgcatttagagtgatgacatcggatggactaaagccgagtttattggctctcaattcgctcatcaatgcctttggtgaggatagaagagacgctgaagcctttgccgtgttacagtacatgaaagaaaatggcgtaaaaccagacgtggtcacttacacaacactcatgaaagctctcattcgtgttgataagtttcagaaggtaccggttgtttacgaggagatgatcatgtcaggatgcaaaccagatagaaaagctagatccatgttacggtcagctctaagatacatgaagcagacgttaagagcctcatagaaacatagggaaacaatgcaaaggttttatcttgagctaaagtgatcaaatatttctcgagcttctgatatcgtctcgcaagctcaggaccgatatgtaaacgacacaaaccacacatcacaagaggaagtctttcatacaaatccgcacattctctgtctatgtaaagattcaacctgtacaaatatataagtgtgttgaccaaattggatacggttactgtctgtactacagagatcatgtaggaagttataaaccaaagctcctttacttaagaatatatcacaaatccaaagaattatgttgtcttttcatgagacacaacatttct

SEQ ID NO: 48099 - protein, 709 aa, Arabidopsis thaliana
  peptide (1)..(709): Ceres Seq. ID no. 15219581
MLLLQQPPLVSTRFHSLYFLTHHHHHHHRFFQPPISAFSATTSASLPSPSPSSSSSYFSSWNGLDTNEEEDNEFSSEVHRRYDFSPLLKFLSRFGPVELALDSESESEASPESLNPVEFDLVESYRAVPAPYWHSLIKSLTSSTSSLGLAYAVVSWLQKHNLCFSYELLYSILIHALGRSEKLYEAFLLSQKQTLTPLTYNALIGACARNNDIEKALNLIAKMRQDGYQSDFVNYSLVIQSLTRSNKIDSVMLLRLYKEIERDKLELDVQLVNDIIMGFAKSGDPSKALQLLGMAQATGLSAKTATLVSIISALADSGRTLEAEALFEELRQSGIKPRTRAYNALLKGYVKTGPLKDAESMVSEMEKRGVSPDEHTYSLLIDAYVNAGRWESARIVLKEMEAGDVQPNSFVFSRLLAGFRDRGEWQKTFQVLKEMKSIGVKPDRQFYNVVIDTFGKFNCLDHAMTTFDRMLSEGIEPDRVTWNTLIDCHCKHGRHIVAEEMFEAMERRGCLPCATTYNIMINSYGDQERWDDMKRLLGKMKSQGILPNVVTHTTLVDVYGKSGRFNDAIECLEEMKSVGLKPSSTMYNALINAYAQRGLSEQAVNAFRVMTSDGLKPSLLALNSLINAFGEDRRDAEAFAVLQYMKENGVKPDVVTYTTLMKALIRVDKFQKVPVVYEEMIMSGCKPDRKARSMLRSALRYMKQTLRAS

SEQ ID NO: 48100 - protein, 487 aa, Arabidopsis thaliana
  peptide (1)..(487): Ceres Seq. ID no. 15219582
MRQDGYQSDFVNYSLVIQSLTRSNKIDSVMLLRLYKEIERDKLELDVQLVNDIIMGFAKSGDPSKALQLLGMAQATGLSAKTATLVSIISALADSGRTLEAEALFEELRQSGIKPRTRAYNALLKGYVKTGPLKDAESMVSEMEKRGVSPDEHTYSLLIDAYVNAGRWESARIVLKEMEAGDVQPNSFVFSRLLAGFRDRGEWQKTFQVLKEMKSIGVKPDRQFYNVVIDTFGKFNCLDHAMTTFDRMLSEGIEPDRVTWNTLIDCHCKHGRHIVAEEMFEAMERRGCLPCATTYNIMINSYGDQERWDDMKRLLGKMKSQGILPNVVTHTTLVDVYGKSGRFNDAIECLEEMKSVGLKPSSTMYNALINAYAQRGLSEQAVNAFRVMTSDGLKPSLLALNSLINAFGEDRRDAEAFAVLQYMKENGVKPDVVTYTTLMKALIRVDKFQKVPVVYEEMIMSGCKPDRKARSMLRSALRYMKQTLRAS

SEQ ID NO: 48101 - protein, 458 aa, Arabidopsis thaliana
  peptide (1)..(458): Ceres Seq. ID no. 15219583
MLLRLYKEIERDKLELDVQLVNDIIMGFAKSGDPSKALQLLGMAQATGLSAKTATLVSIISALADSGRTLEAEALFEELRQSGIKPRTRAYNALLKGYVKTGPLKDAESMVSEMEKRGVSPDEHTYSLLIDAYVNAGRWESARIVLKEMEAGDVQPNSFVFSRLLAGFRDRGEWQKTFQVLKEMKSIGVKPDRQFYNVVIDTFGKFNCLDHAMTTFDRMLSEGIEPDRVTWNTLIDCHCKHGRHIVAEEMFEAMERRGCLPCATTYNIMINSYGDQERWDDMKRLLGKMKSQGILPNVVTHTTLVDVYGKSGRFNDAIECLEEMKSVGLKPSSTMYNALINAYAQRGLSEQAVNAFRVMTSDGLKPSLLALNSLINAFGEDRRDAEAFAVLQYMKENGVKPDVVTYTTLMKALIRVDKFQKVPVVYEEMIMSGCKPDRKARSMLRSALRYMKQTLRAS

SEQ ID NO: 48102 - DNA, 1299 bp, Arabidopsis thaliana
  misc_feature (1)..(1299): Ceres Seq. ID no. 12662749
  misc_feature (1)..(1299): Ortholog of  Ceres SEQ ID NO 13659033 as cited in SEQ ID NO 66372
  misc_feature (1)..(1299): Ortholog of  Ceres SEQ ID NO 13655724 as cited in SEQ ID NO 68973
atgaagctaaaatgggaatcaatctctaatcttcaacaaaacacatatctcataaaactcgtcgctgcaacacttataacttgtctcgcttttcgtttcttcgtcttccgcttcggccaattttccccagttcaagtgtcggtgaccggaaactccaattcccagatttctccgacgtctgttatcttatcggataacgaagatcaaattcccgtcgatattgaggtggagaagtgtgatctatttactgggaaatggattaaagatcctttgggaccaatctacacgaatgagtcatgtggtatcgttgtagatgctcaccagaattgcatcactaatggtcgacctgattctggttttctcaattggaaatggaagcctaatgactgttccttgcctcggtttgattctctgagatttctgcagcttatgaggaataaatcttgggctataatcggtgactccattgctcgtaaccatgtcgagtctttgctttgtatgctatctacagttgaaaaacctgttgaagtgtatcacgatgagaactatagatcgaagcgttggcattttccttcgtataactttacggtatccaacatttggtcaccttttcttgttcaagctgatatctttgaagactcaaatggtgtctcatcagctgcagttcagcttcatctagataaactcgacaatacatggactgatctattcccgagccttgactatgcgatcatctcttcaggggaatggttcttgaaaactgcggtataccacgagaatgctaatcccgttggatgccatggctgcccggagagttcgaacatgacggatttaggattcgactatgcttacaatacgtcgttgcgccatgttatggacttcatagcgaaatctaaaactaaaggcatgatctttttccggacttcgatacctgatcattttgaagatggggaatggcataacggtgggacttgtaagaaaacagaaccggtgggtgaagaggcagtcgagatgaaagttctgaacaagatattgagagatgttgagattaatcaattcgagagagtggttacggagatgggtcaggagagtgagaatctaaagcttctggattttgctggcatgttgctgactcgacccgatggtcatccgggtccatatagagagtttaggccgtttgataaagataagaacgctacggtacagaacgattgtctgcattggtgcttgcctggtccgattgatcacttgaacgatgtcatattggagatcatagtgaatggtcgaaccggtaaataa

SEQ ID NO: 48103 - protein, 432 aa, Arabidopsis thaliana
  peptide (1)..(432): Ceres Seq. ID no. 12662750
MKLKWESISNLQQNTYLIKLVAATLITCLAFRFFVFRFGQFSPVQVSVTGNSNSQISPTSVILSDNEDQIPVDIEVEKCDLFTGKWIKDPLGPIYTNESCGIVVDAHQNCITNGRPDSGFLNWKWKPNDCSLPRFDSLRFLQLMRNKSWAIIGDSIARNHVESLLCMLSTVEKPVEVYHDENYRSKRWHFPSYNFTVSNIWSPFLVQADIFEDSNGVSSAAVQLHLDKLDNTWTDLFPSLDYAIISSGEWFLKTAVYHENANPVGCHGCPESSNMTDLGFDYAYNTSLRHVMDFIAKSKTKGMIFFRTSIPDHFEDGEWHNGGTCKKTEPVGEEAVEMKVLNKILRDVEINQFERVVTEMGQESENLKLLDFAGMLLTRPDGHPGPYREFRPFDKDKNATVQNDCLHWCLPGPIDHLNDVILEIIVNGRTGK

SEQ ID NO: 48104 - protein, 289 aa, Arabidopsis thaliana
  peptide (1)..(289): Ceres Seq. ID no. 12662751
MRNKSWAIIGDSIARNHVESLLCMLSTVEKPVEVYHDENYRSKRWHFPSYNFTVSNIWSPFLVQADIFEDSNGVSSAAVQLHLDKLDNTWTDLFPSLDYAIISSGEWFLKTAVYHENANPVGCHGCPESSNMTDLGFDYAYNTSLRHVMDFIAKSKTKGMIFFRTSIPDHFEDGEWHNGGTCKKTEPVGEEAVEMKVLNKILRDVEINQFERVVTEMGQESENLKLLDFAGMLLTRPDGHPGPYREFRPFDKDKNATVQNDCLHWCLPGPIDHLNDVILEIIVNGRTGK

SEQ ID NO: 48105 - protein, 266 aa, Arabidopsis thaliana
  peptide (1)..(266): Ceres Seq. ID no. 12662752
MLSTVEKPVEVYHDENYRSKRWHFPSYNFTVSNIWSPFLVQADIFEDSNGVSSAAVQLHLDKLDNTWTDLFPSLDYAIISSGEWFLKTAVYHENANPVGCHGCPESSNMTDLGFDYAYNTSLRHVMDFIAKSKTKGMIFFRTSIPDHFEDGEWHNGGTCKKTEPVGEEAVEMKVLNKILRDVEINQFERVVTEMGQESENLKLLDFAGMLLTRPDGHPGPYREFRPFDKDKNATVQNDCLHWCLPGPIDHLNDVILEIIVNGRTGK

SEQ ID NO: 48106 - DNA, 1236 bp, Arabidopsis thaliana
  misc_feature (1)..(1236): Ceres Seq. ID no. 13649096
  misc_feature (1)..(1236): Ortholog of  Ceres SEQ ID NO 14311882 as cited in SEQ ID NO 51638
  misc_feature (1)..(1236): Ortholog of  Ceres SEQ ID NO 13595437 as cited in SEQ ID NO 56562
atggatcctaacgaaagccaccatcaccaccaacaacaacagctccatcacctccaccaacagcaacagcaacagcagcagcagcaacgactcacttctccttacttccaccaccaactacagcaccatcaccaccttccaaccaccgtagcaaccaccgcttctaccggaaacgccgttccatcttccaacaatgggcttttccctccgcagcctcagccacagcaccagcctaatgatgggtcatcttctctcgcggtgtaccctcattcagttccgtcctcggctgtgacggcgccgatggagccggtaaagaggaagaggggtcgaccaagaaagtatgtgacgccggaacaagccctagcggctaagaaattggcgtcttctgcgagtagttcgtctgctaaacagaggcgagagcttgctgctgttaccggtggtacggtatcgactaattccgggtcatccaagaaatctcagcttggttctgtcgggaaaactggacaatgttttactccgcatattgttaatatagctcctggcgaggatgtggtccagaaaattatgatgttcgcaaaccaaagcaagcatgaactatgcgttctttctgcatcaggcactatctctaatgcatccttgcgccaaccggctccatcaggaggcaacttaccatatgagggtcaatacgagattctctcactatctggatcctatatccgaactgaacaaggtggtaaatccggcggccttagcgtttctttatctgcttcagatggtcagatcatcggtggagcgattggtagccatctcacagctgctggcccggttcaggtgattcttggtacgtttcagcttgatagaaagaaggatgccgccgggagtggtgggaaaggggatgcttcaaacagtggaagtcggttaacttctcctgtaagctctggacagttgcttggcatgggtttccctcctggtatggaatctacgggaagaaatccaatgaggggaaacgacgagcaacatgatcatcatcatcatcaagccggtttgggtggacctcatcatttcatgatgcaagcgccgcaggggatacacatgacacattccaggccatctgaatggcgcggaggaggcaacagcggtcatgatggcagaggcggtggcgggtatgatttgtcaggaaggataggacatgagtcgtcggagaatggagattacgagcagcaaataccggattag

SEQ ID NO: 48107 - protein, 411 aa, Arabidopsis thaliana
  peptide (1)..(411): Ceres Seq. ID no. 13649097
MDPNESHHHHQQQQLHHLHQQQQQQQQQQRLTSPYFHHQLQHHHHLPTTVATTASTGNAVPSSNNGLFPPQPQPQHQPNDGSSSLAVYPHSVPSSAVTAPMEPVKRKRGRPRKYVTPEQALAAKKLASSASSSSAKQRRELAAVTGGTVSTNSGSSKKSQLGSVGKTGQCFTPHIVNIAPGEDVVQKIMMFANQSKHELCVLSASGTISNASLRQPAPSGGNLPYEGQYEILSLSGSYIRTEQGGKSGGLSVSLSASDGQIIGGAIGSHLTAAGPVQVILGTFQLDRKKDAAGSGGKGDASNSGSRLTSPVSSGQLLGMGFPPGMESTGRNPMRGNDEQHDHHHHQAGLGGPHHFMMQAPQGIHMTHSRPSEWRGGGNSGHDGRGGGGYDLSGRIGHESSENGDYEQQIPD

SEQ ID NO: 48108 - protein, 311 aa, Arabidopsis thaliana
  peptide (1)..(311): Ceres Seq. ID no. 13649098
MEPVKRKRGRPRKYVTPEQALAAKKLASSASSSSAKQRRELAAVTGGTVSTNSGSSKKSQLGSVGKTGQCFTPHIVNIAPGEDVVQKIMMFANQSKHELCVLSASGTISNASLRQPAPSGGNLPYEGQYEILSLSGSYIRTEQGGKSGGLSVSLSASDGQIIGGAIGSHLTAAGPVQVILGTFQLDRKKDAAGSGGKGDASNSGSRLTSPVSSGQLLGMGFPPGMESTGRNPMRGNDEQHDHHHHQAGLGGPHHFMMQAPQGIHMTHSRPSEWRGGGNSGHDGRGGGGYDLSGRIGHESSENGDYEQQIPD

SEQ ID NO: 48109 - protein, 223 aa, Arabidopsis thaliana
  peptide (1)..(223): Ceres Seq. ID no. 13649099
MMFANQSKHELCVLSASGTISNASLRQPAPSGGNLPYEGQYEILSLSGSYIRTEQGGKSGGLSVSLSASDGQIIGGAIGSHLTAAGPVQVILGTFQLDRKKDAAGSGGKGDASNSGSRLTSPVSSGQLLGMGFPPGMESTGRNPMRGNDEQHDHHHHQAGLGGPHHFMMQAPQGIHMTHSRPSEWRGGGNSGHDGRGGGGYDLSGRIGHESSENGDYEQQIPD

SEQ ID NO: 48110 - DNA, 709 bp, Arabidopsis thaliana
  misc_feature (1)..(709): Ceres Seq. ID no. 13649954
  misc_feature (1)..(709): Ortholog of  Ceres SEQ ID NO 14316118 as cited in SEQ ID NO 52391
  misc_feature (1)..(709): Ortholog of  Ceres SEQ ID NO 13664032 as cited in SEQ ID NO 67527
atgactgaggagagcccagaagaagatcatgggtctcctggagtagctgaaacaaatccaggaagcccttcttcaaagaccaacaacaacaacaacaacaacaaagaacaagaccggtttcttcccattgcgaatgtcggaaggatcatgaaaaaagttcttcccggtaacggtaagatctcaaaagacgctaaagaaaccgttcaagaatgtgtctcggagttcattagtttcgtcactggtgaagcttctgacaagtgtcaaagagaaaagaggaagaccatcaatggagatgatatcatttgggctatcacaactctcggtttcgaagactacgtggctccattaaaggtctacctctgcaaatatagagacaccgaaggagagaaagttaacagcccaaaacaacaacaacaaagacaacaacaacagcagattcaacaacagaatcatcataattatcagtttcaagaacaagaccaaaacaataacaacatgtcatgtactagttacatctctcatcatcatccttctccattcctaccagtggatcatcaaccttttcccaatattgctttctctcctaaatcattgcagaaacagttcccgcagcagcatgataataacattgattcaattcactggtgagagagacatttgctttttttcttctttcttttcacatattatatgcttttctttacctttt

SEQ ID NO: 48111 - protein, 215 aa, Arabidopsis thaliana
  peptide (1)..(215): Ceres Seq. ID no. 15219600
MTEESPEEDHGSPGVAETNPGSPSSKTNNNNNNNKEQDRFLPIANVGRIMKKVLPGNGKISKDAKETVQECVSEFISFVTGEASDKCQREKRKTINGDDIIWAITTLGFEDYVAPLKVYLCKYRDTEGEKVNSPKQQQQRQQQQQIQQQNHHNYQFQEQDQNNNNMSCTSYISHHHPSPFLPVDHQPFPNIAFSPKSLQKQFPQQHDNNIDSIHW

SEQ ID NO: 48112 - protein, 166 aa, Arabidopsis thaliana
  peptide (1)..(166): Ceres Seq. ID no. 15219601
MKKVLPGNGKISKDAKETVQECVSEFISFVTGEASDKCQREKRKTINGDDIIWAITTLGFEDYVAPLKVYLCKYRDTEGEKVNSPKQQQQRQQQQQIQQQNHHNYQFQEQDQNNNNMSCTSYISHHHPSPFLPVDHQPFPNIAFSPKSLQKQFPQQHDNNIDSIHW

SEQ ID NO: 48113 - DNA, 2553 bp, Arabidopsis thaliana
  misc_feature (1)..(2553): Ceres Seq. ID no. 13649718
  misc_feature (1)..(2553): Ortholog of  Ceres SEQ ID NO 14310729 as cited in SEQ ID NO 53317
atgttttcgtttgtgggtttcgtggtgttcctctctggatttttcctgggaattctcgccgtcttatccgctgaagctgcgggatttatgtatctcctgaagcgattgaatcgcaagagagatcgtattgagtcaaaacccgtctctgatccatctatcaaggattttaatcctcgcgaatccatcgatttctgtatcaacaaacagggagtggtatggattttggaattggatgaaggtctgaagaactggatgaaggaaaagttaccaaaagagcagaagaggaagagaggcttattggagattcatccacttcgaaagttcgctcgaatcaaagatcacaagcttatcttgtcagatgctgatagcactcagagtgagactaccgtttctttaataggttgcagtattgaggctgtttcaggctctgatctccctacaagaaaatgggccaaaaggtttccaataaaagttgaaagcaagatttctccagccttatacaagggaaaccaggtgttttacatctatctggagacttcttgggaaaaggaatcatggtgtaaagcccttcgtcttgcttcttgtgaaaatcaggaaaggtttatttggtactccaccaaattgaaagaagatttccgtaattatgtgacttctcttaatgttgcatatccttcatttatgaaaccatcacttggctttagttttgagacacttgacaaagggaacagaacggatggttcatcctcaaaggttcgcttgttcttgaagaaattttctagaaagcgatcaaatcgtgaagacaggaaaacctattcacatcatggaagtagctcagggaagtgctttccaggaaagaataatatgacagatgatactgatgtgcctattttttcacgttctgtgagccatagcagtcatatttctggggtcagtcatctttctggggtttcagatggagactctgaagaaaaggttgacatggatgaaggaacattagcgttgaacttgctcatttctaggctatttttcgatctcaaacggaaaacaggagtgaagaattcagtgcaagcacgaattcagcggttgttatctaacatgaggactccgagctacataggcgaactaatctgctccgatgttgacactggaaatctcccacctcatatacatgctacacgggttcttccaatggagatgagtggtgtgtgggcattcgaactagatattgaatactctggtgacgtggtgattgacgttgaaacacgggttgacatccgtgaggtggatctgcaacaaggcataaccgatacaaggttgcagccaaggtcttcaggggtagtcccgtcaaattttgctgaaggtgttgaagattttgaaaagcaattagtcttccctgtggaaactgttaatgcaggagaagtgaaaaatgatgaatccaagagctcaagaggtacgaaggcagctccaaatggtgtatccaggtggaagtctattcttaaaacaattgctgaacaagtttctcaggtgcctatctctttgtcaatacgggtgtcttctcttcgagggacactgcgggtacacatgaagccgcctccttctgatcaattatggtttggattcacgagcatgccggatatcgaattcgatctcgcatcttctgttggggaacacaaaatcaccaacagccatgttgcaatgttcttgatcaaccggtttaagacggcaatacgagaagcggtggttcttcccaactgtgaaagcctaacgattccttggatgattgctgaaaaagatgattgggttcaacgcaaagccgctccattcatgtggctgaatcaagaaaacgatcacaatacctcccatgcaacagaagcgagatctaaatctgacaagccaccgacttcgttctcatgtcttcaagctgagcaaatgcagagaactgcaaacgccacccagaagattatttctgaaatagggacattggcttcttcctcctgtgctcagtctgagcaagtgcagaaagcggccactgctttccagaaacagaatactgaagcagaagctattatgtctacgccattgtcaaactccacaactgtaacaatagagaatgataaatccttggaagaactgaaaactccactactggtacccagcagcagtaacaagcaggagacgaactcaagagggagtagcagagaggtttctgctgttcagtcaccatctaggtctgtagcttcaagcgaagaagatgattcaagggggaaaaaacagggaagaagagcaagaatgttggatcttgggaagaaaatgggggagaaattggaggagaagaggcgtcacatggaggagaagagtagacagattgttgaaaagatgagaggaccttcttaacatgagaaggaagaagcttttgcaggtttcagatgcaaaaactgatttatagaaacagaggaagttaggcattgttacatatgtacagagatgtgagagaaagccatagatgtccccatatttatccgatcatttgaaaatcttattattctgtaagat

SEQ ID NO: 48114 - protein, 797 aa, Arabidopsis thaliana
  peptide (1)..(797): Ceres Seq. ID no. 13649719
MFSFVGFVVFLSGFFLGILAVLSAEAAGFMYLLKRLNRKRDRIESKPVSDPSIKDFNPRESIDFCINKQGVVWILELDEGLKNWMKEKLPKEQKRKRGLLEIHPLRKFARIKDHKLILSDADSTQSETTVSLIGCSIEAVSGSDLPTRKWAKRFPIKVESKISPALYKGNQVFYIYLETSWEKESWCKALRLASCENQERFIWYSTKLKEDFRNYVTSLNVAYPSFMKPSLGFSFETLDKGNRTDGSSSKVRLFLKKFSRKRSNREDRKTYSHHGSSSGKCFPGKNNMTDDTDVPIFSRSVSHSSHISGVSHLSGVSDGDSEEKVDMDEGTLALNLLISRLFFDLKRKTGVKNSVQARIQRLLSNMRTPSYIGELICSDVDTGNLPPHIHATRVLPMEMSGVWAFELDIEYSGDVVIDVETRVDIREVDLQQGITDTRLQPRSSGVVPSNFAEGVEDFEKQLVFPVETVNAGEVKNDESKSSRGTKAAPNGVSRWKSILKTIAEQVSQVPISLSIRVSSLRGTLRVHMKPPPSDQLWFGFTSMPDIEFDLASSVGEHKITNSHVAMFLINRFKTAIREAVVLPNCESLTIPWMIAEKDDWVQRKAAPFMWLNQENDHNTSHATEARSKSDKPPTSFSCLQAEQMQRTANATQKIISEIGTLASSSCAQSEQVQKAATAFQKQNTEAEAIMSTPLSNSTTVTIENDKSLEELKTPLLVPSSSNKQETNSRGSSREVSAVQSPSRSVASSEEDDSRGKKQGRRARMLDLGKKMGEKLEEKRRHMEEKSRQIVEKMRGPS

SEQ ID NO: 48115 - protein, 768 aa, Arabidopsis thaliana
  peptide (1)..(768): Ceres Seq. ID no. 13649720
MYLLKRLNRKRDRIESKPVSDPSIKDFNPRESIDFCINKQGVVWILELDEGLKNWMKEKLPKEQKRKRGLLEIHPLRKFARIKDHKLILSDADSTQSETTVSLIGCSIEAVSGSDLPTRKWAKRFPIKVESKISPALYKGNQVFYIYLETSWEKESWCKALRLASCENQERFIWYSTKLKEDFRNYVTSLNVAYPSFMKPSLGFSFETLDKGNRTDGSSSKVRLFLKKFSRKRSNREDRKTYSHHGSSSGKCFPGKNNMTDDTDVPIFSRSVSHSSHISGVSHLSGVSDGDSEEKVDMDEGTLALNLLISRLFFDLKRKTGVKNSVQARIQRLLSNMRTPSYIGELICSDVDTGNLPPHIHATRVLPMEMSGVWAFELDIEYSGDVVIDVETRVDIREVDLQQGITDTRLQPRSSGVVPSNFAEGVEDFEKQLVFPVETVNAGEVKNDESKSSRGTKAAPNGVSRWKSILKTIAEQVSQVPISLSIRVSSLRGTLRVHMKPPPSDQLWFGFTSMPDIEFDLASSVGEHKITNSHVAMFLINRFKTAIREAVVLPNCESLTIPWMIAEKDDWVQRKAAPFMWLNQENDHNTSHATEARSKSDKPPTSFSCLQAEQMQRTANATQKIISEIGTLASSSCAQSEQVQKAATAFQKQNTEAEAIMSTPLSNSTTVTIENDKSLEELKTPLLVPSSSNKQETNSRGSSREVSAVQSPSRSVASSEEDDSRGKKQGRRARMLDLGKKMGEKLEEKRRHMEEKSRQIVEKMRGPS

SEQ ID NO: 48116 - protein, 713 aa, Arabidopsis thaliana
  peptide (1)..(713): Ceres Seq. ID no. 13649721
MKEKLPKEQKRKRGLLEIHPLRKFARIKDHKLILSDADSTQSETTVSLIGCSIEAVSGSDLPTRKWAKRFPIKVESKISPALYKGNQVFYIYLETSWEKESWCKALRLASCENQERFIWYSTKLKEDFRNYVTSLNVAYPSFMKPSLGFSFETLDKGNRTDGSSSKVRLFLKKFSRKRSNREDRKTYSHHGSSSGKCFPGKNNMTDDTDVPIFSRSVSHSSHISGVSHLSGVSDGDSEEKVDMDEGTLALNLLISRLFFDLKRKTGVKNSVQARIQRLLSNMRTPSYIGELICSDVDTGNLPPHIHATRVLPMEMSGVWAFELDIEYSGDVVIDVETRVDIREVDLQQGITDTRLQPRSSGVVPSNFAEGVEDFEKQLVFPVETVNAGEVKNDESKSSRGTKAAPNGVSRWKSILKTIAEQVSQVPISLSIRVSSLRGTLRVHMKPPPSDQLWFGFTSMPDIEFDLASSVGEHKITNSHVAMFLINRFKTAIREAVVLPNCESLTIPWMIAEKDDWVQRKAAPFMWLNQENDHNTSHATEARSKSDKPPTSFSCLQAEQMQRTANATQKIISEIGTLASSSCAQSEQVQKAATAFQKQNTEAEAIMSTPLSNSTTVTIENDKSLEELKTPLLVPSSSNKQETNSRGSSREVSAVQSPSRSVASSEEDDSRGKKQGRRARMLDLGKKMGEKLEEKRRHMEEKSRQIVEKMRGPS

SEQ ID NO: 48117 - DNA, 2152 bp, Arabidopsis thaliana; identical to SEQ ID NO: 45499
  misc_feature (1)..(2152): Ceres Seq. ID no. 13576317
  misc_feature (1)..(2152): Ortholog of  Ceres SEQ ID NO 14312180 as cited in SEQ ID NO 59480

SEQ ID NO: 48118 - protein, 633 aa, Arabidopsis thaliana; identical to SEQ ID NO: 45500
  peptide (1)..(633): Ceres Seq. ID no. 13576318

SEQ ID NO: 48119 - protein, 439 aa, Arabidopsis thaliana; identical to SEQ ID NO: 45501
  peptide (1)..(439): Ceres Seq. ID no. 13576319

SEQ ID NO: 48120 - protein, 398 aa, Arabidopsis thaliana; identical to SEQ ID NO: 45502
  peptide (1)..(398): Ceres Seq. ID no. 13576320

SEQ ID NO: 48121 - DNA, 1784 bp, Arabidopsis thaliana
  misc_feature (1)..(1784): Ceres Seq. ID no. 13649106
  misc_feature (1)..(1784): Ortholog of  Ceres SEQ ID NO 12626078 as cited in SEQ ID NO 69113
aaaaataaaaatcaaaacccttcgataaacctcccggaggagaggagacacccgaaatgttcgccgtatcaccgtcgtcattctcgccgacaaccatttctccgcgccgtagtggacagaggaacgaacctcgaaaattctcggtggtgagagctggagctaagagaatactatacggtaaagatagcagagagaaactccaagccggaatcgataagttagctgatgctgtttccatcaccttaggccctagagggcgtaatgtagtgcttgctgaaaaagatacaatcaaagtgattaacgatggtgtcaccattgctaaatctattgagcttcctgacactattgagaacgctggagcaacattaatccaagaggttgcgattaaaatgaacgaatcagcgggtgacgggacaaccactgcaatcattttggctagagaaatgatcaaagctggttctttggctattgcttttggagctaatgctgtttctgtgaagaatggaatgaataagactgttaaagagttggtcagggtgttgcagatgaaaagtattcctgttcaagggaagaatgatattaaagctgtggcttcaatctctgctggtaacgatgaatttgtggggaatttgattgctgagactgtggaaaagattggccctgatggtgtcatctccattgaatcatcttccacttcagaaacgtctgttatagttgaggaaggaatgaagtttgacaagggctatatgtcgcctcatttcatcacaaatcaggagaaatctacggtggaattcgacaaagctaaaattcttgtgacggatcagaaaatcacttcagccaaagaattagttccgttactggagaaaacctcacaactgagtgttccgctccttataattgcagaagatatctctgcggaagtgcttgagatactggtggtgaacaagaagcaaggtttgatcaatgtcgcagttgtgaaatgtccaggaatgttggatgggaaaaaggctttgctacaagacattgcactcatgacaggagctgattatctttccggagatttaggcatgtcgctcatgggtgcaacttcagatcagctgggtgtttctcgtagagtagtaattacagctaattcaacaactatagtcgcagacgcttctactaaaccagagattcaggcaagaattgctcagatgaagaaggatctagctgagacagataattcatatctttcaaaaaaaatagcagagagaattgctaagctcacaggaggcgtggctgtaataaaggttggaggccacactgaaacagaacttgaggacagaaaactaagaatagaggacgcgaagaatgctacatttgcagccatgagagaaggtatagttccaggtggtggtgctacttatatccatcttttagatgagataccgagaatcaagaagaatctaatggaagattcatacgaacaaataggtgcagatattgtagcaatggcactcactgcacctgcaatggccatagcaaccaatgctggggttgatggatcagttgtggtgcagaaaaccagagaactcgaatggagaagtggttacaacgcaatgtctggaaagtatgaggatcttctaaacgctggaatcgcagatccttgtcgggtttcaagattcgcccttcaaaacgcagtttccgttgccggcattattctcacaactcaagcagtactcgtggagaagatcaagcaacctaaacctgctgttcctcaagttcctggcatacccacatcataa

SEQ ID NO: 48122 - protein, 575 aa, Arabidopsis thaliana
  peptide (1)..(575): Ceres Seq. ID no. 13649107
MFAVSPSSFSPTTISPRRSGQRNEPRKFSVVRAGAKRILYGKDSREKLQAGIDKLADAVSITLGPRGRNVVLAEKDTIKVINDGVTIAKSIELPDTIENAGATLIQEVAIKMNESAGDGTTTAIILAREMIKAGSLAIAFGANAVSVKNGMNKTVKELVRVLQMKSIPVQGKNDIKAVASISAGNDEFVGNLIAETVEKIGPDGVISIESSSTSETSVIVEEGMKFDKGYMSPHFITNQEKSTVEFDKAKILVTDQKITSAKELVPLLEKTSQLSVPLLIIAEDISAEVLEILVVNKKQGLINVAVVKCPGMLDGKKALLQDIALMTGADYLSGDLGMSLMGATSDQLGVSRRVVITANSTTIVADASTKPEIQARIAQMKKDLAETDNSYLSKKIAERIAKLTGGVAVIKVGGHTETELEDRKLRIEDAKNATFAAMREGIVPGGGATYIHLLDEIPRIKKNLMEDSYEQIGADIVAMALTAPAMAIATNAGVDGSVVVQKTRELEWRSGYNAMSGKYEDLLNAGIADPCRVSRFALQNAVSVAGIILTTQAVLVEKIKQPKPAVPQVPGIPTS

SEQ ID NO: 48123 - protein, 464 aa, Arabidopsis thaliana
  peptide (1)..(464): Ceres Seq. ID no. 13649108
MNESAGDGTTTAIILAREMIKAGSLAIAFGANAVSVKNGMNKTVKELVRVLQMKSIPVQGKNDIKAVASISAGNDEFVGNLIAETVEKIGPDGVISIESSSTSETSVIVEEGMKFDKGYMSPHFITNQEKSTVEFDKAKILVTDQKITSAKELVPLLEKTSQLSVPLLIIAEDISAEVLEILVVNKKQGLINVAVVKCPGMLDGKKALLQDIALMTGADYLSGDLGMSLMGATSDQLGVSRRVVITANSTTIVADASTKPEIQARIAQMKKDLAETDNSYLSKKIAERIAKLTGGVAVIKVGGHTETELEDRKLRIEDAKNATFAAMREGIVPGGGATYIHLLDEIPRIKKNLMEDSYEQIGADIVAMALTAPAMAIATNAGVDGSVVVQKTRELEWRSGYNAMSGKYEDLLNAGIADPCRVSRFALQNAVSVAGIILTTQAVLVEKIKQPKPAVPQVPGIPTS

SEQ ID NO: 48124 - protein, 446 aa, Arabidopsis thaliana
  peptide (1)..(446): Ceres Seq. ID no. 13649109
MIKAGSLAIAFGANAVSVKNGMNKTVKELVRVLQMKSIPVQGKNDIKAVASISAGNDEFVGNLIAETVEKIGPDGVISIESSSTSETSVIVEEGMKFDKGYMSPHFITNQEKSTVEFDKAKILVTDQKITSAKELVPLLEKTSQLSVPLLIIAEDISAEVLEILVVNKKQGLINVAVVKCPGMLDGKKALLQDIALMTGADYLSGDLGMSLMGATSDQLGVSRRVVITANSTTIVADASTKPEIQARIAQMKKDLAETDNSYLSKKIAERIAKLTGGVAVIKVGGHTETELEDRKLRIEDAKNATFAAMREGIVPGGGATYIHLLDEIPRIKKNLMEDSYEQIGADIVAMALTAPAMAIATNAGVDGSVVVQKTRELEWRSGYNAMSGKYEDLLNAGIADPCRVSRFALQNAVSVAGIILTTQAVLVEKIKQPKPAVPQVPGIPTS

SEQ ID NO: 48125 - DNA, 1658 bp, Arabidopsis thaliana
  misc_feature (1)..(1658): Ceres Seq. ID no. 12720936
  misc_feature (1)..(1658): Ortholog of  Ceres SEQ ID NO 12581802 as cited in SEQ ID NO 54880
aaatcaaggaaaaagggacaaacttcagaaaagcttatggatccgatggaatctttgcccgaagctgccgcacagatcgatctttgggatgatcttgcggcttcccttgtcaaaatctcgaaatcacatgcctttgtgccggaggagcagctattgaaatttgtcgattaccttgagataaaactttcctctgtgcaatatctatggctggacatgttcaaagggtctccttgccccaagctgatagatatgattgatgttccattatctcatattcctgtatctgtctacgacacatcagtcgagtggctcgacaaattttctattgggttactctgtgcctttgtagtgtggtcgttgaatcgtcttctcacgattttggaaccaccacaacagggaggtcaccagcgacgtactacttccaaatttcacgtagcagtatttgttgcactagcaatggtattgcgtaatgaacctaatactttggttattgtattgccgactctcaaggaagacgagtatcaaggacatgacaagcttccgattttagtttggatgatggctcaggcctcccaaggtgatttatctgtaggcttgtattcatggtcgtgtaacttgttaccagtattttaccaagaaaacttgttaccagtatcccgtagcaactctcagtcaatggatctcatcctgcagttggctgagatgattttgtctaatcttgatgctcggactatacttgtaaacggaaccgttatagataaacagcgactgatttcaccttatgcatttgagctcttgatgcggcttacattccctgcttcatctgaaagagtaaaggctacagagaggtttgaggcaatttatcccttgttgaaggaagtggctcttgcctgtgaaccaggaagcgagttaatgaaacaagtcactcaacaaatattccattattctttgataatagctggaagaagaaatcttgttttagccaaggaagctacagcaatcgctgtctggtctctgaccgaaaacgtagattgctgcaagcagtgggaaaaactctattgggagaataaagaagctagtgttgctgttcttaaaaagcttgtagatgaaaggggtgatatttccatcaaactagcatcatcaccgagtcataaattcacactcaatcaaactatggagagcatcaggctaaaaaacgaaaaagccatcactgaaggaggaaccattggttctcgttacaaagaagctgacaagtcctgcaaagtgatgtcgggtagattcttccctgaaaatgcctgcctcaaaggtacagccattattactgctgtggttctagctgctgtagctgtactagcttccaacctgtaggctgaagaagatggtggactcattggttctgcacctatacttcaatgcaaacacctcagctttgaagaactaagagagatataccattgtccttgctttccttttgctaggagtttgtgaatatattgagatatgtcgtcaatcttgttgttgggtattgttcactcaaatagacgtttgacaaaaaaaaagtatatttaggcgatagcttttcttttagctcgtgacttatgtggattttagttactctaaattatgtggtatttaactatttatagagtattcgtgtt

SEQ ID NO: 48126 - protein, 455 aa, Arabidopsis thaliana
  peptide (1)..(455): Ceres Seq. ID no. 12720937
KSRKKGQTSEKLMDPMESLPEAAAQIDLWDDLAASLVKISKSHAFVPEEQLLKFVDYLEIKLSSVQYLWLDMFKGSPCPKLIDMIDVPLSHIPVSVYDTSVEWLDKFSIGLLCAFVVWSLNRLLTILEPPQQGGHQRRTTSKFHVAVFVALAMVLRNEPNTLVIVLPTLKEDEYQGHDKLPILVWMMAQASQGDLSVGLYSWSCNLLPVFYQENLLPVSRSNSQSMDLILQLAEMILSNLDARTILVNGTVIDKQRLISPYAFELLMRLTFPASSERVKATERFEAIYPLLKEVALACEPGSELMKQVTQQIFHYSLIIAGRRNLVLAKEATAIAVWSLTENVDCCKQWEKLYWENKEASVAVLKKLVDERGDISIKLASSPSHKFTLNQTMESIRLKNEKAITEGGTIGSRYKEADKSCKVMSGRFFPENACLKGTAIITAVVLAAVAVLASNL

SEQ ID NO: 48127 - protein, 443 aa, Arabidopsis thaliana
  peptide (1)..(443): Ceres Seq. ID no. 12720938
MDPMESLPEAAAQIDLWDDLAASLVKISKSHAFVPEEQLLKFVDYLEIKLSSVQYLWLDMFKGSPCPKLIDMIDVPLSHIPVSVYDTSVEWLDKFSIGLLCAFVVWSLNRLLTILEPPQQGGHQRRTTSKFHVAVFVALAMVLRNEPNTLVIVLPTLKEDEYQGHDKLPILVWMMAQASQGDLSVGLYSWSCNLLPVFYQENLLPVSRSNSQSMDLILQLAEMILSNLDARTILVNGTVIDKQRLISPYAFELLMRLTFPASSERVKATERFEAIYPLLKEVALACEPGSELMKQVTQQIFHYSLIIAGRRNLVLAKEATAIAVWSLTENVDCCKQWEKLYWENKEASVAVLKKLVDERGDISIKLASSPSHKFTLNQTMESIRLKNEKAITEGGTIGSRYKEADKSCKVMSGRFFPENACLKGTAIITAVVLAAVAVLASNL

SEQ ID NO: 48128 - protein, 440 aa, Arabidopsis thaliana
  peptide (1)..(440): Ceres Seq. ID no. 12720939
MESLPEAAAQIDLWDDLAASLVKISKSHAFVPEEQLLKFVDYLEIKLSSVQYLWLDMFKGSPCPKLIDMIDVPLSHIPVSVYDTSVEWLDKFSIGLLCAFVVWSLNRLLTILEPPQQGGHQRRTTSKFHVAVFVALAMVLRNEPNTLVIVLPTLKEDEYQGHDKLPILVWMMAQASQGDLSVGLYSWSCNLLPVFYQENLLPVSRSNSQSMDLILQLAEMILSNLDARTILVNGTVIDKQRLISPYAFELLMRLTFPASSERVKATERFEAIYPLLKEVALACEPGSELMKQVTQQIFHYSLIIAGRRNLVLAKEATAIAVWSLTENVDCCKQWEKLYWENKEASVAVLKKLVDERGDISIKLASSPSHKFTLNQTMESIRLKNEKAITEGGTIGSRYKEADKSCKVMSGRFFPENACLKGTAIITAVVLAAVAVLASNL

SEQ ID NO: 48129 - DNA, 1884 bp, Arabidopsis thaliana
  misc_feature (1)..(1884): Ceres Seq. ID no. 13649756
  misc_feature (1)..(1884): Ortholog of  Ceres SEQ ID NO 13655237 as cited in SEQ ID NO 62892
  misc_feature (1)..(1884): Ortholog of  Ceres SEQ ID NO 13659840 as cited in SEQ ID NO 66970
atggcttctacttcaataatgctttcttccttcttctccttcttcttcttgactttttttgtcacttatgctcagcaaaacgtcaccgttcacacaatttgctactacgatggaggtaacttcacatccaacacttcatattcccttaatctcaaccgtctgatctcgtctttacctgatctaactccaaccatcaacggcttctacaatatctccatcaatggagaagtcaacgccatagctttatgcagaggagatgtcaagccaaatcaagattgcatcagttgcatcaccaccgccgcaaagcagctcgtagagagctgtccaaacatcatcgaagccaatatttggcttgagaaatgcatgtttcgttacacaagtcgaattatcttaggtcaaatggagccggttcctttttcttatacatcaagtaatgttagtgtgacagacaaggaaggtttcagcaagggtttaggtgacctattggattcattaggagcaaaaatcgatgctgcgaatgagaccaaagaggttaagtttgcagcaggagtgaaaggaacgatctacgcgttggctcagtgtacaccagatttgtctgaatcagattgtagaatctgtcttgctcagatctttgctggagttcccacttgttgtgatggaaagacaggtggatggtggactaatccaagttgctatttcaggtttgaagtgtatccgtttttcgatctttcagttacttcagaacagaagcaacctctttcttctcataataataacaccagaagaagtgatcaaggaaaaagtaaagaccggtctaaaactctcatctttgcggtggttcccattgtggcgatcatattaggtcttgtgtttctctttatctacttaaagaggaggaggaaaaagaagaccctgaaggaaaatgctgaaaatgaatttgagagtacagactcattgcattttgattttgagaccataagagtagcaacagatgatttttccttaacgaataagatcggtgaaggtggttttggcgttgtctacaagtctctcattcgatcttttctccttccgatgattagcttttctctgtttcatttctttcctctgctaatgaatctagatcctatcaagcagaagcaactagactgggaaaaacggtacaatatcatcgtaggagtttcccggggattgctttacctacacgaaggctcggagtttccgataatccaccgtgatctcaaatcctccaatgtgcttttagatgaacaaatgctacctaagatctcagattttggaatggcaagacaattcgatttcgataatactcaagcagtaacaagaagagttgttggaacttatggatatatggctccagagtatgcaatgcacggaagattctcagtgaaaacagatgtttatagctttggagttcttgtacttgagatcattacaggtaaaagaaacagtggattaggtcttggtgaaggaacagatctccccacatttgcttggcaaaattggattgaaggaacatcaatggaactaatagatcctgttcttctgcaaactcacgacaagaaagaatcaatgcaatgcttagaaattgctctgtcttgtgttcaagagaatcctacaaaaagaccaactatggattcagttgtttcaatgcttagctctgattctgagtctcgtcagcttccaaaaccatcgcagcctggtttcttcagaagatcagcgtcgttttcgatttctttaaatgatgtttctctcacagatttgtctgcacgttaggtttttgcagtcacacaatggaggaagatcaatttttaaaccctaaatttacttttataggaatggttatgtattctgctaaagtttaat

SEQ ID NO: 48130 - protein, 597 aa, Arabidopsis thaliana
  peptide (1)..(597): Ceres Seq. ID no. 13649757
MASTSIMLSSFFSFFFLTFFVTYAQQNVTVHTICYYDGGNFTSNTSYSLNLNRLISSLPDLTPTINGFYNISINGEVNAIALCRGDVKPNQDCISCITTAAKQLVESCPNIIEANIWLEKCMFRYTSRIILGQMEPVPFSYTSSNVSVTDKEGFSKGLGDLLDSLGAKIDAANETKEVKFAAGVKGTIYALAQCTPDLSESDCRICLAQIFAGVPTCCDGKTGGWWTNPSCYFRFEVYPFFDLSVTSEQKQPLSSHNNNTRRSDQGKSKDRSKTLIFAVVPIVAIILGLVFLFIYLKRRRKKKTLKENAENEFESTDSLHFDFETIRVATDDFSLTNKIGEGGFGVVYKSLIRSFLLPMISFSLFHFFPLLMNLDPIKQKQLDWEKRYNIIVGVSRGLLYLHEGSEFPIIHRDLKSSNVLLDEQMLPKISDFGMARQFDFDNTQAVTRRVVGTYGYMAPEYAMHGRFSVKTDVYSFGVLVLEIITGKRNSGLGLGEGTDLPTFAWQNWIEGTSMELIDPVLLQTHDKKESMQCLEIALSCVQENPTKRPTMDSVVSMLSSDSESRQLPKPSQPGFFRRSASFSISLNDVSLTDLSAR

SEQ ID NO: 48131 - protein, 591 aa, Arabidopsis thaliana
  peptide (1)..(591): Ceres Seq. ID no. 13649758
MLSSFFSFFFLTFFVTYAQQNVTVHTICYYDGGNFTSNTSYSLNLNRLISSLPDLTPTINGFYNISINGEVNAIALCRGDVKPNQDCISCITTAAKQLVESCPNIIEANIWLEKCMFRYTSRIILGQMEPVPFSYTSSNVSVTDKEGFSKGLGDLLDSLGAKIDAANETKEVKFAAGVKGTIYALAQCTPDLSESDCRICLAQIFAGVPTCCDGKTGGWWTNPSCYFRFEVYPFFDLSVTSEQKQPLSSHNNNTRRSDQGKSKDRSKTLIFAVVPIVAIILGLVFLFIYLKRRRKKKTLKENAENEFESTDSLHFDFETIRVATDDFSLTNKIGEGGFGVVYKSLIRSFLLPMISFSLFHFFPLLMNLDPIKQKQLDWEKRYNIIVGVSRGLLYLHEGSEFPIIHRDLKSSNVLLDEQMLPKISDFGMARQFDFDNTQAVTRRVVGTYGYMAPEYAMHGRFSVKTDVYSFGVLVLEIITGKRNSGLGLGEGTDLPTFAWQNWIEGTSMELIDPVLLQTHDKKESMQCLEIALSCVQENPTKRPTMDSVVSMLSSDSESRQLPKPSQPGFFRRSASFSISLNDVSLTDLSAR

SEQ ID NO: 48132 - protein, 476 aa, Arabidopsis thaliana
  peptide (1)..(476): Ceres Seq. ID no. 13649759
MFRYTSRIILGQMEPVPFSYTSSNVSVTDKEGFSKGLGDLLDSLGAKIDAANETKEVKFAAGVKGTIYALAQCTPDLSESDCRICLAQIFAGVPTCCDGKTGGWWTNPSCYFRFEVYPFFDLSVTSEQKQPLSSHNNNTRRSDQGKSKDRSKTLIFAVVPIVAIILGLVFLFIYLKRRRKKKTLKENAENEFESTDSLHFDFETIRVATDDFSLTNKIGEGGFGVVYKSLIRSFLLPMISFSLFHFFPLLMNLDPIKQKQLDWEKRYNIIVGVSRGLLYLHEGSEFPIIHRDLKSSNVLLDEQMLPKISDFGMARQFDFDNTQAVTRRVVGTYGYMAPEYAMHGRFSVKTDVYSFGVLVLEIITGKRNSGLGLGEGTDLPTFAWQNWIEGTSMELIDPVLLQTHDKKESMQCLEIALSCVQENPTKRPTMDSVVSMLSSDSESRQLPKPSQPGFFRRSASFSISLNDVSLTDLSAR

SEQ ID NO: 48133 - DNA, 1400 bp, Arabidopsis thaliana
  misc_feature (1)..(1400): Ceres Seq. ID no. 13650057
  misc_feature (1)..(1400): Ortholog of  Ceres SEQ ID NO 15170956 as cited in SEQ ID NO 55034
attccaaattcaaaaccatttccaatacaacttccattgattctctctctctctctctctactaaaactttcaaattctcttactttcaatacttattaaagaaacttataaaaaaagaatggagaatatgtttcgtttgatggatcaagatcaggatttaactaataaccggtgcatttgggtcaacggaccggtcatcgtcggagctggaccgtcggggttagcgacggcggcttgtctccatgaacaaaacgttcctttcgttgttctcgagagagcagattgtattgcttctctatggcaaaaacgtacttacgatcgtctcaagcttcaccttcctaagcagttttgtcaattaccgaaaatgcccttccctgaggacttcccggagtacccgacgaagcgtcagttcatcgactaccttgagtcttacgctacccggttcgagatcaaccctaagttcaacgagtgtgtgcagactgctcggttcgatgagaccagtggcttgtggcgagtcaagaccgtgtcgaagagtgagtcgactcagaccgaggtcgagtatatttgccggtggcttgtggtggctacgggagaaaatgcggagagagtgatgccggagattgatggtctttctgagttttccggtgaggtgattcacgcttgtgattacaagtccggcgagaaattcgccgggaaaaaagttctcgtcgttggttgtggaaactccggcatggaagtttctcttgacctagcaaaccatttcgctaagccttccatggtcgtgagaagctctcttcacgtgatgccgagggaagtaatgggtaaatcaacgtttgagcttgcaatgaagatgttaagatggtttcctctatggttagtcgacaagatattgttggttttaagttggatggttcttggaaacatcgagaaatacggtttgaaacgaccagagatgggtccaatggagctaaaaagcgtgaaaggcaagacaccggtgcttgacatcggagctatagagaagatccggttaggaaagatcaacgtggttccagggatcaaaaggtttaacggaaacaaagtcgaacttgtcaatggagaacaactagacgtagactcagttgttctagctactggttaccgcagcaacgtcccatattggctacaagagaatgagttctttgcaaagaatggtttcccaaagacagtagctgacaacaatggttggaaaggaaggacaggattgtatgcggttgggtttacgaggaaagggctctcaggtgcgtcaatggacgcggttaagatcgcacaagacataggctctgtttggcaacttgaaacaaaacaacccacgaaacgctcaaggggttctcttcgaaggtgtatctctcaacagttctaa

SEQ ID NO: 48134 - protein, 426 aa, Arabidopsis thaliana
  peptide (1)..(426): Ceres Seq. ID no. 13650058
MENMFRLMDQDQDLTNNRCIWVNGPVIVGAGPSGLATAACLHEQNVPFVVLERADCIASLWQKRTYDRLKLHLPKQFCQLPKMPFPEDFPEYPTKRQFIDYLESYATRFEINPKFNECVQTARFDETSGLWRVKTVSKSESTQTEVEYICRWLVVATGENAERVMPEIDGLSEFSGEVIHACDYKSGEKFAGKKVLVVGCGNSGMEVSLDLANHFAKPSMVVRSSLHVMPREVMGKSTFELAMKMLRWFPLWLVDKILLVLSWMVLGNIEKYGLKRPEMGPMELKSVKGKTPVLDIGAIEKIRLGKINVVPGIKRFNGNKVELVNGEQLDVDSVVLATGYRSNVPYWLQENEFFAKNGFPKTVADNNGWKGRTGLYAVGFTRKGLSGASMDAVKIAQDIGSVWQLETKQPTKRSRGSLRRCISQQF

SEQ ID NO: 48135 - protein, 423 aa, Arabidopsis thaliana
  peptide (1)..(423): Ceres Seq. ID no. 13650059
MFRLMDQDQDLTNNRCIWVNGPVIVGAGPSGLATAACLHEQNVPFVVLERADCIASLWQKRTYDRLKLHLPKQFCQLPKMPFPEDFPEYPTKRQFIDYLESYATRFEINPKFNECVQTARFDETSGLWRVKTVSKSESTQTEVEYICRWLVVATGENAERVMPEIDGLSEFSGEVIHACDYKSGEKFAGKKVLVVGCGNSGMEVSLDLANHFAKPSMVVRSSLHVMPREVMGKSTFELAMKMLRWFPLWLVDKILLVLSWMVLGNIEKYGLKRPEMGPMELKSVKGKTPVLDIGAIEKIRLGKINVVPGIKRFNGNKVELVNGEQLDVDSVVLATGYRSNVPYWLQENEFFAKNGFPKTVADNNGWKGRTGLYAVGFTRKGLSGASMDAVKIAQDIGSVWQLETKQPTKRSRGSLRRCISQQF

SEQ ID NO: 48136 - protein, 419 aa, Arabidopsis thaliana
  peptide (1)..(419): Ceres Seq. ID no. 13650060
MDQDQDLTNNRCIWVNGPVIVGAGPSGLATAACLHEQNVPFVVLERADCIASLWQKRTYDRLKLHLPKQFCQLPKMPFPEDFPEYPTKRQFIDYLESYATRFEINPKFNECVQTARFDETSGLWRVKTVSKSESTQTEVEYICRWLVVATGENAERVMPEIDGLSEFSGEVIHACDYKSGEKFAGKKVLVVGCGNSGMEVSLDLANHFAKPSMVVRSSLHVMPREVMGKSTFELAMKMLRWFPLWLVDKILLVLSWMVLGNIEKYGLKRPEMGPMELKSVKGKTPVLDIGAIEKIRLGKINVVPGIKRFNGNKVELVNGEQLDVDSVVLATGYRSNVPYWLQENEFFAKNGFPKTVADNNGWKGRTGLYAVGFTRKGLSGASMDAVKIAQDIGSVWQLETKQPTKRSRGSLRRCISQQF

SEQ ID NO: 48137 - DNA, 1582 bp, Arabidopsis thaliana
  misc_feature (1)..(1582): Ceres Seq. ID no. 13649127
  misc_feature (1)..(1582): Ortholog of  Ceres SEQ ID NO 12784444 as cited in SEQ ID NO 67288
gactccatctttccaacagatctaatcttcttcacttcccaagtgtaaaaacctcaactttcagccaacaaaattagggtttcaagctgagattttctacttctgttacacaaaaatacccaatgagtaaagcttcggtgatcctatacattacggtaggaatcctggtgctcttcctcgtctcttattcaccgaagaagaagggtgaccacgatcaccaccatggtggtcacaatcaacatcaccgcttaaaactccggtcttctttcaatttcaaacccactcgtcacgatccagttccgtttgatcctcttgtcgccgacatggagcgccgccgcgaggataaggagtgggagcgacagtacattgagcattctcacccggagcttgtctctcattctcagaaagaaacaaccggtggtggacatgaacatgcacctggtcacgagtcgcagcctgagtgggaagaattcatggatgctgaggattacttaaatgatgaggagaagttcaatgtcactgataggctgatattgttgtttccgaagattgatgtttctcctgctgatgggtttatgacggagagtgaattgactgagtggactatgcagtcttctgccaaggaagttgtgcacagaactcaacgagacctggatgttcatgatagaaacaaagatggttttatttctttctctgaatatgaaccaccgtcttgggtccgtaagtcggataataattcgtttggctatgatatgggctggtggaaggaggagcattttaatgcatcagatgcaaatggtgatggtcttctgaatttaacagagtttaacgactttctgcatcctgctgacaccaagaacccaaagttactgttatggttatgcaaggaggaagtaagagaaagggattcagataaagatgggaagatcagtttcgaagagtttttccacggcctctttgacactgtaaggaactacgaagaagacaatcacaattctacgcatccttaccatgacttgcctgaaggcccagcaaagcagttgttttctcagcttgacaaaaatgatgacgggtacttatcagacgttgaattgcttcccattatcagtaaaatccatcctactgagcattattatgcaaagcaacaagctgattatataatatcacaggcggattcagacaaagatagacgtttgactttggcagagatgattgagcatccatacgtcttctacagtgccattttcgatgaagatgacactgatgatgattatggtttccacgatgaattccgctagttttataatttaggaataaacaacatcaggctcagttcaatatatcctcaaggaacattcctcacaaaacagagtccagcacgaatctctctcacgtagatcatctggtgatttagaagttagaagagtatttatgattctgaacagctaaaagaaacatacttttctttggatcttgttcaatcaattatagatggctttctccatttctgtatgtttaatttaacacctttgaagcttaatcttttataagcaaagcttatgaagtaaacagtgttatgcat

SEQ ID NO: 48138 - protein, 391 aa, Arabidopsis thaliana
  peptide (1)..(391): Ceres Seq. ID no. 13649128
MSKASVILYITVGILVLFLVSYSPKKKGDHDHHHGGHNQHHRLKLRSSFNFKPTRHDPVPFDPLVADMERRREDKEWERQYIEHSHPELVSHSQKETTGGGHEHAPGHESQPEWEEFMDAEDYLNDEEKFNVTDRLILLFPKIDVSPADGFMTESELTEWTMQSSAKEVVHRTQRDLDVHDRNKDGFISFSEYEPPSWVRKSDNNSFGYDMGWWKEEHFNASDANGDGLLNLTEFNDFLHPADTKNPKLLLWLCKEEVRERDSDKDGKISFEEFFHGLFDTVRNYEEDNHNSTHPYHDLPEGPAKQLFSQLDKNDDGYLSDVELLPIISKIHPTEHYYAKQQADYIISQADSDKDRRLTLAEMIEHPYVFYSAIFDEDDTDDDYGFHDEFR

SEQ ID NO: 48139 - protein, 324 aa, Arabidopsis thaliana
  peptide (1)..(324): Ceres Seq. ID no. 13649129
MERRREDKEWERQYIEHSHPELVSHSQKETTGGGHEHAPGHESQPEWEEFMDAEDYLNDEEKFNVTDRLILLFPKIDVSPADGFMTESELTEWTMQSSAKEVVHRTQRDLDVHDRNKDGFISFSEYEPPSWVRKSDNNSFGYDMGWWKEEHFNASDANGDGLLNLTEFNDFLHPADTKNPKLLLWLCKEEVRERDSDKDGKISFEEFFHGLFDTVRNYEEDNHNSTHPYHDLPEGPAKQLFSQLDKNDDGYLSDVELLPIISKIHPTEHYYAKQQADYIISQADSDKDRRLTLAEMIEHPYVFYSAIFDEDDTDDDYGFHDEFR

SEQ ID NO: 48140 - protein, 274 aa, Arabidopsis thaliana
  peptide (1)..(274): Ceres Seq. ID no. 13649130
MDAEDYLNDEEKFNVTDRLILLFPKIDVSPADGFMTESELTEWTMQSSAKEVVHRTQRDLDVHDRNKDGFISFSEYEPPSWVRKSDNNSFGYDMGWWKEEHFNASDANGDGLLNLTEFNDFLHPADTKNPKLLLWLCKEEVRERDSDKDGKISFEEFFHGLFDTVRNYEEDNHNSTHPYHDLPEGPAKQLFSQLDKNDDGYLSDVELLPIISKIHPTEHYYAKQQADYIISQADSDKDRRLTLAEMIEHPYVFYSAIFDEDDTDDDYGFHDEFR

SEQ ID NO: 48141 - DNA, 1560 bp, Arabidopsis thaliana
  misc_feature (1)..(1560): Ceres Seq. ID no. 13649269
  misc_feature (1)..(1560): Ortholog of  Ceres SEQ ID NO 13593855 as cited in SEQ ID NO 53838
  misc_feature (1)..(1560): Ortholog of  Ceres SEQ ID NO 14302247 as cited in SEQ ID NO 62154
  misc_feature (1)..(1560): Ortholog of  Ceres SEQ ID NO 13539874 as cited in SEQ ID NO 64069
gttaaaaatcctaaccttgttctcacattaatcctccgccgagattccttttgtcttcttcttcttcatcttcttctccttctccgattcaattccaaagatgatgagagatgttttcaggccgactaaatcagccccatgttctcctgcaaagccacttggtatctctcgcactcaatctgaatcatttcatgctattcacaaagttcctgtcggagacagtccttatgtcagagcaaagaatgttcagttagtggagaaggatccagagagagcaattcctctgttttggaaggctattaatgctggagatagagtggacagtgctttgaaagacatggctattgtgatgaagcaacaaaaccgcgctgaagaagccattgaagctattaaatcactcagagttagatgttcagatcaagctcaggaatctctcgacaatatcctcttagatctctacaagagatgtgggagattagatgaccagattggacttttgaaacataagctcttcttgatacagaaaggactcgctttcaatggtaaacgaaccaaaacagctagatctcaaggcaagaagtttcaagtctctgtggagcaagaagctactcggttactgggaaacttgggatgggctctgatgcaacgagacaactttgtggaagctgaagatgcatacagaagagctttatcaatagcaccagacaacaacaaaatgtgtaaccttggtatctgccttatgaagcaaggaaggatcgatgaggccaaagagactttacgacgtgtgaaacccgcggttgttgatggccctagaggcgtggattcacatctaaaagcttacgagagagcgcaacagatgctgaatgatcttggatctgagatgatgagaagaggaggagatgataaggttgaacaaagaaggctctttgatgcaatctttggatcttcctctatatggcaacctcagccttgtagtgagcagactgtgaaggctaaaccaaagcctggtttaagcaatggtgatggatacggtgatgagaacgtgaagatgagtgtgaatccagtagtagtaaacccattaagggttgatgcaaaaccgttcttctcttcgaagttggtcatcagtaacaacgagaagctgaagagaacgagatcgtcgagccaagggatggggatgttgagtggtattggtggtgatcatgagggagagacaaacacaagcacgagaaggagattgtcaatggagaagaaagcaacggagtgtggattaccagacaataaagactttgaagatgcgatcatggctgctgttttaggaacagaaaccaaagtggacaagaagaggctcaaggtgttccaggatatcactttgtgtctcaatcagagtctctaaccactcttatcattttatcattctaatttataatttagtcaaggaatcaaaaaaggagatgagcttaattcttcttggtaattttattaatgtttttgtcagctttaagttgctgccatttttttcacaattattgtcttcattgaccagtaataaaagctgaagtt

SEQ ID NO: 48142 - protein, 430 aa, Arabidopsis thaliana
  peptide (1)..(430): Ceres Seq. ID no. 13649270
MMRDVFRPTKSAPCSPAKPLGISRTQSESFHAIHKVPVGDSPYVRAKNVQLVEKDPERAIPLFWKAINAGDRVDSALKDMAIVMKQQNRAEEAIEAIKSLRVRCSDQAQESLDNILLDLYKRCGRLDDQIGLLKHKLFLIQKGLAFNGKRTKTARSQGKKFQVSVEQEATRLLGNLGWALMQRDNFVEAEDAYRRALSIAPDNNKMCNLGICLMKQGRIDEAKETLRRVKPAVVDGPRGVDSHLKAYERAQQMLNDLGSEMMRRGGDDKVEQRRLFDAIFGSSSIWQPQPCSEQTVKAKPKPGLSNGDGYGDENVKMSVNPVVVNPLRVDAKPFFSSKLVISNNEKLKRTRSSSQGMGMLSGIGGDHEGETNTSTRRRLSMEKKATECGLPDNKDFEDAIMAAVLGTETKVDKKRLKVFQDITLCLNQSL

SEQ ID NO: 48143 - protein, 429 aa, Arabidopsis thaliana
  peptide (1)..(429): Ceres Seq. ID no. 13649271
MRDVFRPTKSAPCSPAKPLGISRTQSESFHAIHKVPVGDSPYVRAKNVQLVEKDPERAIPLFWKAINAGDRVDSALKDMAIVMKQQNRAEEAIEAIKSLRVRCSDQAQESLDNILLDLYKRCGRLDDQIGLLKHKLFLIQKGLAFNGKRTKTARSQGKKFQVSVEQEATRLLGNLGWALMQRDNFVEAEDAYRRALSIAPDNNKMCNLGICLMKQGRIDEAKETLRRVKPAVVDGPRGVDSHLKAYERAQQMLNDLGSEMMRRGGDDKVEQRRLFDAIFGSSSIWQPQPCSEQTVKAKPKPGLSNGDGYGDENVKMSVNPVVVNPLRVDAKPFFSSKLVISNNEKLKRTRSSSQGMGMLSGIGGDHEGETNTSTRRRLSMEKKATECGLPDNKDFEDAIMAAVLGTETKVDKKRLKVFQDITLCLNQSL

SEQ ID NO: 48144 - protein, 351 aa, Arabidopsis thaliana
  peptide (1)..(351): Ceres Seq. ID no. 13649272
MAIVMKQQNRAEEAIEAIKSLRVRCSDQAQESLDNILLDLYKRCGRLDDQIGLLKHKLFLIQKGLAFNGKRTKTARSQGKKFQVSVEQEATRLLGNLGWALMQRDNFVEAEDAYRRALSIAPDNNKMCNLGICLMKQGRIDEAKETLRRVKPAVVDGPRGVDSHLKAYERAQQMLNDLGSEMMRRGGDDKVEQRRLFDAIFGSSSIWQPQPCSEQTVKAKPKPGLSNGDGYGDENVKMSVNPVVVNPLRVDAKPFFSSKLVISNNEKLKRTRSSSQGMGMLSGIGGDHEGETNTSTRRRLSMEKKATECGLPDNKDFEDAIMAAVLGTETKVDKKRLKVFQDITLCLNQSL

SEQ ID NO: 48145 - DNA, 1659 bp, Arabidopsis thaliana
  misc_feature (1)..(1659): Ceres Seq. ID no. 13650095
  misc_feature (1)..(1659): Ortholog of  Ceres SEQ ID NO 15169195 as cited in SEQ ID NO 55200
  misc_feature (1)..(1659): Ortholog of  Ceres SEQ ID NO 15226540 as cited in SEQ ID NO 58479
  misc_feature (1)..(1659): Ortholog of  Ceres SEQ ID NO 13581611 as cited in SEQ ID NO 59028
  misc_feature (1)..(1659): Ortholog of  Ceres SEQ ID NO 13596689 as cited in SEQ ID NO 62728
  misc_feature (1)..(1659): Ortholog of  Ceres SEQ ID NO 14301693 as cited in SEQ ID NO 69246
  misc_feature (1)..(1659): Ortholog of  Ceres SEQ ID NO 14302142 as cited in SEQ ID NO 0
atggagaacgagctgtttatgaatgcaggagtttcgcatccgccggtgatgacgtcaccgtcttcttcgtcggcgatgcttaagtgggtttcaatggagactcagccagtggatccaagtctcagtcgcaatctgttttgggaaaagtcaacggaacagagcatttttgattcggctctgagctcactcgtctcttctcctacgccgtcaaattcaaacttttcggttggcggagtaggtggagaaaatgtcattatgagagagctcatcgggaaactgggtaatatcggcgatatctatggaattacggcgagcaatggaaactcgtgttacgcaactccgatgagctctccaccgcctggaagtatgatggagacgaaaacgacgacgccgatggcagaactgtccggcgacccgggattcgctgagagagcggcgaggttctcgtgttttggtagccggagttttaacagcagaacaaactcgccgtttccgattaataacgaaccacccatcacaaccaatgagaaaatgccacgtgtatcaagcagcccagtttttaagcctcttgcgtctcatgttcccgccggcgaatcgtccggtgaactttcccggaaaagaaaaactaaatccaagcagaattctccttctgcagtttcatcatcaaaggagattgaagagaaggaagattctgatccaaagagatgcaaaaaatcagaagaaaatggagacaaaactaaatcaattgatccttacaaagattacattcatgttagagctcgacgaggccaagccaccgatagtcacagtctcgccgaacgagttcgaagagagaaaataagcgaaagaatgaagctgcttcaagatcttgtccctggatgcaacaaggttactggaaaagcactgatgttggatgaaattataaactatgtccaatcattgcaacgacaagttgagttcttgtcgatgaagttatcgtcagtgaacaccaggctggactttaacatggacgctctcttgtctaaggatatatttccttcaagcaacaatctaatgcatcatcaacaagtacttcaattagattcttcagcagaaacgttattgggtgatcatcacaacaaaaatttgcaattgaaccctgatatttcttctaataacgtaataaaccctttggaaacttctgaaactagaagcttcatttctcacttaccaacacttgctcatttcactgactctatttctcagtattcaacattttccgaagatgatttacatagcattattcatatgggttttgcgcaaaaccgtctccaagaattgaaccaaggttcatcaaaccaagtaccatcgcacatgaaagctgaactttgatcaaccactatatgcatttttacaaaaatattggcgttttaaaggtctcgaggatagaaagtaagaaaaggattgatgggtgtacataacaagaaatttgaattggaccacaccatatgcgaattcatttctataatcatcttcatatacataacttcttctttttatccttccgattcatttgtggtgctcaattgtattgtcatgttgttatccgctattcttcttcttatcagattctttaaacttttcttgtttggatttaatatcattgtatgttttaacccc

SEQ ID NO: 48146 - protein, 456 aa, Arabidopsis thaliana
  peptide (1)..(456): Ceres Seq. ID no. 15219602
MENELFMNAGVSHPPVMTSPSSSSAMLKWVSMETQPVDPSLSRNLFWEKSTEQSIFDSALSSLVSSPTPSNSNFSVGGVGGENVIMRELIGKLGNIGDIYGITASNGNSCYATPMSSPPPGSMMETKTTTPMAELSGDPGFAERAARFSCFGSRSFNSRTNSPFPINNEPPITTNEKMPRVSSSPVFKPLASHVPAGESSGELSRKRKTKSKQNSPSAVSSSKEIEEKEDSDPKRCKKSEENGDKTKSIDPYKDYIHVRARRGQATDSHSLAERVRREKISERMKLLQDLVPGCNKVTGKALMLDEIINYVQSLQRQVEFLSMKLSSVNTRLDFNMDALLSKDIFPSSNNLMHHQQVLQLDSSAETLLGDHHNKNLQLNPDISSNNVINPLETSETRSFISHLPTLAHFTDSISQYSTFSEDDLHSIIHMGFAQNRLQELNQGSSNQVPSHMKAEL

SEQ ID NO: 48147 - protein, 450 aa, Arabidopsis thaliana
  peptide (1)..(450): Ceres Seq. ID no. 15219603
MNAGVSHPPVMTSPSSSSAMLKWVSMETQPVDPSLSRNLFWEKSTEQSIFDSALSSLVSSPTPSNSNFSVGGVGGENVIMRELIGKLGNIGDIYGITASNGNSCYATPMSSPPPGSMMETKTTTPMAELSGDPGFAERAARFSCFGSRSFNSRTNSPFPINNEPPITTNEKMPRVSSSPVFKPLASHVPAGESSGELSRKRKTKSKQNSPSAVSSSKEIEEKEDSDPKRCKKSEENGDKTKSIDPYKDYIHVRARRGQATDSHSLAERVRREKISERMKLLQDLVPGCNKVTGKALMLDEIINYVQSLQRQVEFLSMKLSSVNTRLDFNMDALLSKDIFPSSNNLMHHQQVLQLDSSAETLLGDHHNKNLQLNPDISSNNVINPLETSETRSFISHLPTLAHFTDSISQYSTFSEDDLHSIIHMGFAQNRLQELNQGSSNQVPSHMKAEL

SEQ ID NO: 48148 - protein, 440 aa, Arabidopsis thaliana
  peptide (1)..(440): Ceres Seq. ID no. 15219604
MTSPSSSSAMLKWVSMETQPVDPSLSRNLFWEKSTEQSIFDSALSSLVSSPTPSNSNFSVGGVGGENVIMRELIGKLGNIGDIYGITASNGNSCYATPMSSPPPGSMMETKTTTPMAELSGDPGFAERAARFSCFGSRSFNSRTNSPFPINNEPPITTNEKMPRVSSSPVFKPLASHVPAGESSGELSRKRKTKSKQNSPSAVSSSKEIEEKEDSDPKRCKKSEENGDKTKSIDPYKDYIHVRARRGQATDSHSLAERVRREKISERMKLLQDLVPGCNKVTGKALMLDEIINYVQSLQRQVEFLSMKLSSVNTRLDFNMDALLSKDIFPSSNNLMHHQQVLQLDSSAETLLGDHHNKNLQLNPDISSNNVINPLETSETRSFISHLPTLAHFTDSISQYSTFSEDDLHSIIHMGFAQNRLQELNQGSSNQVPSHMKAEL

SEQ ID NO: 48149 - DNA, 1284 bp, Arabidopsis thaliana
  misc_feature (1)..(1284): Ceres Seq. ID no. 13649799
  misc_feature (1)..(1284): Ortholog of  Ceres SEQ ID NO 13577044 as cited in SEQ ID NO 58682
gaactccctgaacacaagtcgcataaaacgaaggaacaatctagaagaagaacgataacatccaatctctctttatattccttccttccattgtggcaataatcaatcgatggcgaaggagcttgctgataaggctaaagaggctttcgtagacgatgacttcgatgttgctgttgacttgtactccaaagccattgacttggatcctaattgcgctgagttcttcgctgatcgtgctcaggcctatatcaaactcgaaagcttcactgaggccgtggcagatgcgaacaaagcaattgagttggatccttcattgaccaaagcttacctaagaaaaggaactgcctgtatgaagcttgaagagtatcggactgctaaaacagctcttgaaaagggtgcctctatcacgccgagtgaatccaaatttaagaagttgatagatgaatgcaattttctaatcacagaagaagagaaagatttggttcaaccggtgccttcgactttgccttcaagtgtgacagcaccaccagtatctgaacttgatgtcacccctacagccaagtacaggcacgagtactaccaaaagccagaggaagttgtggtaactgtttttgcaaaaggaatacccaagcagaatgttaacatcgactttggtgaacaaattctgagtgttgtgattgaggttcctggagaggatgcgtattatctccaaccgagattgtttggaaagataataccagataagtgcaaatatgaagtattgtcgaccaaaattgagatctgtcttgcaaaagccgatataatcacatgggcctccctcgaacacggcaaagggccagcggttttgccaaagcctaatgtctcatcagaggtttcacagaggccagcttatccatcttctaagaaagttaaggactgggacaagctggaagctgaagtgaagaagcaggaaaaagatgagaagctggaaggagacgcagctttgaacaaattcttccgggagatataccagaatgcggatgaggatatgaggcgagcgatgagcaaatcatttgtggaatcgaatgggacagtgctgtcaacaaactggcaagaggttgggactaagacaatcgagagtactcctccggatggcatggagctcaagaaatgggagatctgatctgatatgatatgatgatcctttcctttttatgcagttgtgaattttgcctaaatgtagacaaatcttgaaacctggtccctttcttcctgtaatgaggatcctaaggtttttgctttttt

SEQ ID NO: 48150 - protein, 350 aa, Arabidopsis thaliana
  peptide (1)..(350): Ceres Seq. ID no. 13649800
MAKELADKAKEAFVDDDFDVAVDLYSKAIDLDPNCAEFFADRAQAYIKLESFTEAVADANKAIELDPSLTKAYLRKGTACMKLEEYRTAKTALEKGASITPSESKFKKLIDECNFLITEEEKDLVQPVPSTLPSSVTAPPVSELDVTPTAKYRHEYYQKPEEVVVTVFAKGIPKQNVNIDFGEQILSVVIEVPGEDAYYLQPRLFGKIIPDKCKYEVLSTKIEICLAKADIITWASLEHGKGPAVLPKPNVSSEVSQRPAYPSSKKVKDWDKLEAEVKKQEKDEKLEGDAALNKFFREIYQNADEDMRRAMSKSFVESNGTVLSTNWQEVGTKTIESTPPDGMELKKWEI

SEQ ID NO: 48151 - protein, 270 aa, Arabidopsis thaliana
  peptide (1)..(270): Ceres Seq. ID no. 13649801
MKLEEYRTAKTALEKGASITPSESKFKKLIDECNFLITEEEKDLVQPVPSTLPSSVTAPPVSELDVTPTAKYRHEYYQKPEEVVVTVFAKGIPKQNVNIDFGEQILSVVIEVPGEDAYYLQPRLFGKIIPDKCKYEVLSTKIEICLAKADIITWASLEHGKGPAVLPKPNVSSEVSQRPAYPSSKKVKDWDKLEAEVKKQEKDEKLEGDAALNKFFREIYQNADEDMRRAMSKSFVESNGTVLSTNWQEVGTKTIESTPPDGMELKKWEI

SEQ ID NO: 48152 - DNA, 1030 bp, Arabidopsis thaliana
  misc_feature (1)..(1030): Ceres Seq. ID no. 13649803
  misc_feature (1)..(1030): Ortholog of  Ceres SEQ ID NO 13638567 as cited in SEQ ID NO 51303
  misc_feature (1)..(1030): Ortholog of  Ceres SEQ ID NO 14301396 as cited in SEQ ID NO 51789
  misc_feature (1)..(1030): Ortholog of  Ceres SEQ ID NO 12610031 as cited in SEQ ID NO 55811
  misc_feature (1)..(1030): Ortholog of  Ceres SEQ ID NO 12610896 as cited in SEQ ID NO 55861
  misc_feature (1)..(1030): Ortholog of  Ceres SEQ ID NO 12619664 as cited in SEQ ID NO 66048
  misc_feature (1)..(1030): Ortholog of  Ceres SEQ ID NO 12635952 as cited in SEQ ID NO 0
gaaagagagacgtgcctgtgggtagtgggtggtggtgagaagattctggaaaaatgggagcaattcaagctcgtcttcccttgttcctttctcccccttctataaaacaccataccttccttcattcttcttcatccaattccaatttcaaaatcagatccaacaaatcttcttcttcttcttcttcttcgatcatcatggccagtatcaaggttcacggagttcccatgtccaccgccacaatgcgcgtcctcgctactctttacgagaaagatctccagttcgagctcatccccgtcgatatgagagccggtgcccacaagcaagaggcccaccttgccctcaaccccttcggtcaaattcctgctctcgaggacggtgatttgacgcttttcgagtcaagagccatcacacagtacctagcagaggaatacagtgagaaaggtgaaaagcttatctcccaagactgcaagaaagtcaaggcaaccactaacgtatggcttcaagttgaaggtcaacagtttgaccctaacgcctctaagcttgccttcgagcgtgtctttaaaggcatgttcggcatgaccactgaccctgccgctgtccaagagctcgaaggtaagctccagaaagtcttggatgtctacgaggctaggctcgccaaatctgagttcttggctggtgattccttcactcttgctgatcttcaccacctcccagccatccattacttgttgggtactgactccaaggtgctctttgactctcgccctaaggttagcgagtggattaagaagatctctgccaggcctgcttgggctaaggttattgacctccagaagcagtagtgaccctctctcattcttcacttcttttcttttccttttgcccaaataaacgagtccagtgattttcttttcttggcttatgtacttgtgttttcagtattatttatgtcatcatcatcctcctcttttgtgttattgttgggttcattcacatttgtgcaattaaaaaccagagtttaaacgcc

SEQ ID NO: 48153 - protein, 263 aa, Arabidopsis thaliana [sequence omitted]

SEQ ID NO: 48154 - protein, 215 aa, Arabidopsis thaliana
  peptide (1)..(215): Ceres Seq. ID no. 13649805
MASIKVHGVPMSTATMRVLATLYEKDLQFELIPVDMRAGAHKQEAHLALNPFGQIPALEDGDLTLFESRAITQYLAEEYSEKGEKLISQDCKKVKATTNVWLQVEGQQFDPNASKLAFERVFKGMFGMTTDPAAVQELEGKLQKVLDVYEARLAKSEFLAGDSFTLADLHHLPAIHYLLGTDSKVLFDSRPKVSEWIKKISARPAWAKVIDLQKQ

SEQ ID NO: 48155 - protein, 205 aa, Arabidopsis thaliana
  peptide (1)..(205): Ceres Seq. ID no. 13649806
MSTATMRVLATLYEKDLQFELIPVDMRAGAHKQEAHLALNPFGQIPALEDGDLTLFESRAITQYLAEEYSEKGEKLISQDCKKVKATTNVWLQVEGQQFDPNASKLAFERVFKGMFGMTTDPAAVQELEGKLQKVLDVYEARLAKSEFLAGDSFTLADLHHLPAIHYLLGTDSKVLFDSRPKVSEWIKKISARPAWAKVIDLQKQ

SEQ ID NO: 48156 - DNA, 907 bp, Arabidopsis thaliana
  misc_feature (1)..(907): Ceres Seq. ID no. 13649142
  misc_feature (1)..(907): Ortholog of  Ceres SEQ ID NO 12624019 as cited in SEQ ID NO 61713
aacagagaaagcatctccacaatccccaaaattctttcaacacttgctctccattaatcttttagataataaacctaattgtttctgttttgtttttgtttctgtgagattcttccgaggcttgaagctcaatagctatggcttctctttcagtctcttcctcttcaaccatcatcgattcaagagctcctccttctcgactagcctccgcctccgcctcttctccgtcgtgcatttcacttcccacacttccgattcagtctcatacccgtgccgctaaagccactgcttactgtcggaagattgtgaggaacgttgtgacgagagctactactgaagttggtgaagctcctgccactactaccgaagctgagactactgagttacctgaaatcgtcaagactgctcaagaagcttgggagaaagtggatgacaagtacgctattggttctcttgcctttgctggtgtagtggctctttggggttctgctggaatgatttcggcaatcgataggcttccattggttcctggtgttcttgaacttgtaggcatcggttacacaggatggttcacttacaagaacctggtcttcaaaccagacagggaggctttgtttgagaaggtcaagagcacatacaaagacatattagggagcagctgaatcaaaggaggaagaagaagaagaagagcctttttgaggccattcatgaattggaatgaaggatatcaaaagaatctaacacaaaggccacgtccttccttcaatctttccttcttgtaactaaataattttcatcctttctctctctctgtctctggtcttttttagctcaaagtatcatccatttatgtcaaagtgttgtaaattcctcaagactatatatgagatgttttgtttcattttcc

SEQ ID NO: 48157 - protein, 174 aa, Arabidopsis thaliana
  peptide (1)..(174): Ceres Seq. ID no. 13649143
MASLSVSSSSTIIDSRAPPSRLASASASSPSCISLPTLPIQSHTRAAKATAYCRKIVRNVVTRATTEVGEAPATTTEAETTELPEIVKTAQEAWEKVDDKYAIGSLAFAGVVALWGSAGMISAIDRLPLVPGVLELVGIGYTGWFTYKNLVFKPDREALFEKVKSTYKDILGSS

SEQ ID NO: 48158 - protein, 92 aa, Arabidopsis thaliana
  peptide (1)..(92): Ceres Seq. ID no. 13649144
TEKASPQSPKFFQHLLSINLLDNKPNCFCFVFVSVRFFRGLKLNSYGFSFSLFLFNHHRFKSSSFSTSLRLRLFSVVHFTSHTSDSVSYPCR

SEQ ID NO: 48159 - DNA, 2106 bp, Arabidopsis thaliana
  misc_feature (1)..(2106): Ceres Seq. ID no. 13649807
  misc_feature (1)..(2106): Ortholog of  Ceres SEQ ID NO 12613725 as cited in SEQ ID NO 68196
tgcacaaaagaaaccaagagctctcaaacaaaacagccttttacataagaacaaacacccccaaaaactgcaaaaaaaagagagagatcattaatccatcttcaagatgtctcttcctgaaactaaatctgatgatatccttcttgatgcttgggacttccaaggccgtcccgccgatcgctcaaaaaccggcggctgggccagcgccgccatgattctttgtattgaggccgtggagaggctgacgacgttaggtatcggagttaatctggtgacgtatttgacgggaactatgcatttaggcaatgcaactgcggctaacaccgttaccaatttcctcggaacttctttcatgctctgtctcctcggtggcttcatcgccgatacctttctcggcaggtacctaacgattgctatattcgccgcaatccaagccacgggtgtttcaatcttaactctatcaacaatcataccgggacttcgaccaccaagatgcaatccaacaacgtcgtctcactgcgaacaagcaagtggaatacaactgacggtcctatacttagccttatacctcaccgctctaggaacgggaggcgtgaaggctagtgtctcgggtttcgggtcggaccaattcgatgagaccgaaccaaaagaacgatcgaaaatgacatatttcttcaaccgtttcttcttttgtatcaacgttggctctcttttagctgtgacggtccttgtctacgtacaagacgatgttggacgcaaatggggctatggaatttgcgcgtttgcgatcgtgcttgcactcagcgttttcttggccggaacaaaccgctaccgtttcaagaagttgatcggtagcccgatgacgcaggttgctgcggttatcgtggcggcgtggaggaataggaagctcgagctgccggcagatccgtcctatctctacgatgtggatgatattattgcggcggaaggttcgatgaagggtaaacaaaagctgccacacactgaacaattccgttcattagataaggcagcaataagggatcaggaagcgggagttacctcgaatgtattcaacaagtggacactctcaacactaacagatgttgaggaagtgaaacaaatcgtgcgaatgttaccaatttgggcaacatgcatcctcttctggaccgtccacgctcaattaacgacattatcagtcgcacaatccgagacattggaccgttccatcgggagcttcgagatccctccagcatcgatggcagtcttctacgtcggtggcctcctcctaaccaccgccgtctatgaccgcgtcgccattcgtctatgcaaaaagctattcaactacccccatggtctaagaccgcttcaacggatcggtttggggcttttcttcggatcaatggctatggctgtggctgctttggtcgagctcaaacgtcttagaactgcacacgctcatggtccaacagtcaaaacgcttcctctagggttttatctactcatcccacaatatcttattgtcggtatcggcgaagcgttaatctacacaggacagttagatttcttcttgagagagtgccctaaaggtatgaaagggatgagcacgggtctattgttgagcacattggcattaggctttttcttcagctcggttctcgtgacaatcgtcgagaaattcaccgggaaagctcatccatggattgccgatgatctcaacaagggccgtctttacaatttctactggcttgtggccgtacttgttgccttgaacttcctcattttcctagttttctccaagtggtacgtttacaaggaaaaaagactagctgaggtggggattgagttggatgatgagccgagtattccaatgggtcattgatcatgaattcatgatcatgatcatgatgatgaacattatgcatgtctatgttgatatgtttgaatttgattttgagttttgtttgtatattttatgatgcttttcttaattacctcttgtttccgagtcgacaaataatggaccgaccgataagggataaaagttaaagttttcccatcaggttctgtataaaagcagaaattgtaacatttcttaagatttgacgc

SEQ ID NO: 48160 - protein, 590 aa, Arabidopsis thaliana
  peptide (1)..(590): Ceres Seq. ID no. 13649808
MSLPETKSDDILLDAWDFQGRPADRSKTGGWASAAMILCIEAVERLTTLGIGVNLVTYLTGTMHLGNATAANTVTNFLGTSFMLCLLGGFIADTFLGRYLTIAIFAAIQATGVSILTLSTIIPGLRPPRCNPTTSSHCEQASGIQLTVLYLALYLTALGTGGVKASVSGFGSDQFDETEPKERSKMTYFFNRFFFCINVGSLLAVTVLVYVQDDVGRKWGYGICAFAIVLALSVFLAGTNRYRFKKLIGSPMTQVAAVIVAAWRNRKLELPADPSYLYDVDDIIAAEGSMKGKQKLPHTEQFRSLDKAAIRDQEAGVTSNVFNKWTLSTLTDVEEVKQIVRMLPIWATCILFWTVHAQLTTLSVAQSETLDRSIGSFEIPPASMAVFYVGGLLLTTAVYDRVAIRLCKKLFNYPHGLRPLQRIGLGLFFGSMAMAVAALVELKRLRTAHAHGPTVKTLPLGFYLLIPQYLIVGIGEALIYTGQLDFFLRECPKGMKGMSTGLLLSTLALGFFFSSVLVTIVEKFTGKAHPWIADDLNKGRLYNFYWLVAVLVALNFLIFLVFSKWYVYKEKRLAEVGIELDDEPSIPMGH

SEQ ID NO: 48161 - protein, 555 aa, Arabidopsis thaliana
  peptide (1)..(555): Ceres Seq. ID no. 13649809
MILCIEAVERLTTLGIGVNLVTYLTGTMHLGNATAANTVTNFLGTSFMLCLLGGFIADTFLGRYLTIAIFAAIQATGVSILTLSTIIPGLRPPRCNPTTSSHCEQASGIQLTVLYLALYLTALGTGGVKASVSGFGSDQFDETEPKERSKMTYFFNRFFFCINVGSLLAVTVLVYVQDDVGRKWGYGICAFAIVLALSVFLAGTNRYRFKKLIGSPMTQVAAVIVAAWRNRKLELPADPSYLYDVDDIIAAEGSMKGKQKLPHTEQFRSLDKAAIRDQEAGVTSNVFNKWTLSTLTDVEEVKQIVRMLPIWATCILFWTVHAQLTTLSVAQSETLDRSIGSFEIPPASMAVFYVGGLLLTTAVYDRVAIRLCKKLFNYPHGLRPLQRIGLGLFFGSMAMAVAALVELKRLRTAHAHGPTVKTLPLGFYLLIPQYLIVGIGEALIYTGQLDFFLRECPKGMKGMSTGLLLSTLALGFFFSSVLVTIVEKFTGKAHPWIADDLNKGRLYNFYWLVAVLVALNFLIFLVFSKWYVYKEKRLAEVGIELDDEPSIPMGH

SEQ ID NO: 48162 - protein, 528 aa, Arabidopsis thaliana
  peptide (1)..(528): Ceres Seq. ID no. 13649810
MHLGNATAANTVTNFLGTSFMLCLLGGFIADTFLGRYLTIAIFAAIQATGVSILTLSTIIPGLRPPRCNPTTSSHCEQASGIQLTVLYLALYLTALGTGGVKASVSGFGSDQFDETEPKERSKMTYFFNRFFFCINVGSLLAVTVLVYVQDDVGRKWGYGICAFAIVLALSVFLAGTNRYRFKKLIGSPMTQVAAVIVAAWRNRKLELPADPSYLYDVDDIIAAEGSMKGKQKLPHTEQFRSLDKAAIRDQEAGVTSNVFNKWTLSTLTDVEEVKQIVRMLPIWATCILFWTVHAQLTTLSVAQSETLDRSIGSFEIPPASMAVFYVGGLLLTTAVYDRVAIRLCKKLFNYPHGLRPLQRIGLGLFFGSMAMAVAALVELKRLRTAHAHGPTVKTLPLGFYLLIPQYLIVGIGEALIYTGQLDFFLRECPKGMKGMSTGLLLSTLALGFFFSSVLVTIVEKFTGKAHPWIADDLNKGRLYNFYWLVAVLVALNFLIFLVFSKWYVYKEKRLAEVGIELDDEPSIPMGH

SEQ ID NO: 48163 - DNA, 1068 bp, Arabidopsis thaliana
  misc_feature (1)..(1068): Ceres Seq. ID no. 13650103
  misc_feature (1)..(1068): Ortholog of  Ceres SEQ ID NO 13582350 as cited in SEQ ID NO 56734
  misc_feature (1)..(1068): Ortholog of  Ceres SEQ ID NO 13596470 as cited in SEQ ID NO 62158
  misc_feature (1)..(1068): Ortholog of  Ceres SEQ ID NO 12615466 as cited in SEQ ID NO 62761
  misc_feature (1)..(1068): Ortholog of  Ceres SEQ ID NO 12615907 as cited in SEQ ID NO 62860
  misc_feature (1)..(1068): Ortholog of  Ceres SEQ ID NO 12617090 as cited in SEQ ID NO 64005
  misc_feature (1)..(1068): Ortholog of  Ceres SEQ ID NO 13597439 as cited in SEQ ID NO 64081
  misc_feature (1)..(1068): Ortholog of  Ceres SEQ ID NO 13597233 as cited in SEQ ID NO 64370
  misc_feature (1)..(1068): Ortholog of  Ceres SEQ ID NO 13599438 as cited in SEQ ID NO 0
  misc_feature (1)..(1068): Ortholog of  Ceres SEQ ID NO 13600370 as cited in SEQ ID NO 0
atggaggaaacaaataagagtgtggttaatgattactttaccagtgctatggaacttacagagtcaggtgaccctcacgtgcctacccgttacattcttccaccttcacaacgaccaatgctcggtccaagcattggcaccagtaccatcaatcttcctgtcattgatctctccttcttacacgatcctttgcttagactatgtgtcatccatgagattgaattggcctgcaagggatttggtttctttcaggttataaaccatggaatatcatcagcagtggtgaaagatgcacaagattcagctacaaggttctttgacttacctgccgatgagaagatgcatctggtttctgataattttcaggagccagtaagggaaaaggtggggaaatacgcagaagcaacgcatgttttacataagcaactaattgaagctatctcagaaagtctaggactggagaaaaattacttacaggaagaaatagaagaaggctcacaagtcatggcggtaaactgctatccagcttgtcctgaacccgagattgccttgggaatgccaccacactcggactatggctcgctgacaatcttactccagagtagcgaagggctgcagataaaggactgcaacaacaactgggtttgtgtgccgtatattgaaggagctctgatagtccagttgggagatcaggtagaagtgatgagcaatggcatatacaagagtgtggttcatcgtgtaacagtgaacaaagattacaagcggctctcttttgcaagtcttcacagtctacctatgcacaagaaaataagtccagcaactcagctcgtcaatgaaaataaaccagctgcatatggagaattcagcttcaacgattttcttgattatatatccagaaacgatattacacagaaaagattcattgatacactcagaaagaaaaacctctgaagatggtgtcatataactcgacacggcaattccgatggttgattatttggacctagttgcatgcatcttgtatttaatctatgactatcttgtgcaagtgaataggagagaactagt

SEQ ID NO: 48164 - protein, 316 aa, Arabidopsis thaliana
  peptide (1)..(316): Ceres Seq. ID no. 13650104
MEETNKSVVNDYFTSAMELTESGDPHVPTRYILPPSQRPMLGPSIGTSTINLPVIDLSFLHDPLLRLCVIHEIELACKGFGFFQVINHGISSAVVKDAQDSATRFFDLPADEKMHLVSDNFQEPVREKVGKYAEATHVLHKQLIEAISESLGLEKNYLQEEIEEGSQVMAVNCYPACPEPEIALGMPPHSDYGSLTILLQSSEGLQIKDCNNNWVCVPYIEGALIVQLGDQVEVMSNGIYKSVVHRVTVNKDYKRLSFASLHSLPMHKKISPATQLVNENKPAAYGEFSFNDFLDYISRNDITQKRFIDTLRKKNL

SEQ ID NO: 48165 - protein, 300 aa, Arabidopsis thaliana
  peptide (1)..(300): Ceres Seq. ID no. 13650105
MELTESGDPHVPTRYILPPSQRPMLGPSIGTSTINLPVIDLSFLHDPLLRLCVIHEIELACKGFGFFQVINHGISSAVVKDAQDSATRFFDLPADEKMHLVSDNFQEPVREKVGKYAEATHVLHKQLIEAISESLGLEKNYLQEEIEEGSQVMAVNCYPACPEPEIALGMPPHSDYGSLTILLQSSEGLQIKDCNNNWVCVPYIEGALIVQLGDQVEVMSNGIYKSVVHRVTVNKDYKRLSFASLHSLPMHKKISPATQLVNENKPAAYGEFSFNDFLDYISRNDITQKRFIDTLRKKNL

SEQ ID NO: 48166 - protein, 277 aa, Arabidopsis thaliana
  peptide (1)..(277): Ceres Seq. ID no. 13650106
MLGPSIGTSTINLPVIDLSFLHDPLLRLCVIHEIELACKGFGFFQVINHGISSAVVKDAQDSATRFFDLPADEKMHLVSDNFQEPVREKVGKYAEATHVLHKQLIEAISESLGLEKNYLQEEIEEGSQVMAVNCYPACPEPEIALGMPPHSDYGSLTILLQSSEGLQIKDCNNNWVCVPYIEGALIVQLGDQVEVMSNGIYKSVVHRVTVNKDYKRLSFASLHSLPMHKKISPATQLVNENKPAAYGEFSFNDFLDYISRNDITQKRFIDTLRKKNL

SEQ ID NO: 48167 - DNA, 833 bp, Arabidopsis thaliana
  misc_feature (1)..(833): Ceres Seq. ID no. 12591931
  misc_feature (1)..(833): Ortholog of  Ceres SEQ ID NO 14316367 as cited in SEQ ID NO 57626
  misc_feature (1)..(833): Ortholog of  Ceres SEQ ID NO 13664189 as cited in SEQ ID NO 66834
  misc_feature (1)..(833): Ortholog of  Ceres SEQ ID NO 13654321 as cited in SEQ ID NO 67850
attctctcttcttcttcgacaaacaccaagacaaacgtaagcacaagcacgagtgagtgagagatgtttgccgtggagaatgggttgcagggagacccgagattaaaggccatctccgacgccattcgtgtcattcctcacttccccaagactgggatcatgtttcaggacataacaacgttgttgctggatccagttgcctttaaacatgtcgtcgacatcttcgttgatcgttacaagcacatgaacatctctctcgtcgccggagtagaggcgagaggattcatatttggacctcccatcgcgttagccataggtgccaagttcgttccactacgcaaaccgggaaaactacccgggagagtgataagcgaagagtacgaacttgagtatggaagagattgtctagagatgagtgtagaagccgtcaaatcggaggaacgagctctcatcatcgacgatttagttgccactggtgggacactctctgcttccattaacctcttggagcgtgccggggccgaagttgtagagtgtgcatgcgttgttggtttgcctaagtttaaggggcagtgtaagctgaagggaaagcctttgtacgttctggtggaaccaaaccagtttgatgaattaaccttataaaagccttttctattcaacgattatgacaaataatgtaatcggtttaatcgattttgtaactaaggatttgtttgttttctattggctccatgtggaatgattcatgctagttactatgaaattcggaatacgaaggtatgcagtattatgcaccactgttcttcagatgaatgaattcaagtcgattttct

SEQ ID NO: 48168 - protein, 192 aa, Arabidopsis thaliana
  peptide (1)..(192): Ceres Seq. ID no. 12591932
MFAVENGLQGDPRLKAISDAIRVIPHFPKTGIMFQDITTLLLDPVAFKHVVDIFVDRYKHMNISLVAGVEARGFIFGPPIALAIGAKFVPLRKPGKLPGRVISEEYELEYGRDCLEMSVEAVKSEERALIIDDLVATGGTLSASINLLERAGAEVVECACVVGLPKFKGQCKLKGKPLYVLVEPNQFDELTL

SEQ ID NO: 48169 - protein, 160 aa, Arabidopsis thaliana
  peptide (1)..(160): Ceres Seq. ID no. 12591933
MFQDITTLLLDPVAFKHVVDIFVDRYKHMNISLVAGVEARGFIFGPPIALAIGAKFVPLRKPGKLPGRVISEEYELEYGRDCLEMSVEAVKSEERALIIDDLVATGGTLSASINLLERAGAEVVECACVVGLPKFKGQCKLKGKPLYVLVEPNQFDELTL

SEQ ID NO: 48170 - protein, 132 aa, Arabidopsis thaliana
  peptide (1)..(132): Ceres Seq. ID no. 12591934
MNISLVAGVEARGFIFGPPIALAIGAKFVPLRKPGKLPGRVISEEYELEYGRDCLEMSVEAVKSEERALIIDDLVATGGTLSASINLLERAGAEVVECACVVGLPKFKGQCKLKGKPLYVLVEPNQFDELTL

SEQ ID NO: 48171 - DNA, 891 bp, Arabidopsis thaliana
  misc_feature (1)..(891): Ceres Seq. ID no. 12674807
  misc_feature (1)..(891): Ortholog of  Ceres SEQ ID NO 14312699 as cited in SEQ ID NO 0
actcggcgaattctctcgagaaaacaaactgaatttttttgatcgaagaagatctaaaaaaaaagatggagagacgacaagcgaagatccatgtctttgtattgataggtctaattctattgaattcaatcaatcaaatctcatctctctctgtaacggtgaacgacgaagaatgtgtccaagagtacgtcctttacgaaggcgacactgtttccggtaacttcgtcgtcgtcgatcatgatatcttctggggatccgatcatcctggtttggatttcacggtgacgtcaccagctgggaacattgtacagactttaaagggaacatctggagataagtttgagtttaaggctccaaaaagtggaatgtacaaattttgtttccacaatccttattctactcctgaaactgtctccttttatattcatgttggtcatattcctaatgagcatgacttagccaaagatgaacatttggacccggtaaatgttaagatagctgagttgagagaggctttggaatctgttgttgctgagcagaagtatttgaaagctcgtgacactcgtcaccgtcatacgaatgagagcacgagaaagcgagtgatattctacacagtaggagagtacattttccttgccgcagctagtggacttcaagttctctacatccgcaagctcttcagcaagtcggtagcatacaacagagtttgaacatagcaaaacctcagagcgaggtcttgtgtccagtttatgtttgaatcggtgatcaaaacacaatcctaaacagtgttagttaatttaaaagcttcaatagcgaaagacttactttttgtttttggtttctacacttttataagtttactaatgcagaacttgatgaagcttttttctg

SEQ ID NO: 48172 - protein, 214 aa, Arabidopsis thaliana
  peptide (1)..(214): Ceres Seq. ID no. 12674808
MERRQAKIHVFVLIGLILLNSINQISSLSVTVNDEECVQEYVLYEGDTVSGNFVVVDHDIFWGSDHPGLDFTVTSPAGNIVQTLKGTSGDKFEFKAPKSGMYKFCFHNPYSTPETVSFYIHVGHIPNEHDLAKDEHLDPVNVKIAELREALESVVAEQKYLKARDTRHRHTNESTRKRVIFYTVGEYIFLAAASGLQVLYIRKLFSKSVAYNRV

SEQ ID NO: 48173 - protein, 114 aa, Arabidopsis thaliana
  peptide (1)..(114): Ceres Seq. ID no. 12674809
MYKFCFHNPYSTPETVSFYIHVGHIPNEHDLAKDEHLDPVNVKIAELREALESVVAEQKYLKARDTRHRHTNESTRKRVIFYTVGEYIFLAAASGLQVLYIRKLFSKSVAYNRV

SEQ ID NO: 48174 - DNA, 3191 bp, Arabidopsis thaliana; identical to SEQ ID NO: 46415
  misc_feature (1)..(3191): Ceres Seq. ID no. 13578685
  misc_feature (1)..(3191): Ortholog of  Ceres SEQ ID NO 14316144 as cited in SEQ ID NO 52397

SEQ ID NO: 48175 - protein, 976 aa, Arabidopsis thaliana; identical to SEQ ID NO: 46416
  peptide (1)..(976): Ceres Seq. ID no. 13578686

SEQ ID NO: 48176 - protein, 695 aa, Arabidopsis thaliana; identical to SEQ ID NO: 46417
  peptide (1)..(695): Ceres Seq. ID no. 13578687

SEQ ID NO: 48177 - protein, 647 aa, Arabidopsis thaliana; identical to SEQ ID NO: 46418
  peptide (1)..(647): Ceres Seq. ID no. 13578688

SEQ ID NO: 48178 - DNA, 1153 bp, Arabidopsis thaliana
  misc_feature (1)..(1153): Ceres Seq. ID no. 13648598
  misc_feature (1)..(1153): Ortholog of  Ceres SEQ ID NO 12583413 as cited in SEQ ID NO 56816
  misc_feature (1)..(1153): Ortholog of  Ceres SEQ ID NO 15168480 as cited in SEQ ID NO 57927
  misc_feature (1)..(1153): Ortholog of  Ceres SEQ ID NO 15177738 as cited in SEQ ID NO 0
gagctcttctctctgcaaagctttaccacacaatagtctccttctgtttctctttatatttgtctctataactctctttcgttaaagtttcataaaacctcaacgaactccttccatggcagcaggactatcaacaatcgccgtaacactcaaaccactcaaccgctcttctttctccgcaaaccaccctatatccaccgcagttttccctccatctctaagattcaacggcttccgacgtcgaaagattctcaccgtttgtttcgtcgtggaagaacggaaacaaagctctcccatggacgatgacaacaaaccagaaagcacgacaagctcttctgagatcttgatgacgtcgcggcttctcaagaaagcggagaagaagaaatcagagaggttcacttatttaatagcagctgtgatgtcgagctttggtatcacttctatggctataatggctgtttattaccgattttcttggcaaatgaagggaggtgaagtgtctgtgttagagatgtttggtacatttgctctttccgttggtgctgccgttgggatggagttttgggcaagatgggctcatagagctctttggcatgattctttatggaacatgcatgagtcacatcacaaaccaagagaaggagcgtttgagttaaacgatgtgtttgctataacaaacgcggttcctgcgattggtctactctattatggattcttgaataaaggacttgttcctggtctctgcttcggtgccggactgggaataacgatgtttggaatggcttacatgttcgttcacgatggacttgtgcacaagagattccctgtaggtcccattgccaacgttccttaccttcgaaaggtcgccgccgctcaccagctacaccacacagacaaattcaaaggtgtaccatatgggctgtttcttggaccaaaggaagtagaagaagtgggaggaaaagaagagttggagaaagagataagccggagaatcaaattatacaacaagggttcttctacctcttaattgctacaaacccaattttacttctttgatgtttttgtaatacattttgggactagtctttcttttagtatatataaaaaatgacgtagaagaaagagtcaggctaataaagatttagaaaaacat

SEQ ID NO: 48179 - protein, 303 aa, Arabidopsis thaliana
  peptide (1)..(303): Ceres Seq. ID no. 13648599
MAAGLSTIAVTLKPLNRSSFSANHPISTAVFPPSLRFNGFRRRKILTVCFVVEERKQSSPMDDDNKPESTTSSSEILMTSRLLKKAEKKKSERFTYLIAAVMSSFGITSMAIMAVYYRFSWQMKGGEVSVLEMFGTFALSVGAAVGMEFWARWAHRALWHDSLWNMHESHHKPREGAFELNDVFAITNAVPAIGLLYYGFLNKGLVPGLCFGAGLGITMFGMAYMFVHDGLVHKRFPVGPIANVPYLRKVAAAHQLHHTDKFKGVPYGLFLGPKEVEEVGGKEELEKEISRRIKLYNKGSSTS

SEQ ID NO: 48180 - protein, 243 aa, Arabidopsis thaliana
  peptide (1)..(243): Ceres Seq. ID no. 13648600
MDDDNKPESTTSSSEILMTSRLLKKAEKKKSERFTYLIAAVMSSFGITSMAIMAVYYRFSWQMKGGEVSVLEMFGTFALSVGAAVGMEFWARWAHRALWHDSLWNMHESHHKPREGAFELNDVFAITNAVPAIGLLYYGFLNKGLVPGLCFGAGLGITMFGMAYMFVHDGLVHKRFPVGPIANVPYLRKVAAAHQLHHTDKFKGVPYGLFLGPKEVEEVGGKEELEKEISRRIKLYNKGSSTS

SEQ ID NO: 48181 - protein, 226 aa, Arabidopsis thaliana
  peptide (1)..(226): Ceres Seq. ID no. 13648601
MTSRLLKKAEKKKSERFTYLIAAVMSSFGITSMAIMAVYYRFSWQMKGGEVSVLEMFGTFALSVGAAVGMEFWARWAHRALWHDSLWNMHESHHKPREGAFELNDVFAITNAVPAIGLLYYGFLNKGLVPGLCFGAGLGITMFGMAYMFVHDGLVHKRFPVGPIANVPYLRKVAAAHQLHHTDKFKGVPYGLFLGPKEVEEVGGKEELEKEISRRIKLYNKGSSTS

SEQ ID NO: 48182 - DNA, 2049 bp, Arabidopsis thaliana
  misc_feature (1)..(2049): Ceres Seq. ID no. 12575434
  misc_feature (1)..(2049): Ortholog of  Ceres SEQ ID NO 15169623 as cited in SEQ ID NO 67523
gctctgtgatttgagtttttattttgcggtggcgttgtatggctatggcctttcctctttcttatactccgacgattactgttaaaccagtaacgtactctcggagatcgaactttgtagttttctcgtcgagttctaatggacgagatcctttagaggagaattcagtacctaatggtgtgaaaagcttggagaagcttcaagaagagaagcgtcgtgctgagttatctgctaggattgcttctggagctttcactgtacggaaatctagttttccatctacagtgaagaatggtttatctaagattggaataccaagcaatgttcttgatttcatgtttgattggactggttctgaccaagactaccccaaggttcctgaggctaaaggctcgattcaggcggtccggaacgaagctttcttcatccctttgtatgagcttttccttacttatggtggaattttcaggttgacctttgggcctaagtcattcttgatcgtgtcggatccttctattgctaaacatatattgaaggacaatgcaaaagcttactccaaggggattttagctgaaattctagattttgtgatgggaaaaggactcattcctgctgatggggagatatggcgtagacgaaggcgtgccattgttcctgcattgcatcaaaagtatgtagcagctatgattagtttattcggagaagcttcagataggctttgtcagaagcttgatgctgctgcattgaaaggggaagaagtagagatggaatcactcttctctcgtttgacacttgatattattggcaaggcggttttcaattacgactttgactcccttactaatgataccggtgtgatcgaggcagtgtacactgttctaagagaagctgaagacagaagtgtttcacctattcctgtttgggacatacccatttggaaagatatttccccacgtcagaggaaagttgctacttccttgaaattaatcaatgacacacttgatgatttgattgcaacatgcaagagaatggtagaagaagaggagttgcagtttcacgaggagtatatgaacgaaagagatcctagcatccttcactttcttttagcttcaggagatgatgtctctagtaagcagcttcgtgatgacttgatgacaatgcttatagccggacatgaaacatcggcggcagtattaacatggaccttttaccttttaacaacggaaccaagtgtagttgccaaacttcaagaagaggttgattctgtaattggagatagattcccaaccatacaagatatgaaaaagctgaaatacactactcgagtcatgaatgagtcattgagattatatccacaaccaccagtactgatccgtcgttctatagataatgatatacttggagagtatccgataaaaaggggagaggatatcttcatctcggtttggaatctacatcgaagtcctctgcattgggatgatgcagagaagttcaatcccgagagatggcctttggatggaccaaacccaaatgagacaaaccaaaacttcagttacttacctttcggtggaggaccgcggaaatgtataggcgacatgtttgcttcctttgagaatgtggtagcaatcgcaatgcttattcgaagatttaactttcagattgcaccaggagctcctccggtgaaaatgactacaggagctacaatacacaccacagaaggattgaaattgacagtaacaaagaggacaaaacctctggacataccatccgtaccgatacttccaatggatacttcacgggatgaagtttcatctgctctttcttaagtcttcatctttacaaaactgaaaacaaacaagctcagatgaagaagcaaaaatcttgtgttagaacagcaaatgttgaattgttggaacatgaccaatgctttctgattatttatctgcactgtaaaatgcagacaagtaaaatgagaagatttattattctttggaaaaaaaaatgtttttgtctgcacagtgaagataatataacttctgggttctatgt

SEQ ID NO: 48183 - protein, 595 aa, Arabidopsis thaliana
  peptide (1)..(595): Ceres Seq. ID no. 12575435
MAMAFPLSYTPTITVKPVTYSRRSNFVVFSSSSNGRDPLEENSVPNGVKSLEKLQEEKRRAELSARIASGAFTVRKSSFPSTVKNGLSKIGIPSNVLDFMFDWTGSDQDYPKVPEAKGSIQAVRNEAFFIPLYELFLTYGGIFRLTFGPKSFLIVSDPSIAKHILKDNAKAYSKGILAEILDFVMGKGLIPADGEIWRRRRRAIVPALHQKYVAAMISLFGEASDRLCQKLDAAALKGEEVEMESLFSRLTLDIIGKAVFNYDFDSLTNDTGVIEAVYTVLREAEDRSVSPIPVWDIPIWKDISPRQRKVATSLKLINDTLDDLIATCKRMVEEEELQFHEEYMNERDPSILHFLLASGDDVSSKQLRDDLMTMLIAGHETSAAVLTWTFYLLTTEPSVVAKLQEEVDSVIGDRFPTIQDMKKLKYTTRVMNESLRLYPQPPVLIRRSIDNDILGEYPIKRGEDIFISVWNLHRSPLHWDDAEKFNPERWPLDGPNPNETNQNFSYLPFGGGPRKCIGDMFASFENVVAIAMLIRRFNFQIAPGAPPVKMTTGATIHTTEGLKLTVTKRTKPLDIPSVPILPMDTSRDEVSSALS

SEQ ID NO: 48184 - protein, 593 aa, Arabidopsis thaliana
  peptide (1)..(593): Ceres Seq. ID no. 12575436
MAFPLSYTPTITVKPVTYSRRSNFVVFSSSSNGRDPLEENSVPNGVKSLEKLQEEKRRAELSARIASGAFTVRKSSFPSTVKNGLSKIGIPSNVLDFMFDWTGSDQDYPKVPEAKGSIQAVRNEAFFIPLYELFLTYGGIFRLTFGPKSFLIVSDPSIAKHILKDNAKAYSKGILAEILDFVMGKGLIPADGEIWRRRRRAIVPALHQKYVAAMISLFGEASDRLCQKLDAAALKGEEVEMESLFSRLTLDIIGKAVFNYDFDSLTNDTGVIEAVYTVLREAEDRSVSPIPVWDIPIWKDISPRQRKVATSLKLINDTLDDLIATCKRMVEEEELQFHEEYMNERDPSILHFLLASGDDVSSKQLRDDLMTMLIAGHETSAAVLTWTFYLLTTEPSVVAKLQEEVDSVIGDRFPTIQDMKKLKYTTRVMNESLRLYPQPPVLIRRSIDNDILGEYPIKRGEDIFISVWNLHRSPLHWDDAEKFNPERWPLDGPNPNETNQNFSYLPFGGGPRKCIGDMFASFENVVAIAMLIRRFNFQIAPGAPPVKMTTGATIHTTEGLKLTVTKRTKPLDIPSVPILPMDTSRDEVSSALS

SEQ ID NO: 48185 - protein, 496 aa, Arabidopsis thaliana
  peptide (1)..(496): Ceres Seq. ID no. 12575437
MFDWTGSDQDYPKVPEAKGSIQAVRNEAFFIPLYELFLTYGGIFRLTFGPKSFLIVSDPSIAKHILKDNAKAYSKGILAEILDFVMGKGLIPADGEIWRRRRRAIVPALHQKYVAAMISLFGEASDRLCQKLDAAALKGEEVEMESLFSRLTLDIIGKAVFNYDFDSLTNDTGVIEAVYTVLREAEDRSVSPIPVWDIPIWKDISPRQRKVATSLKLINDTLDDLIATCKRMVEEEELQFHEEYMNERDPSILHFLLASGDDVSSKQLRDDLMTMLIAGHETSAAVLTWTFYLLTTEPSVVAKLQEEVDSVIGDRFPTIQDMKKLKYTTRVMNESLRLYPQPPVLIRRSIDNDILGEYPIKRGEDIFISVWNLHRSPLHWDDAEKFNPERWPLDGPNPNETNQNFSYLPFGGGPRKCIGDMFASFENVVAIAMLIRRFNFQIAPGAPPVKMTTGATIHTTEGLKLTVTKRTKPLDIPSVPILPMDTSRDEVSSALS

SEQ ID NO: 48186 - DNA, 2007 bp, Arabidopsis thaliana
  misc_feature (1)..(2007): Ceres Seq. ID no. 12718518
  misc_feature (1)..(2007): Ortholog of  Ceres SEQ ID NO 14308698 as cited in SEQ ID NO 58663
actttctgtctgtacccaaaagaagtaatgaacctctctcatcttcttcttctctgtttctttcatgttttgtgagttgtttctcaacaattttctggtctcttagagtgagaggagagagatagagagttgtgttgggcgtggaacttggactagttccacatatcaggttatatagatcttctctttcaacttctgattcgtccagaagctttcctaatctgagatctgacatggaacaccaaggttggagttttgaggagaattatagtttgtccactaatagaagatctatcaggccacaagatgaactagtggagttattatggcgagatggacaagtggttctgcagagccaaactcatagagaacaaacccaaacccagaaacaagatcatcatgaagaagccctaagatccagcacctttcttgaagatcaagaaactgtctcttggatccaataccctccagatgaagacccattcgaacccgacgacttctcctcccacttcttctcaaccatggatcccctccagagaccaacctcagagacggttaagcctaagtccagtcctgaacctcctcaagtcatggttaagcctaaggcctgtcctgaccctcctcctcaagtcatgcctcctccaaaatttaggttaacaaattcatcatcggggattagggaaacagaaatggaacagtactcggtaacgaccgttggacctagccattgcggaagcaacccatcacagaacgatctcgatgtctcaatgagtcatgatcgaagcaaaaacatagaagaaaagcttaatccgaacgcaagttcctcatcaggtggctcctctggttgcagctttggcaaagatatcaaagaaatggctagtggaagatgcatcacaaccgaccgtaagagaaaacgtataaatcacactgacgaatctgtatctctatcagatgcaatcggtaacaagtcgaaccaacgatcaggatcaaaccgaaggagtcgagcagctgaagttcataatctctccgaaagggtacttcatcggttcgtctatataatatataatatatagtttaatgttagagaatcgtataacatttatacaaagaaaacagatacaaaactctgttttttattttcttcttttcataacttaaatagaggaggagagataggatcaatgagagaatgaaggctttgcaagaactaatacctcactgcagtaaaactgataaagcttcgattttagacgaagccatagattatttgaaatcacttcagttacagcttcaagtgatgtggatggggagtggaatggcggcggcggcggcttcggctccgatgatgttccccggagttcaacctcagcagttcatacgtcagatacagagcccggtacagttacctcgatttccggttatggatcagtctgcaattcagaacaatcccggtttagtttgccaaaacccggtacaaaaccagatcatctccgaccggtttgctagatacatcggtgggttcccacacatgcaggccgcgactcaggtaaggccaatacgaagccgtgtttattaaacgacgattttggtaaaatgttttttgggtttactacattaatacgagataagaaaaaatgttaaaccgacgtagttttagttgacacgttgtgtggttttttattagatgcagccgatggagatgttgagatttagttcaccggcgggacagcaaagtcaacaaccgtcgtctgtgccgacgaagaccaccgacggttctcgtttggaccactaggttggtgagccacttttttacttccttatttttggtatgtttcttttttatatctatctttctgaacatacttaaaacgttcaaggatgtattattatagagtaaacgtgcaacttcattacgttattttctgtatatgtgagtttatgtatgtcaaaatgacatgatgagattttttgtaaacaacatcttaaaaacaggacatgtgatttttg

SEQ ID NO: 48187 - protein, 279 aa, Arabidopsis thaliana
  peptide (1)..(279): Ceres Seq. ID no. 12718519
MEHQGWSFEENYSLSTNRRSIRPQDELVELLWRDGQVVLQSQTHREQTQTQKQDHHEEALRSSTFLEDQETVSWIQYPPDEDPFEPDDFSSHFFSTMDPLQRPTSETVKPKSSPEPPQVMVKPKACPDPPPQVMPPPKFRLTNSSSGIRETEMEQYSVTTVGPSHCGSNPSQNDLDVSMSHDRSKNIEEKLNPNASSSSGGSSGCSFGKDIKEMASGRCITTDRKRKRINHTDESVSLSDAIGNKSNQRSGSNRRSRAAEVHNLSERVLHRFVYIIYNI

SEQ ID NO: 48188 - protein, 183 aa, Arabidopsis thaliana
  peptide (1)..(183): Ceres Seq. ID no. 12718520
MDPLQRPTSETVKPKSSPEPPQVMVKPKACPDPPPQVMPPPKFRLTNSSSGIRETEMEQYSVTTVGPSHCGSNPSQNDLDVSMSHDRSKNIEEKLNPNASSSSGGSSGCSFGKDIKEMASGRCITTDRKRKRINHTDESVSLSDAIGNKSNQRSGSNRRSRAAEVHNLSERVLHRFVYIIYNI

SEQ ID NO: 48189 - protein, 160 aa, Arabidopsis thaliana
  peptide (1)..(160): Ceres Seq. ID no. 12718521
MVKPKACPDPPPQVMPPPKFRLTNSSSGIRETEMEQYSVTTVGPSHCGSNPSQNDLDVSMSHDRSKNIEEKLNPNASSSSGGSSGCSFGKDIKEMASGRCITTDRKRKRINHTDESVSLSDAIGNKSNQRSGSNRRSRAAEVHNLSERVLHRFVYIIYNI

SEQ ID NO: 48190 - DNA, 1946 bp, Arabidopsis thaliana
  misc_feature (1)..(1946): Ceres Seq. ID no. 13649842
  misc_feature (1)..(1946): Ortholog of  Ceres SEQ ID NO 13663060 as cited in SEQ ID NO 60964
  misc_feature (1)..(1946): Ortholog of  Ceres SEQ ID NO 13598532 as cited in SEQ ID NO 65204
  misc_feature (1)..(1946): Ortholog of  Ceres SEQ ID NO 13655298 as cited in SEQ ID NO 68914
gtatttcccttttacgaatttaaataaagtagatgttacaaaagaaaatgaaaatctctgaaaaactctcctgattcaaaagagtaagaaatctacaaaagaaaaccacagagaaaatctctactgatcagtttctctccattggtgatcgctcgtcagaaaaattgagctcgattttgtataaattgaagaaaaagaagaagatcatcaaatgcgtgatttttacttttccgttcaagtgattgatcaagggaacataagcagctagagaccacaccactcagttatttctatctcatagtgcttgtggatgttcaagctataagaatgtgctcggtggttctatgaatatataggaagattggtgttttgatgggatgggacaccaaattgctaaggtttatggtgttatcaattactagtacgtcttatcttctgaacaaccaccaccatggaatctcatctgggaaatggagtaggcagttcgagatctgccaaaaatacaaagaacacttctagttcagttgattggttgagcagagatatgcttgagatgaagataagggacaagacagaggctgatgaggagagagacagtgaaccagatatcattgatggagttggtgcagaacctggccatgtgatcacaactacactccctggacgaaatggtcaatcaagacagacagtcagttacatagcagaacacgtagtcgggactggttcattcggaatggttttccaagctaaatgcagagaaactggggaggttgttgccatcaaaaaagttctacaagacaagcgttacaagaacagagaattacaaattatgcagatgctagaccatccgaatgttgtttgtttaaagcatagcttctattcaagaacagaaaatgaagaggtttatctaaatcttgtccttgagtttgttcccgagactgtcaatcgtactgccagaagctacagtagaatgaaccagctgatgccattgatatatgtcaaactctacacttaccagatttgcagggggcttgcttaccttcataattgctgtggtctttgtcaccgtgatataaagccccaaaacctgctagtgaatccacacacacatcagctgaaaatttgtgattttgggagtgcaaaagtgttggtgaaaggagaacccaatatttcttacatttgttcaagatactatcgtgccccagagctcatttttggagccaccgagtacacaactgcaatagacatatggtccacaggttgtgtgatggctgaactgctgcttggacagcctctgtttcctggcgaaagtggagtcgatcaacttgttgaaatcataaaggttttgggtacaccaacaagggaggagatcaaatgcatgaatccaaactacacagaatttaaatttcctcagataaaacctcatccttggcacaaggtattccagaaacgtctgccacctgaagcagtagatcttctttgtaggttcttccagtattctcctaatttgagatgtacagcggtggaagcttgtatccaccctttctttgatgagctaagagacccaaatgctcgtctgccaaacggccggccacttcctccgctattcaattttaaaccacaagaactctctggtatccctcctgaaactgtggaccgacttgtcccagaacatgcccgtaagcagaaccacttcatggcattacactcgtaagtctcttccgtgttttctgtacgacctatcgggtgttctcttcttttctctaagctctctagatcccagtctttgggaaaaaccagtagagctctctctctgtaaacagaaatcactggaaaaagaagcaatgacttttgtattaaggtgcttgcgcatcccttgtcgtgaagtgaggatgcgtaaaatacaacactactttgttagatatatgatatagaggaacatactt

SEQ ID NO: 48191 - protein, 420 aa, Arabidopsis thaliana
  peptide (1)..(420): Ceres Seq. ID no. 13649843
MESHLGNGVGSSRSAKNTKNTSSSVDWLSRDMLEMKIRDKTEADEERDSEPDIIDGVGAEPGHVITTTLPGRNGQSRQTVSYIAEHVVGTGSFGMVFQAKCRETGEVVAIKKVLQDKRYKNRELQIMQMLDHPNVVCLKHSFYSRTENEEVYLNLVLEFVPETVNRTARSYSRMNQLMPLIYVKLYTYQICRGLAYLHNCCGLCHRDIKPQNLLVNPHTHQLKICDFGSAKVLVKGEPNISYICSRYYRAPELIFGATEYTTAIDIWSTGCVMAELLLGQPLFPGESGVDQLVEIIKVLGTPTREEIKCMNPNYTEFKFPQIKPHPWHKVFQKRLPPEAVDLLCRFFQYSPNLRCTAVEACIHPFFDELRDPNARLPNGRPLPPLFNFKPQELSGIPPETVDRLVPEHARKQNHFMALHS

SEQ ID NO: 48192 - protein, 389 aa, Arabidopsis thaliana
  peptide (1)..(389): Ceres Seq. ID no. 13649844
MLEMKIRDKTEADEERDSEPDIIDGVGAEPGHVITTTLPGRNGQSRQTVSYIAEHVVGTGSFGMVFQAKCRETGEVVAIKKVLQDKRYKNRELQIMQMLDHPNVVCLKHSFYSRTENEEVYLNLVLEFVPETVNRTARSYSRMNQLMPLIYVKLYTYQICRGLAYLHNCCGLCHRDIKPQNLLVNPHTHQLKICDFGSAKVLVKGEPNISYICSRYYRAPELIFGATEYTTAIDIWSTGCVMAELLLGQPLFPGESGVDQLVEIIKVLGTPTREEIKCMNPNYTEFKFPQIKPHPWHKVFQKRLPPEAVDLLCRFFQYSPNLRCTAVEACIHPFFDELRDPNARLPNGRPLPPLFNFKPQELSGIPPETVDRLVPEHARKQNHFMALHS

SEQ ID NO: 48193 - protein, 386 aa, Arabidopsis thaliana
  peptide (1)..(386): Ceres Seq. ID no. 13649845
MKIRDKTEADEERDSEPDIIDGVGAEPGHVITTTLPGRNGQSRQTVSYIAEHVVGTGSFGMVFQAKCRETGEVVAIKKVLQDKRYKNRELQIMQMLDHPNVVCLKHSFYSRTENEEVYLNLVLEFVPETVNRTARSYSRMNQLMPLIYVKLYTYQICRGLAYLHNCCGLCHRDIKPQNLLVNPHTHQLKICDFGSAKVLVKGEPNISYICSRYYRAPELIFGATEYTTAIDIWSTGCVMAELLLGQPLFPGESGVDQLVEIIKVLGTPTREEIKCMNPNYTEFKFPQIKPHPWHKVFQKRLPPEAVDLLCRFFQYSPNLRCTAVEACIHPFFDELRDPNARLPNGRPLPPLFNFKPQELSGIPPETVDRLVPEHARKQNHFMALHS

SEQ ID NO: 48194 - DNA, 1186 bp, Arabidopsis thaliana
  misc_feature (1)..(1186): Ceres Seq. ID no. 13648617
  misc_feature (1)..(1186): Ortholog of  Ceres SEQ ID NO 14308776 as cited in SEQ ID NO 55124
tgaacaaacgtgtcagctatcttctctctctcactatttctgggttgaagaagatgaagaacaaagcatccatggaagctccacagttgccatctctctctgaccttgaagctcggatgcaaatcctgcgtgagtctggttttcaagaaagccaaggagatgatgatacctttgctcaacgagctgaatggttttaccagggacgacctttgcttctctcactttgtctggacctgtacaacggctacgtcactctcttgggtcgttcttctcatcagaccagacttaaacccactacttctcttccgaaccagcttctccaagatgatgatgactgcatttcggacattgattccgttagtgaggtcagttctgaagttgagagcaccttatcctttcaacagatgaaagatcctactgcggtttctgagaaagtcgatgagcttgtatcccaacttgtgacagcaagcttggacaaagagattctgaaacacgagttacttcacaaggaccaacagtttcatgaagcctccaagactatagagctgttgaagaagtttgtcatgttgctggagatggagaaagaagtggctgtggaggaaaacgctaatcttggctacaaactcacttctctcttggaggagaacagagagctagccactgaggcattgttcatgaagaacgaagctgttgggcttgctaggtgtgtgcttaagatgagagatgaccactttcacaaggtctgcattctccagaaccgcatctactcgcttcaggcatctaggaactcagagcccgtctctgataaggtctcatacggatgctttggcctggataagcataagaccaaaaagaagaaggagaacaaaaccgaagagaagaagcctggattcaagtggttgaagaaactgaacaccattaacctgtttacaaagtgcagccttaacccatcggctgctgctccatcatgctgcactttcgacttgccttattagcttaatcctttgctgtattagtaaactatgaacaatgcatacataactgtgtatgttctatcgccttattaggtttaatgcttttcagtgcatcgccctgatgcacagtttgttgtaccccgcatacaatctgtggctccttgatccacatatgtatggttttcatgactcacttatctggttaacacaac

SEQ ID NO: 48195 - protein, 330 aa, Arabidopsis thaliana
  peptide (1)..(330): Ceres Seq. ID no. 13648618
NKRVSYLLSLTISGLKKMKNKASMEAPQLPSLSDLEARMQILRESGFQESQGDDDTFAQRAEWFYQGRPLLLSLCLDLYNGYVTLLGRSSHQTRLKPTTSLPNQLLQDDDDCISDIDSVSEVSSEVESTLSFQQMKDPTAVSEKVDELVSQLVTASLDKEILKHELLHKDQQFHEASKTIELLKKFVMLLEMEKEVAVEENANLGYKLTSLLEENRELATEALFMKNEAVGLARCVLKMRDDHFHKVCILQNRIYSLQASRNSEPVSDKVSYGCFGLDKHKTKKKKENKTEEKKPGFKWLKKLNTINLFTKCSLNPSAAAPSCCTFDLPY

SEQ ID NO: 48196 - protein, 313 aa, Arabidopsis thaliana
  peptide (1)..(313): Ceres Seq. ID no. 13648619
MKNKASMEAPQLPSLSDLEARMQILRESGFQESQGDDDTFAQRAEWFYQGRPLLLSLCLDLYNGYVTLLGRSSHQTRLKPTTSLPNQLLQDDDDCISDIDSVSEVSSEVESTLSFQQMKDPTAVSEKVDELVSQLVTASLDKEILKHELLHKDQQFHEASKTIELLKKFVMLLEMEKEVAVEENANLGYKLTSLLEENRELATEALFMKNEAVGLARCVLKMRDDHFHKVCILQNRIYSLQASRNSEPVSDKVSYGCFGLDKHKTKKKKENKTEEKKPGFKWLKKLNTINLFTKCSLNPSAAAPSCCTFDLPY

SEQ ID NO: 48197 - protein, 307 aa, Arabidopsis thaliana
  peptide (1)..(307): Ceres Seq. ID no. 13648620
MEAPQLPSLSDLEARMQILRESGFQESQGDDDTFAQRAEWFYQGRPLLLSLCLDLYNGYVTLLGRSSHQTRLKPTTSLPNQLLQDDDDCISDIDSVSEVSSEVESTLSFQQMKDPTAVSEKVDELVSQLVTASLDKEILKHELLHKDQQFHEASKTIELLKKFVMLLEMEKEVAVEENANLGYKLTSLLEENRELATEALFMKNEAVGLARCVLKMRDDHFHKVCILQNRIYSLQASRNSEPVSDKVSYGCFGLDKHKTKKKKENKTEEKKPGFKWLKKLNTINLFTKCSLNPSAAAPSCCTFDLPY

SEQ ID NO: 48198 - DNA, 2044 bp, Arabidopsis thaliana
  misc_feature (1)..(2044): Ceres Seq. ID no. 12669302
  misc_feature (1)..(2044): Ortholog of  Ceres SEQ ID NO 13659971 as cited in SEQ ID NO 67565
  misc_feature (1)..(2044): Ortholog of  Ceres SEQ ID NO 13500385 as cited in SEQ ID NO 67583
aattttacgaaaaggtcgaaactttcttcagctgaacccgtgtttcctcttctctgcaactcaccggttcgccggaaaactctacgccgtcgccggattttgcaccaacgaaaacttctttaaactactttcttcattattcttctgctgagtttcaaaaactcagccatgggtaattgtatcgcctgcgtcaagtttgacccagacaactcaaaaccaaaccagaagaagaaacctccacggggacggcaacgaaacccatacgacgatcccgatggtttaagaactcacgcaccgttacgtgtgattcctatgagccatcaatctcagatcagcgacaagtacatcttaggacgagaactcggtcgcggcgaattcggaatcacgtatctttgtacagatagagagactcgtgaagctttagcttgcaaatcaatctccaagagaaagctccgaaccgccgtcgatgtggaagacgtccgtcgtgaagtcacgatcatgtcaactttaccggaacacccaaacgttgtgaaacttaaagcgacttatgaggataacgagaacgtgcatcttgtgatggagctttgtgaaggaggtgagctttttgatcggattgttgccagaggacattatacagagcgtgcggcggctaccgtcgcgagaacgatcgcggaggttgtgaggatgtgtcatgtcaatggtgttatgcatagagatttgaagcctgagaatttcttgtttgctaacaagaaggagaattctgcacttaaggctattgattttggtttatctgttctctttaaacctggagagaggtttacagagattgttggaagtccttattatatggctccagaagtgttgaagagaaattatggaccagaggttgatgtgtggagtgctggagttatcctctacatcttgctttgtggtgttcctccgttttgggcagagactgaacaaggtgtggctcttgccatcttgaggggagttcttgattttaagagagatccttggtcgcagatatcagagagcgcaaagagccttgtgaagcagatgttggaacctgattcaactaagcgtttgactgctcagcaagttcttgatcacccttggatacagaatgcaaagaaagctccaaatgttcctttaggggatattgttaggtcaaggttgaagcaattctccatgatgaatagattgaaaaagaaagctctgcgtgttatcgccgaacacttgtctattcaagaagttgaagtgatcagaaacatgtttacgctgatggatgatgacaacgacggtaaaatatcatatctagaactcagagctggactccggaaagtcggttcacaactgggtgaaccagagatcaaattgttaatggaagtggcggatgttaatggaaatggatgcttggactatggagagtttgtagcagtgataattcacttgcagaagatggagaatgatgagcatttcagacaagcttttatgttctttgacaaagatggaagtggatacatcgaatcagaagaactacgtgaagctttaaccgacgagttaggtgaaccagacaacagtgttataatcgatataatgcgtgaagtcgacactgacaaggacggaaaaataaactatgatgagtttgtggtgatgatgaaagctggaactgattggagaaaggcatcaagacaatactcaagagagaggtttaaaagcttaagcttaaacttgatgaaagacgggtcaatgcatctacacgacgcactcactggacaatctattgcagtttgatctttacacttgtttatcaccaaaacagaagcaatctgatggctgcttttcttacacgttcatgaagggtttttttctgggcttttttcagatgtgattttggcttacttcactttgtttctagagattcttttttttggttttggggaagttggaaatttgtaatttgtgggcgtagttaggcttttcactggagaatgaatgaatgtgtatgtaatatttgtttaattattataaagcttctttctat

SEQ ID NO: 48199 - protein, 541 aa, Arabidopsis thaliana
  peptide (1)..(541): Ceres Seq. ID no. 12669303
MGNCIACVKFDPDNSKPNQKKKPPRGRQRNPYDDPDGLRTHAPLRVIPMSHQSQISDKYILGRELGRGEFGITYLCTDRETREALACKSISKRKLRTAVDVEDVRREVTIMSTLPEHPNVVKLKATYEDNENVHLVMELCEGGELFDRIVARGHYTERAAATVARTIAEVVRMCHVNGVMHRDLKPENFLFANKKENSALKAIDFGLSVLFKPGERFTEIVGSPYYMAPEVLKRNYGPEVDVWSAGVILYILLCGVPPFWAETEQGVALAILRGVLDFKRDPWSQISESAKSLVKQMLEPDSTKRLTAQQVLDHPWIQNAKKAPNVPLGDIVRSRLKQFSMMNRLKKKALRVIAEHLSIQEVEVIRNMFTLMDDDNDGKISYLELRAGLRKVGSQLGEPEIKLLMEVADVNGNGCLDYGEFVAVIIHLQKMENDEHFRQAFMFFDKDGSGYIESEELREALTDELGEPDNSVIIDIMREVDTDKDGKINYDEFVVMMKAGTDWRKASRQYSRERFKSLSLNLMKDGSMHLHDALTGQSIAV

SEQ ID NO: 48200 - protein, 493 aa, Arabidopsis thaliana
  peptide (1)..(493): Ceres Seq. ID no. 12669304
MSHQSQISDKYILGRELGRGEFGITYLCTDRETREALACKSISKRKLRTAVDVEDVRREVTIMSTLPEHPNVVKLKATYEDNENVHLVMELCEGGELFDRIVARGHYTERAAATVARTIAEVVRMCHVNGVMHRDLKPENFLFANKKENSALKAIDFGLSVLFKPGERFTEIVGSPYYMAPEVLKRNYGPEVDVWSAGVILYILLCGVPPFWAETEQGVALAILRGVLDFKRDPWSQISESAKSLVKQMLEPDSTKRLTAQQVLDHPWIQNAKKAPNVPLGDIVRSRLKQFSMMNRLKKKALRVIAEHLSIQEVEVIRNMFTLMDDDNDGKISYLELRAGLRKVGSQLGEPEIKLLMEVADVNGNGCLDYGEFVAVIIHLQKMENDEHFRQAFMFFDKDGSGYIESEELREALTDELGEPDNSVIIDIMREVDTDKDGKINYDEFVVMMKAGTDWRKASRQYSRERFKSLSLNLMKDGSMHLHDALTGQSIAV

SEQ ID NO: 48201 - protein, 431 aa, Arabidopsis thaliana
  peptide (1)..(431): Ceres Seq. ID no. 12669305
MSTLPEHPNVVKLKATYEDNENVHLVMELCEGGELFDRIVARGHYTERAAATVARTIAEVVRMCHVNGVMHRDLKPENFLFANKKENSALKAIDFGLSVLFKPGERFTEIVGSPYYMAPEVLKRNYGPEVDVWSAGVILYILLCGVPPFWAETEQGVALAILRGVLDFKRDPWSQISESAKSLVKQMLEPDSTKRLTAQQVLDHPWIQNAKKAPNVPLGDIVRSRLKQFSMMNRLKKKALRVIAEHLSIQEVEVIRNMFTLMDDDNDGKISYLELRAGLRKVGSQLGEPEIKLLMEVADVNGNGCLDYGEFVAVIIHLQKMENDEHFRQAFMFFDKDGSGYIESEELREALTDELGEPDNSVIIDIMREVDTDKDGKINYDEFVVMMKAGTDWRKASRQYSRERFKSLSLNLMKDGSMHLHDALTGQSIAV

SEQ ID NO: 48202 - DNA, 1330 bp, Arabidopsis thaliana
  misc_feature (1)..(1330): Ceres Seq. ID no. 13649862
  misc_feature (1)..(1330): Ortholog of  Ceres SEQ ID NO 12583469 as cited in SEQ ID NO 51031
  misc_feature (1)..(1330): Ortholog of  Ceres SEQ ID NO 13597389 as cited in SEQ ID NO 63426
  misc_feature (1)..(1330): Ortholog of  Ceres SEQ ID NO 13595998 as cited in SEQ ID NO 68161
gagtgtgaattgccattaccatcactctctttgtttcgttactcgcaatgaaggataatcttgaaagagcaaaacttatggtttcttctactgtgttttcatggcttcttctgtgtctctttgcagtgacaacatctgtttcagttcagcctacgtgtacttttccggcgatttacaacttcggagattctaattccgacactggaggtatctccgccgcttttgagcctattagggatccttacggtcaaggtttcttccacagacccgccggaagagactccgatggccgtctcaccattgatttcattgctgagcgtctggggttaccgtatttgagcgcatacttaaactcgttaggatcaaacttcagacatggagcaaactttgcaacaggtggttcaaccataagaagacagaacgaaactatctttcaatatggcattagtccattctctctcgatatgcagattgctcaattcgatcagttcaaagccagatctgcactactcttcacacaaattaagagtagatatgatagagagaagcttccaagacaggaagagtttgcaaaggctttgtatacttttgatattggacagaatgatctctctgttgggtttcggacaatgagcgtcgatcaacttaaggcgacgatacccgacattgtcaaccatttagcttctgctgtccggaacatatatcagcaaggaggaagaacattttgggtacacaacacgggtcctttcggttgtttacccgtgaacatgttttacatgggcactcctgcaccgggctacttggacaaatctggctgcgtgaaggctcaaaatgaaatggcgatggagttcaacagaaagctcaaggaaacagtaatcaatctcagaaaagaactcactcaagcagccattacatatgttgatgtctacactgcgaaatatgaaatgatgagcaatcccaagaaactaggatttgcaaaccccttgaaggtatgttgcggctaccatgagaagtatgatcacatctggtgtggaaacaaagggaaagtgaacaataccgaaatctacggtggctcttgtcccaacccggtaatggctgtgagctgggatggagttcactatacggaagctgcaaacaagcatgtggctgaccgtactctaaatggtttgctcacagaccctccagttccaataacccgagcttgttatagacagtgagatttagtagaagcgctagatgaaccgaaataaaggtttgatccttagactcttagggcaataatgtaagtgttttaaggaacaatcaatgatctatgcaatcctgtgtaacc

SEQ ID NO: 48203 - protein, 389 aa, Arabidopsis thaliana
  peptide (1)..(389): Ceres Seq. ID no. 13649863
MKDNLERAKLMVSSTVFSWLLLCLFAVTTSVSVQPTCTFPAIYNFGDSNSDTGGISAAFEPIRDPYGQGFFHRPAGRDSDGRLTIDFIAERLGLPYLSAYLNSLGSNFRHGANFATGGSTIRRQNETIFQYGISPFSLDMQIAQFDQFKARSALLFTQIKSRYDREKLPRQEEFAKALYTFDIGQNDLSVGFRTMSVDQLKATIPDIVNHLASAVRNIYQQGGRTFWVHNTGPFGCLPVNMFYMGTPAPGYLDKSGCVKAQNEMAMEFNRKLKETVINLRKELTQAAITYVDVYTAKYEMMSNPKKLGFANPLKVCCGYHEKYDHIWCGNKGKVNNTEIYGGSCPNPVMAVSWDGVHYTEAANKHVADRTLNGLLTDPPVPITRACYRQ

SEQ ID NO: 48204 - protein, 379 aa, Arabidopsis thaliana
  peptide (1)..(379): Ceres Seq. ID no. 13649864
MVSSTVFSWLLLCLFAVTTSVSVQPTCTFPAIYNFGDSNSDTGGISAAFEPIRDPYGQGFFHRPAGRDSDGRLTIDFIAERLGLPYLSAYLNSLGSNFRHGANFATGGSTIRRQNETIFQYGISPFSLDMQIAQFDQFKARSALLFTQIKSRYDREKLPRQEEFAKALYTFDIGQNDLSVGFRTMSVDQLKATIPDIVNHLASAVRNIYQQGGRTFWVHNTGPFGCLPVNMFYMGTPAPGYLDKSGCVKAQNEMAMEFNRKLKETVINLRKELTQAAITYVDVYTAKYEMMSNPKKLGFANPLKVCCGYHEKYDHIWCGNKGKVNNTEIYGGSCPNPVMAVSWDGVHYTEAANKHVADRTLNGLLTDPPVPITRACYRQ

SEQ ID NO: 48205 - protein, 250 aa, Arabidopsis thaliana
  peptide (1)..(250): Ceres Seq. ID no. 13649865
MQIAQFDQFKARSALLFTQIKSRYDREKLPRQEEFAKALYTFDIGQNDLSVGFRTMSVDQLKATIPDIVNHLASAVRNIYQQGGRTFWVHNTGPFGCLPVNMFYMGTPAPGYLDKSGCVKAQNEMAMEFNRKLKETVINLRKELTQAAITYVDVYTAKYEMMSNPKKLGFANPLKVCCGYHEKYDHIWCGNKGKVNNTEIYGGSCPNPVMAVSWDGVHYTEAANKHVADRTLNGLLTDPPVPITRACYRQ

SEQ ID NO: 48206 - DNA, 1420 bp, Arabidopsis thaliana
  misc_feature (1)..(1420): Ceres Seq. ID no. 13648858
  misc_feature (1)..(1420): Ortholog of  Ceres SEQ ID NO 15174776 as cited in SEQ ID NO 53258
  misc_feature (1)..(1420): Ortholog of  Ceres SEQ ID NO 15179967 as cited in SEQ ID NO 0
gattcgtgggaaaaagaaagtctagatttttgtggattttgattttgtgattccgtgattgtatgaacttgagccgttttgcttcgagattaagaatggcggaagaaatctcaaagacgaaggtgggatcttcttctactgcttcggtggctgattcatctgctgctgcgtcggctgcaacgaatgcggccaaatcaagatggaaaattttgtggcctaattcgctccggtggattcctacgtccaccgattacatcatcgccgccgagaaacgtcttctctccatcctcaagacgccttatgtacaagagcaagtcagtattggttcaggaccaccaggttctaaaatcaggtggtttaggtctacgagcaatgagtcacgttacatcaacactgttacatttgatgccaaggagggagctcctacactcgtcatggttcatggttatggtgcttctcaagggtttttcttccgtaattttgatgctcttgccagtcgatttagagtgatcgctattgatcaacttgggtggggtggttcaagtaggcctgattttacatgtagaagcacagaagaaactgaggcatggtttatcgactcctttgaggaatggcgtaaagcccagaatctcagtaactttattctattaggacattcttttggaggctatgttgctgctaaatacgcgcttaagcatcctgaacatgttcaacacttaattctggtgggatctgctgggttctcagcagaagcagatgccaaatcagaatggctcactaaatttagagcaacatggaaaggtgcagtcctaaatcatttatgggagtcaaatttcactcctcagaagctggttagaggattaggtccttggggtccaggtcttgtaaatcggtatacaactgcaagatttggtgcacattcggagggaactgggctaacagaagaggaagccaaattgctaaccgattatgtgtaccatactttggctgcaaaggctagtggagagttatgcttgaaatacatcttctcatttggagcatttgctaggaagcccctcttacaaagtgcatcagagtggaaagtgccaacaacgtttatctatggaatgaatgattggatgaactatcaaggtgcggtggaagcgaggaaatccatgaaggtcccttgcgaaatcattcgggttccacagggtggtcattttgtgttcatagacaacccaattggttttcattctgcagtgctttatgcttgccgcaagtttatatctcaagactcctctcatgatcaacaactcctagatggtctacgattggtttagtcatagtatcttgttccttttaccttccaaatttattctatatgtgtatacaagtatatatgaaaaagaacataaaaaagaattactttctttatttgaat

SEQ ID NO: 48207 - protein, 418 aa, Arabidopsis thaliana
  peptide (1)..(418): Ceres Seq. ID no. 13648859
MNLSRFASRLRMAEEISKTKVGSSSTASVADSSAAASAATNAAKSRWKILWPNSLRWIPTSTDYIIAAEKRLLSILKTPYVQEQVSIGSGPPGSKIRWFRSTSNESRYINTVTFDAKEGAPTLVMVHGYGASQGFFFRNFDALASRFRVIAIDQLGWGGSSRPDFTCRSTEETEAWFIDSFEEWRKAQNLSNFILLGHSFGGYVAAKYALKHPEHVQHLILVGSAGFSAEADAKSEWLTKFRATWKGAVLNHLWESNFTPQKLVRGLGPWGPGLVNRYTTARFGAHSEGTGLTEEEAKLLTDYVYHTLAAKASGELCLKYIFSFGAFARKPLLQSASEWKVPTTFIYGMNDWMNYQGAVEARKSMKVPCEIIRVPQGGHFVFIDNPIGFHSAVLYACRKFISQDSSHDQQLLDGLRLV

SEQ ID NO: 48208 - protein, 407 aa, Arabidopsis thaliana
  peptide (1)..(407): Ceres Seq. ID no. 13648860
MAEEISKTKVGSSSTASVADSSAAASAATNAAKSRWKILWPNSLRWIPTSTDYIIAAEKRLLSILKTPYVQEQVSIGSGPPGSKIRWFRSTSNESRYINTVTFDAKEGAPTLVMVHGYGASQGFFFRNFDALASRFRVIAIDQLGWGGSSRPDFTCRSTEETEAWFIDSFEEWRKAQNLSNFILLGHSFGGYVAAKYALKHPEHVQHLILVGSAGFSAEADAKSEWLTKFRATWKGAVLNHLWESNFTPQKLVRGLGPWGPGLVNRYTTARFGAHSEGTGLTEEEAKLLTDYVYHTLAAKASGELCLKYIFSFGAFARKPLLQSASEWKVPTTFIYGMNDWMNYQGAVEARKSMKVPCEIIRVPQGGHFVFIDNPIGFHSAVLYACRKFISQDSSHDQQLLDGLRLV

SEQ ID NO: 48209 - protein, 294 aa, Arabidopsis thaliana
  peptide (1)..(294): Ceres Seq. ID no. 13648861
MVHGYGASQGFFFRNFDALASRFRVIAIDQLGWGGSSRPDFTCRSTEETEAWFIDSFEEWRKAQNLSNFILLGHSFGGYVAAKYALKHPEHVQHLILVGSAGFSAEADAKSEWLTKFRATWKGAVLNHLWESNFTPQKLVRGLGPWGPGLVNRYTTARFGAHSEGTGLTEEEAKLLTDYVYHTLAAKASGELCLKYIFSFGAFARKPLLQSASEWKVPTTFIYGMNDWMNYQGAVEARKSMKVPCEIIRVPQGGHFVFIDNPIGFHSAVLYACRKFISQDSSHDQQLLDGLRLV

SEQ ID NO: 48210 - DNA, 1211 bp, Arabidopsis thaliana; identical to SEQ ID NO: 43816
  misc_feature (1)..(1211): Ceres Seq. ID no. 13576059
  misc_feature (1)..(1211): Ortholog of  Ceres SEQ ID NO 15168549 as cited in SEQ ID NO 56976
  misc_feature (1)..(1211): Ortholog of  Ceres SEQ ID NO 14314335 as cited in SEQ ID NO 57305

SEQ ID NO: 48211 - protein, 289 aa, Arabidopsis thaliana; identical to SEQ ID NO: 43817
  peptide (1)..(289): Ceres Seq. ID no. 13576060

SEQ ID NO: 48212 - protein, 201 aa, Arabidopsis thaliana; identical to SEQ ID NO: 43818
  peptide (1)..(201): Ceres Seq. ID no. 13576061

SEQ ID NO: 48213 - protein, 162 aa, Arabidopsis thaliana; identical to SEQ ID NO: 43819
  peptide (1)..(162): Ceres Seq. ID no. 13576062

SEQ ID NO: 48214 - DNA, 3652 bp, Arabidopsis thaliana; identical to SEQ ID NO: 37223
  misc_feature (1)..(3652): Ceres Seq. ID no. 13648943
  misc_feature (1)..(3652): Ortholog of  Ceres SEQ ID NO 14303524 as cited in SEQ ID NO 59500
  misc_feature (1)..(3652): Ortholog of  Ceres SEQ ID NO 14313220 as cited in SEQ ID NO 66007
  misc_feature (1)..(3652): Ortholog of  Ceres SEQ ID NO 13658778 as cited in SEQ ID NO 66511

SEQ ID NO: 48215 - protein, 1065 aa, Arabidopsis thaliana; identical to SEQ ID NO: 37224
  peptide (1)..(1065): Ceres Seq. ID no. 13648944

SEQ ID NO: 48216 - protein, 1054 aa, Arabidopsis thaliana; identical to SEQ ID NO: 37225
  peptide (1)..(1054): Ceres Seq. ID no. 13648945

SEQ ID NO: 48217 - protein, 959 aa, Arabidopsis thaliana; identical to SEQ ID NO: 37226
  peptide (1)..(959): Ceres Seq. ID no. 13648946

SEQ ID NO: 48218 - DNA, 2334 bp, Arabidopsis thaliana
  misc_feature (1)..(2334): Ceres Seq. ID no. 13649885
  misc_feature (1)..(2334): Ortholog of  Ceres SEQ ID NO 13600310 as cited in SEQ ID NO 5086
atgtttaagaaaaaggaagcgctctcaagtattccttttgacaagcgaaggaaggagacgcaaggtactggaagaagacaagtgctttcgacagtgaacagacaagatgcgaacagcgatgtgggaagcacagaggagtgtggtaaagttgagtttacaaaagatgaagtgttggctttgcttaacgagagagctaaagctggaaaatttgataccaagggtaagattgagcaaatgacggatattatcaagaagcttaaggtctgtgttagatggtaccaacaagtggatgaaactcatgttcaagacaaggaaaatctttcttcttctcttcaatctgcagagaaaagatacagtgataaagagttggatgcaaagaccaaagaggaagagctacgagcaactataacagagatgaaggagaacatagaatcacttcaggaaaagctgtccaaggagaagttgagtaaactggatgcaattgaaaatcacagaagagaaaaagattgtagagttgtagctgagaagcttcaggtttctctcagagaagagcttgacaaagttaaagaggaaaaaatggctgcgaagcagaaggtgacgtctctagaagatatgtacaagaggctgcaagagtacaacacaagtttgcaacaatataacaccaaactccagactgatcttgaagtagctagagaggctcacactcgtgctgaaaaagaaaagtcaagtatactggagaatcttactacactaagaggtcacagtaaatcactacaagatcaattagcatcgagccgggtttcacaagatgaagcggtaaaacaaaaggattcattgctgatggaagttaataaccttcaaagcgagctgcaacaagtccgtgatgatcgtgatcgccatgttgtacagtcacaaaagctggctggtgagatactgatgtataaggagagtgttggaaagtcatctcatgagttggacattcttatagccaaatcaggatctttagaggaaacatgttcgttgcaaaaagagcgtattaaaatgttggagcaggaattagcttttgctaaggaaaagcttaagatggtggatttatctatgtctcatacaatgacagaatttgaggagcagaaacaatgtatgcatgaactgcaagatcgccttgcagacacggagcgtcaactttttgaaggagagttattaaagaaaaagcttcataacaccattcttgaactcaaaggaaacatacgcgtgttctgccgagtgcgccccttgctaccagatgatggaggacgccaagaggccagtgttattgcctatcctacatcaactgaatctcttggtagaggcattgatgtggtccaaagtggtaacaaacatcctttcactttcgacaaggtcttcgaccacggagcttctcaggaggaagtattctttgaaatatctcaacttgtgcagagcgcattggatggctacaaggtttgtatttttgcctacggtcagacaggttctggcaaaacctataccatgatgggcaggcctgaaacaccagaacagaaaggactgatccctcgatcactcgaacaaatattcaaaaccagccaaagtcttagtacacaaggctggaaatacaagatgcaggtctcaatgttggagatatataatgagtccatcagagacttgttgtctacaagccgaacgattgctatagaatctgtgcgggcagacagtagcacatctggaagacaatatacaatcacacatgatgttaatggaaacactcatgttagcgacctgacaatagtagatgtatgcagcattggacaaatttcctcacttttgcaacaagctgctcagagcaggtctgttgggaagacgcatatgaatgaacaatcatcaagaagtcatttcgtgtttactcttaggatttctggtgtgaatgagagcactgaacagcaagtacaaggtgttcttaacctaattgatcttgctggaagtgagcgactttcaaggagcggggcaaccggagaccggttaaaggagacacaggctataaacaaaagcttgtctgcattgagtgatgttatatttgcattggcaaagaaagaggatcatgtacctttcagaaactcaaagttaacatatctgctccagccatgtttaggaggggactcaaagaccttaatgtttgtgaacatatcacctgatccatcttcaactggagagtctctatgctctcttcggtttgctgctagagttaatgcatgtgagattggaatacctcgcagacaaacttccgcaaaactcctcgactctcgcctaagttacggttaa

SEQ ID NO: 48219 - protein, 777 aa, Arabidopsis thaliana
  peptide (1)..(777): Ceres Seq. ID no. 13649886
MFKKKEALSSIPFDKRRKETQGTGRRQVLSTVNRQDANSDVGSTEECGKVEFTKDEVLALLNERAKAGKFDTKGKIEQMTDIIKKLKVCVRWYQQVDETHVQDKENLSSSLQSAEKRYSDKELDAKTKEEELRATITEMKENIESLQEKLSKEKLSKLDAIENHRREKDCRVVAEKLQVSLREELDKVKEEKMAAKQKVTSLEDMYKRLQEYNTSLQQYNTKLQTDLEVAREAHTRAEKEKSSILENLTTLRGHSKSLQDQLASSRVSQDEAVKQKDSLLMEVNNLQSELQQVRDDRDRHVVQSQKLAGEILMYKESVGKSSHELDILIAKSGSLEETCSLQKERIKMLEQELAFAKEKLKMVDLSMSHTMTEFEEQKQCMHELQDRLADTERQLFEGELLKKKLHNTILELKGNIRVFCRVRPLLPDDGGRQEASVIAYPTSTESLGRGIDVVQSGNKHPFTFDKVFDHGASQEEVFFEISQLVQSALDGYKVCIFAYGQTGSGKTYTMMGRPETPEQKGLIPRSLEQIFKTSQSLSTQGWKYKMQVSMLEIYNESIRDLLSTSRTIAIESVRADSSTSGRQYTITHDVNGNTHVSDLTIVDVCSIGQISSLLQQAAQSRSVGKTHMNEQSSRSHFVFTLRISGVNESTEQQVQGVLNLIDLAGSERLSRSGATGDRLKETQAINKSLSALSDVIFALAKKEDHVPFRNSKLTYLLQPCLGGDSKTLMFVNISPDPSSTGESLCSLRFAARVNACEIGIPRRQTSAKLLDSRLSYG

SEQ ID NO: 48220 - protein, 699 aa, Arabidopsis thaliana
  peptide (1)..(699): Ceres Seq. ID no. 13649887
MTDIIKKLKVCVRWYQQVDETHVQDKENLSSSLQSAEKRYSDKELDAKTKEEELRATITEMKENIESLQEKLSKEKLSKLDAIENHRREKDCRVVAEKLQVSLREELDKVKEEKMAAKQKVTSLEDMYKRLQEYNTSLQQYNTKLQTDLEVAREAHTRAEKEKSSILENLTTLRGHSKSLQDQLASSRVSQDEAVKQKDSLLMEVNNLQSELQQVRDDRDRHVVQSQKLAGEILMYKESVGKSSHELDILIAKSGSLEETCSLQKERIKMLEQELAFAKEKLKMVDLSMSHTMTEFEEQKQCMHELQDRLADTERQLFEGELLKKKLHNTILELKGNIRVFCRVRPLLPDDGGRQEASVIAYPTSTESLGRGIDVVQSGNKHPFTFDKVFDHGASQEEVFFEISQLVQSALDGYKVCIFAYGQTGSGKTYTMMGRPETPEQKGLIPRSLEQIFKTSQSLSTQGWKYKMQVSMLEIYNESIRDLLSTSRTIAIESVRADSSTSGRQYTITHDVNGNTHVSDLTIVDVCSIGQISSLLQQAAQSRSVGKTHMNEQSSRSHFVFTLRISGVNESTEQQVQGVLNLIDLAGSERLSRSGATGDRLKETQAINKSLSALSDVIFALAKKEDHVPFRNSKLTYLLQPCLGGDSKTLMFVNISPDPSSTGESLCSLRFAARVNACEIGIPRRQTSAKLLDSRLSYG

SEQ ID NO: 48221 - protein, 639 aa, Arabidopsis thaliana
  peptide (1)..(639): Ceres Seq. ID no. 13649888
MKENIESLQEKLSKEKLSKLDAIENHRREKDCRVVAEKLQVSLREELDKVKEEKMAAKQKVTSLEDMYKRLQEYNTSLQQYNTKLQTDLEVAREAHTRAEKEKSSILENLTTLRGHSKSLQDQLASSRVSQDEAVKQKDSLLMEVNNLQSELQQVRDDRDRHVVQSQKLAGEILMYKESVGKSSHELDILIAKSGSLEETCSLQKERIKMLEQELAFAKEKLKMVDLSMSHTMTEFEEQKQCMHELQDRLADTERQLFEGELLKKKLHNTILELKGNIRVFCRVRPLLPDDGGRQEASVIAYPTSTESLGRGIDVVQSGNKHPFTFDKVFDHGASQEEVFFEISQLVQSALDGYKVCIFAYGQTGSGKTYTMMGRPETPEQKGLIPRSLEQIFKTSQSLSTQGWKYKMQVSMLEIYNESIRDLLSTSRTIAIESVRADSSTSGRQYTITHDVNGNTHVSDLTIVDVCSIGQISSLLQQAAQSRSVGKTHMNEQSSRSHFVFTLRISGVNESTEQQVQGVLNLIDLAGSERLSRSGATGDRLKETQAINKSLSALSDVIFALAKKEDHVPFRNSKLTYLLQPCLGGDSKTLMFVNISPDPSSTGESLCSLRFAARVNACEIGIPRRQTSAKLLDSRLSYG

SEQ ID NO: 48222 - DNA, 1065 bp, Arabidopsis thaliana
  misc_feature (1)..(1065): Ceres Seq. ID no. 13649889
  misc_feature (1)..(1065): Ortholog of  Ceres SEQ ID NO 12610385 as cited in SEQ ID NO 55938
  misc_feature (1)..(1065): Ortholog of  Ceres SEQ ID NO 13661939 as cited in SEQ ID NO 61170
  misc_feature (1)..(1065): Ortholog of  Ceres SEQ ID NO 15178805 as cited in SEQ ID NO 0
ggttgtttccttcttcttcttcttctttctctttcttatatcttttttctcttcccaattttctcatcgatcactgaatcttcttcttcttcttcttcctcctcttctccttctttttctctcctctctcaaaaacagattttttttaaacgagcttgatcaataaattctctcaagatctatggcggaagagcatcgatgtcagacaccagaaagcaaccgtctctgtgttaacaactgtggcttcctcggcagctccgccaccatgaatctctgttctaattgttacggcgatctttgtctcaaacaacaacaacaatcctcctccatcaaatccaccgttgaatcttccctctctgtatctcctccgtcgtcatcatcatcggagatctcttctccgatcatccctcctctccttaaaaatccatcagtcaagctagaggtaccggagaaaaaggcggtgatttcgctgccgacgacggagcagaatcagcaacagaggccgaatcggtgcacgacgtgtaggaaacgggtcgggttaaccggattcaagtgccggtgcggtacgatgttttgcggggttcataggtacccggagatccatggatgcagctacgatttcaaatcggccggacgtgaagagatcgcgaaagcgaatccgttggtgaaagcagcgaagcttcagaagatatgatcagagccgttcgatgcgttgacttttcctctcgtaagtcttcatttctacgcgtatgtgtgtcctccgtcccccgagaaatacggatggtgtcgatttgattgatctcagccgttggatcaaaaatggtttattattgtaaaagattgattatgtatttatcaaagggacacgtgtcacgtggttttaggatggagacgctttcgctttttctccttcattttattttctttttcctttcagaaagaaataagattattcgcgttggctttttctttttattaaattccggcttattattattattattgtgtggcttttgcgtgtacaaagtctattcagaaaaataaaaaaaatgatattaatttccc

SEQ ID NO: 48223 - protein, 170 aa, Arabidopsis thaliana
  peptide (1)..(170): Ceres Seq. ID no. 15219596
MAEEHRCQTPESNRLCVNNCGFLGSSATMNLCSNCYGDLCLKQQQQSSSIKSTVESSLSVSPPSSSSSEISSPIIPPLLKNPSVKLEVPEKKAVISLPTTEQNQQQRPNRCTTCRKRVGLTGFKCRCGTMFCGVHRYPEIHGCSYDFKSAGREEIAKANPLVKAAKLQKI

SEQ ID NO: 48224 - protein, 142 aa, Arabidopsis thaliana; identical to SEQ ID NO: 29088
  peptide (1)..(142): Ceres Seq. ID no. 15219597

SEQ ID NO: 48225 - DNA, 1108 bp, Arabidopsis thaliana
  misc_feature (1)..(1108): Ceres Seq. ID no. 13648877
  misc_feature (1)..(1108): Ortholog of  Ceres SEQ ID NO 13596969 as cited in SEQ ID NO 63375
  misc_feature (1)..(1108): Ortholog of  Ceres SEQ ID NO 13597519 as cited in SEQ ID NO 64759
  misc_feature (1)..(1108): Ortholog of  Ceres SEQ ID NO 13597870 as cited in SEQ ID NO 64982
  misc_feature (1)..(1108): Ortholog of  Ceres SEQ ID NO 13595926 as cited in SEQ ID NO 67778
gatatacaaaaggaagaaacacttaaaagaaaatatcaaatctaaagtcgatcacatggctaataagagtttagagattcggtttttatttccacttgttttgtttttggttgtgaaattactttgtgttgatggtaaaggattcaataataatggccataagataagaaaaggaagatgggaaggtaagctgaagatgaacttctatcacaatagctgccctggagccgaggatatcgtgaggcagatagtgtggaagaaagtcgaagcaaaccgtagcctggctcccaagttactgagggttcattaccatgactgctttgttagggggtgcgacgcatcgctgcttttagattcggttgctggaaaagcagtgtccgagaaggaagcgagacctaatctctcgctttccgggtttgaaatcatcgatgagatcaagtatattctcgaaaaacgatgccctaacaccgtctcttgcgctgacattctcactttagccgcccgagatgccgtctcttatgaatttgaacggccgctatggaatgtgtttaccggacgtgttgatggaagagtttcattggcaacggaggcggccagagacttaccatccgctggggcaaacttcaccactctacagaaactctttgccgagagcgatttggacgtcgttgacctcgtcgctttatcaggagcacacacgataggaatagcacattgcggtgtgtttggcagaaggctcttgaacttcaccggaaaaggggacacagatccttccctaaaccctagttacgcctccttcctcaaatccgaatgctccgacaaatctttaagactcaacccttccgcagtggtcggaatggaccctactggtcctctcgcctttgacagtggctacttcgtctctctactcaagaacaaaggactcttcacctccgacgccgccttgttgactgatccctccgccgctcacattgctagtgttttccaaaactccggcgcttttcttgctcagtttggtcggtccatgataaagatgagttccatcaaagtccttactcttggagatcaaggtggtgagattcgtaaaaattgtcgcctcgtcaactga

SEQ ID NO: 48226 - protein, 368 aa, Arabidopsis thaliana
  peptide (1)..(368): Ceres Seq. ID no. 13648878
IYKRKKHLKENIKSKVDHMANKSLEIRFLFPLVLFLVVKLLCVDGKGFNNNGHKIRKGRWEGKLKMNFYHNSCPGAEDIVRQIVWKKVEANRSLAPKLLRVHYHDCFVRGCDASLLLDSVAGKAVSEKEARPNLSLSGFEIIDEIKYILEKRCPNTVSCADILTLAARDAVSYEFERPLWNVFTGRVDGRVSLATEAARDLPSAGANFTTLQKLFAESDLDVVDLVALSGAHTIGIAHCGVFGRRLLNFTGKGDTDPSLNPSYASFLKSECSDKSLRLNPSAVVGMDPTGPLAFDSGYFVSLLKNKGLFTSDAALLTDPSAAHIASVFQNSGAFLAQFGRSMIKMSSIKVLTLGDQGGEIRKNCRLVN

SEQ ID NO: 48227 - protein, 350 aa, Arabidopsis thaliana
  peptide (1)..(350): Ceres Seq. ID no. 13648879
MANKSLEIRFLFPLVLFLVVKLLCVDGKGFNNNGHKIRKGRWEGKLKMNFYHNSCPGAEDIVRQIVWKKVEANRSLAPKLLRVHYHDCFVRGCDASLLLDSVAGKAVSEKEARPNLSLSGFEIIDEIKYILEKRCPNTVSCADILTLAARDAVSYEFERPLWNVFTGRVDGRVSLATEAARDLPSAGANFTTLQKLFAESDLDVVDLVALSGAHTIGIAHCGVFGRRLLNFTGKGDTDPSLNPSYASFLKSECSDKSLRLNPSAVVGMDPTGPLAFDSGYFVSLLKNKGLFTSDAALLTDPSAAHIASVFQNSGAFLAQFGRSMIKMSSIKVLTLGDQGGEIRKNCRLVN

SEQ ID NO: 48228 - protein, 303 aa, Arabidopsis thaliana
  peptide (1)..(303): Ceres Seq. ID no. 13648880
MNFYHNSCPGAEDIVRQIVWKKVEANRSLAPKLLRVHYHDCFVRGCDASLLLDSVAGKAVSEKEARPNLSLSGFEIIDEIKYILEKRCPNTVSCADILTLAARDAVSYEFERPLWNVFTGRVDGRVSLATEAARDLPSAGANFTTLQKLFAESDLDVVDLVALSGAHTIGIAHCGVFGRRLLNFTGKGDTDPSLNPSYASFLKSECSDKSLRLNPSAVVGMDPTGPLAFDSGYFVSLLKNKGLFTSDAALLTDPSAAHIASVFQNSGAFLAQFGRSMIKMSSIKVLTLGDQGGEIRKNCRLVN

SEQ ID NO: 48229 - DNA, 2485 bp, Arabidopsis thaliana
  misc_feature (1)..(2485): Ceres Seq. ID no. 12671602
  misc_feature (1)..(2485): Ortholog of  Ceres SEQ ID NO 14313674 as cited in SEQ ID NO 59602
acaatttgtgctcttcttcttccgtttcttcttcgccgtcagattcgactgtaactgattcatgagttaaaagagtatgttcgatacttgtggcccaaaaggagtcaaatctcaagtcatcagtggccaacgcgagaactttgtgaggttagatagtatggactcaaggtactcgcaaagttccgaaacgggtctaaacaaatgcacattgaatatacaaggaggacctaaacgttttgctcaaggaagcaaagcatcatctggatcttttaagaaagggtttagaaaaggatcagaggggctttggtctataggtcgatcgattggactcggtgtttcgcgcgctgtgtttccagaagatcttgaagtatcagagaagaagatatttgatccacaagacaagtttcttttactctgcaacaagttgttcgtcgcttcgtgtatactcgcagtatccgttgatcctctcttcttgtatcttcctttcattaatgataaagcgaaatgtgttggtatagatcggaaactggctattatagtaactacaataaggacagttatagattcgttttatctctttcatatggctctacggtttagaacagcttatgttgctccctcgtcacgggtttttggccgcggagagcttgttatagacccggcgcagatagctaagcggtatctgcaacagtatttcatcattgatttactttctgttcttccggttccacagattatagtttggagattcctctatacttcgaggggtgcgaatgtactggcgacaaaacaagcacttagatatatcgttttagttcagtatattccgcggtttcttcgaatgtatcctttaagttcagaactgaagagaactgccggggtattcgctgaaactgcgtgggcgggtgcagcgtactacttgttgctttacatgctcgcaagtcatattgttggggctttgtggtatttgcttgctttagaacgcaataacgactgttggagtaaggcttgccacaataaccagaactgtactagaaacttcttgttttgtggtaaccaaaatatgaaaggttatgctgcttgggacaatattaaagtttcgtatcttcaactaaagtgccctgtcaatgtccccgaagatgaagaacctccttttgattttggaatctacttaagagcactctcctctggcatcgtctcgtctaagaactttgtctctaagtacttcttctgtttgtggtggggactacagaatcttagtacacttggtcaagggcttgaaaccagcacatatcctggagaggttatattctctataacacttgctattgctggacttctactatttgcacttctcattggaaacatgcagacttatcttcaatcgcttaccattcggttagaagaaatgcgagtaaaaagacgtgactcagaacagtggatgcatcatcgaatgcttccaccagaactgcgggaacgggttagacgatatgaccagtacaagtggttggagacgcgtggagttgatgaagagaatcttgttcagaatctcccaaaggatcttagaagagatatcaaacgtcatctctgtctcgcgttagtccgaagagttccattgtttgagaatatggatgagaggctgttagatgcaatctgtgagaggcttaagccatgtctgttcactgagaagtcgtacttggttcgtgagggagatccagtcaacgagatgctcttcattatccgtggtaggctcgaaagtgtaaccactgatggcggtagaagcggattctacaaccggagtttacttaaagaaggagatttctgcggtgacgagcttttgacatgggcgcttgatcccaaatccggttctaacctcccttcctctacaagaaccgtgaaggccttaaccgaagtggaagctttcgctctgatagccgatgagctgaaattcgtggcaagccagttcaggagactccatagcagacaagtacaacacacgttcagattctattcacagcaatggaggacttgggccgcttgcttcatgcaagcagcatggcgacggtacataaagaggaagaaattggagcaacttagaaaagaagaggaagaagaagaagcggcagcagcatcagttatagcaggaggaagtccttatagcataagagcaacgttcttggcttcaaagtttgcggcaaatgcacttcgtagcgttcacaagaaccggaccgcgaaatcaacattgttgttgtcatctactaaagaattggtgaaatttcagaaacctccagaaccagatttctctgctgaagatcactgatccaatatcgcatacgcaagaattctttttctttttaacttgtacacaatctctaagaatgctccaaatttttttgttgttgtttaaacacttactgtaatataaatgattatttgtgatcgttcttaatcttgttattacatagaaatgttttttaagattttc

SEQ ID NO: 48230 - protein, 747 aa, Arabidopsis thaliana
  peptide (1)..(747): Ceres Seq. ID no. 12671603
MFDTCGPKGVKSQVISGQRENFVRLDSMDSRYSQSSETGLNKCTLNIQGGPKRFAQGSKASSGSFKKGFRKGSEGLWSIGRSIGLGVSRAVFPEDLEVSEKKIFDPQDKFLLLCNKLFVASCILAVSVDPLFLYLPFINDKAKCVGIDRKLAIIVTTIRTVIDSFYLFHMALRFRTAYVAPSSRVFGRGELVIDPAQIAKRYLQQYFIIDLLSVLPVPQIIVWRFLYTSRGANVLATKQALRYIVLVQYIPRFLRMYPLSSELKRTAGVFAETAWAGAAYYLLLYMLASHIVGALWYLLALERNNDCWSKACHNNQNCTRNFLFCGNQNMKGYAAWDNIKVSYLQLKCPVNVPEDEEPPFDFGIYLRALSSGIVSSKNFVSKYFFCLWWGLQNLSTLGQGLETSTYPGEVIFSITLAIAGLLLFALLIGNMQTYLQSLTIRLEEMRVKRRDSEQWMHHRMLPPELRERVRRYDQYKWLETRGVDEENLVQNLPKDLRRDIKRHLCLALVRRVPLFENMDERLLDAICERLKPCLFTEKSYLVREGDPVNEMLFIIRGRLESVTTDGGRSGFYNRSLLKEGDFCGDELLTWALDPKSGSNLPSSTRTVKALTEVEAFALIADELKFVASQFRRLHSRQVQHTFRFYSQQWRTWAACFMQAAWRRYIKRKKLEQLRKEEEEEEAAAASVIAGGSPYSIRATFLASKFAANALRSVHKNRTAKSTLLLSSTKELVKFQKPPEPDFSAEDH

SEQ ID NO: 48231 - protein, 720 aa, Arabidopsis thaliana
  peptide (1)..(720): Ceres Seq. ID no. 12671604
MDSRYSQSSETGLNKCTLNIQGGPKRFAQGSKASSGSFKKGFRKGSEGLWSIGRSIGLGVSRAVFPEDLEVSEKKIFDPQDKFLLLCNKLFVASCILAVSVDPLFLYLPFINDKAKCVGIDRKLAIIVTTIRTVIDSFYLFHMALRFRTAYVAPSSRVFGRGELVIDPAQIAKRYLQQYFIIDLLSVLPVPQIIVWRFLYTSRGANVLATKQALRYIVLVQYIPRFLRMYPLSSELKRTAGVFAETAWAGAAYYLLLYMLASHIVGALWYLLALERNNDCWSKACHNNQNCTRNFLFCGNQNMKGYAAWDNIKVSYLQLKCPVNVPEDEEPPFDFGIYLRALSSGIVSSKNFVSKYFFCLWWGLQNLSTLGQGLETSTYPGEVIFSITLAIAGLLLFALLIGNMQTYLQSLTIRLEEMRVKRRDSEQWMHHRMLPPELRERVRRYDQYKWLETRGVDEENLVQNLPKDLRRDIKRHLCLALVRRVPLFENMDERLLDAICERLKPCLFTEKSYLVREGDPVNEMLFIIRGRLESVTTDGGRSGFYNRSLLKEGDFCGDELLTWALDPKSGSNLPSSTRTVKALTEVEAFALIADELKFVASQFRRLHSRQVQHTFRFYSQQWRTWAACFMQAAWRRYIKRKKLEQLRKEEEEEEAAAASVIAGGSPYSIRATFLASKFAANALRSVHKNRTAKSTLLLSSTKELVKFQKPPEPDFSAEDH

SEQ ID NO: 48232 - protein, 578 aa, Arabidopsis thaliana
  peptide (1)..(578): Ceres Seq. ID no. 12671605
MALRFRTAYVAPSSRVFGRGELVIDPAQIAKRYLQQYFIIDLLSVLPVPQIIVWRFLYTSRGANVLATKQALRYIVLVQYIPRFLRMYPLSSELKRTAGVFAETAWAGAAYYLLLYMLASHIVGALWYLLALERNNDCWSKACHNNQNCTRNFLFCGNQNMKGYAAWDNIKVSYLQLKCPVNVPEDEEPPFDFGIYLRALSSGIVSSKNFVSKYFFCLWWGLQNLSTLGQGLETSTYPGEVIFSITLAIAGLLLFALLIGNMQTYLQSLTIRLEEMRVKRRDSEQWMHHRMLPPELRERVRRYDQYKWLETRGVDEENLVQNLPKDLRRDIKRHLCLALVRRVPLFENMDERLLDAICERLKPCLFTEKSYLVREGDPVNEMLFIIRGRLESVTTDGGRSGFYNRSLLKEGDFCGDELLTWALDPKSGSNLPSSTRTVKALTEVEAFALIADELKFVASQFRRLHSRQVQHTFRFYSQQWRTWAACFMQAAWRRYIKRKKLEQLRKEEEEEEAAAASVIAGGSPYSIRATFLASKFAANALRSVHKNRTAKSTLLLSSTKELVKFQKPPEPDFSAEDH

SEQ ID NO: 48233 - DNA, 812 bp, Arabidopsis thaliana
  misc_feature (1)..(812): Ceres Seq. ID no. 13649904
  misc_feature (1)..(812): Ortholog of  Ceres SEQ ID NO 14301944 as cited in SEQ ID NO 0
gaaccatcgtctctatatatgtatcgacgacttcaaaagcttcaagttattctttatcagtaatggaaccaattacttattccaaagatcttccattattcttctcaatcttcatcttcgtttatcttctcggttacttattcattttcaaaaaatggactccggagactcgtcctttagcttccagctgtttaatctccctcctccacggcgtctccgccgtcgtcctcgccacgaacgccttactctccgatcctaaccgtggattctcctccgtcaacacccaatctcaaaactcaattctcgatttcagctccgcttatttcctcgctgatctcgtccaccttgccgtgtttccttctcccgccggcggagactcgcttttcgccgctcatcacctcgccgtgcttttcgttttcctcacctgccgttacatggttgctcacggcgcctgcgctctgctcgcgctgctagtcgtcgcggaggccacgagcgcgtgtcagaacacgtggacgctcgcggatgcgcgtgggaaagacgcgcctctagcggtgagtttgcaccggttcgttacggtgccgttttacgcgtcctatagcgtctgcaggtgcgttctagcgccgttgcttatcgttaagatgacgtggttttacgtcagcggaggcgctgatgacgtcatacccagatgggtttgggtttcgtggaccgttgttattgttactgccgttaccgttagtatcctttggatttggaatttgtgggtactgttttttcaggaaagatattccaaatttaccaaaaaggttaggtaa

SEQ ID NO: 48234 - protein, 269 aa, Arabidopsis thaliana
  peptide (1)..(269): Ceres Seq. ID no. 13649905
TIVSIYVSTTSKASSYSLSVMEPITYSKDLPLFFSIFIFVYLLGYLFIFKKWTPETRPLASSCLISLLHGVSAVVLATNALLSDPNRGFSSVNTQSQNSILDFSSAYFLADLVHLAVFPSPAGGDSLFAAHHLAVLFVFLTCRYMVAHGACALLALLVVAEATSACQNTWTLADARGKDAPLAVSLHRFVTVPFYASYSVCRCVLAPLLIVKMTWFYVSGGADDVIPRWVWVSWTVVIVTAVTVSILWIWNLWVLFFQERYSKFTKKVR

SEQ ID NO: 48235 - protein, 249 aa, Arabidopsis thaliana
  peptide (1)..(249): Ceres Seq. ID no. 13649906
MEPITYSKDLPLFFSIFIFVYLLGYLFIFKKWTPETRPLASSCLISLLHGVSAVVLATNALLSDPNRGFSSVNTQSQNSILDFSSAYFLADLVHLAVFPSPAGGDSLFAAHHLAVLFVFLTCRYMVAHGACALLALLVVAEATSACQNTWTLADARGKDAPLAVSLHRFVTVPFYASYSVCRCVLAPLLIVKMTWFYVSGGADDVIPRWVWVSWTVVIVTAVTVSILWIWNLWVLFFQERYSKFTKKVR

SEQ ID NO: 48236 - DNA, 1284 bp, Arabidopsis thaliana
  misc_feature (1)..(1284): Ceres Seq. ID no. 13593575
  misc_feature (1)..(1284): Ortholog of  Ceres SEQ ID NO 14314620 as cited in SEQ ID NO 56872
atggctaccgagggagttgttccttcagcgcaggatattgctgctgaatttgtgagacagtactatcatgttttaggacagcttcctcatgaagctcgtaggttatatgttgatgctagtgttgtcagcagacctgatgttactggtactatgatgtcttttacttccgttgaggctatcaacaagcatatcctgtcctgtgactttgagaatactaaatttgaggttctgagtgttgactctcagaattctttggaagatgggatttttattatggtgatcggtttcatgactggaaaagacaaccagaggaggaagttttctcagatgttctatcttgctcgtcaaaataccctcgttgttctcaatgacatgttacgatacgttgatcaagaggattcttctaccactgaaactccatgtgagccggtaactgagattgtgagaccagctgatggtctaaagaaggccgagaagactgagctgaaacagaaaaacgttgcttcggtggagaaatctgttaatgctgctgttgaaaagaatgctgctccattggacaacggaaagatgaagcaatctgaaaaagctgttattactcagaaagttacagagccagatgctgctcctcagcccgatggagccaagagatcgtttgctgacatagttggatcaatggcgaaaaacgctgctccgtttcaagttaaatcccctgttcaagccccggttcagaaacctaaatacgtgggacaaccccgtgctgctgcagcacctcaaaaacctgcttacgtcagtaaatctataaagaaaaatgatcagaaggtcattgaagtaccaggcacttcgatatttgttgcaaatctgccattgaatgcaatgccgcctcaactctttgaactgttcaaggattttggtcctatcaaagaaaacgggattcaagtccgaagctccaggggtaatgctaatccagtttgcttcgggtttatctcctttgaaactgttgcctcagtccagagcgtgcttcaggctgccaagaacacgcccttcatgcttgcagaccgtaagcttcgtgtaaaggaaaaagaagttgattatgatggaagcaaaccttctggtaaaaccaaaggtggaagcaacaagacgcagaatggctctgcagatagcagcaagactgagaatggctctgcagatgacagcaagacaaatggctccgcagaagatggcgagaaagaattcaaacaggttaaaagtcgtagaaataggaaaaaaagtgaagccgcacattga

SEQ ID NO: 48237 - protein, 427 aa, Arabidopsis thaliana
  peptide (1)..(427): Ceres Seq. ID no. 13593576
MATEGVVPSAQDIAAEFVRQYYHVLGQLPHEARRLYVDASVVSRPDVTGTMMSFTSVEAINKHILSCDFENTKFEVLSVDSQNSLEDGIFIMVIGFMTGKDNQRRKFSQMFYLARQNTLVVLNDMLRYVDQEDSSTTETPCEPVTEIVRPADGLKKAEKTELKQKNVASVEKSVNAAVEKNAAPLDNGKMKQSEKAVITQKVTEPDAAPQPDGAKRSFADIVGSMAKNAAPFQVKSPVQAPVQKPKYVGQPRAAAAPQKPAYVSKSIKKNDQKVIEVPGTSIFVANLPLNAMPPQLFELFKDFGPIKENGIQVRSSRGNANPVCFGFISFETVASVQSVLQAAKNTPFMLADRKLRVKEKEVDYDGSKPSGKTKGGSNKTQNGSADSSKTENGSADDSKTNGSAEDGEKEFKQVKSRRNRKKSEAAH

SEQ ID NO: 48238 - protein, 377 aa, Arabidopsis thaliana
  peptide (1)..(377): Ceres Seq. ID no. 13593577
MMSFTSVEAINKHILSCDFENTKFEVLSVDSQNSLEDGIFIMVIGFMTGKDNQRRKFSQMFYLARQNTLVVLNDMLRYVDQEDSSTTETPCEPVTEIVRPADGLKKAEKTELKQKNVASVEKSVNAAVEKNAAPLDNGKMKQSEKAVITQKVTEPDAAPQPDGAKRSFADIVGSMAKNAAPFQVKSPVQAPVQKPKYVGQPRAAAAPQKPAYVSKSIKKNDQKVIEVPGTSIFVANLPLNAMPPQLFELFKDFGPIKENGIQVRSSRGNANPVCFGFISFETVASVQSVLQAAKNTPFMLADRKLRVKEKEVDYDGSKPSGKTKGGSNKTQNGSADSSKTENGSADDSKTNGSAEDGEKEFKQVKSRRNRKKSEAAH

SEQ ID NO: 48239 - protein, 376 aa, Arabidopsis thaliana
  peptide (1)..(376): Ceres Seq. ID no. 13593578
MSFTSVEAINKHILSCDFENTKFEVLSVDSQNSLEDGIFIMVIGFMTGKDNQRRKFSQMFYLARQNTLVVLNDMLRYVDQEDSSTTETPCEPVTEIVRPADGLKKAEKTELKQKNVASVEKSVNAAVEKNAAPLDNGKMKQSEKAVITQKVTEPDAAPQPDGAKRSFADIVGSMAKNAAPFQVKSPVQAPVQKPKYVGQPRAAAAPQKPAYVSKSIKKNDQKVIEVPGTSIFVANLPLNAMPPQLFELFKDFGPIKENGIQVRSSRGNANPVCFGFISFETVASVQSVLQAAKNTPFMLADRKLRVKEKEVDYDGSKPSGKTKGGSNKTQNGSADSSKTENGSADDSKTNGSAEDGEKEFKQVKSRRNRKKSEAAH

SEQ ID NO: 48240 - DNA, 1960 bp, Arabidopsis thaliana
  misc_feature (1)..(1960): Ceres Seq. ID no. 13648802
  misc_feature (1)..(1960): Ortholog of  Ceres SEQ ID NO 14314144 as cited in SEQ ID NO 54403
  misc_feature (1)..(1960): Ortholog of  Ceres SEQ ID NO 15169663 as cited in SEQ ID NO 64659
  misc_feature (1)..(1960): Ortholog of  Ceres SEQ ID NO 13656177 as cited in SEQ ID NO 64997
  misc_feature (1)..(1960): Ortholog of  Ceres SEQ ID NO 15225015 as cited in SEQ ID NO 0
gccgcgttatcactcttacgtttctctctctctctcaacttcttccacagcaaatttcttcgattctctgagctctctcccatccttttcaagtggcttcgtttctaaaaaattgattggttgaagaaagtggaaacatggttgaatcggacaagtcatccgttgaagagctgaagaagagggttaggaagagaagccgtgggaagaagaatgagcagcaaaaggctgaagaaaaaacccacactgtagaggaaaacgctgatgaaacgcagaagaagagtgaaaagaaggttaagaaagtgagaggcaaaatcgaggaagaggaagaaaaggtggaagcaatggaagatggtgaagatgagaagaatattgtgattgtcgggaaagggataatgactaatgtgacttttgattccctcgacttatctgagcaaacttctatagctatcaaggagatgggctttcagtacatgactcagattcaagctggatcaattcagccccttttggaggggaaggatgttcttggtgctgccagaactggttctggtaaaactcttgcttttctcattccggctgttgagttgctgtttaaagagcgtttctctcctcgcaacgggactggtgtgattgttatttgccccacaagggaacttgctatccagactaaaaatgtggcggaggagttactcaagcatcattcacagacagtcagcatggttattggtggcaataacagaaggtcggaagcacaacgcattgccagtggttcaaacttggtgatagcaactcctggtcgtcttcttgaccatcttcagaatacaaaggctttcatttataaacacttgaagtgccttgtgatcgatgaagctgataggatactggaagagaattttgaggaagacatgaataagattctaaagattttaccaaagactaggcaaactgcgttattctctgccacccagacctctaaggttaaagatcttgctcgggtgtcattgacatcacctgttcatgtggatgtcgatgatggcagacgcaaggtgacaaatgaaggattggagcaaggctattgtgttgttccgagcaaacaaagacttatccttctaatttcctttttgaaaaagaacctaaataaaaagattatggtatttttctcgacttgcaagtcggtacaattccatacggaaatcatgaaaataagcgacgtggatgtctctgatattcatggaggcatggatcagaacagaagaactaaaacctttttcgacttcatgaaagcaaagaaaggtatcttgttatgtactgatgttgctgctcgtggtctcgatattccttccgtggactggattatacagtatgatccaccagacaagccaacggaatatatccatagggttggtcgaacagcccgtggagaaggagcaaagggaaaggcattacttgtcttgattcctgaagaacttcagtttattcgctacctgaaggctgcgaaagtacctgttaaagagcttgagttcaatgagaagaggcttagtaatgttcaatctgcgctggagaaatgtgttgccaaggactacaatctgaacaagttagccaaagatgcgtacagggcttatctctcagcatacaattcacactctttgaaagacatctttaatgttcaccgacttgacctcctggctgttgctgaatcgttctgcttctcttcgccgcctaaagtgaatctgaacatagaaagtggagctgggaaggtgaggaaggcgagaaagcagcaaggtcgcaatggcttcagtccttacagtccctatggcaagtccacacctacaaaggaggcataaagtgtcatttgtttacaaaattactattttgctccgtagttttgactaattaccaccaccaagttttgtttaaagagtaaacagtgcatttgatttaaatgaaatgttccttggcc

SEQ ID NO: 48241 - protein, 568 aa, Arabidopsis thaliana
  peptide (1)..(568): Ceres Seq. ID no. 13648803
MVESDKSSVEELKKRVRKRSRGKKNEQQKAEEKTHTVEENADETQKKSEKKVKKVRGKIEEEEEKVEAMEDGEDEKNIVIVGKGIMTNVTFDSLDLSEQTSIAIKEMGFQYMTQIQAGSIQPLLEGKDVLGAARTGSGKTLAFLIPAVELLFKERFSPRNGTGVIVICPTRELAIQTKNVAEELLKHHSQTVSMVIGGNNRRSEAQRIASGSNLVIATPGRLLDHLQNTKAFIYKHLKCLVIDEADRILEENFEEDMNKILKILPKTRQTALFSATQTSKVKDLARVSLTSPVHVDVDDGRRKVTNEGLEQGYCVVPSKQRLILLISFLKKNLNKKIMVFFSTCKSVQFHTEIMKISDVDVSDIHGGMDQNRRTKTFFDFMKAKKGILLCTDVAARGLDIPSVDWIIQYDPPDKPTEYIHRVGRTARGEGAKGKALLVLIPEELQFIRYLKAAKVPVKELEFNEKRLSNVQSALEKCVAKDYNLNKLAKDAYRAYLSAYNSHSLKDIFNVHRLDLLAVAESFCFSSPPKVNLNIESGAGKVRKARKQQGRNGFSPYSPYGKSTPTKEA

SEQ ID NO: 48242 - protein, 500 aa, Arabidopsis thaliana
  peptide (1)..(500): Ceres Seq. ID no. 13648804
MEDGEDEKNIVIVGKGIMTNVTFDSLDLSEQTSIAIKEMGFQYMTQIQAGSIQPLLEGKDVLGAARTGSGKTLAFLIPAVELLFKERFSPRNGTGVIVICPTRELAIQTKNVAEELLKHHSQTVSMVIGGNNRRSEAQRIASGSNLVIATPGRLLDHLQNTKAFIYKHLKCLVIDEADRILEENFEEDMNKILKILPKTRQTALFSATQTSKVKDLARVSLTSPVHVDVDDGRRKVTNEGLEQGYCVVPSKQRLILLISFLKKNLNKKIMVFFSTCKSVQFHTEIMKISDVDVSDIHGGMDQNRRTKTFFDFMKAKKGILLCTDVAARGLDIPSVDWIIQYDPPDKPTEYIHRVGRTARGEGAKGKALLVLIPEELQFIRYLKAAKVPVKELEFNEKRLSNVQSALEKCVAKDYNLNKLAKDAYRAYLSAYNSHSLKDIFNVHRLDLLAVAESFCFSSPPKVNLNIESGAGKVRKARKQQGRNGFSPYSPYGKSTPTKEA

SEQ ID NO: 48243 - protein, 483 aa, Arabidopsis thaliana
  peptide (1)..(483): Ceres Seq. ID no. 13648805
MTNVTFDSLDLSEQTSIAIKEMGFQYMTQIQAGSIQPLLEGKDVLGAARTGSGKTLAFLIPAVELLFKERFSPRNGTGVIVICPTRELAIQTKNVAEELLKHHSQTVSMVIGGNNRRSEAQRIASGSNLVIATPGRLLDHLQNTKAFIYKHLKCLVIDEADRILEENFEEDMNKILKILPKTRQTALFSATQTSKVKDLARVSLTSPVHVDVDDGRRKVTNEGLEQGYCVVPSKQRLILLISFLKKNLNKKIMVFFSTCKSVQFHTEIMKISDVDVSDIHGGMDQNRRTKTFFDFMKAKKGILLCTDVAARGLDIPSVDWIIQYDPPDKPTEYIHRVGRTARGEGAKGKALLVLIPEELQFIRYLKAAKVPVKELEFNEKRLSNVQSALEKCVAKDYNLNKLAKDAYRAYLSAYNSHSLKDIFNVHRLDLLAVAESFCFSSPPKVNLNIESGAGKVRKARKQQGRNGFSPYSPYGKSTPTKEA

SEQ ID NO: 48244 - DNA, 997 bp, Arabidopsis thaliana
  misc_feature (1)..(997): Ceres Seq. ID no. 13648935
  misc_feature (1)..(997): Ortholog of  Ceres SEQ ID NO 14313397 as cited in SEQ ID NO 58774
ggttctctactcttgtcgtcgttggaagaagaggaagagagaggacaagagaatcataagaagaagacatagtcatgggagaggtgaaagtagacgacgatgcgattcttaaatccttcctcgccgaggtcggagaagttgagagagataacgaagtcggcaggattctctcatgcttcaagctgaatccgtttgagcatcttaacctctctttcgattcttccacggatgatgttaaaaggcagtacagaaagatttctttgatggttcatcctgataaatgcaaacatccacaagcacaggaggctttcggagcattggcaaaagcgcaacaactgctgctaaacgaccaagaaagagattatattcttacccaagtccatgctgcaaaagaagagcttaagatgaagagaaagaaacagttaaagaaagacaccgcctctaaaataaagtccttggttgatgagggaaagcatgagcacatatatgagcaatctgaggagtttcagaaggagctcaagttaaaggtccgagagatattaacagaccaagagtggcgtagaagaaaaatggcaatgagaatatcagaagaagaggggagactgaagaaggatgaagcagaacaaaaggagatatggaagaaaaagcgtgagcatgaagaacagtgggaaggaacaagagaaaaaagggtatcaagctggagagactttcagaaagcaggaaagaaggccaaaaaaggagagacgcgacctccaaaattgaagacagaggatccgaacaaatcatacgtccaaaggccggtcaagaaaggctgatctctgccttcatttgtttttgctgttgttgacattgatagatattggtcttctcgaggataatctcagactctctcttcttgtgtctgtgtttcttccctttgtacatcaccaacttcattcgtctttccaaatacatcagagacagggaagcgatatctcacttctcacattatgaccct

SEQ ID NO: 48245 - protein, 246 aa, Arabidopsis thaliana
  peptide (1)..(246): Ceres Seq. ID no. 13648936
MGEVKVDDDAILKSFLAEVGEVERDNEVGRILSCFKLNPFEHLNLSFDSSTDDVKRQYRKISLMVHPDKCKHPQAQEAFGALAKAQQLLLNDQERDYILTQVHAAKEELKMKRKKQLKKDTASKIKSLVDEGKHEHIYEQSEEFQKELKLKVREILTDQEWRRRKMAMRISEEEGRLKKDEAEQKEIWKKKREHEEQWEGTREKRVSSWRDFQKAGKKAKKGETRPPKLKTEDPNKSYVQRPVKKG

SEQ ID NO: 48246 - protein, 183 aa, Arabidopsis thaliana
  peptide (1)..(183): Ceres Seq. ID no. 13648937
MVHPDKCKHPQAQEAFGALAKAQQLLLNDQERDYILTQVHAAKEELKMKRKKQLKKDTASKIKSLVDEGKHEHIYEQSEEFQKELKLKVREILTDQEWRRRKMAMRISEEEGRLKKDEAEQKEIWKKKREHEEQWEGTREKRVSSWRDFQKAGKKAKKGETRPPKLKTEDPNKSYVQRPVKKG

SEQ ID NO: 48247 - protein, 136 aa, Arabidopsis thaliana
  peptide (1)..(136): Ceres Seq. ID no. 13648938
MKRKKQLKKDTASKIKSLVDEGKHEHIYEQSEEFQKELKLKVREILTDQEWRRRKMAMRISEEEGRLKKDEAEQKEIWKKKREHEEQWEGTREKRVSSWRDFQKAGKKAKKGETRPPKLKTEDPNKSYVQRPVKKG

SEQ ID NO: 48248 - DNA, 1620 bp, Arabidopsis thaliana
  misc_feature (1)..(1620): Ceres Seq. ID no. 12559488
  misc_feature (1)..(1620): Ortholog of  Ceres SEQ ID NO 14312208 as cited in SEQ ID NO 54845
  misc_feature (1)..(1620): Ortholog of  Ceres SEQ ID NO 15171755 as cited in SEQ ID NO 57047
  misc_feature (1)..(1620): Ortholog of  Ceres SEQ ID NO 13597613 as cited in SEQ ID NO 65334
  misc_feature (1)..(1620): Ortholog of  Ceres SEQ ID NO 14303664 as cited in SEQ ID NO 65892
  misc_feature (1)..(1620): Ortholog of  Ceres SEQ ID NO 15178832 as cited in SEQ ID NO 0
aaacccagaaggatctggaagaagaggaggatccttttcattttttctttcttggataaactctctcctatctttttttttttcttttcttcttctacttttctaatttcttacgacaattctcctcctttcgtacataaaacaaagaaaccctctctttttctcatcttcttcaattttcaaaactcaaaatccttcttcatcgtcgctacatttttctgtgcttctcggtttctgctatcgaacaacaagactcaaaaggtagaaagaatcggacatggaagaagcagttgtaacgaggtattggtgtcatatgtgttctcaaactgtgaatccagtcatggaagctgagatcaaatgtcccttttgtcaaagtgggtttgttgaagaaatggaagatgacgacgatcatgattcttctgatccggctgatgttagagcaaacaactctctttgggcgcctatcttgatggaacttatgaatgatcctgtgcgtcgtaggagaaaccagagtgttgagtctgttgaagataatcaaaacgaggtacagaccgagaacaatgaagacgatggagaaaatgatttggattggcagcttcaagagattctcaggagaaggagaagacattccgctgctgttttgcagttgcttcaggggatacgagcagggttgtctgtagaatctgagagtactggtaatggaggtaataatccgggacgggtgatcttgatcaatacctccaatcagactatcacggttcaaaactctgctgatatggattctgtacctgctggttctttaggtgactatttcattggtcctggatttgaaatgttgcttcaacgtctagctgagaatgatcccaacagatatggaacacctcctgctaaaaaagaagctgtcgaggctttggctactgtgaaaatcgaagagactctgcaatgttcggtttgtttagatgattttgagattggaactgaggcaaagctgatgccctgtacgcacaagtttcatagtgactgcttgttaccatggcttgagcttcacagttcatgcccggtttgcagatatcagttacctgcagatgaagccaagactgattcagtaacaacaacgagcgataacaatggaagcagtagtgcttctgctacaaccagccatggagctgagaacagcgatggaaaccggcgccaagaagaagaagaagaagaagaagaggaggaggaggaggagaacgagaacaatgacggaagcggattctcgatcccgtggccgtttagcaccttgttctcctcgtcgcaagatagcaatgcaccaacggattctagttaagacatgttccctgagcaacataagctttttggtgtgatcatgaaatctcggttctacctaaatctgatcttttgtctgtacataagtttctcagatttggttgaatgctacatctttggaaaacaaatatctttcagtttgtgtttttttaattgtttttgagcaaatcttttgccggattctgtaagtcgcttgtgtgttttttgttgtcaaccaaagccacttttgcaacttagtttgttaaattaatgccttaatggtaaaataacaagattggtggctgtagt

SEQ ID NO: 48249 - protein, 351 aa, Arabidopsis thaliana
  peptide (1)..(351): Ceres Seq. ID no. 12559489
MEEAVVTRYWCHMCSQTVNPVMEAEIKCPFCQSGFVEEMEDDDDHDSSDPADVRANNSLWAPILMELMNDPVRRRRNQSVESVEDNQNEVQTENNEDDGENDLDWQLQEILRRRRRHSAAVLQLLQGIRAGLSVESESTGNGGNNPGRVILINTSNQTITVQNSADMDSVPAGSLGDYFIGPGFEMLLQRLAENDPNRYGTPPAKKEAVEALATVKIEETLQCSVCLDDFEIGTEAKLMPCTHKFHSDCLLPWLELHSSCPVCRYQLPADEAKTDSVTTTSDNNGSSSASATTSHGAENSDGNRRQEEEEEEEEEEEEENENNDGSGFSIPWPFSTLFSSSQDSNAPTDSS

SEQ ID NO: 48250 - protein, 339 aa, Arabidopsis thaliana
  peptide (1)..(339): Ceres Seq. ID no. 12559490
MCSQTVNPVMEAEIKCPFCQSGFVEEMEDDDDHDSSDPADVRANNSLWAPILMELMNDPVRRRRNQSVESVEDNQNEVQTENNEDDGENDLDWQLQEILRRRRRHSAAVLQLLQGIRAGLSVESESTGNGGNNPGRVILINTSNQTITVQNSADMDSVPAGSLGDYFIGPGFEMLLQRLAENDPNRYGTPPAKKEAVEALATVKIEETLQCSVCLDDFEIGTEAKLMPCTHKFHSDCLLPWLELHSSCPVCRYQLPADEAKTDSVTTTSDNNGSSSASATTSHGAENSDGNRRQEEEEEEEEEEEEENENNDGSGFSIPWPFSTLFSSSQDSNAPTDSS

SEQ ID NO: 48251 - protein, 330 aa, Arabidopsis thaliana
  peptide (1)..(330): Ceres Seq. ID no. 12559491
MEAEIKCPFCQSGFVEEMEDDDDHDSSDPADVRANNSLWAPILMELMNDPVRRRRNQSVESVEDNQNEVQTENNEDDGENDLDWQLQEILRRRRRHSAAVLQLLQGIRAGLSVESESTGNGGNNPGRVILINTSNQTITVQNSADMDSVPAGSLGDYFIGPGFEMLLQRLAENDPNRYGTPPAKKEAVEALATVKIEETLQCSVCLDDFEIGTEAKLMPCTHKFHSDCLLPWLELHSSCPVCRYQLPADEAKTDSVTTTSDNNGSSSASATTSHGAENSDGNRRQEEEEEEEEEEEEENENNDGSGFSIPWPFSTLFSSSQDSNAPTDSS

SEQ ID NO: 48252 - DNA, 2152 bp, Arabidopsis thaliana; identical to SEQ ID NO: 45499
  misc_feature (1)..(2152): Ceres Seq. ID no. 13576317
  misc_feature (1)..(2152): Ortholog of  Ceres SEQ ID NO 14312180 as cited in SEQ ID NO 59480

SEQ ID NO: 48253 - protein, 633 aa, Arabidopsis thaliana; identical to SEQ ID NO: 45500
  peptide (1)..(633): Ceres Seq. ID no. 13576318

SEQ ID NO: 48254 - protein, 439 aa, Arabidopsis thaliana; identical to SEQ ID NO: 45501
  peptide (1)..(439): Ceres Seq. ID no. 13576319

SEQ ID NO: 48255 - protein, 398 aa, Arabidopsis thaliana; identical to SEQ ID NO: 45502
  peptide (1)..(398): Ceres Seq. ID no. 13576320

SEQ ID NO: 48256 - DNA, 2106 bp, Arabidopsis thaliana
  misc_feature (1)..(2106): Ceres Seq. ID no. 13649059
  misc_feature (1)..(2106): Ortholog of  Ceres SEQ ID NO 14313943 as cited in SEQ ID NO 54725
  misc_feature (1)..(2106): Ortholog of  Ceres SEQ ID NO 12465428 as cited in SEQ ID NO 68898
gaacactcgacttgtctcataaaccctttgtgtttgtagtctctctactctctagatcccatcccatttcttgatcagcctcgcgcattgtgtgcttacacagcaggtaatttccagagagattttcaacagaggaagcatgttcgctctttccaaggttttacgaagaacgcagagactccgactgggagcttgttctgctgtgttttcaaaagatatacaattaggaggagaaaggagctttgattccaattcgattgcttctactaaacgtgaagctgtgccaagattttacgagatctcctctttgagtaatcgtgctctttcctccagtgctggcactaaaagtgatcaagaggaagacgacctcgaagacggtttctcagaactggaaggttcaaagtctggccaaggttcaactagtagtgatgaagatgagggaaagctctccgctgatgaagaagaagaagaagaactagacctcattgaaaccgacgttagtagaaaaacagttgaaaagaaacaatctgagctatttaagaccattgtctccgcacccggtctgtctataggtagtgctcttgataaatgggtggaagaaggaaatgagatcactcgagttgagattgctaaggcaatgctccagctgcgcaggcgtcgcatgtatggaagagcgttacagatgtcagaatggttggaagcaaataagaaaattgaaatgactgagagagattatgcttctcggttagatctgacagttaagattcgtggtttagaaaagggagaagcttgtatgcagaagatcccaaaatcttttaaaggggaagtgctttaccgtaccctcttggcgaattgtgttgctgctggcaatgtgaagaaatccgaactggtgtttaacaaaatgaaggacttgggattccctctctctggatttacttgtgatcagatgcttctgctccacaagaggatcgacaggaagaaaattgctgatgtactattgctcatggagaaagaaaatatcaagccaagtcttctcacttacaaaatcctgattgatgtcaaaggtgcaacaaatgacataagtggtatggagcaaattctggagacaatgaaagatgaaggtgttgaactggacttccagacgcaagctctcactgctagacactattcgggagctggccttaaagataaagccgagaaagtcttgaaagagatggaaggtgaaagcttagaggcaaatcgccgggcattcaaagatttgctctccatctatgcctctcttgggagagaagatgaagtgaaaagaatatggaagatctgtgaatcaaagccctactttgaggaatcccttgctgcaatccaagcttttggaaagctcaataaagtgcaagaagcagaggcgatttttgagaagattgtgaagatggacagaagagcttcttctagtacttactccgttctcttgagggtttacgtagatcacaagatgctctcaaagggtaaggatctggttaaacgaatggctgagagcggttgcaggatcgaggcaacgacatgggatgcactcatcaagctctatgtggaagctggagaagttgaaaaggctgattctttgctggacaaggcatcaaaacagagccatacaaaactgatgatgaactccttcatgtatatcatggacgagtactcaaaacggggagatgttcataacacagagaagatattcctaaaaatgagggaagctgggtatacatctcggcttaggcagttccaagccctcatgcaggcttacataaacgccaaatctcctgcatatggaatgcgagatagattgaaggcggataatatctttccaaacaaatccatggctgcacagttggctcaaggtgatccatttaagaagacagctatctctgatattctggattgagtagtctctctccctacacttttcttctatctgcttgcaagaagtatctcatttgtcgtcctaacgtttagtttgagagagtaacgttaagtttaagaacctgcttagttgctgtgtttttaatgtttctattcggttctttggtgatcacacttcagagaccttcaagtttcatg

SEQ ID NO: 48257 - protein, 596 aa, Arabidopsis thaliana; identical to SEQ ID NO: 45237
  peptide (1)..(596): Ceres Seq. ID no. 15219578

SEQ ID NO: 48258 - protein, 430 aa, Arabidopsis thaliana; identical to SEQ ID NO: 45238
  peptide (1)..(430): Ceres Seq. ID no. 15219579

SEQ ID NO: 48259 - protein, 422 aa, Arabidopsis thaliana; identical to SEQ ID NO: 45239
  peptide (1)..(422): Ceres Seq. ID no. 15219580

SEQ ID NO: 48260 - DNA, 1393 bp, Arabidopsis thaliana
  misc_feature (1)..(1393): Ceres Seq. ID no. 13648959
  misc_feature (1)..(1393): Ortholog of  Ceres SEQ ID NO 13654989 as cited in SEQ ID NO 63117
  misc_feature (1)..(1393): Ortholog of  Ceres SEQ ID NO 13584744 as cited in SEQ ID NO 69137
ggtgcacacgtttttggtgttgacctacgacaacgacaacgacagacaaaaatttatcatcatacaaaacctttctttggctttatctcattttgttttcttaatatcctctgtttcttcttctaattttctctgtttttattccttctgcttctgagatccataaagattcatctcttattacttcatcggaaaagaaacctcgatttcagttttcttgatctctctaatggggaattgcttggactcttctgcaagagtaggtaatagagaaagcacttttggagggtcatcaagaatttcccgcaaaccgaatcagtcatctcgactctcaagtctcaccataccttcttatagcaacaatagcttcactacttcatcatggtcaaatttgacacctagaagtgaaggagagctcttaccatctccaacactaaaggcctttacattcaacgagctaaaaaccgctactagaaacttcaagccgaatagtatgattggtgaaggcggttttggttgtgtctataagggttggatcggtgaacgctcgttgtcaccttcgaaaccagggtccggtatggttgttgcagtcaagaaacttaaatcagaagggtttcaaggacacaaagagtggttgactgaggttcattatcttgggagacttcatcatatgaatcttgtgaagctaattggatattgcttagagggagagaaaagacttttggtttacgagtacatgcctaaaggaagcctggagaaccatctatttcgaagaggcgcagagccaattccgtggaagactaggatgaaagtagcttttagcgcagcgagaggactatctttcctccacgaagctaaagtcatataccgagacttcaaggcctctaatattctacttgatgtggatttcaatgcaaagctatctgattttgggttggcaaaagctggaccaacaggagatagaacgcatgtgacaactcaagtgataggcacacaagggtacgcagctccggaatacatagcaaccggccggttaacctccaagagtgatgtctatagctttggagtggtgttgctcgaactactctcgggtcgtcccaccctagacaaatcgaaagtaggagtggaacgtaacctggtggattgggcaataccttatttggtggacagaagaaaagtgtttagaataatggacacaaagcttggaggacagtaccctcacaaaggggcttgtgcagctgccaacatcgcattgcggtgtctcaataccgaacctaagctcagaccggatatggctgatgtcttatccactttacaacagcttgagacttcttcaaaaaagatgggttctactcaaaatatagtcatgtctccttcatctcatatgtcgtag

SEQ ID NO: 48261 - protein, 387 aa, Arabidopsis thaliana
  peptide (1)..(387): Ceres Seq. ID no. 15219575
MGNCLDSSARVGNRESTFGGSSRISRKPNQSSRLSSLTIPSYSNNSFTTSSWSNLTPRSEGELLPSPTLKAFTFNELKTATRNFKPNSMIGEGGFGCVYKGWIGERSLSPSKPGSGMVVAVKKLKSEGFQGHKEWLTEVHYLGRLHHMNLVKLIGYCLEGEKRLLVYEYMPKGSLENHLFRRGAEPIPWKTRMKVAFSAARGLSFLHEAKVIYRDFKASNILLDVDFNAKLSDFGLAKAGPTGDRTHVTTQVIGTQGYAAPEYIATGRLTSKSDVYSFGVVLLELLSGRPTLDKSKVGVERNLVDWAIPYLVDRRKVFRIMDTKLGGQYPHKGACAAANIALRCLNTEPKLRPDMADVLSTLQQLETSSKKMGSTQNIVMSPSSHMS

SEQ ID NO: 48262 - protein, 299 aa, Arabidopsis thaliana
  peptide (1)..(299): Ceres Seq. ID no. 15219576
MIGEGGFGCVYKGWIGERSLSPSKPGSGMVVAVKKLKSEGFQGHKEWLTEVHYLGRLHHMNLVKLIGYCLEGEKRLLVYEYMPKGSLENHLFRRGAEPIPWKTRMKVAFSAARGLSFLHEAKVIYRDFKASNILLDVDFNAKLSDFGLAKAGPTGDRTHVTTQVIGTQGYAAPEYIATGRLTSKSDVYSFGVVLLELLSGRPTLDKSKVGVERNLVDWAIPYLVDRRKVFRIMDTKLGGQYPHKGACAAANIALRCLNTEPKLRPDMADVLSTLQQLETSSKKMGSTQNIVMSPSSHMS

SEQ ID NO: 48263 - protein, 271 aa, Arabidopsis thaliana
  peptide (1)..(271): Ceres Seq. ID no. 15219577
MVVAVKKLKSEGFQGHKEWLTEVHYLGRLHHMNLVKLIGYCLEGEKRLLVYEYMPKGSLENHLFRRGAEPIPWKTRMKVAFSAARGLSFLHEAKVIYRDFKASNILLDVDFNAKLSDFGLAKAGPTGDRTHVTTQVIGTQGYAAPEYIATGRLTSKSDVYSFGVVLLELLSGRPTLDKSKVGVERNLVDWAIPYLVDRRKVFRIMDTKLGGQYPHKGACAAANIALRCLNTEPKLRPDMADVLSTLQQLETSSKKMGSTQNIVMSPSSHMS

SEQ ID NO: 48264 - DNA, 1212 bp, Arabidopsis thaliana
  misc_feature (1)..(1212): Ceres Seq. ID no. 12670076
  misc_feature (1)..(1212): Ortholog of  Ceres SEQ ID NO 13594727 as cited in SEQ ID NO 52169
  misc_feature (1)..(1212): Ortholog of  Ceres SEQ ID NO 14310369 as cited in SEQ ID NO 54765
  misc_feature (1)..(1212): Ortholog of  Ceres SEQ ID NO 15175700 as cited in SEQ ID NO 58584
  misc_feature (1)..(1212): Ortholog of  Ceres SEQ ID NO 14314050 as cited in SEQ ID NO 59952
  misc_feature (1)..(1212): Ortholog of  Ceres SEQ ID NO 13596474 as cited in SEQ ID NO 62169
  misc_feature (1)..(1212): Ortholog of  Ceres SEQ ID NO 13598714 as cited in SEQ ID NO 62656
  misc_feature (1)..(1212): Ortholog of  Ceres SEQ ID NO 13596969 as cited in SEQ ID NO 63375
  misc_feature (1)..(1212): Ortholog of  Ceres SEQ ID NO 14302434 as cited in SEQ ID NO 63410
  misc_feature (1)..(1212): Ortholog of  Ceres SEQ ID NO 13597519 as cited in SEQ ID NO 64759
  misc_feature (1)..(1212): Ortholog of  Ceres SEQ ID NO 14302388 as cited in SEQ ID NO 65655
  misc_feature (1)..(1212): Ortholog of  Ceres SEQ ID NO 15170183 as cited in SEQ ID NO 65667
  misc_feature (1)..(1212): Ortholog of  Ceres SEQ ID NO 13587054 as cited in SEQ ID NO 0
atcactcaccacaaagtcttctcatttcctcatcttcttgttgaaagtaatggcaagactcacgagctttctccttcttctttctctcatctgctttgtccctctctgtctctgcgacaagagctatggaggcaaacttttcccgggttattacgcccattcatgcccacaagtcaatgagatcgtgagatcagttgtagctaaagctgttgctagagagacacgtatggctgcttccttgttgagacttcatttccacgactgtttcgttcagggttgtgatggctctttgcttctagacagcagtggaagggtagcgactgagaaaaactcaaaccctaacagcaaatcagctcgtgggtttgacgtagttgaccaaatcaaagctgaactggagaaacaatgccctggaactgtttcttgcgctgatgttcttaccctagccgctagagactcctctgttcttaccggtggaccaagttgggttgttccattgggaagaagagattcaagaagtgcaagcttgagtcaatcgaacaacaacatccctgcaccaaacaacactttccagaccattctatctaagtttaaccgtcaaggacttgatatcactgaccttgtcgctctctccggtagtcacacaatcggattctcgagatgcacgagtttcagacagaggttgtacaaccagtccggaaacggcagtccagacatgacattggaacaatccttcgctgctaacttgcgccaacggtgtccaaaatccggtggggaccagattctctcggtgctagacatcatcagcgccgcgagcttcgacaacagctacttcaagaacttgatagagaacaaggggttgttgaactcggaccaagttctgttcagcagtaacgagaaatcgagagagcttgtgaagaagtatgcagaagatcaaggagagttttttgagcaatttgcggaatcgatgatcaagatgggaaatatctctcccttgacaggttctagtggcgaaatcaggaagaattgcaggaagattaactcttgattgaaacaagaaaactcttcttatatcttgtggaacaaatgtgagacatttacttttactttggagtgtgttttgtttgtttttttcaattctgtcatttggaagttttatttcgtgttatttgcgttgtgttaagacataagtttgaaatttataaaacttgtacg

SEQ ID NO: 48265 - protein, 347 aa, Arabidopsis thaliana
  peptide (1)..(347): Ceres Seq. ID no. 12670077
SLTTKSSHFLIFLLKVMARLTSFLLLLSLICFVPLCLCDKSYGGKLFPGYYAHSCPQVNEIVRSVVAKAVARETRMAASLLRLHFHDCFVQGCDGSLLLDSSGRVATEKNSNPNSKSARGFDVVDQIKAELEKQCPGTVSCADVLTLAARDSSVLTGGPSWVVPLGRRDSRSASLSQSNNNIPAPNNTFQTILSKFNRQGLDITDLVALSGSHTIGFSRCTSFRQRLYNQSGNGSPDMTLEQSFAANLRQRCPKSGGDQILSVLDIISAASFDNSYFKNLIENKGLLNSDQVLFSSNEKSRELVKKYAEDQGEFFEQFAESMIKMGNISPLTGSSGEIRKNCRKINS

SEQ ID NO: 48266 - protein, 331 aa, Arabidopsis thaliana
  peptide (1)..(331): Ceres Seq. ID no. 12670078
MARLTSFLLLLSLICFVPLCLCDKSYGGKLFPGYYAHSCPQVNEIVRSVVAKAVARETRMAASLLRLHFHDCFVQGCDGSLLLDSSGRVATEKNSNPNSKSARGFDVVDQIKAELEKQCPGTVSCADVLTLAARDSSVLTGGPSWVVPLGRRDSRSASLSQSNNNIPAPNNTFQTILSKFNRQGLDITDLVALSGSHTIGFSRCTSFRQRLYNQSGNGSPDMTLEQSFAANLRQRCPKSGGDQILSVLDIISAASFDNSYFKNLIENKGLLNSDQVLFSSNEKSRELVKKYAEDQGEFFEQFAESMIKMGNISPLTGSSGEIRKNCRKINS

SEQ ID NO: 48267 - protein, 272 aa, Arabidopsis thaliana
  peptide (1)..(272): Ceres Seq. ID no. 12670079
MAASLLRLHFHDCFVQGCDGSLLLDSSGRVATEKNSNPNSKSARGFDVVDQIKAELEKQCPGTVSCADVLTLAARDSSVLTGGPSWVVPLGRRDSRSASLSQSNNNIPAPNNTFQTILSKFNRQGLDITDLVALSGSHTIGFSRCTSFRQRLYNQSGNGSPDMTLEQSFAANLRQRCPKSGGDQILSVLDIISAASFDNSYFKNLIENKGLLNSDQVLFSSNEKSRELVKKYAEDQGEFFEQFAESMIKMGNISPLTGSSGEIRKNCRKINS

SEQ ID NO: 48268 - DNA, 1037 bp, Arabidopsis thaliana
  misc_feature (1)..(1037): Ceres Seq. ID no. 13649313
  misc_feature (1)..(1037): Ortholog of  Ceres SEQ ID NO 13595569 as cited in SEQ ID NO 56778
  misc_feature (1)..(1037): Ortholog of  Ceres SEQ ID NO 12611159 as cited in SEQ ID NO 59821
gacaggaactctcttccttgcaaaaaaaataaaacactatttcctccaaatacacgtagagagatacatatatacatatagagatcaacaaagatgggaagatcaccatgctgcgagaaagctcacatgaacaaaggagcttggactaaagaagaagatcagcttcttgttgattacatccgtaaacacggtgaaggttgctggcgatctctccctcgcgccgctggattacaaagatgtggtaagagttgtagattgagatggatgaattatctaagaccagatctcaaaagaggcaattttactgaagaagaagatgaactcatcatcaagctccatagcttgctcggtaacaaatggtctttaatagctgggagattaccaggaagaacagataacgagatcaagaactattggaacactcatatcaagaggaagcttctcagccgtgggattgatccaaactctcaccgtctgatcaacgaatccgtcgtgtctccgtcgtctcttcaaaacgatgtcgttgagactatacatcttgatttctctggaccggttaaaccggaaccggtgcgtgaagagattggtatggttaataattgtgagagtagtggaacgacgtcggagaaggattatgggaacgaggaagattgggtgttgaatttggaactctctgttggaccgagttatcggtacgagtcgactcggaaagtgagtgttgttgactcggctgagtcgactcgacggtggggttccgagttgtttggagctcatgagagtgatgcggtgtgtttgtgttgtcggattgggttgtttcgtaatgagtcgtgtcggaattgtcgggtttctgatgttagaactcattagagagtcaatcgagaattctttaggaatctttttatatatttagatcgtcaattgtgttttttttttgttcacatttgttatgtaacatcaagtaagaaactagcataattatttgatggcaaagccaaaagattgtgctcaaagaaatttataaaaacaacaattagggc

SEQ ID NO: 48269 - protein, 257 aa, Arabidopsis thaliana
  peptide (1)..(257): Ceres Seq. ID no. 15219587
MGRSPCCEKAHMNKGAWTKEEDQLLVDYIRKHGEGCWRSLPRAAGLQRCGKSCRLRWMNYLRPDLKRGNFTEEEDELIIKLHSLLGNKWSLIAGRLPGRTDNEIKNYWNTHIKRKLLSRGIDPNSHRLINESVVSPSSLQNDVVETIHLDFSGPVKPEPVREEIGMVNNCESSGTTSEKDYGNEEDWVLNLELSVGPSYRYESTRKVSVVDSAESTRRWGSELFGAHESDAVCLCCRIGLFRNESCRNCRVSDVRTH

SEQ ID NO: 48270 - protein, 246 aa, Arabidopsis thaliana
  peptide (1)..(246): Ceres Seq. ID no. 15219588
MNKGAWTKEEDQLLVDYIRKHGEGCWRSLPRAAGLQRCGKSCRLRWMNYLRPDLKRGNFTEEEDELIIKLHSLLGNKWSLIAGRLPGRTDNEIKNYWNTHIKRKLLSRGIDPNSHRLINESVVSPSSLQNDVVETIHLDFSGPVKPEPVREEIGMVNNCESSGTTSEKDYGNEEDWVLNLELSVGPSYRYESTRKVSVVDSAESTRRWGSELFGAHESDAVCLCCRIGLFRNESCRNCRVSDVRTH

SEQ ID NO: 48271 - protein, 200 aa, Arabidopsis thaliana
  peptide (1)..(200): Ceres Seq. ID no. 15219589
MNYLRPDLKRGNFTEEEDELIIKLHSLLGNKWSLIAGRLPGRTDNEIKNYWNTHIKRKLLSRGIDPNSHRLINESVVSPSSLQNDVVETIHLDFSGPVKPEPVREEIGMVNNCESSGTTSEKDYGNEEDWVLNLELSVGPSYRYESTRKVSVVDSAESTRRWGSELFGAHESDAVCLCCRIGLFRNESCRNCRVSDVRTH

SEQ ID NO: 48272 - DNA, 1871 bp, Arabidopsis thaliana
  misc_feature (1)..(1871): Ceres Seq. ID no. 13578936
  misc_feature (1)..(1871): Ortholog of  Ceres SEQ ID NO 14312423 as cited in SEQ ID NO 55259
gatccaataaaagttgtgaaaaaaagccgcaaagggtcgttgttgtttgtcgcctctcaatggcagcttcttcaactaatgctcgtctcaccaaccctcctcgtctactctccaaaccccgactttcacctacctccgtcgccaatctccgttttccagccgccgatttctccactcgcttctttgccgattcttcgtccccgcggctaaggagtgtaccgtttccggtggtattttccgatcaaaggcgccggcgaagcatggaacctagcaatgtctatgtggcttcaaattccacggaaatggagatcggaagtcatgatatcgtgaagaatccgagcttgatctgtgctccagtgatggcggattcaatagacaagatggtgattgaaacgagtaaagcccatgaattgggtgcagacttggttgaaattcgattagattggctaaaggacttcaatcctcttgaggatctaaaaaccattattaagaaatctcctctacccactttattcacctacagaccaaaatgggaaggtggtcagtatgaaggtgatgaaaatgagagacgggatgtgcttcgtctggccatggagttgggagctgattatattgatgttgaacttcaggtggcaagtgagttcatcaaatctattgacggaaagaagcctggaaagttcaaagtaattgtttcatcgcacaactatcagaataccccttctgttgaggaccttgatggccttgttgcaagaatacaacagactggagccgacattgttaagattgctactactgctgtggacattgcagatgttgctcgcatgttccatataacctcaaaagctcaagttcccacaattggacttgttatgggtgaaagaggtttgatgtctcggattctttgttcgaaatttggtggttatttgacctttggcaccttagattctagtaaagtttctgcgccaggtcaaccaacgatcaaggatctgttggatctttacaactttagaagaattggtcctgacacaaaggtatatggaattattggcaagcctgtcagccacagcaaatcacctattgttcacaatcaagctttcaaatcagttgattttaatggagtatatgtccacctgttagttgataatcttgtaagctttcttcaagcatactcatcctctgatttcgctggattcagctgtacaattccgcacaaagaagctgcattgcaatgttgtgatgaagttgatccattggcaaagtctataggagctgtgaacactatactaaggagaaaaagtgacggaaagttgttgggttacaacacagattgtattggttccatttctgctattgaggatggcctacgaagttcaggtgatccaagcagtgtaccttcttcttcttcgccattggccagtaaaacagtggtggttattggtgctggtggagcaggcaaggctcttgcttatggtgcaaaagaaaagggggccaaagttgtaattgctaatcgaacttacgaacgagcactagaactcgcagaagcaataggaggcaaagcgttatctctgacagatttagataactatcacccagaagatggcatggttttggcaaacacaacatctatgggtatgcaaccaaatgttgaggagactccaatttctaaggatgcattgaagcactatgcactggtctttgatgcggtatacactccgagaatcaccagactgttgagggaagcagaagaaagtggagccataactgtctcagggtcagagatgtttgtcaggcaggcttacgagcagtttgagatcttcaccggtttacccgctccaaaggaactctactggcaaataatgtcaaagtactga

SEQ ID NO: 48273 - protein, 622 aa, Arabidopsis thaliana
  peptide (1)..(622): Ceres Seq. ID no. 13578937
SNKSCEKKPQRVVVVCRLSMAASSTNARLTNPPRLLSKPRLSPTSVANLRFPAADFSTRFFADSSSPRLRSVPFPVVFSDQRRRRSMEPSNVYVASNSTEMEIGSHDIVKNPSLICAPVMADSIDKMVIETSKAHELGADLVEIRLDWLKDFNPLEDLKTIIKKSPLPTLFTYRPKWEGGQYEGDENERRDVLRLAMELGADYIDVELQVASEFIKSIDGKKPGKFKVIVSSHNYQNTPSVEDLDGLVARIQQTGADIVKIATTAVDIADVARMFHITSKAQVPTIGLVMGERGLMSRILCSKFGGYLTFGTLDSSKVSAPGQPTIKDLLDLYNFRRIGPDTKVYGIIGKPVSHSKSPIVHNQAFKSVDFNGVYVHLLVDNLVSFLQAYSSSDFAGFSCTIPHKEAALQCCDEVDPLAKSIGAVNTILRRKSDGKLLGYNTDCIGSISAIEDGLRSSGDPSSVPSSSSPLASKTVVVIGAGGAGKALAYGAKEKGAKVVIANRTYERALELAEAIGGKALSLTDLDNYHPEDGMVLANTTSMGMQPNVEETPISKDALKHYALVFDAVYTPRITRLLREAEESGAITVSGSEMFVRQAYEQFEIFTGLPAPKELYWQIMSKY

SEQ ID NO: 48274 - protein, 603 aa, Arabidopsis thaliana
  peptide (1)..(603): Ceres Seq. ID no. 13578938
MAASSTNARLTNPPRLLSKPRLSPTSVANLRFPAADFSTRFFADSSSPRLRSVPFPVVFSDQRRRRSMEPSNVYVASNSTEMEIGSHDIVKNPSLICAPVMADSIDKMVIETSKAHELGADLVEIRLDWLKDFNPLEDLKTIIKKSPLPTLFTYRPKWEGGQYEGDENERRDVLRLAMELGADYIDVELQVASEFIKSIDGKKPGKFKVIVSSHNYQNTPSVEDLDGLVARIQQTGADIVKIATTAVDIADVARMFHITSKAQVPTIGLVMGERGLMSRILCSKFGGYLTFGTLDSSKVSAPGQPTIKDLLDLYNFRRIGPDTKVYGIIGKPVSHSKSPIVHNQAFKSVDFNGVYVHLLVDNLVSFLQAYSSSDFAGFSCTIPHKEAALQCCDEVDPLAKSIGAVNTILRRKSDGKLLGYNTDCIGSISAIEDGLRSSGDPSSVPSSSSPLASKTVVVIGAGGAGKALAYGAKEKGAKVVIANRTYERALELAEAIGGKALSLTDLDNYHPEDGMVLANTTSMGMQPNVEETPISKDALKHYALVFDAVYTPRITRLLREAEESGAITVSGSEMFVRQAYEQFEIFTGLPAPKELYWQIMSKY

SEQ ID NO: 48275 - protein, 536 aa, Arabidopsis thaliana
  peptide (1)..(536): Ceres Seq. ID no. 13578939
MEPSNVYVASNSTEMEIGSHDIVKNPSLICAPVMADSIDKMVIETSKAHELGADLVEIRLDWLKDFNPLEDLKTIIKKSPLPTLFTYRPKWEGGQYEGDENERRDVLRLAMELGADYIDVELQVASEFIKSIDGKKPGKFKVIVSSHNYQNTPSVEDLDGLVARIQQTGADIVKIATTAVDIADVARMFHITSKAQVPTIGLVMGERGLMSRILCSKFGGYLTFGTLDSSKVSAPGQPTIKDLLDLYNFRRIGPDTKVYGIIGKPVSHSKSPIVHNQAFKSVDFNGVYVHLLVDNLVSFLQAYSSSDFAGFSCTIPHKEAALQCCDEVDPLAKSIGAVNTILRRKSDGKLLGYNTDCIGSISAIEDGLRSSGDPSSVPSSSSPLASKTVVVIGAGGAGKALAYGAKEKGAKVVIANRTYERALELAEAIGGKALSLTDLDNYHPEDGMVLANTTSMGMQPNVEETPISKDALKHYALVFDAVYTPRITRLLREAEESGAITVSGSEMFVRQAYEQFEIFTGLPAPKELYWQIMSKY

SEQ ID NO: 48276 - DNA, 1523 bp, Arabidopsis thaliana
  misc_feature (1)..(1523): Ceres Seq. ID no. 13649922
  misc_feature (1)..(1523): Ortholog of  Ceres SEQ ID NO 13596392 as cited in SEQ ID NO 62136
  misc_feature (1)..(1523): Ortholog of  Ceres SEQ ID NO 13654360 as cited in SEQ ID NO 67980
  misc_feature (1)..(1523): Ortholog of  Ceres SEQ ID NO 13596394 as cited in SEQ ID NO 68561
gacgagccgcacgtgtgctttccttttttctccttccccgttctctagccgattctctctgtctagggctcctccgtcttcttcttctcataccttcacataccacaaaacctctcttctctctctattgattctctacgaagaggaaagtgattttgaaccatcttgatcggaaacggcgtttcgaaactggaggtcgaagacgaaaaaaactcttatctcatcgctccggtgtaccgaattcgagaggtttttgttaggtttcgtagtgattgattgattttgatggaagatagtgtggtggatgatgttataaagaggttactaggagcgaaaaacgggaagacgacgaagcaggttcagttgacggaggctgagattaaacatctttgttctaccgctaagcagatctttctcactcaacctaatcttcttgaactcgaggctcctattaagatttgtggagatactcatggtcagttctcagatcttttgagattgttcgagtatggtggctacccaccagctgcaaactatttgtttcttggggattatgtagatcgtggaaagcagagtgtagagaccatatgccttcttcttgcctacaagatcaaatacaaagagaatttctttcttctacgtgggaaccatgagtgtgcttctataaaccgtatatacggattctatgacgagtgcaagaagagatatagcgttcgagtgtggaagatatttactgactgctttaattgtctacctgttgctgctcttattgatgaaaagatcctctgtatgcatggtgggctatcgcctgagttgaagcacttggatgagatcaggaacattcctcgtcctgctgacattcctgatcatggactactgtgtgatctgttgtggtctgatcctgacaaagacattgaaggatggggagagaatgacaggggtgtctcgtacacttttggggctgataaagtcgaggagtttcttcaaacgcatgaccttgacttaatttgtagagctcatcaggttgtggaagacgggtatgaattctttgcaaatagacagctagtaacgatattctcggccccaaactactgcggagagtttgataacgcaggagcaatgatgagtgtggatgattccttgacgtgctcatttcagatccttaaagcatctgagaagaaaggaaacttcgggtttggcaaaaatgcaggaaggcgaggaaccccgcctcgcaagggtggtggaaaaggctgaagacaaatcccataaactctgttttgtgtattccatgtttcttggttcaagacacttgcttgatcagctgaacttatcaaactgtcttcttcttcttcttcctctgctctggatcactttggcaaggggtacttctgtcttttcccttgactactctggatcacttggtgtctttgacctctgtgaatctgagatattattctctgtgagatacactttatgtcgttttttgttaaaacatttaaatgaaaatcataatgttcctcgtc

SEQ ID NO: 48277 - protein, 322 aa, Arabidopsis thaliana
  peptide (1)..(322): Ceres Seq. ID no. 13649923
MEDSVVDDVIKRLLGAKNGKTTKQVQLTEAEIKHLCSTAKQIFLTQPNLLELEAPIKICGDTHGQFSDLLRLFEYGGYPPAANYLFLGDYVDRGKQSVETICLLLAYKIKYKENFFLLRGNHECASINRIYGFYDECKKRYSVRVWKIFTDCFNCLPVAALIDEKILCMHGGLSPELKHLDEIRNIPRPADIPDHGLLCDLLWSDPDKDIEGWGENDRGVSYTFGADKVEEFLQTHDLDLICRAHQVVEDGYEFFANRQLVTIFSAPNYCGEFDNAGAMMSVDDSLTCSFQILKASEKKGNFGFGKNAGRRGTPPRKGGGKG

SEQ ID NO: 48278 - DNA, 1020 bp, Arabidopsis thaliana
  misc_feature (1)..(1020): Ceres Seq. ID no. 13649924
  misc_feature (1)..(1020): Ortholog of  Ceres SEQ ID NO 14312572 as cited in SEQ ID NO 55151
accacgtcgtgaaaatccgatctacgtctctgtctctctccaatctctctgcgccacagaattgtgcgatttacgaaaatctctgaaacctccgatcgttaacggcgaccgccgattttcccggtaaaaatgaacgacggagatgtatcgaggcagatccagcagatggtgagatttatccgccaagaagcggaagagaaagcaaacgagatctcggtttctgctgaagaagaattcaacattgagaaactccagcttgttgaggcggagaagaagaagatcaggcaagattatgagaagaaggagaagcaagctgatgttcgcaagaagattgattactctatgcagctaaatgcatcaaggatcaaagttcttcaagcgcaagacgatattgtcaatgccatgaaagaccaagcagctaaggatcttctgaacgttagtcgcgatgagtatgcctacaaacagctcctcaaggatctaattgttcagtgtttgcttcggttgaaagaaccttctgtgttgttgcgttgtcgtgaagaggacttgggtttagtggaagctgtacttgatgacgcaaaggaggaatatgctggtaaagcaaaggttcatgccccagaggttgctgttgacacaaaaatattccttccccctcctcctaaatctaatgatcctcatggtctccactgctctggaggtgttgtgttagcttctcgtgatgggaaaatcgtgtgcgagaacacacttgatgcgcgtcttgatgtggcattccgtatgaaactcccagtgatccgtaagtcgttgttcggccaagttactgcctgatgaaagaaaggaaaagagaaaagagattattcaaaccggtttgcgtttggttatttacctattttgggagagatttctctttgttgtgattctttgtattttgcaaaatcttactttggtgccaaacccatcgaacgcttctttttttcgaattcctttttttcattcctcctcgaatgtgtgttatcatggctatac

SEQ ID NO: 48279 - protein, 230 aa, Arabidopsis thaliana; identical to SEQ ID NO: 47290
  peptide (1)..(230): Ceres Seq. ID no. 13649925

SEQ ID NO: 48280 - protein, 218 aa, Arabidopsis thaliana; identical to SEQ ID NO: 47291
  peptide (1)..(218): Ceres Seq. ID no. 13649926

SEQ ID NO: 48281 - protein, 159 aa, Arabidopsis thaliana; identical to SEQ ID NO: 47292
  peptide (1)..(159): Ceres Seq. ID no. 13649927

SEQ ID NO: 48282 - DNA, 1108 bp, Arabidopsis thaliana
  misc_feature (1)..(1108): Ceres Seq. ID no. 13649928
  misc_feature (1)..(1108): Ortholog of  Ceres SEQ ID NO 15168413 as cited in SEQ ID NO 59281
gataatgcagtgaagggacgacgatgattctgataacctcaccgacgttgacatatctccgtcaccgtctccacagttcccaaatcaaatcgccacaaattcgccgccattttcttcggagtagagaaatctccacagtcgatcgctgctacaatccatggcagtctacgaatcgtttcaaattacgaacacgagacagttccttcttatgctgtgctcgccggaaaccggagacggcgacggtagaggttgaagatgattctataaggagaattgttcggtatcttctatggactagtgaagctgtgtatatactatggctctttcttctcccttacgctcctggagatccagtttgggcaattagttcagagacagtgaattctcttttgggactttctctgaatttcttctttgtcttgcctcttacaaacgccgctggtattcacttcttacaagctcctgttcttcacccgatggctgaagggttattcaactttgtaatagcttggacactcatgtttgctccattgctatacacagaccgaaagagaaatcgatacaaaagctctcttgacgtcttatggagtctcatgatgttccttacaaacacgtttctaatcccatacatggctttacggctcaatgacgctgacccagatgataaaccaagcaaaaggtctcaacttggtgaagtgatgaccaaaggtgcaccaatagttggtctgaccggagctacggtgtgtctgatatcagcattgtggtctctctacggtcgagcagatggtgatttcggtggaatcatggacagatggcagtatctgattggttatttgggatcggagagactagcttacgcgtttatatgggatatatgtctgtacacaatctttcagccatggttgattggagagaacctgcaaaatgtgaagaagaacaagattgaattggtgaagtatctaaggtttgttcctgtttttggtttacttgcatatcatttgtttctcaatctcgaagatgaatcaatttaatttgttagtatacacacatattgtcgttgtacttataacaaatgtaattatattatggaaattttgttatgtcattt

SEQ ID NO: 48283 - protein, 335 aa, Arabidopsis thaliana
  peptide (1)..(335): Ceres Seq. ID no. 13649929
MILITSPTLTYLRHRLHSSQIKSPQIRRHFLRSREISTVDRCYNPWQSTNRFKLRTRDSSFLCCARRKPETATVEVEDDSIRRIVRYLLWTSEAVYILWLFLLPYAPGDPVWAISSETVNSLLGLSLNFFFVLPLTNAAGIHFLQAPVLHPMAEGLFNFVIAWTLMFAPLLYTDRKRNRYKSSLDVLWSLMMFLTNTFLIPYMALRLNDADPDDKPSKRSQLGEVMTKGAPIVGLTGATVCLISALWSLYGRADGDFGGIMDRWQYLIGYLGSERLAYAFIWDICLYTIFQPWLIGENLQNVKKNKIELVKYLRFVPVFGLLAYHLFLNLEDESI

SEQ ID NO: 48284 - protein, 184 aa, Arabidopsis thaliana
  peptide (1)..(184): Ceres Seq. ID no. 13649930
MAEGLFNFVIAWTLMFAPLLYTDRKRNRYKSSLDVLWSLMMFLTNTFLIPYMALRLNDADPDDKPSKRSQLGEVMTKGAPIVGLTGATVCLISALWSLYGRADGDFGGIMDRWQYLIGYLGSERLAYAFIWDICLYTIFQPWLIGENLQNVKKNKIELVKYLRFVPVFGLLAYHLFLNLEDESI

SEQ ID NO: 48285 - protein, 170 aa, Arabidopsis thaliana
  peptide (1)..(170): Ceres Seq. ID no. 13649931
MFAPLLYTDRKRNRYKSSLDVLWSLMMFLTNTFLIPYMALRLNDADPDDKPSKRSQLGEVMTKGAPIVGLTGATVCLISALWSLYGRADGDFGGIMDRWQYLIGYLGSERLAYAFIWDICLYTIFQPWLIGENLQNVKKNKIELVKYLRFVPVFGLLAYHLFLNLEDESI

SEQ ID NO: 48286 - DNA, 1829 bp, Arabidopsis thaliana; identical to SEQ ID NO: 45969
  misc_feature (1)..(1829): Ceres Seq. ID no. 13576075
  misc_feature (1)..(1829): Ortholog of  Ceres SEQ ID NO 14313559 as cited in SEQ ID NO 62852

SEQ ID NO: 48287 - protein, 537 aa, Arabidopsis thaliana; identical to SEQ ID NO: 45970
  peptide (1)..(537): Ceres Seq. ID no. 13576076

SEQ ID NO: 48288 - protein, 476 aa, Arabidopsis thaliana; identical to SEQ ID NO: 45971
  peptide (1)..(476): Ceres Seq. ID no. 13576077

SEQ ID NO: 48289 - protein, 424 aa, Arabidopsis thaliana; identical to SEQ ID NO: 45972
  peptide (1)..(424): Ceres Seq. ID no. 13576078

SEQ ID NO: 48290 - DNA, 2828 bp, Arabidopsis thaliana; identical to SEQ ID NO: 44938
  misc_feature (1)..(2828): Ceres Seq. ID no. 13646314
  misc_feature (1)..(2828): Ortholog of  Ceres SEQ ID NO 13598023 as cited in SEQ ID NO 66487

SEQ ID NO: 48291 - protein, 814 aa, Arabidopsis thaliana; identical to SEQ ID NO: 44939
  peptide (1)..(814): Ceres Seq. ID no. 13646315

SEQ ID NO: 48292 - protein, 697 aa, Arabidopsis thaliana; identical to SEQ ID NO: 44940
  peptide (1)..(697): Ceres Seq. ID no. 13646316

SEQ ID NO: 48293 - protein, 678 aa, Arabidopsis thaliana; identical to SEQ ID NO: 44941
  peptide (1)..(678): Ceres Seq. ID no. 13646317

SEQ ID NO: 48294 - DNA, 1093 bp, Arabidopsis thaliana
  misc_feature (1)..(1093): Ceres Seq. ID no. 13649073
  misc_feature (1)..(1093): Ortholog of  Ceres SEQ ID NO 13638402 as cited in SEQ ID NO 60300
  misc_feature (1)..(1093): Ortholog of  Ceres SEQ ID NO 12618349 as cited in SEQ ID NO 64838
  misc_feature (1)..(1093): Ortholog of  Ceres SEQ ID NO 15176161 as cited in SEQ ID NO 0
ggtaatccatctgagcgcttcaagaatgtcgtcccatgctcgaggtaaggagctaattcctctcctgtctttctcccaccaaaaaaaacaaccaaatctctcgatctcatcgacgacgaagatgaacaagaagaacccagatcagaaatccgacatgtcgtcttcttcatcttctccgaagaaacaaaccctcttcatatcatccttaatcattctctggtacacctccaacatcggtgttcttctcctcaacaagttcctcctctccaattacggattcaaattccctattttcctcacaatgtgtcacatgtccgcttgcgctatcctcagctacgtctccatcgtcttcctcaagctcgtccctctccaatacctcaaatctcgttctcagtttctcaaggttgcgactctcagcattgtcttttgtgcctctgtcgtcggtggaaacatctcccttcgttatctccctgtctcctttaatcaagccgttggtgctacgacgccgtttttcactgcactcttcgcttatatcatgacctttaagagagaagcttgggtcacttatggcgctctcgtccccgttgttaccggtgtcgttatcgccagtgggggtgaaccaggttttcactggtttggattcattatgtgcattagtgctactgcagcaagagcttttaaatctgttcttcaaggcatcttactttcttccgagggagaaaggttgaattcgatgaatttgatgctgtacatgtctccaatagccgtcattgctcttctgcctgtcacaatttttatggagccggacgtgatgagtgtgacactaacactcggaagacaacataagtacatgtatatacttctgctggttaactctgtaatggcttattcagccaacttgttaaactttctggttaccaagcacacaagcgcacttaccctgcaggtccttggaaatgctaaaggagcggttgcagttgtgatatcgatcctgcttttccgaaacccggtaacggtgatgggaattggcgggtacagtataaccgttctcggggtggttgcttatggagagactaaacgcaggtttagatga

SEQ ID NO: 48295 - protein, 363 aa, Arabidopsis thaliana
  peptide (1)..(363): Ceres Seq. ID no. 13649074
VIHLSASRMSSHARGKELIPLLSFSHQKKQPNLSISSTTKMNKKNPDQKSDMSSSSSSPKKQTLFISSLIILWYTSNIGVLLLNKFLLSNYGFKFPIFLTMCHMSACAILSYVSIVFLKLVPLQYLKSRSQFLKVATLSIVFCASVVGGNISLRYLPVSFNQAVGATTPFFTALFAYIMTFKREAWVTYGALVPVVTGVVIASGGEPGFHWFGFIMCISATAARAFKSVLQGILLSSEGERLNSMNLMLYMSPIAVIALLPVTIFMEPDVMSVTLTLGRQHKYMYILLLVNSVMAYSANLLNFLVTKHTSALTLQVLGNAKGAVAVVISILLFRNPVTVMGIGGYSITVLGVVAYGETKRRFR

SEQ ID NO: 48296 - protein, 355 aa, Arabidopsis thaliana
  peptide (1)..(355): Ceres Seq. ID no. 13649075
MSSHARGKELIPLLSFSHQKKQPNLSISSTTKMNKKNPDQKSDMSSSSSSPKKQTLFISSLIILWYTSNIGVLLLNKFLLSNYGFKFPIFLTMCHMSACAILSYVSIVFLKLVPLQYLKSRSQFLKVATLSIVFCASVVGGNISLRYLPVSFNQAVGATTPFFTALFAYIMTFKREAWVTYGALVPVVTGVVIASGGEPGFHWFGFIMCISATAARAFKSVLQGILLSSEGERLNSMNLMLYMSPIAVIALLPVTIFMEPDVMSVTLTLGRQHKYMYILLLVNSVMAYSANLLNFLVTKHTSALTLQVLGNAKGAVAVVISILLFRNPVTVMGIGGYSITVLGVVAYGETKRRFR

SEQ ID NO: 48297 - protein, 323 aa, Arabidopsis thaliana
  peptide (1)..(323): Ceres Seq. ID no. 13649076
MNKKNPDQKSDMSSSSSSPKKQTLFISSLIILWYTSNIGVLLLNKFLLSNYGFKFPIFLTMCHMSACAILSYVSIVFLKLVPLQYLKSRSQFLKVATLSIVFCASVVGGNISLRYLPVSFNQAVGATTPFFTALFAYIMTFKREAWVTYGALVPVVTGVVIASGGEPGFHWFGFIMCISATAARAFKSVLQGILLSSEGERLNSMNLMLYMSPIAVIALLPVTIFMEPDVMSVTLTLGRQHKYMYILLLVNSVMAYSANLLNFLVTKHTSALTLQVLGNAKGAVAVVISILLFRNPVTVMGIGGYSITVLGVVAYGETKRRFR

SEQ ID NO: 48298 - DNA, 1000 bp, Arabidopsis thaliana
  misc_feature (1)..(1000): Ceres Seq. ID no. 13649148
  misc_feature (1)..(1000): Ortholog of  Ceres SEQ ID NO 13594738 as cited in SEQ ID NO 59314
ggcaaagaccagagagacactatgaatcttccatcgtcaacgacggcgacgtcaacctccgcgacttccgatgcagcggcgaattccaccgaaagatgcgatgattgcggaagctcagacgcctgggtgatacacacagtacgtctccgtgcatctctccgcttcttctgcactcattgtctcctccgcaaccatccggcgtcgttttgtcccggttgcttcgccttgtacgattcatctccgccgtcttttcgccgcgtctcttgttccattaaagggtgccactccttgactcacattcactgtgccggcgatgaaagtcacctttcttatctctgtcctccttgccgagaccctaattccttctccttcttccgccctatcgtcgacgaaaacggctctcgcttcgtcgataaagcactctccgaagctttcttatgcgctgctaagatcgctgcttcttcaatgaacaaagctgttatgaccgctaagtgtgaaactgaccggagaggaaaagaagctgctttggcgaagaagagagctcgcgaggctcttgagcaggttgtcatgcttgatgccaaggagaaggcaagatcggttgttcctaagcttaaagaagctcccgttgatcagaaaccaaaactgagtcctgcatcaaatggtgctactgtgaaagaaacagagagctctgatactactactactcctacgacgactacgactaagaacaatggaggtacagagaaacagaatccggcaacacaattggctaaagttaagcaagaagctgatgcgtctaggtgaaatcaatgtttaaagtttcaggtaccacaacttcaagcatttcggcttctgatgaaagaaactgattctgattcgatctcaatgtagattgtaagttatccttttttggtttgttcatgtttttcgatcgtttactatgtgtaggaatctttggaactgtgaagtgtttttttaaaataaatcatatgtttctgtg

SEQ ID NO: 48299 - protein, 267 aa, Arabidopsis thaliana
  peptide (1)..(267): Ceres Seq. ID no. 13649149
GKDQRDTMNLPSSTTATSTSATSDAAANSTERCDDCGSSDAWVIHTVRLRASLRFFCTHCLLRNHPASFCPGCFALYDSSPPSFRRVSCSIKGCHSLTHIHCAGDESHLSYLCPPCRDPNSFSFFRPIVDENGSRFVDKALSEAFLCAAKIAASSMNKAVMTAKCETDRRGKEAALAKKRAREALEQVVMLDAKEKARSVVPKLKEAPVDQKPKLSPASNGATVKETESSDTTTTPTTTTTKNNGGTEKQNPATQLAKVKQEADASR

SEQ ID NO: 48300 - protein, 260 aa, Arabidopsis thaliana
  peptide (1)..(260): Ceres Seq. ID no. 13649150
MNLPSSTTATSTSATSDAAANSTERCDDCGSSDAWVIHTVRLRASLRFFCTHCLLRNHPASFCPGCFALYDSSPPSFRRVSCSIKGCHSLTHIHCAGDESHLSYLCPPCRDPNSFSFFRPIVDENGSRFVDKALSEAFLCAAKIAASSMNKAVMTAKCETDRRGKEAALAKKRAREALEQVVMLDAKEKARSVVPKLKEAPVDQKPKLSPASNGATVKETESSDTTTTPTTTTTKNNGGTEKQNPATQLAKVKQEADASR

SEQ ID NO: 48301 - DNA, 1606 bp, Arabidopsis thaliana; identical to SEQ ID NO: 47677
  misc_feature (1)..(1606): Ceres Seq. ID no. 12725994
  misc_feature (1)..(1606): Ortholog of  Ceres SEQ ID NO 12593464 as cited in SEQ ID NO 69039

SEQ ID NO: 48302 - protein, 438 aa, Arabidopsis thaliana; identical to SEQ ID NO: 47678
  peptide (1)..(438): Ceres Seq. ID no. 12725995

SEQ ID NO: 48303 - protein, 389 aa, Arabidopsis thaliana; identical to SEQ ID NO: 47679
  peptide (1)..(389): Ceres Seq. ID no. 12725996

SEQ ID NO: 48304 - protein, 327 aa, Arabidopsis thaliana; identical to SEQ ID NO: 47680
  peptide (1)..(327): Ceres Seq. ID no. 12725997

SEQ ID NO: 48305 - DNA, 1571 bp, Arabidopsis thaliana
  misc_feature (1)..(1571): Ceres Seq. ID no. 13649972
  misc_feature (1)..(1571): Ortholog of  Ceres SEQ ID NO 14311367 as cited in SEQ ID NO 53834
atggtggataccgaaatgcaagagcaagatgtgacttttggtgcccttgttgagacaaagtatttagaggaagaacctttggagccagaaaatgatcacaaccctagtgaaatcccgcagccccttcttcttggagatggtcaggctaataatggtcatggcatgaatggtggtgctgttggagttgttgaccactctgaaaggaagactcgtagggtgcaaatgttgagtcctaagactgaaggtgagaatgccaaaaagaggaagacttggctgctggattctgaggcacagggaactgatgaagcagggacaccggtagaacaagtggcgtttctaagagaagtggaggccttttacaaagagagtttcctggaatttaaacctcctaagttttatggacagcctttaaacattctcaagctttggcgagcagtcgtgaacctaggtggctatgaagtggtcaccacaaataagctgtggcggcaagttggagaatccttcaatcctcccaagacatgcacaacagtctcctacacattccgcaatttctatgagaaggcacttttggagtacgaaaagtgtttaaggaataatggtgagcttaaccttcctggttcaacattgattctgtcttccagtgtcgagaaagagccaagtagccatcaaggttcagggtcaggcagggcacgaagagattctgcagctcgtgctatgcaaggttggcatgcgcagcgccttgttggatctggagaggttactgcgcctgctgttaaggataagggcttaatttccaccccaaagcacaagaaactcaaaagcattgggctgcaaaaacacaaacaacaaactagcatggaccatgttgttacaaatgaagctgacaaacagttggctgctgaggttgttgatgttggacccgttgctgactgggtgaagataaatgtcaaagaatctgtgagtaacttctgccaacggctaaagaaacgccaaaaacttgcaaactggatgtttgtttccaatatggaattcttaccaaatctgttttcctttttcttgaattcacagaaggattccttcgagatatttgccttggtacctggacttcttcgcaaagaggttcgaattcaatcagatcctgcgggaaaggtggttataacaggccagccagagcagcttgacaatccttgggggattacacccttcaaaaagattgttgacttatcagcaagaattgatccgcttcacacatccgcggtcatgagcatgcatggacggttgttcatacgagttccgtttgagcagtaatggatttcaagagagctggtcacttgttcgtggtttcttctaggaattcatatgtttcagaaccaaattgttaggcggctgaagcagttttgtaactgtgatttgaatctgaagactgaagttaggaacatgcaacaaacatttgatcttactgtaatatttctcttttgtataatttgagattagtaggagaaactgctccaaagacatttaggatgcaaccaacaatgatgattttgatctaaaatcggaatgttatgctt

SEQ ID NO: 48306 - protein, 435 aa, Arabidopsis thaliana
  peptide (1)..(435): Ceres Seq. ID no. 13649973
MVDTEMQEQDVTFGALVETKYLEEEPLEPENDHNPSEIPQPLLLGDGQANNGHGMNGGAVGVVDHSERKTRRVQMLSPKTEGENAKKRKTWLLDSEAQGTDEAGTPVEQVAFLREVEAFYKESFLEFKPPKFYGQPLNILKLWRAVVNLGGYEVVTTNKLWRQVGESFNPPKTCTTVSYTFRNFYEKALLEYEKCLRNNGELNLPGSTLILSSSVEKEPSSHQGSGSGRARRDSAARAMQGWHAQRLVGSGEVTAPAVKDKGLISTPKHKKLKSIGLQKHKQQTSMDHVVTNEADKQLAAEVVDVGPVADWVKINVKESVSNFCQRLKKRQKLANWMFVSNMEFLPNLFSFFLNSQKDSFEIFALVPGLLRKEVRIQSDPAGKVVITGQPEQLDNPWGITPFKKIVDLSARIDPLHTSAVMSMHGRLFIRVPFEQ

SEQ ID NO: 48307 - protein, 430 aa, Arabidopsis thaliana
  peptide (1)..(430): Ceres Seq. ID no. 13649974
MQEQDVTFGALVETKYLEEEPLEPENDHNPSEIPQPLLLGDGQANNGHGMNGGAVGVVDHSERKTRRVQMLSPKTEGENAKKRKTWLLDSEAQGTDEAGTPVEQVAFLREVEAFYKESFLEFKPPKFYGQPLNILKLWRAVVNLGGYEVVTTNKLWRQVGESFNPPKTCTTVSYTFRNFYEKALLEYEKCLRNNGELNLPGSTLILSSSVEKEPSSHQGSGSGRARRDSAARAMQGWHAQRLVGSGEVTAPAVKDKGLISTPKHKKLKSIGLQKHKQQTSMDHVVTNEADKQLAAEVVDVGPVADWVKINVKESVSNFCQRLKKRQKLANWMFVSNMEFLPNLFSFFLNSQKDSFEIFALVPGLLRKEVRIQSDPAGKVVITGQPEQLDNPWGITPFKKIVDLSARIDPLHTSAVMSMHGRLFIRVPFEQ

SEQ ID NO: 48308 - protein, 381 aa, Arabidopsis thaliana
  peptide (1)..(381): Ceres Seq. ID no. 13649975
MNGGAVGVVDHSERKTRRVQMLSPKTEGENAKKRKTWLLDSEAQGTDEAGTPVEQVAFLREVEAFYKESFLEFKPPKFYGQPLNILKLWRAVVNLGGYEVVTTNKLWRQVGESFNPPKTCTTVSYTFRNFYEKALLEYEKCLRNNGELNLPGSTLILSSSVEKEPSSHQGSGSGRARRDSAARAMQGWHAQRLVGSGEVTAPAVKDKGLISTPKHKKLKSIGLQKHKQQTSMDHVVTNEADKQLAAEVVDVGPVADWVKINVKESVSNFCQRLKKRQKLANWMFVSNMEFLPNLFSFFLNSQKDSFEIFALVPGLLRKEVRIQSDPAGKVVITGQPEQLDNPWGITPFKKIVDLSARIDPLHTSAVMSMHGRLFIRVPFEQ

SEQ ID NO: 48309 - DNA, 1916 bp, Arabidopsis thaliana
  misc_feature (1)..(1916): Ceres Seq. ID no. 13649976
  misc_feature (1)..(1916): Ortholog of  Ceres SEQ ID NO 12586556 as cited in SEQ ID NO 64667
  misc_feature (1)..(1916): Ortholog of  Ceres SEQ ID NO 13660894 as cited in SEQ ID NO 67475
gatccgacggcatatgatttcttaccggcgaatctcgccggcgcaaaccctttctgacttgtgttcgccgggatccaatcgcaaatcgttaaattcgcatcccatggtggtttctccctccaatgcccatcagtaaccctaggaaacggccaatctgtgtcgcccaatcgtttctcagcaaacacgcaacgaaagcagagctctctcaggccgtatctcgtctcgagtccttgactcaacaagggattcgattaccctttgacctcctagcatctctgctccagcagtgtggagatacaaagtctttgaaacaaggcaaatggattcatcgtcacttgaagattactggattcaagagacccaacacgcttttgtccaatcatttaatcggaatgtacatgaaatgcggtaaacctattgatgcttgtaaagtgtttgatcaaatgcatctcaggaacttgtattcgtggaacaatatggtctctgggtatgtcaaatcagggatgttggtgcgtgcacgcgtagtgttcgatagtatgcctgagagagatgttgtttcttggaacacgatggttattgggtatgctcaggatgggaatctacacgaggcgttgtggttttataaagagtttaggagatctggaatcaagttcaacgagttcagcttcgctgggcttttgacggcatgtgtgaaatctaggcagctccagctcaatcggcaagctcacgggcaggttttggttgctgggtttttgtcaaatgtggtactttcgtgttctatcatcgatgcttatgcgaaatgtggtcagatggagagtgctaaaagatgttttgatgagatgacagtgaaggatattcatatttggactactctgatctctgggtatgccaaactgggagatatggaagctgctgaaaagttattctgtgagatgcctgagaaaaatccagtctcttggactgcattaattgctggatatgttagacaaggctcagggaatcgagcgcttgacttgtttagaaaaatgattgctttgggggttaaaccagagcaatttacttttagtagctgtctatgtgcctctgcgagcattgcttctcttagacatgggaaggaaattcatggctatatgatccgtaccaatgttagaccgaacgcgattgtcatcagttctttgatagatatgtactccaaatcaggtagtttagaagctagcgagcgggtgttcagaatttgcgatgacaagcacgactgcgttttttggaacacgatgatttctgcattggcacagcacgggcttggacacaaggccttgcgaatgcttgatgacatgatcaaattcagggtccagccaaaccggacgactctggttgtgattcttaatgcctgcagccattcaggtctggtagaggaaggattgaggtggtttgagtcaatgactgttcagcacgggattgttcccgaccaagagcattacgcatgtctgatagatctcctaggtcgcgccggttgtttcaaagaactgatgaggaagattgaggaaatgccttttgaacccgacaagcatatctggaacgcaatcctaggagtatgcagaatccatggaaacgaagaactgggaaagaaagcagcggacgagctgatcaaactggaccctgagtcgtctgcaccatacatattgctgtcaagcatttacgcagatcatgggaagtgggaattagtagagaagctgagaggggttatgaagaagagaagagtgaataaagaaaaagctgtgagttggattgaaatcgagaaaaaagtcgaagctttcactgtctcagatgggtcacatgctcatgctcggaaagaagagatatacttcattctgcataatctggctgcagttattgaagaagaagcttcaagaacatga

SEQ ID NO: 48310 - protein, 597 aa, Arabidopsis thaliana
  peptide (1)..(597): Ceres Seq. ID no. 13649977
MPISNPRKRPICVAQSFLSKHATKAELSQAVSRLESLTQQGIRLPFDLLASLLQQCGDTKSLKQGKWIHRHLKITGFKRPNTLLSNHLIGMYMKCGKPIDACKVFDQMHLRNLYSWNNMVSGYVKSGMLVRARVVFDSMPERDVVSWNTMVIGYAQDGNLHEALWFYKEFRRSGIKFNEFSFAGLLTACVKSRQLQLNRQAHGQVLVAGFLSNVVLSCSIIDAYAKCGQMESAKRCFDEMTVKDIHIWTTLISGYAKLGDMEAAEKLFCEMPEKNPVSWTALIAGYVRQGSGNRALDLFRKMIALGVKPEQFTFSSCLCASASIASLRHGKEIHGYMIRTNVRPNAIVISSLIDMYSKSGSLEASERVFRICDDKHDCVFWNTMISALAQHGLGHKALRMLDDMIKFRVQPNRTTLVVILNACSHSGLVEEGLRWFESMTVQHGIVPDQEHYACLIDLLGRAGCFKELMRKIEEMPFEPDKHIWNAILGVCRIHGNEELGKKAADELIKLDPESSAPYILLSSIYADHGKWELVEKLRGVMKKRRVNKEKAVSWIEIEKKVEAFTVSDGSHAHARKEEIYFILHNLAAVIEEEASRT

SEQ ID NO: 48311 - protein, 507 aa, Arabidopsis thaliana
  peptide (1)..(507): Ceres Seq. ID no. 13649978
MYMKCGKPIDACKVFDQMHLRNLYSWNNMVSGYVKSGMLVRARVVFDSMPERDVVSWNTMVIGYAQDGNLHEALWFYKEFRRSGIKFNEFSFAGLLTACVKSRQLQLNRQAHGQVLVAGFLSNVVLSCSIIDAYAKCGQMESAKRCFDEMTVKDIHIWTTLISGYAKLGDMEAAEKLFCEMPEKNPVSWTALIAGYVRQGSGNRALDLFRKMIALGVKPEQFTFSSCLCASASIASLRHGKEIHGYMIRTNVRPNAIVISSLIDMYSKSGSLEASERVFRICDDKHDCVFWNTMISALAQHGLGHKALRMLDDMIKFRVQPNRTTLVVILNACSHSGLVEEGLRWFESMTVQHGIVPDQEHYACLIDLLGRAGCFKELMRKIEEMPFEPDKHIWNAILGVCRIHGNEELGKKAADELIKLDPESSAPYILLSSIYADHGKWELVEKLRGVMKKRRVNKEKAVSWIEIEKKVEAFTVSDGSHAHARKEEIYFILHNLAAVIEEEASRT

SEQ ID NO: 48312 - protein, 505 aa, Arabidopsis thaliana
  peptide (1)..(505): Ceres Seq. ID no. 13649979
MKCGKPIDACKVFDQMHLRNLYSWNNMVSGYVKSGMLVRARVVFDSMPERDVVSWNTMVIGYAQDGNLHEALWFYKEFRRSGIKFNEFSFAGLLTACVKSRQLQLNRQAHGQVLVAGFLSNVVLSCSIIDAYAKCGQMESAKRCFDEMTVKDIHIWTTLISGYAKLGDMEAAEKLFCEMPEKNPVSWTALIAGYVRQGSGNRALDLFRKMIALGVKPEQFTFSSCLCASASIASLRHGKEIHGYMIRTNVRPNAIVISSLIDMYSKSGSLEASERVFRICDDKHDCVFWNTMISALAQHGLGHKALRMLDDMIKFRVQPNRTTLVVILNACSHSGLVEEGLRWFESMTVQHGIVPDQEHYACLIDLLGRAGCFKELMRKIEEMPFEPDKHIWNAILGVCRIHGNEELGKKAADELIKLDPESSAPYILLSSIYADHGKWELVEKLRGVMKKRRVNKEKAVSWIEIEKKVEAFTVSDGSHAHARKEEIYFILHNLAAVIEEEASRT

SEQ ID NO: 48313 - DNA, 3657 bp, Arabidopsis thaliana
  misc_feature (1)..(3657): Ceres Seq. ID no. 12733467
  misc_feature (1)..(3657): Ortholog of  Ceres SEQ ID NO 14306557 as cited in SEQ ID NO 53442
atgctgaccaagttcgagaccaagagtaaccgagttaagggtctgagtttccaccctaaacgaccatggattctcgcgagtttacacagtggtgtgatccagctctgggattatcgtatgggtactttgatcgacagatttgatgagcacgaaggacctgttcgtggtgttcatttccacaactcacagcctttattcgtctctggaggggatgattacaagattaaagtttggaactacaaaactcacaggtgtcttttcactcttctcgggcatcttgattatatccgcactgtccaatttcaccacgaaaacccatggattgtgagtgctagtgacgatcagactatccgcatttggaactggcagtctaggacttgtatttccgtgttgactggtcacaatcattatgttatgtgtgcttctttccatccaaaggaagatcttgttgtatcagcatcactggatcagactgtccgtgtttgggacattggtgctcttaagaagaagtcagcatctcctgctgatgacctcatgcgatttagtcagatgaattctgatctttttggaggggttgacgctatagttaagtacgtccttgaaggtcatgatagaggagtcaactgggcttcttttcatcccacacttcctctcattgtctctggtgccgatgaccgccaagtaaagctgtggcgtatgaatgaaactaaagcttgggaggtggatacattgcgaggtcatatgaataacgtttcatccgttatgttccatgcaaaacaggacattatcgtgtcaaactctgaggataaaagcatccgtgtctgggatgctaccaagcgaactggaatccaaacttttcgtcgtgagcatgaccgattctggattcttgcagttcaccctgagattaatctacttgcagcaggacatgacaatggtatgattgttttcaaacttgagagagaacgtcctgcatttgctttgagtggtgattcgttattctatgccaaagatagatttctgcggtactatgaatattcaactcaaaaagattcccaagttattcctatacggcgtcctggtaccccaagcttgaatcaaagtccgaggactttatcctacagtccgacagaaaatgcagtcttaatctgctcagatctggatggtggttcttacgagttgtacatcataccgaaagatagcgttggcaggagtgatgttgtacaagatgcaaagagggggacagggggttctgcggtgttcattgctcgaaatcggtttgctgttctggagaaaagcaccagccaggtgttagtgaagaatctaaagaatgaggtggttaaaaagagttctttacctattcccacagatgctatcttttatgctgggactggaaatttgctttgtagatctgaggataaagtggttatatttgaccttcaacaaaggcttgttcttggtgagcttcagacaccgtttgttaggtacgttgtttggtctaacgatatggagagtgttgctttgctcagcaaacatactatcattattgcgagcaaaaaacttgtcctacagtgcacgcttcatgagacaatacgtgtgaaaagtggagcatgggacgacaatggtgtcttcatttacactactctgaaccacatcaagtactgtctgcctaatggagatagtggaatcatcagaaccctggatgtcccaatctacatcaccaaggtgtctggaaatacaatcttttgcttggaccgggatgggaaaaacagggctatcaccattaatgcaaccgaatacattttcaagcttgcactactgagaaagaaatatgatcatgtcatgagcatgataaagaactcccagctatgtggacaggctatgatcgcttatcttcagcagaaaggatttcctgaagttgccctacactttgttgaagacgagaggatccgattcaacttggctcttgaaagtggcaacatcagtgtagctgttgcatccgctacagagattaatgagaaagaccactggtatagactcggagtggaagctcttcgtcaaggaaattctagaattgttgagtttgcgtaccagcagacaaagaactttgagaggttatcttttctatatctcattactggcaatttagacaagctgtcaaagttgatgaagattgcagaggtgaagaacaatgtaatgggtcagtttcacaatgcactctacctaggagatgttaaagagcgtgttaagatactagagaatgctggtcatttgcctctagcttatatcacagcttcggttcatggtttaactgacattgctgagcgactagcaattgagctaggagacaatgtgccttcattgcctgaagggaagactccatcgcttttaatgccaccgtctcccatcatgtgtggtggtgattggcctctactgagagtgatgaaaggaatatttgaaggaggacttgagagtgcaaacagaggggctgttgatgaagaagaagaagatgttgaaggcgactggggtgagggacttgacaaattcgatgttgatggaatggagaacacagacatcgaagccatattggatggtgcagaagcaggtgaagaagaagacgacgaggaaggtggatggggacttgacttggatcttccaccagagcttgacactcctaaagcctctgctaacgcacgttcatctacttttgtgacacctcctcaaggtatgcccgtaagtcagatttggagtcagaaatcttcccttgctgctgagcaggctgcagcaggaagcttcgacactgcaatgcgtttgctccacaggcagcttggcattaagaactttgcgcctttgaaatcgatgtttcttgatctgttcagtgggagccatagctatctgcgtgccttttcttcatctcctgtggttcctcttgccattgagcgtggatggagtgagtcttccagtcctaacgtccgtggcccgccagctcttgtttttgatttctctcagcttgaagcaaagctcaaatccggctacaaagctacaacagctgggaaactatctgaggctcttcgtgtcttcctctctattctccaaaccatcccattggtggtagttgagtcaagaagagaagtagatgaggttaaggaactggtcatcattgttaaagaatatgtcctcggtcttcaattggagctcaagaggagagagatgaaagatgatccggtgaggcagcaagagctcgctgcttacttcactcactgtaaacttcaaacacctcacctacggctcgcgtacttcagtgcaatgaccgtctgctacaagtcaaagaacatggctactgctgctcacttcgccagaagtttgttggatacaaacccaactattgagagccaggccaggacggctagacaagttatgcaagcagctgaacgcaacatgacagatgcaacaacactcaactacgactttagaaacccgtttgtgatatgcgggtccacttatgtgccaatctacaaaggacagaaagacgttgcatgtccttactgcactgcccggtttgtaccaagccaggaaggtaacatttgctcggtctgtgatcttgcagtcattggcgcagacgcatctggcttgctatgctctgcctctcaagtccggtga

SEQ ID NO: 48314 - protein, 1218 aa, Arabidopsis thaliana
  peptide (1)..(1218): Ceres Seq. ID no. 12733468
MLTKFETKSNRVKGLSFHPKRPWILASLHSGVIQLWDYRMGTLIDRFDEHEGPVRGVHFHNSQPLFVSGGDDYKIKVWNYKTHRCLFTLLGHLDYIRTVQFHHENPWIVSASDDQTIRIWNWQSRTCISVLTGHNHYVMCASFHPKEDLVVSASLDQTVRVWDIGALKKKSASPADDLMRFSQMNSDLFGGVDAIVKYVLEGHDRGVNWASFHPTLPLIVSGADDRQVKLWRMNETKAWEVDTLRGHMNNVSSVMFHAKQDIIVSNSEDKSIRVWDATKRTGIQTFRREHDRFWILAVHPEINLLAAGHDNGMIVFKLERERPAFALSGDSLFYAKDRFLRYYEYSTQKDSQVIPIRRPGTPSLNQSPRTLSYSPTENAVLICSDLDGGSYELYIIPKDSVGRSDVVQDAKRGTGGSAVFIARNRFAVLEKSTSQVLVKNLKNEVVKKSSLPIPTDAIFYAGTGNLLCRSEDKVVIFDLQQRLVLGELQTPFVRYVVWSNDMESVALLSKHTIIIASKKLVLQCTLHETIRVKSGAWDDNGVFIYTTLNHIKYCLPNGDSGIIRTLDVPIYITKVSGNTIFCLDRDGKNRAITINATEYIFKLALLRKKYDHVMSMIKNSQLCGQAMIAYLQQKGFPEVALHFVEDERIRFNLALESGNISVAVASATEINEKDHWYRLGVEALRQGNSRIVEFAYQQTKNFERLSFLYLITGNLDKLSKLMKIAEVKNNVMGQFHNALYLGDVKERVKILENAGHLPLAYITASVHGLTDIAERLAIELGDNVPSLPEGKTPSLLMPPSPIMCGGDWPLLRVMKGIFEGGLESANRGAVDEEEEDVEGDWGEGLDKFDVDGMENTDIEAILDGAEAGEEEDDEEGGWGLDLDLPPELDTPKASANARSSTFVTPPQGMPVSQIWSQKSSLAAEQAAAGSFDTAMRLLHRQLGIKNFAPLKSMFLDLFSGSHSYLRAFSSSPVVPLAIERGWSESSSPNVRGPPALVFDFSQLEAKLKSGYKATTAGKLSEALRVFLSILQTIPLVVVESRREVDEVKELVIIVKEYVLGLQLELKRREMKDDPVRQQELAAYFTHCKLQTPHLRLAYFSAMTVCYKSKNMATAAHFARSLLDTNPTIESQARTARQVMQAAERNMTDATTLNYDFRNPFVICGSTYVPIYKGQKDVACPYCTARFVPSQEGNICSVCDLAVIGADASGLLCSASQVR

SEQ ID NO: 48315 - protein, 1179 aa, Arabidopsis thaliana
  peptide (1)..(1179): Ceres Seq. ID no. 12733469
MGTLIDRFDEHEGPVRGVHFHNSQPLFVSGGDDYKIKVWNYKTHRCLFTLLGHLDYIRTVQFHHENPWIVSASDDQTIRIWNWQSRTCISVLTGHNHYVMCASFHPKEDLVVSASLDQTVRVWDIGALKKKSASPADDLMRFSQMNSDLFGGVDAIVKYVLEGHDRGVNWASFHPTLPLIVSGADDRQVKLWRMNETKAWEVDTLRGHMNNVSSVMFHAKQDIIVSNSEDKSIRVWDATKRTGIQTFRREHDRFWILAVHPEINLLAAGHDNGMIVFKLERERPAFALSGDSLFYAKDRFLRYYEYSTQKDSQVIPIRRPGTPSLNQSPRTLSYSPTENAVLICSDLDGGSYELYIIPKDSVGRSDVVQDAKRGTGGSAVFIARNRFAVLEKSTSQVLVKNLKNEVVKKSSLPIPTDAIFYAGTGNLLCRSEDKVVIFDLQQRLVLGELQTPFVRYVVWSNDMESVALLSKHTIIIASKKLVLQCTLHETIRVKSGAWDDNGVFIYTTLNHIKYCLPNGDSGIIRTLDVPIYITKVSGNTIFCLDRDGKNRAITINATEYIFKLALLRKKYDHVMSMIKNSQLCGQAMIAYLQQKGFPEVALHFVEDERIRFNLALESGNISVAVASATEINEKDHWYRLGVEALRQGNSRIVEFAYQQTKNFERLSFLYLITGNLDKLSKLMKIAEVKNNVMGQFHNALYLGDVKERVKILENAGHLPLAYITASVHGLTDIAERLAIELGDNVPSLPEGKTPSLLMPPSPIMCGGDWPLLRVMKGIFEGGLESANRGAVDEEEEDVEGDWGEGLDKFDVDGMENTDIEAILDGAEAGEEEDDEEGGWGLDLDLPPELDTPKASANARSSTFVTPPQGMPVSQIWSQKSSLAAEQAAAGSFDTAMRLLHRQLGIKNFAPLKSMFLDLFSGSHSYLRAFSSSPVVPLAIERGWSESSSPNVRGPPALVFDFSQLEAKLKSGYKATTAGKLSEALRVFLSILQTIPLVVVESRREVDEVKELVIIVKEYVLGLQLELKRREMKDDPVRQQELAAYFTHCKLQTPHLRLAYFSAMTVCYKSKNMATAAHFARSLLDTNPTIESQARTARQVMQAAERNMTDATTLNYDFRNPFVICGSTYVPIYKGQKDVACPYCTARFVPSQEGNICSVCDLAVIGADASGLLCSASQVR

SEQ ID NO: 48316 - protein, 1080 aa, Arabidopsis thaliana
  peptide (1)..(1080): Ceres Seq. ID no. 12733470
MCASFHPKEDLVVSASLDQTVRVWDIGALKKKSASPADDLMRFSQMNSDLFGGVDAIVKYVLEGHDRGVNWASFHPTLPLIVSGADDRQVKLWRMNETKAWEVDTLRGHMNNVSSVMFHAKQDIIVSNSEDKSIRVWDATKRTGIQTFRREHDRFWILAVHPEINLLAAGHDNGMIVFKLERERPAFALSGDSLFYAKDRFLRYYEYSTQKDSQVIPIRRPGTPSLNQSPRTLSYSPTENAVLICSDLDGGSYELYIIPKDSVGRSDVVQDAKRGTGGSAVFIARNRFAVLEKSTSQVLVKNLKNEVVKKSSLPIPTDAIFYAGTGNLLCRSEDKVVIFDLQQRLVLGELQTPFVRYVVWSNDMESVALLSKHTIIIASKKLVLQCTLHETIRVKSGAWDDNGVFIYTTLNHIKYCLPNGDSGIIRTLDVPIYITKVSGNTIFCLDRDGKNRAITINATEYIFKLALLRKKYDHVMSMIKNSQLCGQAMIAYLQQKGFPEVALHFVEDERIRFNLALESGNISVAVASATEINEKDHWYRLGVEALRQGNSRIVEFAYQQTKNFERLSFLYLITGNLDKLSKLMKIAEVKNNVMGQFHNALYLGDVKERVKILENAGHLPLAYITASVHGLTDIAERLAIELGDNVPSLPEGKTPSLLMPPSPIMCGGDWPLLRVMKGIFEGGLESANRGAVDEEEEDVEGDWGEGLDKFDVDGMENTDIEAILDGAEAGEEEDDEEGGWGLDLDLPPELDTPKASANARSSTFVTPPQGMPVSQIWSQKSSLAAEQAAAGSFDTAMRLLHRQLGIKNFAPLKSMFLDLFSGSHSYLRAFSSSPVVPLAIERGWSESSSPNVRGPPALVFDFSQLEAKLKSGYKATTAGKLSEALRVFLSILQTIPLVVVESRREVDEVKELVIIVKEYVLGLQLELKRREMKDDPVRQQELAAYFTHCKLQTPHLRLAYFSAMTVCYKSKNMATAAHFARSLLDTNPTIESQARTARQVMQAAERNMTDATTLNYDFRNPFVICGSTYVPIYKGQKDVACPYCTARFVPSQEGNICSVCDLAVIGADASGLLCSASQVR

SEQ ID NO: 48317 - DNA, 871 bp, Arabidopsis thaliana
  misc_feature (1)..(871): Ceres Seq. ID no. 12724123
  misc_feature (1)..(871): Ortholog of  Ceres SEQ ID NO 15172842 as cited in SEQ ID NO 58023
agagagagatatcatcgacagagatcaacgaggacaagaagcttctcagagagatccgtggaggagaattctctcaggcggatctgtttgtcggagcttttgtgaatcatcatcatcaatgggtttgttggaagcttttctcaattggcttcgtagcctcttcttcaagcaagaaatggagctttctttgataggacttcaaaatgcaggaaagacatcacttgtaaatgttgttgcaactggtggatacagtgaagacatgattcctacggtcgggtttaacatgaggaaagtaacaaaaggaaatgttacaatcaaactatgggatcttggtggtcaaccaagattccgcagcatgtgggaacgttactgtcgcgctgtttctgccattgtgtatgtagttgatgctgcagatcctgacaacctaagtgtgtcgaaaagtgaactccatgatttgttgagcaagacttcgcttaatggtatccctcttctcgttcttgggaacaagattgacaaacctggagctctgtccaaagaagccttaacagacgaaatgggacttacatcacttacagatagagaagtctgctgtttcatgatatcatgcaagaactctaccaacattgatcaagtcattgattggctcgtaaagcattcaaagtcgaagaactaatcttcaccaagaacatatattctctcttcttgattcttcttagtcttcctgtattgtctagttgatgatgatggtgacaatttttcgtgtgaaacaagagtgtctttatttttcgccttccgtctctccttcttctgctggtctggtcttgtttggtcctccagtcttgtctttgtatattagatgtggattgttttt

SEQ ID NO: 48318 - protein, 223 aa, Arabidopsis thaliana
  peptide (1)..(223): Ceres Seq. ID no. 12724124
ERDIIDRDQRGQEASQRDPWRRILSGGSVCRSFCESSSSMGLLEAFLNWLRSLFFKQEMELSLIGLQNAGKTSLVNVVATGGYSEDMIPTVGFNMRKVTKGNVTIKLWDLGGQPRFRSMWERYCRAVSAIVYVVDAADPDNLSVSKSELHDLLSKTSLNGIPLLVLGNKIDKPGALSKEALTDEMGLTSLTDREVCCFMISCKNSTNIDQVIDWLVKHSKSKN

SEQ ID NO: 48319 - protein, 184 aa, Arabidopsis thaliana
  peptide (1)..(184): Ceres Seq. ID no. 12724125
MGLLEAFLNWLRSLFFKQEMELSLIGLQNAGKTSLVNVVATGGYSEDMIPTVGFNMRKVTKGNVTIKLWDLGGQPRFRSMWERYCRAVSAIVYVVDAADPDNLSVSKSELHDLLSKTSLNGIPLLVLGNKIDKPGALSKEALTDEMGLTSLTDREVCCFMISCKNSTNIDQVIDWLVKHSKSKN

SEQ ID NO: 48320 - protein, 165 aa, Arabidopsis thaliana
  peptide (1)..(165): Ceres Seq. ID no. 12724126
MELSLIGLQNAGKTSLVNVVATGGYSEDMIPTVGFNMRKVTKGNVTIKLWDLGGQPRFRSMWERYCRAVSAIVYVVDAADPDNLSVSKSELHDLLSKTSLNGIPLLVLGNKIDKPGALSKEALTDEMGLTSLTDREVCCFMISCKNSTNIDQVIDWLVKHSKSKN

SEQ ID NO: 48321 - DNA, 2093 bp, Arabidopsis thaliana
  misc_feature (1)..(2093): Ceres Seq. ID no. 13649980
  misc_feature (1)..(2093): Ortholog of  Ceres SEQ ID NO 12624774 as cited in SEQ ID NO 63620
  misc_feature (1)..(2093): Ortholog of  Ceres SEQ ID NO 14307940 as cited in SEQ ID NO 0
  misc_feature (1)..(2093): Ortholog of  Ceres SEQ ID NO 14308560 as cited in SEQ ID NO 0
aaaaaaagtcacactcgaagtctcacaccacaccaaccacttcttcttcttcttcttcttctacataaaacctaacgccatggattcagatttcggaatccccagagaactctcccctcttcagcaacttcgatctcagtacaaacctgagcttcctccttgtctccaggggactactgtccgcgtggagcttggtgatggaaccactgtggctgaagctgctgattcacataccatggctcgtgctttcccgcataccttaggccagcctttggctcacttcctcagggaaactgctcaagttcctgatgcgcacatcattaccgagcttccttcagttagagttggaattgtgttttgtggaaggcaagctccaggtggacataatgtgatctggggtcttttcgaggctctcaaggtgcacaacgcaaaaagcactttgctaggatttttgggtggttccgagggtctatttgcacaaaagactctagagattacagatgatatacttcagacttacaaaaaccaaggtggttatgatttgctcggaagaactaaggatcagatcaaaacaactgagcaggttaacgctgcactcaaagcttgcacagatttaaagttagatggccttgttatcattggaggcgtaatatcaaacacagatgcagctcatctcgctgaattttttgctgctgcaaaatgctcaactaaggtggttggtgttccagttactacaaatggagatctcaaaaatcagtttgtggaggcaaacgtgggttttgacaccatatgcaaggtgaactcacaactcattagcaatgcctgcactgatgccctttctgcagagaagtattattatttcatccgcctcatgggtcgtaagcactctcatgttgcccttgagtgtacactccagtctcatccaaacatggtgatactgggcgaggaggttgcagcatctaagctcacaatttttgacattgctaaacagatctgtgatgctgttcaagcaagagcagtagaagacaagaatcatggagtcatcctcattcctgaagggcttatagtcagtattcctgaagtctacgctctgttaaaggaaattcacgggctgctgaggcagggtgtatctgctgataagatttctactcagctctcaccttggtcatctgctttgtttgaatttcttcctccattcattaagaaacagctacttctccatcctgagtctgatgattctgctcagctatcccagattgagacagagaaacttcttgcgtatctcgtggagactgaaatgaacaagcgcttgaaagaaggcacatacaaggggaagaaattcaatgccatatgtcacttttttggttaccaagctcgtggatctcttccatcgaaattcgattgtgattacgcctacgttcttggacatatatgttaccacatccttgcagctggtctgaatggttacatggcaacagtgaccaacctaaaaagtcctgtgaacaagtggaaatgtggtgctacacctattacagcgatgatgacggtgaagcattggtcccaggatgctagttatactttaacttcaattggtagacctgcaattcatccagctatggtggatttgaaaggcaaagcatacgacctcttgagacagaatgcacaaaaattcttgatggaagatctgtacagaaacccaggaccgctacagtacgatggtcctggtgcggatgctaaagcagtgagtctctgtgttgaagatcaagattacatgggacgtatcaagaagctgcaggaatatcttgaccaagtgaggacgatagtgaaaccaggatgttctcaagacgtattgaaggcagcactgagtgtgatggcttcggtgactgatgttcttactactatttcttcaaatggtggtcaatgatttgcttaaaacttaaggacaaagctcttatgaatcacacacgtcgtgtttgttctcttctttttgttttctttcttttgagatgtaacttttgttgtattttttaagttattgagtttggaaagacataaaaattgaaaaggtttggattatagaggcgctatttcac

SEQ ID NO: 48322 - protein, 640 aa, Arabidopsis thaliana
  peptide (1)..(640): Ceres Seq. ID no. 13649981
KKVTLEVSHHTNHFFFFFFFYIKPNAMDSDFGIPRELSPLQQLRSQYKPELPPCLQGTTVRVELGDGTTVAEAADSHTMARAFPHTLGQPLAHFLRETAQVPDAHIITELPSVRVGIVFCGRQAPGGHNVIWGLFEALKVHNAKSTLLGFLGGSEGLFAQKTLEITDDILQTYKNQGGYDLLGRTKDQIKTTEQVNAALKACTDLKLDGLVIIGGVISNTDAAHLAEFFAAAKCSTKVVGVPVTTNGDLKNQFVEANVGFDTICKVNSQLISNACTDALSAEKYYYFIRLMGRKHSHVALECTLQSHPNMVILGEEVAASKLTIFDIAKQICDAVQARAVEDKNHGVILIPEGLIVSIPEVYALLKEIHGLLRQGVSADKISTQLSPWSSALFEFLPPFIKKQLLLHPESDDSAQLSQIETEKLLAYLVETEMNKRLKEGTYKGKKFNAICHFFGYQARGSLPSKFDCDYAYVLGHICYHILAAGLNGYMATVTNLKSPVNKWKCGATPITAMMTVKHWSQDASYTLTSIGRPAIHPAMVDLKGKAYDLLRQNAQKFLMEDLYRNPGPLQYDGPGADAKAVSLCVEDQDYMGRIKKLQEYLDQVRTIVKPGCSQDVLKAALSVMASVTDVLTTISSNGGQ

SEQ ID NO: 48323 - protein, 614 aa, Arabidopsis thaliana
  peptide (1)..(614): Ceres Seq. ID no. 13649982
MDSDFGIPRELSPLQQLRSQYKPELPPCLQGTTVRVELGDGTTVAEAADSHTMARAFPHTLGQPLAHFLRETAQVPDAHIITELPSVRVGIVFCGRQAPGGHNVIWGLFEALKVHNAKSTLLGFLGGSEGLFAQKTLEITDDILQTYKNQGGYDLLGRTKDQIKTTEQVNAALKACTDLKLDGLVIIGGVISNTDAAHLAEFFAAAKCSTKVVGVPVTTNGDLKNQFVEANVGFDTICKVNSQLISNACTDALSAEKYYYFIRLMGRKHSHVALECTLQSHPNMVILGEEVAASKLTIFDIAKQICDAVQARAVEDKNHGVILIPEGLIVSIPEVYALLKEIHGLLRQGVSADKISTQLSPWSSALFEFLPPFIKKQLLLHPESDDSAQLSQIETEKLLAYLVETEMNKRLKEGTYKGKKFNAICHFFGYQARGSLPSKFDCDYAYVLGHICYHILAAGLNGYMATVTNLKSPVNKWKCGATPITAMMTVKHWSQDASYTLTSIGRPAIHPAMVDLKGKAYDLLRQNAQKFLMEDLYRNPGPLQYDGPGADAKAVSLCVEDQDYMGRIKKLQEYLDQVRTIVKPGCSQDVLKAALSVMASVTDVLTTISSNGGQ

SEQ ID NO: 48324 - protein, 562 aa, Arabidopsis thaliana
  peptide (1)..(562): Ceres Seq. ID no. 13649983
MARAFPHTLGQPLAHFLRETAQVPDAHIITELPSVRVGIVFCGRQAPGGHNVIWGLFEALKVHNAKSTLLGFLGGSEGLFAQKTLEITDDILQTYKNQGGYDLLGRTKDQIKTTEQVNAALKACTDLKLDGLVIIGGVISNTDAAHLAEFFAAAKCSTKVVGVPVTTNGDLKNQFVEANVGFDTICKVNSQLISNACTDALSAEKYYYFIRLMGRKHSHVALECTLQSHPNMVILGEEVAASKLTIFDIAKQICDAVQARAVEDKNHGVILIPEGLIVSIPEVYALLKEIHGLLRQGVSADKISTQLSPWSSALFEFLPPFIKKQLLLHPESDDSAQLSQIETEKLLAYLVETEMNKRLKEGTYKGKKFNAICHFFGYQARGSLPSKFDCDYAYVLGHICYHILAAGLNGYMATVTNLKSPVNKWKCGATPITAMMTVKHWSQDASYTLTSIGRPAIHPAMVDLKGKAYDLLRQNAQKFLMEDLYRNPGPLQYDGPGADAKAVSLCVEDQDYMGRIKKLQEYLDQVRTIVKPGCSQDVLKAALSVMASVTDVLTTISSNGGQ

SEQ ID NO: 48325 - DNA, 1771 bp, Arabidopsis thaliana; identical to SEQ ID NO: 39258
  misc_feature (1)..(1771): Ceres Seq. ID no. 13495902
  misc_feature (1)..(1771): Ortholog of  Ceres SEQ ID NO 14310907 as cited in SEQ ID NO 54338

SEQ ID NO: 48326 - protein, 548 aa, Arabidopsis thaliana; identical to SEQ ID NO: 39259
  peptide (1)..(548): Ceres Seq. ID no. 13495903

SEQ ID NO: 48327 - protein, 542 aa, Arabidopsis thaliana; identical to SEQ ID NO: 39260
  peptide (1)..(542): Ceres Seq. ID no. 13495904

SEQ ID NO: 48328 - protein, 462 aa, Arabidopsis thaliana; identical to SEQ ID NO: 39261
  peptide (1)..(462): Ceres Seq. ID no. 13495905

SEQ ID NO: 48329 - DNA, 1046 bp, Arabidopsis thaliana
  misc_feature (1)..(1046): Ceres Seq. ID no. 12670711
  misc_feature (1)..(1046): Ortholog of  Ceres SEQ ID NO 14316118 as cited in SEQ ID NO 52391
  misc_feature (1)..(1046): Ortholog of  Ceres SEQ ID NO 14316060 as cited in SEQ ID NO 52465
  misc_feature (1)..(1046): Ortholog of  Ceres SEQ ID NO 15177246 as cited in SEQ ID NO 57731
  misc_feature (1)..(1046): Ortholog of  Ceres SEQ ID NO 13664032 as cited in SEQ ID NO 67527
gtgtacaataccagccgacacttaacaattcacacctgctctttttactctttctaaaaccctaaattttctcgcttcagtcttcccactcaagtcaaccaccaattgaattcgatttcgaatcattgatggaaatgatttgaaaaaagagtaaagtttatttttttattccttgtaattttcagaaatgggggattccgacagggattccggtggagggcaaaacgggaacaaccagaacggacagtcctccttgtctccaagagagcaagacaggttcttgccgatcgctaacgtcagccggatcatgaagaaggccttgcccgccaacgccaagatctctaaagatgccaaagagacgatgcaggagtgtgtctccgagttcatcagcttcgtcaccggagaagcatctgataagtgtcagaaggagaagaggaagacgatcaacggagacgatttgctctgggctatgactactctaggttttgaggattatgttgagccattgaaagtttacttgcagaggtttagggagatcgaaggggagaggactggactagggaggccacagactggtggtgaggtcggagagcatcagagagatgctgtcggagatggcggtgggttctacggtggtggtggtgggatgcagtatcaccaacatcatcagtttcttcaccagcagaaccatatgtatggagccacaggtggcggtagcgacagtggaggtggagctgcctccggtaggacaaggacttaacaaagattggtgaagtggatctctctctgtatatagatacataaatacatgtatacacatgcctatttttacgacccatataaggtatctatcatgtgatagaacgaacattggtgttggtgatgtaaaatcagatgtgcattaagggtttagattttgaggctgtgtaaagaagatcaagtgtgcttgttgaacaataggattcactaacgaatctgcttcattgaatcttgtatgtaactaaagccattgtattgaatgcaaatgttttcatttgggatgcttt

SEQ ID NO: 48330 - protein, 190 aa, Arabidopsis thaliana
  peptide (1)..(190): Ceres Seq. ID no. 12670712
MGDSDRDSGGGQNGNNQNGQSSLSPREQDRFLPIANVSRIMKKALPANAKISKDAKETMQECVSEFISFVTGEASDKCQKEKRKTINGDDLLWAMTTLGFEDYVEPLKVYLQRFREIEGERTGLGRPQTGGEVGEHQRDAVGDGGGFYGGGGGMQYHQHHQFLHQQNHMYGATGGGSDSGGGAASGRTRT

SEQ ID NO: 48331 - protein, 150 aa, Arabidopsis thaliana
  peptide (1)..(150): Ceres Seq. ID no. 12670713
MKKALPANAKISKDAKETMQECVSEFISFVTGEASDKCQKEKRKTINGDDLLWAMTTLGFEDYVEPLKVYLQRFREIEGERTGLGRPQTGGEVGEHQRDAVGDGGGFYGGGGGMQYHQHHQFLHQQNHMYGATGGGSDSGGGAASGRTRT

SEQ ID NO: 48332 - protein, 132 aa, Arabidopsis thaliana
  peptide (1)..(132): Ceres Seq. ID no. 12670714
MQECVSEFISFVTGEASDKCQKEKRKTINGDDLLWAMTTLGFEDYVEPLKVYLQRFREIEGERTGLGRPQTGGEVGEHQRDAVGDGGGFYGGGGGMQYHQHHQFLHQQNHMYGATGGGSDSGGGAASGRTRT

SEQ ID NO: 48333 - DNA, 1754 bp, Arabidopsis thaliana; identical to SEQ ID NO: 47175
  misc_feature (1)..(1754): Ceres Seq. ID no. 13592461
  misc_feature (1)..(1754): Ortholog of  Ceres SEQ ID NO 14303770 as cited in SEQ ID NO 53890

SEQ ID NO: 48334 - protein, 478 aa, Arabidopsis thaliana; identical to SEQ ID NO: 47176
  peptide (1)..(478): Ceres Seq. ID no. 13592462

SEQ ID NO: 48335 - protein, 405 aa, Arabidopsis thaliana; identical to SEQ ID NO: 47177
  peptide (1)..(405): Ceres Seq. ID no. 13592463

SEQ ID NO: 48336 - DNA, 1753 bp, Arabidopsis thaliana
  misc_feature (1)..(1753): Ceres Seq. ID no. 13649992
  misc_feature (1)..(1753): Ortholog of  Ceres SEQ ID NO 13663328 as cited in SEQ ID NO 66678
  misc_feature (1)..(1753): Ortholog of  Ceres SEQ ID NO 13624495 as cited in SEQ ID NO 0
atcttttttcaatagtctcatgattgtctcttgtgtgtttccagctttcccatagggtccattgatttttgcagccatggattatgatctgcttcgttccaagaagagtatcaaacgcgtagaatccaccaaatcaaatccatggtggtgggatagtcatatcggtctcaaaaattctaagtggcttgagaataatctcgatgagatggaccggagcgtgaaacggatggtgaagttgatagaggaggatgcagattcttttgctaagaaggcagagatgtattaccagtcaagacctgagcttattgctcttgtggatgagtttcaccgtatgtaccgtgctttggcagagcggtacgagaacatcaccggagagttgagaaaaggctctcctttagagcttcagtcacagggctctggtctttctgacatctctgcttctgacctctctgctttatggacctctaatgaggttaataggttaggtcgtcctccttctggtcgacgtgctcctggttttgaatacttccttggcaatggaggacttccttctgatctttatcacaaagatggagatgattctgcttccattactgattctgaacttgaatctgatgattcttctgtgactaattaccctggttatgtgagtataggctctgactttcagtccctaagcaagaggatcatggatcttgagattgagctacgtgaagccaaagaaagacttaggatgcaacttgaagggaacactgagagcttgttgccgagggtgaaaagtgagactaaatttgttgatttcccggcaaaacttgctgcttgtgagcaagaactgaaagatgtaaatgagaagttacagaattcagaagaccaaatctatattttaaagagtcagcttgctagatacttgccatctgggttggatgatgaacagagcgaaggggcagcttcaactcaagaactggacattgagactttgtctgaagagctgagaattacaagcctgaggcttcgggaggcagaaaaacaaaacggtatcatgagaaaagaagtcgagaaaagcaagtctgatgatgcaaaactcaagagtctgcaagacatgcttgagtcggcacagaaagaagctgcagcatggaaaagcaaggctagtgcagataaaagagaggtggtgaagctgcttgatagaatctcaatgttgaagtcgagtttagcaggtagagatcatgagatcagggatttaaagacagcattgtctgacgcagaagagaagattttcccggagaaagcacaggtcaaagccgatatagcaaagctgttggaagaaaaaatacaccgggatgaccaattcaaagagctggaagccaatgtgcgttatcttgaagatgagagaagaaaggtgaacaatgagaaaatagaagaggaggaaaagctgaagagcgaaatcgaggtgctgacactggaaaaggtagagaaagggagatgcatagagacgttaagcagaaaggtgagtgagctagagtcggagataagtcgacttggaagtgaaataaaagcgagagacgataggactatggagatggagaaggaggtggagaagcagaggagggaactagaagaagtagcagaagagaagagggaagtgataagacagctctgtttttcactagactactccagagacgaatacaagagactacgcatagccttttcagggcatccaccaacaagaccatcatccattcttgcttcttaa

SEQ ID NO: 48337 - protein, 558 aa, Arabidopsis thaliana
  peptide (1)..(558): Ceres Seq. ID no. 13649993
MDYDLLRSKKSIKRVESTKSNPWWWDSHIGLKNSKWLENNLDEMDRSVKRMVKLIEEDADSFAKKAEMYYQSRPELIALVDEFHRMYRALAERYENITGELRKGSPLELQSQGSGLSDISASDLSALWTSNEVNRLGRPPSGRRAPGFEYFLGNGGLPSDLYHKDGDDSASITDSELESDDSSVTNYPGYVSIGSDFQSLSKRIMDLEIELREAKERLRMQLEGNTESLLPRVKSETKFVDFPAKLAACEQELKDVNEKLQNSEDQIYILKSQLARYLPSGLDDEQSEGAASTQELDIETLSEELRITSLRLREAEKQNGIMRKEVEKSKSDDAKLKSLQDMLESAQKEAAAWKSKASADKREVVKLLDRISMLKSSLAGRDHEIRDLKTALSDAEEKIFPEKAQVKADIAKLLEEKIHRDDQFKELEANVRYLEDERRKVNNEKIEEEEKLKSEIEVLTLEKVEKGRCIETLSRKVSELESEISRLGSEIKARDDRTMEMEKEVEKQRRELEEVAEEKREVIRQLCFSLDYSRDEYKRLRIAFSGHPPTRPSSILAS

SEQ ID NO: 48338 - protein, 515 aa, Arabidopsis thaliana
  peptide (1)..(515): Ceres Seq. ID no. 13649994
MDRSVKRMVKLIEEDADSFAKKAEMYYQSRPELIALVDEFHRMYRALAERYENITGELRKGSPLELQSQGSGLSDISASDLSALWTSNEVNRLGRPPSGRRAPGFEYFLGNGGLPSDLYHKDGDDSASITDSELESDDSSVTNYPGYVSIGSDFQSLSKRIMDLEIELREAKERLRMQLEGNTESLLPRVKSETKFVDFPAKLAACEQELKDVNEKLQNSEDQIYILKSQLARYLPSGLDDEQSEGAASTQELDIETLSEELRITSLRLREAEKQNGIMRKEVEKSKSDDAKLKSLQDMLESAQKEAAAWKSKASADKREVVKLLDRISMLKSSLAGRDHEIRDLKTALSDAEEKIFPEKAQVKADIAKLLEEKIHRDDQFKELEANVRYLEDERRKVNNEKIEEEEKLKSEIEVLTLEKVEKGRCIETLSRKVSELESEISRLGSEIKARDDRTMEMEKEVEKQRRELEEVAEEKREVIRQLCFSLDYSRDEYKRLRIAFSGHPPTRPSSILAS

SEQ ID NO: 48339 - protein, 508 aa, Arabidopsis thaliana
  peptide (1)..(508): Ceres Seq. ID no. 13649995
MVKLIEEDADSFAKKAEMYYQSRPELIALVDEFHRMYRALAERYENITGELRKGSPLELQSQGSGLSDISASDLSALWTSNEVNRLGRPPSGRRAPGFEYFLGNGGLPSDLYHKDGDDSASITDSELESDDSSVTNYPGYVSIGSDFQSLSKRIMDLEIELREAKERLRMQLEGNTESLLPRVKSETKFVDFPAKLAACEQELKDVNEKLQNSEDQIYILKSQLARYLPSGLDDEQSEGAASTQELDIETLSEELRITSLRLREAEKQNGIMRKEVEKSKSDDAKLKSLQDMLESAQKEAAAWKSKASADKREVVKLLDRISMLKSSLAGRDHEIRDLKTALSDAEEKIFPEKAQVKADIAKLLEEKIHRDDQFKELEANVRYLEDERRKVNNEKIEEEEKLKSEIEVLTLEKVEKGRCIETLSRKVSELESEISRLGSEIKARDDRTMEMEKEVEKQRRELEEVAEEKREVIRQLCFSLDYSRDEYKRLRIAFSGHPPTRPSSILAS

SEQ ID NO: 48340 - DNA, 1153 bp, Arabidopsis thaliana
  misc_feature (1)..(1153): Ceres Seq. ID no. 13649996
  misc_feature (1)..(1153): Ortholog of  Ceres SEQ ID NO 15171626 as cited in SEQ ID NO 57201
gactacctctctcttctctctctactcacacacaaacacatttcctttgccgtgttcttcttgcaacttcctctgttctgtttcataacatcttcttctgatctttgcaatggcagtgtctgggttcgagggtttcgagaaaagactcgaacttcggttcttcgacgatgacaaaccaatcaccaaaaaccctatgggactccgtctaatagacttcgaatctttagaccaagtcttaaacgaagtgcagtgcacagtggtctccgccgtagcgaatcgtagcttcgacgcttacgttctctcagagtcaagcctctttgtatacccaaccaaaatcatcatcaaaacatgtggaaccacgcaactcctcaaatcaatccgaccgttgatccatctcgcacgtaacctcggcctcacgttacgcgcgtgtcgctactcgcgtggcagcttcatcttccctaaagctcagcctttcccttacacaagcttcaaagacgaagtcatcgtcgtcgaagaaagcctcccaaaatctctctgttaccgcaaagcctctgttatgacgccttctaataacccatcacgtgcttggcacgtgttcaccgcaagcgctgacgtggaatccgacgaacatgtcgtcgtagtcgaagtatgtatgacggagctggaccgagtcaacgctcgaagcttctttaaacggaaaggtgacgagaaaaacaacagcgattccgccgggaaagagatgacgcggctcagtggtatcgataacataaacgcaaacgcttatatatgcgatttcgcgtttgatccttgcggttactcgatgaacggcgtcgacggtgaccgttactcaactatccacgtaacgcctgaagacggttttagctacgcgagcttcgagtgtggtttgtctctctacgacaacggtcacgaagatatctctgaggtgttaagccgggccattgatgttttccgtccaagtgacgtctcgatcgccaccacttacggcggcgaagattacaaccacgaggtgactaagcgcgtggagcgtgtgttagctaagaagcttgatcttaagtgtcggagccgtcttatggatgagtttccaggctccggaaccgtcgtttatcagtccttcacgcctcgtcggaaatag

SEQ ID NO: 48341 - protein, 347 aa, Arabidopsis thaliana
  peptide (1)..(347): Ceres Seq. ID no. 13649997
MAVSGFEGFEKRLELRFFDDDKPITKNPMGLRLIDFESLDQVLNEVQCTVVSAVANRSFDAYVLSESSLFVYPTKIIIKTCGTTQLLKSIRPLIHLARNLGLTLRACRYSRGSFIFPKAQPFPYTSFKDEVIVVEESLPKSLCYRKASVMTPSNNPSRAWHVFTASADVESDEHVVVVEVCMTELDRVNARSFFKRKGDEKNNSDSAGKEMTRLSGIDNINANAYICDFAFDPCGYSMNGVDGDRYSTIHVTPEDGFSYASFECGLSLYDNGHEDISEVLSRAIDVFRPSDVSIATTYGGEDYNHEVTKRVERVLAKKLDLKCRSRLMDEFPGSGTVVYQSFTPRRK

SEQ ID NO: 48342 - protein, 319 aa, Arabidopsis thaliana
  peptide (1)..(319): Ceres Seq. ID no. 13649998
MGLRLIDFESLDQVLNEVQCTVVSAVANRSFDAYVLSESSLFVYPTKIIIKTCGTTQLLKSIRPLIHLARNLGLTLRACRYSRGSFIFPKAQPFPYTSFKDEVIVVEESLPKSLCYRKASVMTPSNNPSRAWHVFTASADVESDEHVVVVEVCMTELDRVNARSFFKRKGDEKNNSDSAGKEMTRLSGIDNINANAYICDFAFDPCGYSMNGVDGDRYSTIHVTPEDGFSYASFECGLSLYDNGHEDISEVLSRAIDVFRPSDVSIATTYGGEDYNHEVTKRVERVLAKKLDLKCRSRLMDEFPGSGTVVYQSFTPRRK

SEQ ID NO: 48343 - protein, 198 aa, Arabidopsis thaliana
  peptide (1)..(198): Ceres Seq. ID no. 13649999
MTPSNNPSRAWHVFTASADVESDEHVVVVEVCMTELDRVNARSFFKRKGDEKNNSDSAGKEMTRLSGIDNINANAYICDFAFDPCGYSMNGVDGDRYSTIHVTPEDGFSYASFECGLSLYDNGHEDISEVLSRAIDVFRPSDVSIATTYGGEDYNHEVTKRVERVLAKKLDLKCRSRLMDEFPGSGTVVYQSFTPRRK

SEQ ID NO: 48344 - DNA, 2532 bp, Arabidopsis thaliana; identical to SEQ ID NO: 39469
  misc_feature (1)..(2532): Ceres Seq. ID no. 13504839
  misc_feature (1)..(2532): Ortholog of  Ceres SEQ ID NO 14306279 as cited in SEQ ID NO 56860

SEQ ID NO: 48345 - protein, 671 aa, Arabidopsis thaliana; identical to SEQ ID NO: 39470
  peptide (1)..(671): Ceres Seq. ID no. 13504840

SEQ ID NO: 48346 - protein, 651 aa, Arabidopsis thaliana; identical to SEQ ID NO: 39471
  peptide (1)..(651): Ceres Seq. ID no. 13504841

SEQ ID NO: 48347 - protein, 582 aa, Arabidopsis thaliana; identical to SEQ ID NO: 39472
  peptide (1)..(582): Ceres Seq. ID no. 13504842

SEQ ID NO: 48348 - DNA, 1547 bp, Arabidopsis thaliana; identical to SEQ ID NO: 44750
  misc_feature (1)..(1547): Ceres Seq. ID no. 13509870
  misc_feature (1)..(1547): Ortholog of  Ceres SEQ ID NO 15178100 as cited in SEQ ID NO 52676
  misc_feature (1)..(1547): Ortholog of  Ceres SEQ ID NO 15224811 as cited in SEQ ID NO 0
  misc_feature (1)..(1547): Ortholog of  Ceres SEQ ID NO 15226156 as cited in SEQ ID NO 0

SEQ ID NO: 48349 - protein, 486 aa, Arabidopsis thaliana; identical to SEQ ID NO: 44751
  peptide (1)..(486): Ceres Seq. ID no. 13509871

SEQ ID NO: 48350 - protein, 473 aa, Arabidopsis thaliana; identical to SEQ ID NO: 44752
  peptide (1)..(473): Ceres Seq. ID no. 13509872

SEQ ID NO: 48351 - protein, 388 aa, Arabidopsis thaliana; identical to SEQ ID NO: 44753
  peptide (1)..(388): Ceres Seq. ID no. 13509873

SEQ ID NO: 48352 - DNA, 2389 bp, Arabidopsis thaliana; identical to SEQ ID NO: 43744
  misc_feature (1)..(2389): Ceres Seq. ID no. 13591580
  misc_feature (1)..(2389): Ortholog of  Ceres SEQ ID NO 12465083 as cited in SEQ ID NO 68239

SEQ ID NO: 48353 - protein, 669 aa, Arabidopsis thaliana; identical to SEQ ID NO: 25857
  peptide (1)..(669): Ceres Seq. ID no. 15221053

SEQ ID NO: 48354 - protein, 516 aa, Arabidopsis thaliana; identical to SEQ ID NO: 25858
  peptide (1)..(516): Ceres Seq. ID no. 15221054

SEQ ID NO: 48355 - protein, 511 aa, Arabidopsis thaliana; identical to SEQ ID NO: 43747
  peptide (1)..(511): Ceres Seq. ID no. 15221055

SEQ ID NO: 48356 - DNA, 955 bp, Arabidopsis thaliana
  misc_feature (1)..(955): Ceres Seq. ID no. 13650008
  misc_feature (1)..(955): Ortholog of  Ceres SEQ ID NO 12611392 as cited in SEQ ID NO 56826
  misc_feature (1)..(955): Ortholog of  Ceres SEQ ID NO 13660872 as cited in SEQ ID NO 60830
ggtgagtccaaagggcaaaaaggaagaaatagaaaccaaagccatggagaagatgatagaaccacgggacaacacaagagaatcagaagatgaggatgcgttaaagcttccagggtttaggtttcatccgacggatgaggagcttgtagggtattatctctctaaaaaagtgcttctcaaaaaaacgagcaagatcgatgagatcgtgagtcaaatcgatatctataaatttgatccgtgggatcttccaaggtcgaggaatacagagaaggagagctacttcttttgtaagagaggaaggaaatacagaaacagcataagaccgaaccgagtgactggttccggtttctggaaagccacagggatagacaagcctgtctattccgatggatccaacaaagccgtgatcggtctaaagaagacactcgtttattacctaggaagcgccgggaaaggaaacaagacggattggatgatgcacgagtttcgtctccctacagccaatgacacaatccccggtggccctacacactctaaccctactccaacttccttgctacacgcggaagtatggacgttatgccggatatttaagagaactgtgtctagtcgaaaatacactccggactggagagaattagcaaatggcaaacgtgtgaagcagcaacaatctaattaccaagaagcttatataaattttggggacaatgaaagtagtagtagtaccaacgtgatgaacgttagggaaggcaaagggaactacgagagaagcgttttccagcttcagcaaacgccttatcaacatcaaaaccagccaattctcatggacaccacacacgttgattcgtttcaacatttctccaacgataacattcaccatgaaacctacgagacttggccggacgagcttcgatcggttgtggaatttgctttcccaccttcttttcttagttag

SEQ ID NO: 48357 - protein, 317 aa, Arabidopsis thaliana
  peptide (1)..(317): Ceres Seq. ID no. 13650009
VSPKGKKEEIETKAMEKMIEPRDNTRESEDEDALKLPGFRFHPTDEELVGYYLSKKVLLKKTSKIDEIVSQIDIYKFDPWDLPRSRNTEKESYFFCKRGRKYRNSIRPNRVTGSGFWKATGIDKPVYSDGSNKAVIGLKKTLVYYLGSAGKGNKTDWMMHEFRLPTANDTIPGGPTHSNPTPTSLLHAEVWTLCRIFKRTVSSRKYTPDWRELANGKRVKQQQSNYQEAYINFGDNESSSSTNVMNVREGKGNYERSVFQLQQTPYQHQNQPILMDTTHVDSFQHFSNDNIHHETYETWPDELRSVVEFAFPPSFLS

SEQ ID NO: 48358 - protein, 303 aa, Arabidopsis thaliana
  peptide (1)..(303): Ceres Seq. ID no. 13650010
MEKMIEPRDNTRESEDEDALKLPGFRFHPTDEELVGYYLSKKVLLKKTSKIDEIVSQIDIYKFDPWDLPRSRNTEKESYFFCKRGRKYRNSIRPNRVTGSGFWKATGIDKPVYSDGSNKAVIGLKKTLVYYLGSAGKGNKTDWMMHEFRLPTANDTIPGGPTHSNPTPTSLLHAEVWTLCRIFKRTVSSRKYTPDWRELANGKRVKQQQSNYQEAYINFGDNESSSSTNVMNVREGKGNYERSVFQLQQTPYQHQNQPILMDTTHVDSFQHFSNDNIHHETYETWPDELRSVVEFAFPPSFLS

SEQ ID NO: 48359 - protein, 300 aa, Arabidopsis thaliana
  peptide (1)..(300): Ceres Seq. ID no. 13650011
MIEPRDNTRESEDEDALKLPGFRFHPTDEELVGYYLSKKVLLKKTSKIDEIVSQIDIYKFDPWDLPRSRNTEKESYFFCKRGRKYRNSIRPNRVTGSGFWKATGIDKPVYSDGSNKAVIGLKKTLVYYLGSAGKGNKTDWMMHEFRLPTANDTIPGGPTHSNPTPTSLLHAEVWTLCRIFKRTVSSRKYTPDWRELANGKRVKQQQSNYQEAYINFGDNESSSSTNVMNVREGKGNYERSVFQLQQTPYQHQNQPILMDTTHVDSFQHFSNDNIHHETYETWPDELRSVVEFAFPPSFLS

SEQ ID NO: 48360 - DNA, 1401 bp, Arabidopsis thaliana
  misc_feature (1)..(1401): Ceres Seq. ID no. 13649216
  misc_feature (1)..(1401): Ortholog of  Ceres SEQ ID NO 14310547 as cited in SEQ ID NO 55132
  misc_feature (1)..(1401): Ortholog of  Ceres SEQ ID NO 13596261 as cited in SEQ ID NO 67817
  misc_feature (1)..(1401): Ortholog of  Ceres SEQ ID NO 13662360 as cited in SEQ ID NO 68830
gaattttcagttttcattaccatttcctcttcaccggggaaaattctgttagtttctttcgccggtagttgaaagaaaatgtctcctgcgatcaaagcaccgctcttaccaaaccaagagccttcatcatcatcatcggagaaccatggatcattcgccggagctgtgtttaacatctcgacaagcatcgtcggagctggaattatggcgattccggcggctttcaaagtcctaggtgtaatcccatctctatcgataatcgtaatcatagcttggctctccaatgtatcagctgggtttttaatgaaatccagtctcgccggagaatcaacaacttacgccggcgtgatgaaggaatcgttcggaaaatctggtgccgttgctgttacggttgttacaatggttgtgacttttgggtctatgattattttctcgattatcattggtgatgttatttcgggtaatgagaaagatggaatcatacatttaggtcttcttcaagaatggtttggttctcattggtggaatacgagattctttggtttgttgttcatctttgtcttcctcttccttcctttagtcttatgcagacgtgtagaaagattggcatttagttctgcaatttcgtttctgcttgcgttactctttgttgtcataagctcggtgttagcgattattgctctcgtgcaagggaagacaaagcctccgagactcttccctgaactcaatgatggtggattatcgtttttcagtctcttcactgcttcccctgtcattgtaacagccttcacctttcatttcaatgtccatccagtagcattcgaactcaaagatccattaaatgtgctttcagcaacaaggatctctgtgattctgtgtgctacgatctactcagctactggtctcttttgttaccttctgtttggggattccactatgacagatgttctaatgaactttgatcaaagcaccagttcttcggttggttcattactaaatgatattgttagactcagctacgcgattcacctcatgctcgtgtttcctctgctcaacttctcgcttagagccaacctcgacgaactcttgttccctatgaagctttctttagtggaagacaacaaaagattcttcgcactcacttttccattactgatatcttgtttcttgggtgcaattgccataccagacatttggtacttctttcagttcttgggatcaacttctacagtctctatagcattcatctttccagctgcaattgtcctacggaatgtaaatggtttctcgactttaagagagaagattgtagcttcagtaatgcttgttcttgctgttgccacaagtatcatcgctatttcgacaaatatatacactttcacagcaacagaagaaacatga

SEQ ID NO: 48361 - protein, 440 aa, Arabidopsis thaliana
  peptide (1)..(440): Ceres Seq. ID no. 13649217
MSPAIKAPLLPNQEPSSSSSENHGSFAGAVFNISTSIVGAGIMAIPAAFKVLGVIPSLSIIVIIAWLSNVSAGFLMKSSLAGESTTYAGVMKESFGKSGAVAVTVVTMVVTFGSMIIFSIIIGDVISGNEKDGIIHLGLLQEWFGSHWWNTRFFGLLFIFVFLFLPLVLCRRVERLAFSSAISFLLALLFVVISSVLAIIALVQGKTKPPRLFPELNDGGLSFFSLFTASPVIVTAFTFHFNVHPVAFELKDPLNVLSATRISVILCATIYSATGLFCYLLFGDSTMTDVLMNFDQSTSSSVGSLLNDIVRLSYAIHLMLVFPLLNFSLRANLDELLFPMKLSLVEDNKRFFALTFPLLISCFLGAIAIPDIWYFFQFLGSTSTVSIAFIFPAAIVLRNVNGFSTLREKIVASVMLVLAVATSIIAISTNIYTFTATEET

SEQ ID NO: 48362 - protein, 398 aa, Arabidopsis thaliana
  peptide (1)..(398): Ceres Seq. ID no. 13649218
MAIPAAFKVLGVIPSLSIIVIIAWLSNVSAGFLMKSSLAGESTTYAGVMKESFGKSGAVAVTVVTMVVTFGSMIIFSIIIGDVISGNEKDGIIHLGLLQEWFGSHWWNTRFFGLLFIFVFLFLPLVLCRRVERLAFSSAISFLLALLFVVISSVLAIIALVQGKTKPPRLFPELNDGGLSFFSLFTASPVIVTAFTFHFNVHPVAFELKDPLNVLSATRISVILCATIYSATGLFCYLLFGDSTMTDVLMNFDQSTSSSVGSLLNDIVRLSYAIHLMLVFPLLNFSLRANLDELLFPMKLSLVEDNKRFFALTFPLLISCFLGAIAIPDIWYFFQFLGSTSTVSIAFIFPAAIVLRNVNGFSTLREKIVASVMLVLAVATSIIAISTNIYTFTATEET

SEQ ID NO: 48363 - protein, 365 aa, Arabidopsis thaliana
  peptide (1)..(365): Ceres Seq. ID no. 13649219
MKSSLAGESTTYAGVMKESFGKSGAVAVTVVTMVVTFGSMIIFSIIIGDVISGNEKDGIIHLGLLQEWFGSHWWNTRFFGLLFIFVFLFLPLVLCRRVERLAFSSAISFLLALLFVVISSVLAIIALVQGKTKPPRLFPELNDGGLSFFSLFTASPVIVTAFTFHFNVHPVAFELKDPLNVLSATRISVILCATIYSATGLFCYLLFGDSTMTDVLMNFDQSTSSSVGSLLNDIVRLSYAIHLMLVFPLLNFSLRANLDELLFPMKLSLVEDNKRFFALTFPLLISCFLGAIAIPDIWYFFQFLGSTSTVSIAFIFPAAIVLRNVNGFSTLREKIVASVMLVLAVATSIIAISTNIYTFTATEET

SEQ ID NO: 48364 - DNA, 1322 bp, Arabidopsis thaliana
  misc_feature (1)..(1322): Ceres Seq. ID no. 13649220
  misc_feature (1)..(1322): Ortholog of  Ceres SEQ ID NO 15175767 as cited in SEQ ID NO 56994
gacgacacgagatcatcgaatttggaccgtaaaagagacaagcagcttcataatcaaaccatcatcattatcatcatgttgacgaacacgatctaatttttccttttacatatacaattcccaaactccagatttcttccttattcgtcctgtttcatttctacggttcatgttctctactttcaaccctcgctaacgttttcgacttctccacatctcgattcagcttctccttcgtccaaattcgattagattttgaattgggaagctgacaagtttgaagatttctcatttgatggattgatctgatttcgcaattttcattttcccgtttcgggttcaattgatttcgatcagattgaacccaatccaaatccaatcagggctacttcgatttgatctgtttcctcaaaaaaggattcgactttctctgagatggtatatttccagaactcaatctccctcgtagaccaatctccaatcatggctcactcaccagattttcatcatcattcaaaacaatcaagaaccagcagcagcaacagaaagtcatcatcgtcaagctgttcttcaaatttctctgtttgctgtgacggatctagatcagctgctatcgatgttgtgatcttaatcgctgtgatcacatcctccgggtttttaatcttcccttacatcaaattcatcactatcaaatctgttgaaatcttctctgagctctcttgtttagtgaaagaagagattttgcgtaaccctgatccaattgtctacggtttaatagctttgagtatctcgtgtactgcgttatctgcttggatgattgttatactactgtgtagtcgtcatcgatgtgggaaaccgaactgtaaagggcttaggaaagctaatgctgagtttgatattcagttagagactgaggattgtgttaagagctctaatagtggcaagagtgttagtaagaagggtttgtttgagttgcctcgtgatcatcaccgtgagttagaggcggagttgaagaagatggctccacctaatgggcgagccgtgcttgtttttcgggctaaatgtgggtgttcggttgggagattagaggttcctggacctaagaagcagcaactgcagcaaaggaaggttaagaaatgaagtataaaggttcaatctttttgaggtaaaggttattatgatgatgatgatgattactttgattagtttataaacaacctttttttcttttgggtttagttattttcagaagaacttcttacagaaactaatactatgttaaatctccatgtgtttaaataaaagctttacaaggatattgc

SEQ ID NO: 48365 - protein, 234 aa, Arabidopsis thaliana
  peptide (1)..(234): Ceres Seq. ID no. 13649221
MVYFQNSISLVDQSPIMAHSPDFHHHSKQSRTSSSNRKSSSSSCSSNFSVCCDGSRSAAIDVVILIAVITSSGFLIFPYIKFITIKSVEIFSELSCLVKEEILRNPDPIVYGLIALSISCTALSAWMIVILLCSRHRCGKPNCKGLRKANAEFDIQLETEDCVKSSNSGKSVSKKGLFELPRDHHRELEAELKKMAPPNGRAVLVFRAKCGCSVGRLEVPGPKKQQLQQRKVKK

SEQ ID NO: 48366 - protein, 218 aa, Arabidopsis thaliana
  peptide (1)..(218): Ceres Seq. ID no. 13649222
MAHSPDFHHHSKQSRTSSSNRKSSSSSCSSNFSVCCDGSRSAAIDVVILIAVITSSGFLIFPYIKFITIKSVEIFSELSCLVKEEILRNPDPIVYGLIALSISCTALSAWMIVILLCSRHRCGKPNCKGLRKANAEFDIQLETEDCVKSSNSGKSVSKKGLFELPRDHHRELEAELKKMAPPNGRAVLVFRAKCGCSVGRLEVPGPKKQQLQQRKVKK

SEQ ID NO: 48367 - DNA, 1049 bp, Arabidopsis thaliana
  misc_feature (1)..(1049): Ceres Seq. ID no. 13649223
  misc_feature (1)..(1049): Ortholog of  Ceres SEQ ID NO 14307265 as cited in SEQ ID NO 54298
ggcaatcaaaacaacttttccaatttttcagttccgatctgctgccattgactaggaagatcttcaagcttcaaaactctataatcggatcttttattccttgtggagatatggatggagatggttctagctttgagcagtgttaccgttgttatcctgtcacattcattgacaaggcacatcttgagaagggtgacaaaattatcatgcctccttccgctctcgatcgtcttgcttctttgcatattgaatacccaatgctgtttcaactgagtaatgtttctgttgagaagacctcacattgtggtgtactagaattcactgcagacgaaggcctagtttacttgccatattggatgatgcaaaacatgtctcttgaagagggagacgttatgcaagttaagaatatcagcttggtaaaagggacttacatcaagctgcagcctcacactcaagatttcttggatatttccaacccaaaaaatgtcttggagactacgcttaggagttactcttgcttaaccacgggtgatacaattatggttccgtataacaacaagcaatattacatcaatgtggttgaggcaaaaccttcttcagctgtgagtattatcgaaacggattgtgaggttgattttgctcctcctcttgattacaaagaacctgagaagccacagaagttgactccttcaaacaaacgacctctccaagttaaagaagaagaagaacctgcaagcaaagttcccaaattcacgccgttcactggatcaggaaaacgtttagatggaaaagcacaaacacaaactgaaccagaagatacaaaacagcaagaaaagccgactgagaatgggaaagacgatgagaagttgtcagtcactacaccaaggcaaatatcaggaaagctcgtctttggttcaaacagcaaatcagctgcaaaagaaacagcgaaagttgatgatccaaagaacattgtgcaagagagctcaacaaaatccgatgaagctaagttcaaagtgttcacagggaagaaatactcactcaatggttaa

SEQ ID NO: 48368 - protein, 348 aa, Arabidopsis thaliana
  peptide (1)..(348): Ceres Seq. ID no. 13649224
QSKQLFQFFSSDLLPLTRKIFKLQNSIIGSFIPCGDMDGDGSSFEQCYRCYPVTFIDKAHLEKGDKIIMPPSALDRLASLHIEYPMLFQLSNVSVEKTSHCGVLEFTADEGLVYLPYWMMQNMSLEEGDVMQVKNISLVKGTYIKLQPHTQDFLDISNPKNVLETTLRSYSCLTTGDTIMVPYNNKQYYINVVEAKPSSAVSIIETDCEVDFAPPLDYKEPEKPQKLTPSNKRPLQVKEEEEPASKVPKFTPFTGSGKRLDGKAQTQTEPEDTKQQEKPTENGKDDEKLSVTTPRQISGKLVFGSNSKSAAKETAKVDDPKNIVQESSTKSDEAKFKVFTGKKYSLNG

SEQ ID NO: 48369 - protein, 312 aa, Arabidopsis thaliana
  peptide (1)..(312): Ceres Seq. ID no. 13649225
MDGDGSSFEQCYRCYPVTFIDKAHLEKGDKIIMPPSALDRLASLHIEYPMLFQLSNVSVEKTSHCGVLEFTADEGLVYLPYWMMQNMSLEEGDVMQVKNISLVKGTYIKLQPHTQDFLDISNPKNVLETTLRSYSCLTTGDTIMVPYNNKQYYINVVEAKPSSAVSIIETDCEVDFAPPLDYKEPEKPQKLTPSNKRPLQVKEEEEPASKVPKFTPFTGSGKRLDGKAQTQTEPEDTKQQEKPTENGKDDEKLSVTTPRQISGKLVFGSNSKSAAKETAKVDDPKNIVQESSTKSDEAKFKVFTGKKYSLNG

SEQ ID NO: 48370 - protein, 280 aa, Arabidopsis thaliana
  peptide (1)..(280): Ceres Seq. ID no. 13649226
MPPSALDRLASLHIEYPMLFQLSNVSVEKTSHCGVLEFTADEGLVYLPYWMMQNMSLEEGDVMQVKNISLVKGTYIKLQPHTQDFLDISNPKNVLETTLRSYSCLTTGDTIMVPYNNKQYYINVVEAKPSSAVSIIETDCEVDFAPPLDYKEPEKPQKLTPSNKRPLQVKEEEEPASKVPKFTPFTGSGKRLDGKAQTQTEPEDTKQQEKPTENGKDDEKLSVTTPRQISGKLVFGSNSKSAAKETAKVDDPKNIVQESSTKSDEAKFKVFTGKKYSLNG

SEQ ID NO: 48371 - DNA, 1037 bp, Arabidopsis thaliana; identical to SEQ ID NO: 48268
  misc_feature (1)..(1037): Ceres Seq. ID no. 13649313
  misc_feature (1)..(1037): Ortholog of  Ceres SEQ ID NO 13595569 as cited in SEQ ID NO 56778
  misc_feature (1)..(1037): Ortholog of  Ceres SEQ ID NO 12611159 as cited in SEQ ID NO 59821

SEQ ID NO: 48372 - protein, 257 aa, Arabidopsis thaliana; identical to SEQ ID NO: 48269
  peptide (1)..(257): Ceres Seq. ID no. 15219587

SEQ ID NO: 48373 - protein, 246 aa, Arabidopsis thaliana; identical to SEQ ID NO: 48270
  peptide (1)..(246): Ceres Seq. ID no. 15219588

SEQ ID NO: 48374 - protein, 200 aa, Arabidopsis thaliana; identical to SEQ ID NO: 48271
  peptide (1)..(200): Ceres Seq. ID no. 15219589

SEQ ID NO: 48375 - DNA, 1331 bp, Arabidopsis thaliana
  misc_feature (1)..(1331): Ceres Seq. ID no. 13649303
  misc_feature (1)..(1331): Ortholog of  Ceres SEQ ID NO 14304983 as cited in SEQ ID NO 53862
  misc_feature (1)..(1331): Ortholog of  Ceres SEQ ID NO 14310483 as cited in SEQ ID NO 58376
  misc_feature (1)..(1331): Ortholog of  Ceres SEQ ID NO 13597528 as cited in SEQ ID NO 64802
ggtgaacatagaaacactcaaaacttcaaaccaaaaaaaataaatgggagaggaagagaagaaaccagaagcagcagaggaaaagaaaatggaagagaagaaaccagaagagaaaaaagaaggagaagacaagaaagtggatgctgagaaaaaaggagaagattctgacaagaagcctcaagaaggagaatctaacaaagattccaaagaagattctgctccggcggcgcctgaggctccagcaccgcctcctccgccgcaagaggttgttcttaaggtttacatgcactgtgaaggatgtgctagaaaagtccgccgttgtctcaaaggcttcgaaggagtggaagatgtgatgactgattgtaaaacggggaaagtggtggtgaaaggtgagaaagctgatccattgaaagtattagctagagttcagaggaagacccaccgtcaagttcagcttctgtctccgattcctcctccgcctccgccgccggagaagaaagcagaggaggataaacccattgtggaagagaagaaagtggagcctccggtggttgtgacggtggttcttaaggttcacatgcactgtgaagcttgtgcgacagagatcaagaaacggatcatgagaatgaaaggagtggaatctgctgaatccgacttaaagagttctcaagtgacggtgaaaggagtttttgaaccacaaaagcttgtagaatacgtttataagcgaaccggaaaacatgctgcgatcatgaaaatcgacccaccgcctccaccaccacctgaggaggcggctgcggcagcggaaggagagaagaaggaagaagaaaagggagaaggagaatccaaaggcgaagaagggaaggatgataaggcgaagacggacgaagaaaagaaagaaggggatggtggtaaaggggaaggcgaagcagcggataatggcggtggggaggaagaaggcaaagttgtggaggtgagaaagatagagaatccttattactactactattaccaaccaccgcgtgtggcgattccgcctatggaaatgccgccacacgcttatccgcctcaattgttcagcgacgagaatccaaatgcatgtactgtaatgtaacaaagaaaaacgcaaatgctataaagggtataatggggaatattttgaacaattttgatgaagtgggtacatggcatttgctgtctctcatagcatgtggtttctttctaatgtgtttgtgcagctcttttcttttaactgtaatttacattttaaaaaactcgcaacacgagttatttttaatggctatatataaacaataaaataataaatttactct

SEQ ID NO: 48376 - protein, 355 aa, Arabidopsis thaliana
  peptide (1)..(355): Ceres Seq. ID no. 13649304
MGEEEKKPEAAEEKKMEEKKPEEKKEGEDKKVDAEKKGEDSDKKPQEGESNKDSKEDSAPAAPEAPAPPPPPQEVVLKVYMHCEGCARKVRRCLKGFEGVEDVMTDCKTGKVVVKGEKADPLKVLARVQRKTHRQVQLLSPIPPPPPPPEKKAEEDKPIVEEKKVEPPVVVTVVLKVHMHCEACATEIKKRIMRMKGVESAESDLKSSQVTVKGVFEPQKLVEYVYKRTGKHAAIMKIDPPPPPPPEEAAAAAEGEKKEEEKGEGESKGEEGKDDKAKTDEEKKEGDGGKGEGEAADNGGGEEEGKVVEVRKIENPYYYYYYQPPRVAIPPMEMPPHAYPPQLFSDENPNACTVM

SEQ ID NO: 48377 - protein, 340 aa, Arabidopsis thaliana
  peptide (1)..(340): Ceres Seq. ID no. 13649305
MEEKKPEEKKEGEDKKVDAEKKGEDSDKKPQEGESNKDSKEDSAPAAPEAPAPPPPPQEVVLKVYMHCEGCARKVRRCLKGFEGVEDVMTDCKTGKVVVKGEKADPLKVLARVQRKTHRQVQLLSPIPPPPPPPEKKAEEDKPIVEEKKVEPPVVVTVVLKVHMHCEACATEIKKRIMRMKGVESAESDLKSSQVTVKGVFEPQKLVEYVYKRTGKHAAIMKIDPPPPPPPEEAAAAAEGEKKEEEKGEGESKGEEGKDDKAKTDEEKKEGDGGKGEGEAADNGGGEEEGKVVEVRKIENPYYYYYYQPPRVAIPPMEMPPHAYPPQLFSDENPNACTVM

SEQ ID NO: 48378 - protein, 275 aa, Arabidopsis thaliana
  peptide (1)..(275): Ceres Seq. ID no. 13649306
MHCEGCARKVRRCLKGFEGVEDVMTDCKTGKVVVKGEKADPLKVLARVQRKTHRQVQLLSPIPPPPPPPEKKAEEDKPIVEEKKVEPPVVVTVVLKVHMHCEACATEIKKRIMRMKGVESAESDLKSSQVTVKGVFEPQKLVEYVYKRTGKHAAIMKIDPPPPPPPEEAAAAAEGEKKEEEKGEGESKGEEGKDDKAKTDEEKKEGDGGKGEGEAADNGGGEEEGKVVEVRKIENPYYYYYYQPPRVAIPPMEMPPHAYPPQLFSDENPNACTVM

SEQ ID NO: 48379 - DNA, 1419 bp, Arabidopsis thaliana
  misc_feature (1)..(1419): Ceres Seq. ID no. 13649083
  misc_feature (1)..(1419): Ortholog of  Ceres SEQ ID NO 14313264 as cited in SEQ ID NO 67300
tctttctctctctcgaataataatttttcatttgctgcgtccttttggtgcttgaagcgatgaccatggcagcaaatctagcgcgacggctgatcggaaaccgatcgactcagatccttggagccgtgaactctagctcaggtgcggctagttctgtcgctagggctttctgctcctccaccactccgatcaccgcaactctcttccctggcgatgggatcggtcccgagatcgccgaatctgtcaaaaaggtgtttacaacagctggtgtaccaattgagtgggaagaacactatgttgggactgagatagatccgagaacacagagtttcttgacatgggaaagtctcgaatctgtgcgtagaaacaaagttggtttgaaaggtccaatggctactccaattgggaaaggtcaccgttctttgaacctgactcttaggaaagagcttaatctatatgccaatgttagaccttgttacagtcttcctggttacaaaactcgttacgatgatgttgatctcattaccatcagagaaaacacggaaggagaatacagtggccttgaacatcaggttgttagaggtgtggtggaaagtcttaaaatcattacccgtcaggcgagtttgagagttgcagagtatgcttttctctatgccaagactcatggaagagagagagtttctgctatccacaaagccaacattatgcagaaaactgacggtctctttctcaagtgttgtcgtgaggttgctgagaagtatcctgagatcacttacgaggaggtcgttattgacaactgctgtatgatgcttgtgaaaaacccagcactttttgatgtcttggtgatgccaaacctgtacggtgacattattagcgatctgtgtgccggattggttggaggactaggattgactccaagttgtaatattggagaagatggtgtagcccttgctgaagcagttcacggttctgcacctgatatcgctggaaagaacttggcgaacccaaccgcgttgcttctgagtggagtgatgatgttgcgtcacctgaagttcaacgaacaagcagaacaaatccacagtgcaatcatcaacaccatagcagagggcaaatacagaaccgcggatcttggaggtagttcgaccaccacggaattcacaaaggcaatctgtgatcatctctgaacatcgtaaaatccaattctttatcgaatcttcttttgggagccttttttatagcctcgaattcttcttgttttcttgttttacgattagaataaaagaaaaagcaaaaaaacggctcttcatgagttttgaagttattgtttctgccttaaaatttctctgccgtaaggcaagaagattcataacactggaaaaagtgatgttctttctgaatcgatcagaagaattttgtttt

SEQ ID NO: 48380 - protein, 374 aa, Arabidopsis thaliana
  peptide (1)..(374): Ceres Seq. ID no. 13649084
MTMAANLARRLIGNRSTQILGAVNSSSGAASSVARAFCSSTTPITATLFPGDGIGPEIAESVKKVFTTAGVPIEWEEHYVGTEIDPRTQSFLTWESLESVRRNKVGLKGPMATPIGKGHRSLNLTLRKELNLYANVRPCYSLPGYKTRYDDVDLITIRENTEGEYSGLEHQVVRGVVESLKIITRQASLRVAEYAFLYAKTHGRERVSAIHKANIMQKTDGLFLKCCREVAEKYPEITYEEVVIDNCCMMLVKNPALFDVLVMPNLYGDIISDLCAGLVGGLGLTPSCNIGEDGVALAEAVHGSAPDIAGKNLANPTALLLSGVMMLRHLKFNEQAEQIHSAIINTIAEGKYRTADLGGSSTTTEFTKAICDHL

SEQ ID NO: 48381 - protein, 372 aa, Arabidopsis thaliana
  peptide (1)..(372): Ceres Seq. ID no. 13649085
MAANLARRLIGNRSTQILGAVNSSSGAASSVARAFCSSTTPITATLFPGDGIGPEIAESVKKVFTTAGVPIEWEEHYVGTEIDPRTQSFLTWESLESVRRNKVGLKGPMATPIGKGHRSLNLTLRKELNLYANVRPCYSLPGYKTRYDDVDLITIRENTEGEYSGLEHQVVRGVVESLKIITRQASLRVAEYAFLYAKTHGRERVSAIHKANIMQKTDGLFLKCCREVAEKYPEITYEEVVIDNCCMMLVKNPALFDVLVMPNLYGDIISDLCAGLVGGLGLTPSCNIGEDGVALAEAVHGSAPDIAGKNLANPTALLLSGVMMLRHLKFNEQAEQIHSAIINTIAEGKYRTADLGGSSTTTEFTKAICDHL

SEQ ID NO: 48382 - protein, 264 aa, Arabidopsis thaliana
  peptide (1)..(264): Ceres Seq. ID no. 13649086
MATPIGKGHRSLNLTLRKELNLYANVRPCYSLPGYKTRYDDVDLITIRENTEGEYSGLEHQVVRGVVESLKIITRQASLRVAEYAFLYAKTHGRERVSAIHKANIMQKTDGLFLKCCREVAEKYPEITYEEVVIDNCCMMLVKNPALFDVLVMPNLYGDIISDLCAGLVGGLGLTPSCNIGEDGVALAEAVHGSAPDIAGKNLANPTALLLSGVMMLRHLKFNEQAEQIHSAIINTIAEGKYRTADLGGSSTTTEFTKAICDHL

SEQ ID NO: 48383 - DNA, 2720 bp, Arabidopsis thaliana
  misc_feature (1)..(2720): Ceres Seq. ID no. 12575670
  misc_feature (1)..(2720): Ortholog of  Ceres SEQ ID NO 13659394 as cited in SEQ ID NO 67049
gaattagttcttatctttcgtctgcttcatcttctctctagtctctctctctctcttcaccgcgtacacagtaacacagaccctttttccctcttactcaaggttcttctttgtcatcttgttgccgaatccacaaagaggagaataaagattcgacctttattagatattaacgactctggatttttgggtttttggagttggatccacatgggttcttatccggatggattccctggatccatggacgagttggatttcaataaggactttgatttgcctccctcctcaaaccaaaccttaggtttagctaatgggttctatttagatgacttagatttctcatccttggatcctccagaggcatatccctcccagaacaacaacaacaacaacatcaacaacaaagctgtagcaggagatctgttatcatcttcatctgatgacgctgatttctctgattctgttttgaagtatataagccaagttcttatggaagaggatatggaagagaagccttgtatgtttcatgacgctttggctcttcaagctgctgagaaatctctctatgaggctcttggtgagaaatacccttcttcgtcttctgcttcttctgtggatcatcctgagagattggctagtgatagccctgacggttcttgttcaggtggtgcttttagtgattacgctagcaccactaccactacttcctctgattctcactggagtgttgatggtttggagaatagaccttcttggttacatacacctatgccgagtaattttgttttccagtctacttctaggtccaacagtgtcaccggtggtggtggtggtggtaatagtgcggtttacggttcaggttttggcgatgatttggtttcgaatatgtttaaagatgatgaattggctatgcagttcaagaaaggggttgaggaagctagtaagttccttcctaagtcttctcagctctttattgatgtggatagttacatccctatgaattctggttccaaggaaaatggttctgaggtttttgttaagacggagaagaaagatgagacagagcatcatcatcatcatagctatgctcctcctcccaacagattaactggtaagaaaagccattggcgcgacgaagatgaagatttcgttgaagaaagaagtaacaagcaatcagctgtttatgttgaggaaagcgagctttctgaaatgtttgataagatcttggtatgtggccctgggaaacctgtatgcattcttaaccagaactttcctacagaatccgctaaagtcgtgaccgcacagtcaaatggagcaaagattcgtgggaagaaatcaacttctactagtcatagtaacgattctaagaaagaaactgctgatttgaggactcttttggtgttatgtgcacaagctgtatcagtggatgatcgtagaaccgccaacgaaatgctaaggcagatacgagagcattcttcgcctctaggcaatggttcagagcggttggctcattattttgcaaatagtcttgaagcacgcttagctgggaccggtacacagatctacaccgctttatcttcgaagaaaacgtctgcagcagacatgttgaaggcttaccagacatacatgtcggtctgccctttcaagaaagctgctatcatatttgctaaccacagcatgatgcgtttcactgcaaacgccaacacgatccacataatagatttcggaatatcttacggttttcagtggcctgctctgattcatcgcctctcgctcagcagacctggtggttcgcctaagcttcgaattaccggtatagagcttcctcagcgcggttttagaccagcggaaggagttcaggagacaggtcatcgcttggctcgatactgtcagcgacacaatgttccgtttgagtacaacgcaattgctcagaaatgggaaacgatccaagtcgaagacttaaagcttcgacaaggagagtatgtggttgtgaactctttgttccgtttcaggaaccttctagatgagaccgttctggtaaacagcccgagagatgcagttttgaagctgataagaaaaataaacccgaatgtcttcattccagcgatcttaagcgggaattacaacgcgccattctttgtcacgaggttcagagaagcgttgtttcattactcggctgtgtttgatatgtgtgactcgaagctagctagggaagacgagatgaggctgatgtatgagaaagagttttatgggagagagattgtgaatgttgtggcttgtgaaggaacagagagagtggagagaccagagacatataagcagtggcaggcgagactgatccgagccggatttagacagcttccgcttgagaaggaactgatgcagaatctgaagttgaaaatcgaaaacgggtacgataaaaacttcgatgttgatcaaaacggtaactggttacttcaagggtggaaaggtagaatcgtgtatgcttcatctctatgggttccttcgtcttcatagatgttgtttcttacgttctaagcgactgggatttatgtagggcttttctgttgatagtctctcgccaacacgagtggattaagttcagagttagggttcttgaacactagaatgttgttatattatgcttgtgacatagcgtgtgtaagagtgtagcctaagagatatagtactcattgcatgatcttttgctatatgtt

SEQ ID NO: 48384 - protein, 839 aa, Arabidopsis thaliana
  peptide (1)..(839): Ceres Seq. ID no. 12575671
ELVLIFRLLHLLSSLSLSLHRVHSNTDPFSLLLKVLLCHLVAESTKRRIKIRPLLDINDSGFLGFWSWIHMGSYPDGFPGSMDELDFNKDFDLPPSSNQTLGLANGFYLDDLDFSSLDPPEAYPSQNNNNNNINNKAVAGDLLSSSSDDADFSDSVLKYISQVLMEEDMEEKPCMFHDALALQAAEKSLYEALGEKYPSSSSASSVDHPERLASDSPDGSCSGGAFSDYASTTTTTSSDSHWSVDGLENRPSWLHTPMPSNFVFQSTSRSNSVTGGGGGGNSAVYGSGFGDDLVSNMFKDDELAMQFKKGVEEASKFLPKSSQLFIDVDSYIPMNSGSKENGSEVFVKTEKKDETEHHHHHSYAPPPNRLTGKKSHWRDEDEDFVEERSNKQSAVYVEESELSEMFDKILVCGPGKPVCILNQNFPTESAKVVTAQSNGAKIRGKKSTSTSHSNDSKKETADLRTLLVLCAQAVSVDDRRTANEMLRQIREHSSPLGNGSERLAHYFANSLEARLAGTGTQIYTALSSKKTSAADMLKAYQTYMSVCPFKKAAIIFANHSMMRFTANANTIHIIDFGISYGFQWPALIHRLSLSRPGGSPKLRITGIELPQRGFRPAEGVQETGHRLARYCQRHNVPFEYNAIAQKWETIQVEDLKLRQGEYVVVNSLFRFRNLLDETVLVNSPRDAVLKLIRKINPNVFIPAILSGNYNAPFFVTRFREALFHYSAVFDMCDSKLAREDEMRLMYEKEFYGREIVNVVACEGTERVERPETYKQWQARLIRAGFRQLPLEKELMQNLKLKIENGYDKNFDVDQNGNWLLQGWKGRIVYASSLWVPSSS

SEQ ID NO: 48385 - protein, 769 aa, Arabidopsis thaliana
  peptide (1)..(769): Ceres Seq. ID no. 12575672
MGSYPDGFPGSMDELDFNKDFDLPPSSNQTLGLANGFYLDDLDFSSLDPPEAYPSQNNNNNNINNKAVAGDLLSSSSDDADFSDSVLKYISQVLMEEDMEEKPCMFHDALALQAAEKSLYEALGEKYPSSSSASSVDHPERLASDSPDGSCSGGAFSDYASTTTTTSSDSHWSVDGLENRPSWLHTPMPSNFVFQSTSRSNSVTGGGGGGNSAVYGSGFGDDLVSNMFKDDELAMQFKKGVEEASKFLPKSSQLFIDVDSYIPMNSGSKENGSEVFVKTEKKDETEHHHHHSYAPPPNRLTGKKSHWRDEDEDFVEERSNKQSAVYVEESELSEMFDKILVCGPGKPVCILNQNFPTESAKVVTAQSNGAKIRGKKSTSTSHSNDSKKETADLRTLLVLCAQAVSVDDRRTANEMLRQIREHSSPLGNGSERLAHYFANSLEARLAGTGTQIYTALSSKKTSAADMLKAYQTYMSVCPFKKAAIIFANHSMMRFTANANTIHIIDFGISYGFQWPALIHRLSLSRPGGSPKLRITGIELPQRGFRPAEGVQETGHRLARYCQRHNVPFEYNAIAQKWETIQVEDLKLRQGEYVVVNSLFRFRNLLDETVLVNSPRDAVLKLIRKINPNVFIPAILSGNYNAPFFVTRFREALFHYSAVFDMCDSKLAREDEMRLMYEKEFYGREIVNVVACEGTERVERPETYKQWQARLIRAGFRQLPLEKELMQNLKLKIENGYDKNFDVDQNGNWLLQGWKGRIVYASSLWVPSSS

SEQ ID NO: 48386 - protein, 758 aa, Arabidopsis thaliana
  peptide (1)..(758): Ceres Seq. ID no. 12575673
MDELDFNKDFDLPPSSNQTLGLANGFYLDDLDFSSLDPPEAYPSQNNNNNNINNKAVAGDLLSSSSDDADFSDSVLKYISQVLMEEDMEEKPCMFHDALALQAAEKSLYEALGEKYPSSSSASSVDHPERLASDSPDGSCSGGAFSDYASTTTTTSSDSHWSVDGLENRPSWLHTPMPSNFVFQSTSRSNSVTGGGGGGNSAVYGSGFGDDLVSNMFKDDELAMQFKKGVEEASKFLPKSSQLFIDVDSYIPMNSGSKENGSEVFVKTEKKDETEHHHHHSYAPPPNRLTGKKSHWRDEDEDFVEERSNKQSAVYVEESELSEMFDKILVCGPGKPVCILNQNFPTESAKVVTAQSNGAKIRGKKSTSTSHSNDSKKETADLRTLLVLCAQAVSVDDRRTANEMLRQIREHSSPLGNGSERLAHYFANSLEARLAGTGTQIYTALSSKKTSAADMLKAYQTYMSVCPFKKAAIIFANHSMMRFTANANTIHIIDFGISYGFQWPALIHRLSLSRPGGSPKLRITGIELPQRGFRPAEGVQETGHRLARYCQRHNVPFEYNAIAQKWETIQVEDLKLRQGEYVVVNSLFRFRNLLDETVLVNSPRDAVLKLIRKINPNVFIPAILSGNYNAPFFVTRFREALFHYSAVFDMCDSKLAREDEMRLMYEKEFYGREIVNVVACEGTERVERPETYKQWQARLIRAGFRQLPLEKELMQNLKLKIENGYDKNFDVDQNGNWLLQGWKGRIVYASSLWVPSSS

SEQ ID NO: 48387 - DNA, 3085 bp, Arabidopsis thaliana; identical to SEQ ID NO: 45153
  misc_feature (1)..(3085): Ceres Seq. ID no. 13592143
  misc_feature (1)..(3085): Ortholog of  Ceres SEQ ID NO 14308209 as cited in SEQ ID NO 58800

SEQ ID NO: 48388 - protein, 949 aa, Arabidopsis thaliana; identical to SEQ ID NO: 45154
  peptide (1)..(949): Ceres Seq. ID no. 15221079
  misc_feature (1)..(1): Xaa is any aa, unknown or other

SEQ ID NO: 48389 - protein, 917 aa, Arabidopsis thaliana; identical to SEQ ID NO: 45155
  peptide (1)..(917): Ceres Seq. ID no. 15221080

SEQ ID NO: 48390 - protein, 838 aa, Arabidopsis thaliana; identical to SEQ ID NO: 45156
  peptide (1)..(838): Ceres Seq. ID no. 15221081

SEQ ID NO: 48391 - DNA, 1423 bp, Arabidopsis thaliana
  misc_feature (1)..(1423): Ceres Seq. ID no. 14310247
  misc_feature (1)..(1423): Ortholog of  Ceres SEQ ID NO 14302216 as cited in SEQ ID NO 66456
gattctcattccttcctcctgtttccgtaccgggggattttgtgatcatcaaaatcaaaaacaatcagatttcttctaccaaacgattaattgccttttgggatacgattcagggcttcttttggggcctctgtttgaattaacaccttgtttgctgcaaacaataataaggaaagataaacgagatggtgtcggacaatgagatgggtttgatattagctgtgtcgtcgagcgtcttcataggttccagcttcattttgaagaagaaaggtctcaagcgcgctgctgctaatggcacccgcgctggtttcggaggttatacatatttgttagagccactttggtgggtaggcttggtaacaatgacttttggagaaattgctaattttgtggcttacgtttatgaacctgctgtactagtcactcctcttggcgcattaagtataatcatcagtgctgttttggcacatttcttgttagacgaaaaacttaggaaaatgggagtttggggatgtgtttgttgcattgtgggctcagttatgatcgtcatacacgcacctcaggaacagactcccaattctgtagaagaaatctggaaactagcaatgcaaccagcttttctaatttacgtagccatatcaatgtcgatagtcctggctttgattctctactgtgaacctctctgcggccaaaccaacattcttgtttatatcggaatttgttcgttgatgggttctctcacagttatgagcatcaaggctgtagggattgccataaagttaacatttgaagggataaaccagatttggtatccagagacttggttttttgccatggttgcagcaatctgtgtggttatgcaaatgatttacctcaacaaggcgctggacacattcaacgcagcaattgtttctccaatctattatgtgatgttcacaacactcacaattgttgctagtgcaatcatgttcaaggactggaatgggcaaaacacagacagcatagcctctgagatttgtggattcctcacagtgcttacaggaacggttatactccattccacgagagaagaggaacaagcttcgccacgacgaatgagatggcaggattccgggaagagctttgacgaagaacatttgacaagtttgtacagtcctgaatattaggaaggtaacaaagatttaaaccttgtgctgaacggaaggatgttgggatccgaatcagaagatcatctaattaatctcttagtggggaaaagaatgtaaactagctttctgtatatacttgatagttttgtaacagtcttttgtatacaaatttgtccactgtttgttcatattcatttatttttgagctcttaggacagatttgttaccatgtatagatcatataacattgactattattattttgatccaacaat

SEQ ID NO: 48392 - protein, 326 aa, Arabidopsis thaliana
  peptide (1)..(326): Ceres Seq. ID no. 14310248
MVSDNEMGLILAVSSSVFIGSSFILKKKGLKRAAANGTRAGFGGYTYLLEPLWWVGLVTMTFGEIANFVAYVYEPAVLVTPLGALSIIISAVLAHFLLDEKLRKMGVWGCVCCIVGSVMIVIHAPQEQTPNSVEEIWKLAMQPAFLIYVAISMSIVLALILYCEPLCGQTNILVYIGICSLMGSLTVMSIKAVGIAIKLTFEGINQIWYPETWFFAMVAAICVVMQMIYLNKALDTFNAAIVSPIYYVMFTTLTIVASAIMFKDWNGQNTDSIASEICGFLTVLTGTVILHSTREEEQASPRRMRWQDSGKSFDEEHLTSLYSPEY

SEQ ID NO: 48393 - protein, 320 aa, Arabidopsis thaliana
  peptide (1)..(320): Ceres Seq. ID no. 14310249
MGLILAVSSSVFIGSSFILKKKGLKRAAANGTRAGFGGYTYLLEPLWWVGLVTMTFGEIANFVAYVYEPAVLVTPLGALSIIISAVLAHFLLDEKLRKMGVWGCVCCIVGSVMIVIHAPQEQTPNSVEEIWKLAMQPAFLIYVAISMSIVLALILYCEPLCGQTNILVYIGICSLMGSLTVMSIKAVGIAIKLTFEGINQIWYPETWFFAMVAAICVVMQMIYLNKALDTFNAAIVSPIYYVMFTTLTIVASAIMFKDWNGQNTDSIASEICGFLTVLTGTVILHSTREEEQASPRRMRWQDSGKSFDEEHLTSLYSPEY

SEQ ID NO: 48394 - protein, 267 aa, Arabidopsis thaliana
  peptide (1)..(267): Ceres Seq. ID no. 14310250
MTFGEIANFVAYVYEPAVLVTPLGALSIIISAVLAHFLLDEKLRKMGVWGCVCCIVGSVMIVIHAPQEQTPNSVEEIWKLAMQPAFLIYVAISMSIVLALILYCEPLCGQTNILVYIGICSLMGSLTVMSIKAVGIAIKLTFEGINQIWYPETWFFAMVAAICVVMQMIYLNKALDTFNAAIVSPIYYVMFTTLTIVASAIMFKDWNGQNTDSIASEICGFLTVLTGTVILHSTREEEQASPRRMRWQDSGKSFDEEHLTSLYSPEY

SEQ ID NO: 48395 - DNA, 1383 bp, Arabidopsis thaliana
  misc_feature (1)..(1383): Ceres Seq. ID no. 13580745
  misc_feature (1)..(1383): Ortholog of  Ceres SEQ ID NO 14312208 as cited in SEQ ID NO 54845
  misc_feature (1)..(1383): Ortholog of  Ceres SEQ ID NO 15171755 as cited in SEQ ID NO 57047
  misc_feature (1)..(1383): Ortholog of  Ceres SEQ ID NO 13597613 as cited in SEQ ID NO 65334
  misc_feature (1)..(1383): Ortholog of  Ceres SEQ ID NO 15178832 as cited in SEQ ID NO 0
gatcttcgtcttcctttcctccttcattcctcttttcttcgtctcccaccatttctgcagaagaagacaaataaaaaagctctcatttatcttcgtggagatctaaaagaaggaggaagacatttcttccctctggatctccaaaagtaagaacatttacaagaaacgagaggtttgggtggggaaggaaagaaggaggaagaggcaatgtcagctaggtattggtgtcacatgtgttcacaaatggtgaatccagttattggtgccgagatcaaatgccccttttgccaaagcgggtttgtcgaggaaatgagccgtgagattaatggcggcagcagtagcagtctaagggaggttcaagaccctgagattgattttggtacagaccgtgcattgtctctatggggtccaatcttgcttggaatgatgagtaatcctcgtagacgtagaaggtttaggaggacagagtttggtgtggataatgatgaggtcaatgtatctgatgatgttgatggaaatgacagcgtcgatattgatcgacatcatcatcgtcgtcatcgccacaggcaacaaggtagagagattgatttagacagagagtttgagtctatccttaggaggagacggagaagctcagctactatattgcagttgcttcagggtattcgtgcagggattgcttctgagtatgagagctcggatcgagacctgttaaatcaatcagctgttgttcagggttcaacgagtttgaatcaaaaccggaacaatacttctctttctgcaattggagattactttgttggatccagtttagaccatttgcttgaacatctagctgataatgattcaatcaggcacgggagtcttccagcacgtaaagaagttgtggataatctcccaacggttaagataagtgaatcattgcagtgctcgatttgtttggatgattttgacaaaggaagtgaagctaaagagatgccgtgtaagcacaagtttcacatccggtgtatagtaccgtggctcgagcttcacagttcatgtcccgtgtgccgatatgaactccctcctgatgatgagaccaaggttaatcctgtaagaccgagaacaagaactctagagatcaacgtaagtaatgagaatgtggaagatgatgcaaggaacagtaatgtgagcgagagaaggttctcttttccatggccgttcagcggattattctcttcatcctcttcgtcatccgcatcggcctcggggtcatctcatctcggtgagaactcgtaaactgctattcctcagcttatagtacataaaatcttgttcactcagattgttgaatactgcataacaaataaacactttcgaggaatggaatcttttctttatttg

SEQ ID NO: 48396 - protein, 356 aa, Arabidopsis thaliana; identical to SEQ ID NO: 39296
  peptide (1)..(356): Ceres Seq. ID no. 13580746

SEQ ID NO: 48397 - protein, 348 aa, Arabidopsis thaliana; identical to SEQ ID NO: 39297
  peptide (1)..(348): Ceres Seq. ID no. 13580747

SEQ ID NO: 48398 - protein, 344 aa, Arabidopsis thaliana; identical to SEQ ID NO: 39298
  peptide (1)..(344): Ceres Seq. ID no. 13580748

SEQ ID NO: 48399 - DNA, 2174 bp, Arabidopsis thaliana
  misc_feature (1)..(2174): Ceres Seq. ID no. 14310271
  misc_feature (1)..(2174): Ortholog of  Ceres SEQ ID NO 14310452 as cited in SEQ ID NO 54426
gacgactattttcccttcacttcttcatcttcttcctgcgccgcttttcaaacctattcgaccagacaagctcggaaatttcatattccatgggtaagacgaagttaaaacctgtggaggatgtgaactcggaagtggtggacgaagttgagaaagcagaggaagttgaggaacagagaaacgacagagaacaagaagaagagcaaaaagaagaagaggcacctaaaagtttcgaagagctagggcttgattctcgtctaattcgtgccctaactaaaaagggtatagagaaaccaacccttattcagcaatcagccattccttacattctggaaggaaaagatgtggttgctagggcaaagactggttcaggtaagactttggcttaccttttgccattgctccagaagctattttcagcagattctgtgagcaagaagaagcttgctccttctgcatttattcttgttccatctcgagaactatgtcagcaggtttacacagaggtttcatcgcttattgagctgtgtagagttcagctaaaagcagtgcagttgactagtagcatgtctgcatctgatatgcgtaatgcattggctggactgcctgagattcttgtctccacacctgcttgtattccgaaatgttttgctgccggagttttagagcccactgctgtcagtgaatcactttcaattctggttcttgatgaggcagatcttttgttgtcatatggatatgaagataatctaaggtcggtaacatcaataatcccaaggcgttgccaatgccttcttatgtcggctaccacaagctctgatgtcgaaaaattgaagaaattgattctgcacaacccaatcgttttgaccttgacagaagataatgacaaggaagaggccgtcccaagtaatgttcagcagttttggatctcttgcagtgctcaggataaactgcttcacattcttgctctcttgaagctagaggttgttcagaagaaaattctgattttcatcaatacaattgacatgggattcaggttgaaattattcttggaaaagtttggaatcaagtctgcaattttaaacggggaattgcctcagaattctcgacttcatatccttgagcaattcaatgcaggacttttcgattacttgattgcaacggatgataatagccagactaaaaaacaaaaggaagaggctaaaggtgaggctaacaaggagaacaagaaaaataataagcgtagcaaaccaaagctagatgctgagttcggtgtagttaggggaattgatttcaaaaaagttcacacggttataaactttgatatgcctcaaagtgttactggatatatccatcgaattgagcgtacagggagagcatatagcagcggatcttccgtttctcttatttctcctgatgagatggaagggtttgaagatataaagtccttcttagcaagcgacaagaacaaggatattgatattatcacaccctttcctttgttgaccgaaaatgctgtcgagtctcttagatatagagctgaggatgtggcaaagagtgttacaaagattgcggttcgagagtctcgagctcaggatttgaggaatgagataatcaactctgaaaagttaaaagctcattttgaagctaatccaagagacttagatctgttgagacatgacaagcctctgagtaagactgcacctgcaccacatctaaaggacatccccgagtatctagtggacgcaaagactcaagaagcaagcaagatggtaaagctagctagagccgcaatgggcaacactaggagatctggtggaggtggtggtcgcaacaacaaaaacaagaaacggtctagaaaaggcagcgacccactcaaaaccttcaaccctaatgggtctaagagaggagccgttggccagaaggatggcaaagattctagctcgaccaaaaaacagaagacagtttaagttatttcgtttagctcaagtgtaaccaaattttgactcgttataatcaatcacacaaaagaacggagacgagagcatcaatctttgtagctctattcatgtggcatcaggagacaaagttttgtgagcatattattagccttttgaggtttttattgaaatagatttttgtaaaaaaaaaaaaaaaaaaactagagaactagt

SEQ ID NO: 48400 - protein, 655 aa, Arabidopsis thaliana
  peptide (1)..(655): Ceres Seq. ID no. 14310272
RLFSLHFFIFFLRRFSNLFDQTSSEISYSMGKTKLKPVEDVNSEVVDEVEKAEEVEEQRNDREQEEEQKEEEAPKSFEELGLDSRLIRALTKKGIEKPTLIQQSAIPYILEGKDVVARAKTGSGKTLAYLLPLLQKLFSADSVSKKKLAPSAFILVPSRELCQQVYTEVSSLIELCRVQLKAVQLTSSMSASDMRNALAGLPEILVSTPACIPKCFAAGVLEPTAVSESLSILVLDEADLLLSYGYEDNLRSVTSIIPRRCQCLLMSATTSSDVEKLKKLILHNPIVLTLTEDNDKEEAVPSNVQQFWISCSAQDKLLHILALLKLEVVQKKILIFINTIDMGFRLKLFLEKFGIKSAILNGELPQNSRLHILEQFNAGLFDYLIATDDNSQTKKQKEEAKGEANKENKKNNKRSKPKLDAEFGVVRGIDFKKVHTVINFDMPQSVTGYIHRIERTGRAYSSGSSVSLISPDEMEGFEDIKSFLASDKNKDIDIITPFPLLTENAVESLRYRAEDVAKSVTKIAVRESRAQDLRNEIINSEKLKAHFEANPRDLDLLRHDKPLSKTAPAPHLKDIPEYLVDAKTQEASKMVKLARAAMGNTRRSGGGGGRNNKNKKRSRKGSDPLKTFNPNGSKRGAVGQKDGKDSSSTKKQKTV

SEQ ID NO: 48401 - protein, 626 aa, Arabidopsis thaliana
  peptide (1)..(626): Ceres Seq. ID no. 14310273
MGKTKLKPVEDVNSEVVDEVEKAEEVEEQRNDREQEEEQKEEEAPKSFEELGLDSRLIRALTKKGIEKPTLIQQSAIPYILEGKDVVARAKTGSGKTLAYLLPLLQKLFSADSVSKKKLAPSAFILVPSRELCQQVYTEVSSLIELCRVQLKAVQLTSSMSASDMRNALAGLPEILVSTPACIPKCFAAGVLEPTAVSESLSILVLDEADLLLSYGYEDNLRSVTSIIPRRCQCLLMSATTSSDVEKLKKLILHNPIVLTLTEDNDKEEAVPSNVQQFWISCSAQDKLLHILALLKLEVVQKKILIFINTIDMGFRLKLFLEKFGIKSAILNGELPQNSRLHILEQFNAGLFDYLIATDDNSQTKKQKEEAKGEANKENKKNNKRSKPKLDAEFGVVRGIDFKKVHTVINFDMPQSVTGYIHRIERTGRAYSSGSSVSLISPDEMEGFEDIKSFLASDKNKDIDIITPFPLLTENAVESLRYRAEDVAKSVTKIAVRESRAQDLRNEIINSEKLKAHFEANPRDLDLLRHDKPLSKTAPAPHLKDIPEYLVDAKTQEASKMVKLARAAMGNTRRSGGGGGRNNKNKKRSRKGSDPLKTFNPNGSKRGAVGQKDGKDSSSTKKQKTV

SEQ ID NO: 48402 - protein, 467 aa, Arabidopsis thaliana
  peptide (1)..(467): Ceres Seq. ID no. 14310274
MSASDMRNALAGLPEILVSTPACIPKCFAAGVLEPTAVSESLSILVLDEADLLLSYGYEDNLRSVTSIIPRRCQCLLMSATTSSDVEKLKKLILHNPIVLTLTEDNDKEEAVPSNVQQFWISCSAQDKLLHILALLKLEVVQKKILIFINTIDMGFRLKLFLEKFGIKSAILNGELPQNSRLHILEQFNAGLFDYLIATDDNSQTKKQKEEAKGEANKENKKNNKRSKPKLDAEFGVVRGIDFKKVHTVINFDMPQSVTGYIHRIERTGRAYSSGSSVSLISPDEMEGFEDIKSFLASDKNKDIDIITPFPLLTENAVESLRYRAEDVAKSVTKIAVRESRAQDLRNEIINSEKLKAHFEANPRDLDLLRHDKPLSKTAPAPHLKDIPEYLVDAKTQEASKMVKLARAAMGNTRRSGGGGGRNNKNKKRSRKGSDPLKTFNPNGSKRGAVGQKDGKDSSSTKKQKTV

SEQ ID NO: 48403 - DNA, 3885 bp, Arabidopsis thaliana
  misc_feature (1)..(3885): Ceres Seq. ID no. 13579059
  misc_feature (1)..(3885): Ortholog of  Ceres SEQ ID NO 13600310 as cited in SEQ ID NO 5086
atggagagcacagagtgcgttagggttgccgtcaacatccgtccgttaattacaccggagcttttgaacggatgcacagattgcatcaccgtggctcccaaagagccacaggtacatattggttcgcatacatttacttatgatttcgtctacggaaatggtggctatccgtgttcggagatttacaatcactgtgttgctccacttgtggatgcattgtttaaaggatacaatgccactgttctagcttatggccagactggttcaggtaaaacctataccatgggtactaattatagtggagattgcacaaatggtggcgttataccaaacgttatggaggatatatttagaagagtggagacaaccaaagattcatctgaactattgatacgagtgtcttttattgagatttttaaggaagaagtttttgatttgctggactcaaattcttcggccctccttaaaaatgacagtggcgttcaagcaaagcacactgctctctcacgagctccaattcaaatcagggaaactgccagtggaggaataacattggctggagttactgaggctgaagtcaagacgaaagaggagatgggctcgtttctagcacgaggctctttgtctcgagctacaggcagcacaaacatgaatagccagtcaagtcggtcccatgcaatcttcacaatcactctggaacaaaagaagattgccggtggttcttgcacaacaactgaagatggaggtgaagatatattatgtgcaaagcttcatttggttgacctagcggggtcagaacgtgcaaaacgaacaggagctgatgggatgcgtttaaaagaaggtattcacatcaacaaaggtctattagctcttggaaatgttataagtgcacttggagatgagaaaaagagaaaggaaggaggtcacgttccttaccgtgacagcaagttaactcgtttgctacaggattctcttggtggcaatagcaaaactgtgatgattgcttgtgtaagtcccgctgatacaaatgctgaggaaactttaaatacgctcaaatacgcaaatcgtgctcgcaatattcaaaacaaagcagtgatcaatcgagacccagcaaccgcacaaatgcaaagaatgcggagccaaattgagcaactgcaaacagaactcttgttctataggggtgatagtggtgcttttgatgagctccagattctcaagcataagatatcactacttgaggcaagcaatcgtgagctacacaatgaacttcaagaacggagagtcgcgtctgagcatttctcaaagcgtgcttatgatgctcaggttgaaaaggacaaacttataatgataattgaatctgttcgtaatggtaaatccttggatgagattgaatcctgccaaaatgaggatgttggtttggtgaacaagtatgtctcgaaaattcaagagctagaaggagaactgttgcatatcaaaaacttgaagaaaaccagtaaccaccaatattcggatgattcctatgacgttgggcctcgttcgaacaatgtcttgtttccctcatccaatgagtcgtcagattgtgaagacaaagtgatggatgtcactgatgaacttgaatttcaagaaaaagagattgaacattgctcacttcaagaaaagttggatatggagctaaaggaattggataagagacttgaagaaaaggaggctgaaatgaagcgcttttcaagtggtggtacatctgttctcaaacaacactatgagaaaaaagtttatgacctagaacaggaaaaaagagcactacagagagaaatcgaaggtttgagacataatcttgctagcataccatctggaccaggagatggtgcccagaaactgaaggaagaatatgttcagaaactgaacacgcttgaaacacaggtttctgttctgaagaagaaacaagatgcacaggctcagcttatgagacaaaagcagaaaagtgacgatgccgcaataaaattgcaggatgaaatacacagaattaagtctcagaaggtgcaattacagcaaaagattaagcaggagtcagagcagtttagggcttggaaggcttcaagagagaaggaagttatgcagctcaaaaaagagggaaggagaaatgagtatgagatgcacaaactcatggctctgaatcaaaaacagaagctggttttgcaaagaaagacagaagaggcatctcaggtgacaaaaagactcaaagagcttttagataatcgaaaggcttcttcacgcgagacattgagtggtgctaatggccctggaactcaggcattgatgcaagcaattgagcatgagattgaagtcactgttcgggttcacgaagtgcgttctgaatatgagaggcaaacggaagagagggcaagaatggctaaggaagttgcaaggctaagagaagaaaacgagcttctcaagaatgccaagataagcgttcatggtgacaccatgtctcctggtgcaagaaactcaaggatttttgctctggagaatatgcttgcgacctcttccagcactcttgtctccatggcatcacagttatctgaagcagaagaacgtgagcgtgtgtttggtggaagagggaggtggaaccaagttagaacattaggtgacgccaagagtatcatgaactatctattcaacttggcgtcaactgcgaggtgtctagcccgagataaagaggcagactgcagagaaaaagatgtcctaataagagacctcaaagaaaaaatagtaaagtttagcagttatgtaagatacatggagatccagaaagcagacctcgtgcatcaagtgaaagcacagacctctgcaatgaagaaattgtcagcagatgagaacctaaagaacgagcatagtatgaaaaagcaggaaacccgaaactcgactatagttcttgaggacatggatacctctgattctgaagcgtcagaccatgaacgggaagatccagatcttgatgatgaatggaaacctgaacatgaatcagagcgtgagtccgagcaggaatcggttataaagctaaataggaaacgaaacttcaaagtgggaagacggcgctcgagtgtggtcatgaggcgttcatatgaagagaattcggaaactccttcagatgatgcagtgaaatctgacgtgtgttgttgcacttgcagcaagagctcctcttgcaagacaatgaagtgtcagtgtcgagctacaaagggatcttgtggtccgtcatgtggatgttcttccgtgaaatgctccaacagaaacgcagacggaaaggagaacaattccatctcggaatcagaggccttggaaaacggggagaactcgcaagaatctgatgaaaaggacaaaggccaacaacaacaagttcttgcttcacgtggagctatgctgctacagaacgctcttgctgacaagccagaggaggagacaaacgatgatggaggaacacgaagaagaagaaaacctctatcagacataggaaacacaacgggtaaatcgaatgtgccaaggccaagccaaagaaagaaatggaagaagactgtgcttcagcttgttcctgtaggtccaccagcactaccacccacacacacaaacacacacctgattccagaagctaattcagtgactgtggactcggacacagcgagaatgccagaaaacagtgactcaggagagtctaatagcatcaaactgaagctaccgagggcaatgagagcaattcgggtagggcaagtggaagtagaacttcagatgaaaaggagaaccacactcgtcgggtctaaagaggagacgtcgcttgaggttcctgttgtgaattttctcagacagatacagttgttaaagtttgaagtttga

SEQ ID NO: 48404 - protein, 1294 aa, Arabidopsis thaliana
  peptide (1)..(1294): Ceres Seq. ID no. 13579060
MESTECVRVAVNIRPLITPELLNGCTDCITVAPKEPQVHIGSHTFTYDFVYGNGGYPCSEIYNHCVAPLVDALFKGYNATVLAYGQTGSGKTYTMGTNYSGDCTNGGVIPNVMEDIFRRVETTKDSSELLIRVSFIEIFKEEVFDLLDSNSSALLKNDSGVQAKHTALSRAPIQIRETASGGITLAGVTEAEVKTKEEMGSFLARGSLSRATGSTNMNSQSSRSHAIFTITLEQKKIAGGSCTTTEDGGEDILCAKLHLVDLAGSERAKRTGADGMRLKEGIHINKGLLALGNVISALGDEKKRKEGGHVPYRDSKLTRLLQDSLGGNSKTVMIACVSPADTNAEETLNTLKYANRARNIQNKAVINRDPATAQMQRMRSQIEQLQTELLFYRGDSGAFDELQILKHKISLLEASNRELHNELQERRVASEHFSKRAYDAQVEKDKLIMIIESVRNGKSLDEIESCQNEDVGLVNKYVSKIQELEGELLHIKNLKKTSNHQYSDDSYDVGPRSNNVLFPSSNESSDCEDKVMDVTDELEFQEKEIEHCSLQEKLDMELKELDKRLEEKEAEMKRFSSGGTSVLKQHYEKKVYDLEQEKRALQREIEGLRHNLASIPSGPGDGAQKLKEEYVQKLNTLETQVSVLKKKQDAQAQLMRQKQKSDDAAIKLQDEIHRIKSQKVQLQQKIKQESEQFRAWKASREKEVMQLKKEGRRNEYEMHKLMALNQKQKLVLQRKTEEASQVTKRLKELLDNRKASSRETLSGANGPGTQALMQAIEHEIEVTVRVHEVRSEYERQTEERARMAKEVARLREENELLKNAKISVHGDTMSPGARNSRIFALENMLATSSSTLVSMASQLSEAEERERVFGGRGRWNQVRTLGDAKSIMNYLFNLASTARCLARDKEADCREKDVLIRDLKEKIVKFSSYVRYMEIQKADLVHQVKAQTSAMKKLSADENLKNEHSMKKQETRNSTIVLEDMDTSDSEASDHEREDPDLDDEWKPEHESERESEQESVIKLNRKRNFKVGRRRSSVVMRRSYEENSETPSDDAVKSDVCCCTCSKSSSCKTMKCQCRATKGSCGPSCGCSSVKCSNRNADGKENNSISESEALENGENSQESDEKDKGQQQQVLASRGAMLLQNALADKPEEETNDDGGTRRRRKPLSDIGNTTGKSNVPRPSQRKKWKKTVLQLVPVGPPALPPTHTNTHLIPEANSVTVDSDTARMPENSDSGESNSIKLKLPRAMRAIRVGQVEVELQMKRRTTLVGSKEETSLEVPVVNFLRQIQLLKFEV

SEQ ID NO: 48405 - protein, 1200 aa, Arabidopsis thaliana
  peptide (1)..(1200): Ceres Seq. ID no. 13579061
MGTNYSGDCTNGGVIPNVMEDIFRRVETTKDSSELLIRVSFIEIFKEEVFDLLDSNSSALLKNDSGVQAKHTALSRAPIQIRETASGGITLAGVTEAEVKTKEEMGSFLARGSLSRATGSTNMNSQSSRSHAIFTITLEQKKIAGGSCTTTEDGGEDILCAKLHLVDLAGSERAKRTGADGMRLKEGIHINKGLLALGNVISALGDEKKRKEGGHVPYRDSKLTRLLQDSLGGNSKTVMIACVSPADTNAEETLNTLKYANRARNIQNKAVINRDPATAQMQRMRSQIEQLQTELLFYRGDSGAFDELQILKHKISLLEASNRELHNELQERRVASEHFSKRAYDAQVEKDKLIMIIESVRNGKSLDEIESCQNEDVGLVNKYVSKIQELEGELLHIKNLKKTSNHQYSDDSYDVGPRSNNVLFPSSNESSDCEDKVMDVTDELEFQEKEIEHCSLQEKLDMELKELDKRLEEKEAEMKRFSSGGTSVLKQHYEKKVYDLEQEKRALQREIEGLRHNLASIPSGPGDGAQKLKEEYVQKLNTLETQVSVLKKKQDAQAQLMRQKQKSDDAAIKLQDEIHRIKSQKVQLQQKIKQESEQFRAWKASREKEVMQLKKEGRRNEYEMHKLMALNQKQKLVLQRKTEEASQVTKRLKELLDNRKASSRETLSGANGPGTQALMQAIEHEIEVTVRVHEVRSEYERQTEERARMAKEVARLREENELLKNAKISVHGDTMSPGARNSRIFALENMLATSSSTLVSMASQLSEAEERERVFGGRGRWNQVRTLGDAKSIMNYLFNLASTARCLARDKEADCREKDVLIRDLKEKIVKFSSYVRYMEIQKADLVHQVKAQTSAMKKLSADENLKNEHSMKKQETRNSTIVLEDMDTSDSEASDHEREDPDLDDEWKPEHESERESEQESVIKLNRKRNFKVGRRRSSVVMRRSYEENSETPSDDAVKSDVCCCTCSKSSSCKTMKCQCRATKGSCGPSCGCSSVKCSNRNADGKENNSISESEALENGENSQESDEKDKGQQQQVLASRGAMLLQNALADKPEEETNDDGGTRRRRKPLSDIGNTTGKSNVPRPSQRKKWKKTVLQLVPVGPPALPPTHTNTHLIPEANSVTVDSDTARMPENSDSGESNSIKLKLPRAMRAIRVGQVEVELQMKRRTTLVGSKEETSLEVPVVNFLRQIQLLKFEV

SEQ ID NO: 48406 - protein, 1182 aa, Arabidopsis thaliana
  peptide (1)..(1182): Ceres Seq. ID no. 13579062
MEDIFRRVETTKDSSELLIRVSFIEIFKEEVFDLLDSNSSALLKNDSGVQAKHTALSRAPIQIRETASGGITLAGVTEAEVKTKEEMGSFLARGSLSRATGSTNMNSQSSRSHAIFTITLEQKKIAGGSCTTTEDGGEDILCAKLHLVDLAGSERAKRTGADGMRLKEGIHINKGLLALGNVISALGDEKKRKEGGHVPYRDSKLTRLLQDSLGGNSKTVMIACVSPADTNAEETLNTLKYANRARNIQNKAVINRDPATAQMQRMRSQIEQLQTELLFYRGDSGAFDELQILKHKISLLEASNRELHNELQERRVASEHFSKRAYDAQVEKDKLIMIIESVRNGKSLDEIESCQNEDVGLVNKYVSKIQELEGELLHIKNLKKTSNHQYSDDSYDVGPRSNNVLFPSSNESSDCEDKVMDVTDELEFQEKEIEHCSLQEKLDMELKELDKRLEEKEAEMKRFSSGGTSVLKQHYEKKVYDLEQEKRALQREIEGLRHNLASIPSGPGDGAQKLKEEYVQKLNTLETQVSVLKKKQDAQAQLMRQKQKSDDAAIKLQDEIHRIKSQKVQLQQKIKQESEQFRAWKASREKEVMQLKKEGRRNEYEMHKLMALNQKQKLVLQRKTEEASQVTKRLKELLDNRKASSRETLSGANGPGTQALMQAIEHEIEVTVRVHEVRSEYERQTEERARMAKEVARLREENELLKNAKISVHGDTMSPGARNSRIFALENMLATSSSTLVSMASQLSEAEERERVFGGRGRWNQVRTLGDAKSIMNYLFNLASTARCLARDKEADCREKDVLIRDLKEKIVKFSSYVRYMEIQKADLVHQVKAQTSAMKKLSADENLKNEHSMKKQETRNSTIVLEDMDTSDSEASDHEREDPDLDDEWKPEHESERESEQESVIKLNRKRNFKVGRRRSSVVMRRSYEENSETPSDDAVKSDVCCCTCSKSSSCKTMKCQCRATKGSCGPSCGCSSVKCSNRNADGKENNSISESEALENGENSQESDEKDKGQQQQVLASRGAMLLQNALADKPEEETNDDGGTRRRRKPLSDIGNTTGKSNVPRPSQRKKWKKTVLQLVPVGPPALPPTHTNTHLIPEANSVTVDSDTARMPENSDSGESNSIKLKLPRAMRAIRVGQVEVELQMKRRTTLVGSKEETSLEVPVVNFLRQIQLLKFEV

SEQ ID NO: 48407 - DNA, 1912 bp, Arabidopsis thaliana
  misc_feature (1)..(1912): Ceres Seq. ID no. 15168677
  misc_feature (1)..(1912): Ortholog of  Ceres SEQ ID NO 15178460 as cited in SEQ ID NO 66107
gacaaaaacccttttaatctctctctcgtgtagatctatcactctccatttcccttcttctctgtaaaccctttataaatctcacttccttcttcttcatcaatccttcctcagatctcttcttattcaaattcaattgagagatactctcttcttcttctttttctctatccagttccttctgtgcgaagttcttctgattaatttgagtttcttggaagcttttactcgatcttcatcggatcttagggttttgtttaaatccagatcttgggttttgttaaataatggcgactccttatcctggagcgacgcaggtgggttcgtactttgtggggcagtattatcaagtgttgcagcagcagccagatcttattcatcagttttattctgagcctagtagagctattcgtatcgatggtgattccaccgagactgctaattctttgctgcatattcataacatggttatgtcactgaatttcactgcgattgaagtgaagacgattaattcagtcgagtcgtgggaaggtggtgttcttgtggtggtttcaggatctgtgaaaaccaaggaatttagcaacagaaggagttttgtgcagaccttttttctcgctcctcaggaaaagggttattttgttctcagtgatgtatttctgtttgttgatgagggtactgtttactatcatcagccttcttatttatctgaaatcaagcatgaggctcagcttaatcctcctacccgtcatccagaaccccaagtttctgactatgtgctggaggaagaggcaagcgattatgtgaacgcagtccaaatcaaagatgatcttgttgataagtacagtctgcaagaggaccaacatcaacctcagcatgaagactatgaagatgaagttgcgattgaggaaacacctagggaagaagttgcagttgatgtggtacatgaacatcgggctgcaccagtagaggaaccagttggtgaaaaatcaaagatgagttatgcttccattttaaaagttgcaaaggaagcagcaactgtacctgtagctgctacacaaccatcatataacaagagctctcaagatattaatgagtgggatcaaccaatgcggactccttcccctcagctggctgcgcctcttgcccctattcagcaatcaaactcatccacatatgtttccgactatggagcagaggcagaagatggctccggttttgaagactttgagttcaaatcagtgtacgttaggaatttgccttccgacatatctgcttctgaaatagaggaagagtttaagaacttcggtacaatcaagcctgatggtgtgttcctcagaacccgcaaggatgttatgggcgtatgttatgcatttgttgagtttgaggacatgacttccgttgagaatgcgattaaggcttctcctatatacttgggtggaaggcaagtatacattgaggaacgaagaccaaatcccgctggtgttcgcggagcaagaagaggaggaggacgtggaaggggtggttacccaacagaagcaccaagaggccggtttggtgggcgtgggtctggcagaggaaaccaggatggaggtgactacaggccaagaggaaatggttactaccgcggtggtggtcgctaaaagaaaaaagaatctcgtcaaagttttagtgctaccaaagaatgaaatgattcagttcttcttcctttatctacggaagaagtagtttgtaatttctattttgttgggtttggtttttggctcaaagaaacaaagattttggcttatatatgtttttctttaaatttgttatagatttagccatttagactgttatctccctttgggaatggtttagttttggtataacatttcaatttttggtttccttactggattgaattccaaacttc

SEQ ID NO: 48408 - protein, 450 aa, Arabidopsis thaliana
  peptide (1)..(450): Ceres Seq. ID no. 15168678
MATPYPGATQVGSYFVGQYYQVLQQQPDLIHQFYSEPSRAIRIDGDSTETANSLLHIHNMVMSLNFTAIEVKTINSVESWEGGVLVVVSGSVKTKEFSNRRSFVQTFFLAPQEKGYFVLSDVFLFVDEGTVYYHQPSYLSEIKHEAQLNPPTRHPEPQVSDYVLEEEASDYVNAVQIKDDLVDKYSLQEDQHQPQHEDYEDEVAIEETPREEVAVDVVHEHRAAPVEEPVGEKSKMSYASILKVAKEAATVPVAATQPSYNKSSQDINEWDQPMRTPSPQLAAPLAPIQQSNSSTYVSDYGAEAEDGSGFEDFEFKSVYVRNLPSDISASEIEEEFKNFGTIKPDGVFLRTRKDVMGVCYAFVEFEDMTSVENAIKASPIYLGGRQVYIEERRPNPAGVRGARRGGGRGRGGYPTEAPRGRFGGRGSGRGNQDGGDYRPRGNGYYRGGGR

SEQ ID NO: 48409 - protein, 391 aa, Arabidopsis thaliana
  peptide (1)..(391): Ceres Seq. ID no. 15168679
MVMSLNFTAIEVKTINSVESWEGGVLVVVSGSVKTKEFSNRRSFVQTFFLAPQEKGYFVLSDVFLFVDEGTVYYHQPSYLSEIKHEAQLNPPTRHPEPQVSDYVLEEEASDYVNAVQIKDDLVDKYSLQEDQHQPQHEDYEDEVAIEETPREEVAVDVVHEHRAAPVEEPVGEKSKMSYASILKVAKEAATVPVAATQPSYNKSSQDINEWDQPMRTPSPQLAAPLAPIQQSNSSTYVSDYGAEAEDGSGFEDFEFKSVYVRNLPSDISASEIEEEFKNFGTIKPDGVFLRTRKDVMGVCYAFVEFEDMTSVENAIKASPIYLGGRQVYIEERRPNPAGVRGARRGGGRGRGGYPTEAPRGRFGGRGSGRGNQDGGDYRPRGNGYYRGGGR

SEQ ID NO: 48410 - protein, 389 aa, Arabidopsis thaliana
  peptide (1)..(389): Ceres Seq. ID no. 15168680
MSLNFTAIEVKTINSVESWEGGVLVVVSGSVKTKEFSNRRSFVQTFFLAPQEKGYFVLSDVFLFVDEGTVYYHQPSYLSEIKHEAQLNPPTRHPEPQVSDYVLEEEASDYVNAVQIKDDLVDKYSLQEDQHQPQHEDYEDEVAIEETPREEVAVDVVHEHRAAPVEEPVGEKSKMSYASILKVAKEAATVPVAATQPSYNKSSQDINEWDQPMRTPSPQLAAPLAPIQQSNSSTYVSDYGAEAEDGSGFEDFEFKSVYVRNLPSDISASEIEEEFKNFGTIKPDGVFLRTRKDVMGVCYAFVEFEDMTSVENAIKASPIYLGGRQVYIEERRPNPAGVRGARRGGGRGRGGYPTEAPRGRFGGRGSGRGNQDGGDYRPRGNGYYRGGGR

SEQ ID NO: 48411 - DNA, 1592 bp, Arabidopsis thaliana; identical to SEQ ID NO: 46783
  misc_feature (1)..(1592): Ceres Seq. ID no. 12574698
  misc_feature (1)..(1592): Ortholog of  Ceres SEQ ID NO 13656177 as cited in SEQ ID NO 64997

SEQ ID NO: 48412 - protein, 529 aa, Arabidopsis thaliana; identical to SEQ ID NO: 46784
  peptide (1)..(529): Ceres Seq. ID no. 12574699

SEQ ID NO: 48413 - protein, 483 aa, Arabidopsis thaliana; identical to SEQ ID NO: 46785
  peptide (1)..(483): Ceres Seq. ID no. 12574700

SEQ ID NO: 48414 - DNA, 1507 bp, Arabidopsis thaliana
  misc_feature (1)..(1507): Ceres Seq. ID no. 12575600
  misc_feature (1)..(1507): Ortholog of  Ceres SEQ ID NO 15177043 as cited in SEQ ID NO 57425
gacttcaagaaaaattaaagaaaagaaagtaaactctttcaccaaaaaaaataaagaaaatttattgttccatctttctgataatcggatcttacagagagagagctccatggatcgccgcatctatggtggctccgccgtcattcatctctttctcttcttctccgtcctaatcttctccgccgcatctgcattatccaagaaccagtctccttcttccgggtcgggtcagatcaactccaactctgtcctcgtagctcttcttgactctcgttacactgagctagctgagctcgtcgagaaagctcttctccttcagacacttgaagacgctgttggtcgtcacaatattaccatttttgctcctcgcaatgaagctcttgagcgtgaccttgaccctgagttcaagcggttcttgctcgagccaggtaatctcaaatctctgcaaacactcctcatgttccacattatacccaatcgggtcgggtcgaaccaatggccttcagaagaatcgggtcgggtcaagcaccacacgctagggaacgatcaggtccgtttgagcaacggacaaggaaaaaagatggttgatttagctgagattatccgacccgatgatttgacccgacccgacggattgatccacgggattgaacggcttctcattcctcgctctgttcaagaagatttcaatcgccgtcgtagccttcaatcaatctccgccgtcttacctgaaggagctcctgaagttgacccgagaaccaaccgtctcaagaaacccgcagctccagtacccgccggatctccaccagctcttccgatccaatccgctatggcccctggtccgtcgctagctccggcaccagctccgggacctggaggcaagcagcaccacttcgacggtgaggctcaagtcaaagatttcatccatacactgttacattacggcggttacaacgagatggcagatattctcgtgaatctgacgtcactcgcgacagagatgggacggttggtgtcagaaggctatgtgttaacggttttggctcctaacgatgaagcaatggcgaaattgaccacggatcagctgagtgagccaggagcaccggagcagatcgtatactaccatataatccctgagtatcaaacggaggagagtatgtacaattctgttaggagatttgggaaggtgaagttcgatacgttgcgttttcctcataaggttgcggctaaggaagctgatggttccgttaagtttggtgacggtgagaagtcggcgtatttgtttgatcctgatatctatacggacggtcggatttcggttcaggggattgacggtgttttgtttccacaagaggaggaggttgttgaatcggttaagaaaccggttaagaaaattgttcagccgagaagaggtacgcttttgtttttattgcatttgatcttttatgtgtgttcctcaaattgtgtgcttagtattgattttctgcgtgtggcaaagtttagataa

SEQ ID NO: 48415 - protein, 501 aa, Arabidopsis thaliana
  peptide (1)..(501): Ceres Seq. ID no. 12575601
TSRKIKEKKVNSFTKKNKENLLFHLSDNRILQRESSMDRRIYGGSAVIHLFLFFSVLIFSAASALSKNQSPSSGSGQINSNSVLVALLDSRYTELAELVEKALLLQTLEDAVGRHNITIFAPRNEALERDLDPEFKRFLLEPGNLKSLQTLLMFHIIPNRVGSNQWPSEESGRVKHHTLGNDQVRLSNGQGKKMVDLAEIIRPDDLTRPDGLIHGIERLLIPRSVQEDFNRRRSLQSISAVLPEGAPEVDPRTNRLKKPAAPVPAGSPPALPIQSAMAPGPSLAPAPAPGPGGKQHHFDGEAQVKDFIHTLLHYGGYNEMADILVNLTSLATEMGRLVSEGYVLTVLAPNDEAMAKLTTDQLSEPGAPEQIVYYHIIPEYQTEESMYNSVRRFGKVKFDTLRFPHKVAAKEADGSVKFGDGEKSAYLFDPDIYTDGRISVQGIDGVLFPQEEEVVESVKKPVKKIVQPRRGTLLFLLHLIFYVCSSNCVLSIDFLRVAKFR

SEQ ID NO: 48416 - protein, 465 aa, Arabidopsis thaliana
  peptide (1)..(465): Ceres Seq. ID no. 12575602
MDRRIYGGSAVIHLFLFFSVLIFSAASALSKNQSPSSGSGQINSNSVLVALLDSRYTELAELVEKALLLQTLEDAVGRHNITIFAPRNEALERDLDPEFKRFLLEPGNLKSLQTLLMFHIIPNRVGSNQWPSEESGRVKHHTLGNDQVRLSNGQGKKMVDLAEIIRPDDLTRPDGLIHGIERLLIPRSVQEDFNRRRSLQSISAVLPEGAPEVDPRTNRLKKPAAPVPAGSPPALPIQSAMAPGPSLAPAPAPGPGGKQHHFDGEAQVKDFIHTLLHYGGYNEMADILVNLTSLATEMGRLVSEGYVLTVLAPNDEAMAKLTTDQLSEPGAPEQIVYYHIIPEYQTEESMYNSVRRFGKVKFDTLRFPHKVAAKEADGSVKFGDGEKSAYLFDPDIYTDGRISVQGIDGVLFPQEEEVVESVKKPVKKIVQPRRGTLLFLLHLIFYVCSSNCVLSIDFLRVAKFR

SEQ ID NO: 48417 - protein, 349 aa, Arabidopsis thaliana
  peptide (1)..(349): Ceres Seq. ID no. 12575603
MFHIIPNRVGSNQWPSEESGRVKHHTLGNDQVRLSNGQGKKMVDLAEIIRPDDLTRPDGLIHGIERLLIPRSVQEDFNRRRSLQSISAVLPEGAPEVDPRTNRLKKPAAPVPAGSPPALPIQSAMAPGPSLAPAPAPGPGGKQHHFDGEAQVKDFIHTLLHYGGYNEMADILVNLTSLATEMGRLVSEGYVLTVLAPNDEAMAKLTTDQLSEPGAPEQIVYYHIIPEYQTEESMYNSVRRFGKVKFDTLRFPHKVAAKEADGSVKFGDGEKSAYLFDPDIYTDGRISVQGIDGVLFPQEEEVVESVKKPVKKIVQPRRGTLLFLLHLIFYVCSSNCVLSIDFLRVAKFR

SEQ ID NO: 48418 - DNA, 2410 bp, Arabidopsis thaliana
  misc_feature (1)..(2410): Ceres Seq. ID no. 13579078
  misc_feature (1)..(2410): Ortholog of  Ceres SEQ ID NO 13597407 as cited in SEQ ID NO 64106
ccacgcgtccgattctactaaagagtttgttgagcaatgaagggagcgactctcgttgctctcgccgccacaatcggcaatttcttacaaggatgggacaatgccaccattgctggagctatggtttatatcaacaaagacttgaatctaccaacctctgttcaaggtcttgtcgttgctatgtcattgatcggtgcaacggtcatcacgacttgctcaggaccgatatctgattggctcggcagacgccccatgctcattttatcatcagttatgtatttcgtctgcggtttgataatgttgtggtctcccaatgtctatgttctgtgctttgctaggcttcttaatgggtttggtgccgggctcgcggttacacttgtccctgtttacatttctgaaaccgctcctccggagatcagaggacagttaaatactctccctcagtttcttggctctggtggaatgtttttgtcatactgtatggttttcactatgtccctgagtgactcccctagctggagagccatgctcggtgtcctctcgatcccttctcttctttatttgtttctcacggtgttttatttgcccgagtctcctcgttggctggttagtaaaggaagaatggacgaggctaagcgagttcttcaacagttatgtggcagagaagatgttaccgatgagatggctttactagttgaaggactagatataggaggagaaaaaacaatggaagatctcttagtaactttggaggatcatgaaggtgatgatacacttgaaaccgttgatgaggatggacaaatgcggctttatggaacccacgagaatcaatcgtaccttgctagacctgtcccagaacaaaatagctcacttgggctacgctctcgccacggaagcttagcaaaccaaagcatgatccttaaagatccgctcgtcaatctttttggcagtctccacgagaagatgccagaagcaggcggaaacactcggagtgggattttccctcatttcggaagcatgttcagtactactgccgatgcgcctcacggtaaaccggctcattgggaaaaggacatagagagccattacaacaaagacaatgatgactatgcgactgatgatggtgcgggtgatgatgatgactcggacaacgatttgcgtagccccttaatgtcgcgccagaccacaagcatggacaaggatatgatcccacatcctacaagtggaagcactttaagcatgagacgacacagtacgcttatgcaaggcaacggcgaaagtagcatgggaattggtggtggttggcatatgggatatagatacgaaaacgatgaatacaagaggtattatcttaaagaagatggagctgaatctcgccgtggctcgatcatctctattcccggaggtccggatggtggaggcagctacattcacgcttctgcccttgtaagcagatctgttcttggtcctaaatcagttcatggatccgccatggttcccccggagaaaattgctgcctctggaccactctggtctgctcttcttgaacctggtgttaagcgtgccttggttgttggtgtcggcattcaaatactgcagcagttttcaggtatcaatggagttctctactacactcctcagattctcgaacgggctggcgtagatattcttctttcgagcctcggactaagttccatctctgcgtcattcctcatcagcggtttaacaacattactcatgctcccagccattgtcgttgccatgagactcatggatgtatccggaagaaggtcattacttctctggacaatcccagttctcattgtctcacttgtcgtccttgtcatcagcgagctcatccacatcagcaaagtcgtgaacgcagcactctccacaggttgtgtcgtgctctacttctgcttcttcgtgatgggttacggtcccattccaaacatcctctgttctgaaatcttcccaacaagagtccgtggtctctgcatcgccatatgtgctatggtcttttggattggagacattattgtcacgtactcacttcccgttctcctcagctcgatcggactagttggtgttttcagcatttacgctgcggtttgcgttatctcatggatcttcgtttacatgaaagtcccggagactaaaggcatgcctttggaagttatcacagactactttgcctttggagctcaagctcaagcttctgctccttctaaggatatataacttgtaactttcttcttcgtcaattgctctgtgtacctaaagattctcttcatccccnttttgttttgtttttcagatacccttcatatcgtttttgtttcttttgttttttttctttttcctttgtttcgttgtcaaaatcaatctaataagtactcaattttctctc

SEQ ID NO: 48419 - protein, 734 aa, Arabidopsis thaliana
  peptide (1)..(734): Ceres Seq. ID no. 13579079
MKGATLVALAATIGNFLQGWDNATIAGAMVYINKDLNLPTSVQGLVVAMSLIGATVITTCSGPISDWLGRRPMLILSSVMYFVCGLIMLWSPNVYVLCFARLLNGFGAGLAVTLVPVYISETAPPEIRGQLNTLPQFLGSGGMFLSYCMVFTMSLSDSPSWRAMLGVLSIPSLLYLFLTVFYLPESPRWLVSKGRMDEAKRVLQQLCGREDVTDEMALLVEGLDIGGEKTMEDLLVTLEDHEGDDTLETVDEDGQMRLYGTHENQSYLARPVPEQNSSLGLRSRHGSLANQSMILKDPLVNLFGSLHEKMPEAGGNTRSGIFPHFGSMFSTTADAPHGKPAHWEKDIESHYNKDNDDYATDDGAGDDDDSDNDLRSPLMSRQTTSMDKDMIPHPTSGSTLSMRRHSTLMQGNGESSMGIGGGWHMGYRYENDEYKRYYLKEDGAESRRGSIISIPGGPDGGGSYIHASALVSRSVLGPKSVHGSAMVPPEKIAASGPLWSALLEPGVKRALVVGVGIQILQQFSGINGVLYYTPQILERAGVDILLSSLGLSSISASFLISGLTTLLMLPAIVVAMRLMDVSGRRSLLLWTIPVLIVSLVVLVISELIHISKVVNAALSTGCVVLYFCFFVMGYGPIPNILCSEIFPTRVRGLCIAICAMVFWIGDIIVTYSLPVLLSSIGLVGVFSIYAAVCVISWIFVYMKVPETKGMPLEVITDYFAFGAQAQASAPSKDI

SEQ ID NO: 48420 - protein, 706 aa, Arabidopsis thaliana
  peptide (1)..(706): Ceres Seq. ID no. 13579080
MVYINKDLNLPTSVQGLVVAMSLIGATVITTCSGPISDWLGRRPMLILSSVMYFVCGLIMLWSPNVYVLCFARLLNGFGAGLAVTLVPVYISETAPPEIRGQLNTLPQFLGSGGMFLSYCMVFTMSLSDSPSWRAMLGVLSIPSLLYLFLTVFYLPESPRWLVSKGRMDEAKRVLQQLCGREDVTDEMALLVEGLDIGGEKTMEDLLVTLEDHEGDDTLETVDEDGQMRLYGTHENQSYLARPVPEQNSSLGLRSRHGSLANQSMILKDPLVNLFGSLHEKMPEAGGNTRSGIFPHFGSMFSTTADAPHGKPAHWEKDIESHYNKDNDDYATDDGAGDDDDSDNDLRSPLMSRQTTSMDKDMIPHPTSGSTLSMRRHSTLMQGNGESSMGIGGGWHMGYRYENDEYKRYYLKEDGAESRRGSIISIPGGPDGGGSYIHASALVSRSVLGPKSVHGSAMVPPEKIAASGPLWSALLEPGVKRALVVGVGIQILQQFSGINGVLYYTPQILERAGVDILLSSLGLSSISASFLISGLTTLLMLPAIVVAMRLMDVSGRRSLLLWTIPVLIVSLVVLVISELIHISKVVNAALSTGCVVLYFCFFVMGYGPIPNILCSEIFPTRVRGLCIAICAMVFWIGDIIVTYSLPVLLSSIGLVGVFSIYAAVCVISWIFVYMKVPETKGMPLEVITDYFAFGAQAQASAPSKDI

SEQ ID NO: 48421 - protein, 686 aa, Arabidopsis thaliana
  peptide (1)..(686): Ceres Seq. ID no. 13579081
MSLIGATVITTCSGPISDWLGRRPMLILSSVMYFVCGLIMLWSPNVYVLCFARLLNGFGAGLAVTLVPVYISETAPPEIRGQLNTLPQFLGSGGMFLSYCMVFTMSLSDSPSWRAMLGVLSIPSLLYLFLTVFYLPESPRWLVSKGRMDEAKRVLQQLCGREDVTDEMALLVEGLDIGGEKTMEDLLVTLEDHEGDDTLETVDEDGQMRLYGTHENQSYLARPVPEQNSSLGLRSRHGSLANQSMILKDPLVNLFGSLHEKMPEAGGNTRSGIFPHFGSMFSTTADAPHGKPAHWEKDIESHYNKDNDDYATDDGAGDDDDSDNDLRSPLMSRQTTSMDKDMIPHPTSGSTLSMRRHSTLMQGNGESSMGIGGGWHMGYRYENDEYKRYYLKEDGAESRRGSIISIPGGPDGGGSYIHASALVSRSVLGPKSVHGSAMVPPEKIAASGPLWSALLEPGVKRALVVGVGIQILQQFSGINGVLYYTPQILERAGVDILLSSLGLSSISASFLISGLTTLLMLPAIVVAMRLMDVSGRRSLLLWTIPVLIVSLVVLVISELIHISKVVNAALSTGCVVLYFCFFVMGYGPIPNILCSEIFPTRVRGLCIAICAMVFWIGDIIVTYSLPVLLSSIGLVGVFSIYAAVCVISWIFVYMKVPETKGMPLEVITDYFAFGAQAQASAPSKDI

SEQ ID NO: 48422 - DNA, 1934 bp, Arabidopsis thaliana
  misc_feature (1)..(1934): Ceres Seq. ID no. 12574577
  misc_feature (1)..(1934): Ortholog of  Ceres SEQ ID NO 12597287 as cited in SEQ ID NO 63982
ctgattctcctgctccttcgtcttcttcatcttcctctgagaaatcaaaaactcgatcgatcaattcgttgttcgtctacatcgattccttcagaacctagtgatcctctgttttggttgattcgattaagctaaccatgtcttacaaaccaagcgcgaagactgaggttcgccggaacaggtataaagtatctgtggacgccgatgaaggtcgccggagacgggaggataacatggtggagatccggaagaacaagagagaggagaacttgcagaagaagcggcgtgaaggttttaatccttccatggcgtcacagccagggcaggatttctcctcgtctctccctacggaaacgagattggagaatatacaacagatgattgctggagtaatgtcagaggatagagacttacaattggaggcgacggctagcttcaggagattgctttcaattgagcgaaatcctccaatcaatgaagttgttcaatctggtgttgttcctcacattgtgcaatttctttccagggatgacttcactcaacttcagtttgaggcagcttgggcgcttaccaatatcgcttcagggacatctgagaacactagggtcattattgatagtggtgctgtccctttattcgtcaaacttcttagttctgcaagtgaggaagttcgagaacaggctgtatgggcattgggaaacgttgctggtgactcgccaaaatgtcgtgatcatgtcctaagttgtgaggctatgatgtctcttctggctcaattccatgagcattcaaagctctccatgctgaggaatgctacatggacattatcaaatttctgcagagggaagccgcagcctgcatttgaacagacaaaagcagctttaccagctcttgagcgccttctgcattcaaccgacgaagaagttctcacagatgcatcctgggctctctcatatctctctgatggtacaaacgagaaaatacaaactgttatcgacgctggtgtcatccctcgccttgttcagctcttggctcatccatcgccctcagttctgattccagctctccgtacaattggtaacattgtaaccggagatgatattcagactcaggcggttattagcagtcaagcgcttcctggtctgttaaaccttttgaagaacacatacaagaagagtatcaagaaggaagcttgctggactatctctaacattacagctgggaacacaagtcaaattcaagaagtgtttcaggcaggcattattcggcctctgattaacctgcttgagatcggtgaattcgaaattaagaaagaagctgtttgggcaatctctaatgcaacttctggtggcaatcatgaccaaatcaagtttctcgtgagccaaggctgcatcagacccctgtgtgatctcctaccgtgtcccgatccaagggttgtcacagtgactttggaaggtctagaaaacattctcaaagtaggtgaagccgagaagaatctaggcaacacaggaaacgataatctgtacgcgcagatgattgaagacgcagatggtttggacaagattgagaatcttcagagtcacgataataatgagatttatgagaaagcagtcaaaatcctggagtcgtattgggctgcagatgacgaggaggaagatattggcggtgtggatgctcctgagaatgttcagtcttccggtttccaattcggaaaccaaagtggtaatgctcctacgggtggattcaactttggttgaaggtttctgtagtattctctcagttgcttgaacttaagaacaaaggtcgctcgttgtcttttctaaaaacagtttaggtttttttttctcttttttgggtcatgttttgagtgaattttgtatttttagaagtttggatattttgttctctcgcgtttaaggcggaaattaaagtgtttc

SEQ ID NO: 48423 - protein, 538 aa, Arabidopsis thaliana
  peptide (1)..(538): Ceres Seq. ID no. 12574578
MSYKPSAKTEVRRNRYKVSVDADEGRRRREDNMVEIRKNKREENLQKKRREGFNPSMASQPGQDFSSSLPTETRLENIQQMIAGVMSEDRDLQLEATASFRRLLSIERNPPINEVVQSGVVPHIVQFLSRDDFTQLQFEAAWALTNIASGTSENTRVIIDSGAVPLFVKLLSSASEEVREQAVWALGNVAGDSPKCRDHVLSCEAMMSLLAQFHEHSKLSMLRNATWTLSNFCRGKPQPAFEQTKAALPALERLLHSTDEEVLTDASWALSYLSDGTNEKIQTVIDAGVIPRLVQLLAHPSPSVLIPALRTIGNIVTGDDIQTQAVISSQALPGLLNLLKNTYKKSIKKEACWTISNITAGNTSQIQEVFQAGIIRPLINLLEIGEFEIKKEAVWAISNATSGGNHDQIKFLVSQGCIRPLCDLLPCPDPRVVTVTLEGLENILKVGEAEKNLGNTGNDNLYAQMIEDADGLDKIENLQSHDNNEIYEKAVKILESYWAADDEEEDIGGVDAPENVQSSGFQFGNQSGNAPTGGFNFG

SEQ ID NO: 48424 - protein, 506 aa, Arabidopsis thaliana
  peptide (1)..(506): Ceres Seq. ID no. 12574579
MVEIRKNKREENLQKKRREGFNPSMASQPGQDFSSSLPTETRLENIQQMIAGVMSEDRDLQLEATASFRRLLSIERNPPINEVVQSGVVPHIVQFLSRDDFTQLQFEAAWALTNIASGTSENTRVIIDSGAVPLFVKLLSSASEEVREQAVWALGNVAGDSPKCRDHVLSCEAMMSLLAQFHEHSKLSMLRNATWTLSNFCRGKPQPAFEQTKAALPALERLLHSTDEEVLTDASWALSYLSDGTNEKIQTVIDAGVIPRLVQLLAHPSPSVLIPALRTIGNIVTGDDIQTQAVISSQALPGLLNLLKNTYKKSIKKEACWTISNITAGNTSQIQEVFQAGIIRPLINLLEIGEFEIKKEAVWAISNATSGGNHDQIKFLVSQGCIRPLCDLLPCPDPRVVTVTLEGLENILKVGEAEKNLGNTGNDNLYAQMIEDADGLDKIENLQSHDNNEIYEKAVKILESYWAADDEEEDIGGVDAPENVQSSGFQFGNQSGNAPTGGFNFG

SEQ ID NO: 48425 - protein, 482 aa, Arabidopsis thaliana
  peptide (1)..(482): Ceres Seq. ID no. 12574580
MASQPGQDFSSSLPTETRLENIQQMIAGVMSEDRDLQLEATASFRRLLSIERNPPINEVVQSGVVPHIVQFLSRDDFTQLQFEAAWALTNIASGTSENTRVIIDSGAVPLFVKLLSSASEEVREQAVWALGNVAGDSPKCRDHVLSCEAMMSLLAQFHEHSKLSMLRNATWTLSNFCRGKPQPAFEQTKAALPALERLLHSTDEEVLTDASWALSYLSDGTNEKIQTVIDAGVIPRLVQLLAHPSPSVLIPALRTIGNIVTGDDIQTQAVISSQALPGLLNLLKNTYKKSIKKEACWTISNITAGNTSQIQEVFQAGIIRPLINLLEIGEFEIKKEAVWAISNATSGGNHDQIKFLVSQGCIRPLCDLLPCPDPRVVTVTLEGLENILKVGEAEKNLGNTGNDNLYAQMIEDADGLDKIENLQSHDNNEIYEKAVKILESYWAADDEEEDIGGVDAPENVQSSGFQFGNQSGNAPTGGFNFG

SEQ ID NO: 48426 - DNA, 1414 bp, Arabidopsis thaliana
  misc_feature (1)..(1414): Ceres Seq. ID no. 15168631
  misc_feature (1)..(1414): Ortholog of  Ceres SEQ ID NO 15170354 as cited in SEQ ID NO 54190
  misc_feature (1)..(1414): Ortholog of  Ceres SEQ ID NO 14307253 as cited in SEQ ID NO 54783
  misc_feature (1)..(1414): Ortholog of  Ceres SEQ ID NO 13654989 as cited in SEQ ID NO 63117
  misc_feature (1)..(1414): Ortholog of  Ceres SEQ ID NO 13657138 as cited in SEQ ID NO 65923
  misc_feature (1)..(1414): Ortholog of  Ceres SEQ ID NO 13584744 as cited in SEQ ID NO 69137
ggccatttcctatttctcccttcgtctccatcaagcaaccctctctctctctctctctctctatcatcatcatcgcagaggagacgatcttacgcgacgaatccttgagagattgagagggacaagcgagttttgacccaaggattgttgacggtctatattgaacaagtaaacaaggatgcgtaagtggatctgttgtacatgtcaaatagaagactcaaatgaagagcaacaactgaaaagttcacagcagcaatctgatgcaaatcataagaattcaaaaccagcacctgttgcaaaacatgaggttaagaaggaagctcttcccatcgaggtccctcccttgtctttggatgaggtcaaggaaaagactgaaaattttggatccaaggcactgattggtgaagggtcttatgggagagtatattatgcgacactaaatgatggtgtggcggttgctctgaagaaacttgatgtcgcacctgaagctgaaacagataccgaattcttgagtcaggtttccatggtctctaggctgaagcatgaaaatctcattcaattgcttggattttgtgttgatggaaacctccgcgtccttgcatatgagtttgcaacaatgggatcgttgcatgacatcttgcatggtaggaagggagttcaaggagcacaaccaggtccaacacttgactggataatgagggtgaagatagcggttgaggcagctaggggtttggaatacctcccatgagaagtctcagcctcctgtaatccatagggacataagatctagcaatgtccttctttttgaagactacaaagcaaagattgctgatttcaatctctcgaatcaagcacctgataatgctgcccgtcttcactcaacaagagtcttggggacttttggttatcatgctccagaatatgcaatgactggacagttaactcagaagagtgatgtgtacagctttggtgttgtacttctagaacttcttacagggaggaaaccggtggatcataccatgcctagaggtcaacagagtcttgtaacctgggcgacaccaagactcagtgaagataaagtgaaacagtgcattgatccaaagctaaaagccgattaccctccaaaagcagttgctaagctagcagcggtggcagcattgtgtgtgcaatacgaagctgagtttagaccaaatatgagcatagttgtgaaggcgctacagcctctcctgaaacctccagcagcagctccagcaccagaatattgaaacttttaaatcttttttttcgctgcaactatcagaaagaatctacatagtaccatttgccataaatgataatgaggttggttttgagagtgataactactattattaaaagatgatattatgtttcatttgatgatttgattttgcac

SEQ ID NO: 48427 - protein, 189 aa, Arabidopsis thaliana
  peptide (1)..(189): Ceres Seq. ID no. 15168632
MRKWICCTCQIEDSNEEQQLKSSQQQSDANHKNSKPAPVAKHEVKKEALPIEVPPLSLDEVKEKTENFGSKALIGEGSYGRVYYATLNDGVAVALKKLDVAPEAETDTEFLSQVSMVSRLKHENLIQLLGFCVDGNLRVLAYEFATMGSLHDILHGRKGVQGAQPGPTLDWIMRVKIAVEAARGLEYLP

SEQ ID NO: 48428 - protein, 112 aa, Arabidopsis thaliana
  peptide (1)..(112): Ceres Seq. ID no. 15168633
MTGQLTQKSDVYSFGVVLLELLTGRKPVDHTMPRGQQSLVTWATPRLSEDKVKQCIDPKLKADYPPKAVAKLAAVAALCVQYEAEFRPNMSIVVKALQPLLKPPAAAPAPEY

SEQ ID NO: 48429 - DNA, 2211 bp, Arabidopsis thaliana
  misc_feature (1)..(2211): Ceres Seq. ID no. 12601185
  misc_feature (1)..(2211): Ortholog of  Ceres SEQ ID NO 15170885 as cited in SEQ ID NO 54326
  misc_feature (1)..(2211): Ortholog of  Ceres SEQ ID NO 14311609 as cited in SEQ ID NO 58341
cgtcttcttcaccatttcgaaaaatctcaaaactttacagagagaaagagagatcctttacatatacttcactgtcttcttgaaaaccctaatcctccgatctgtttaacctccgatcaagagagatttcttcagcttgtgtgtatcagattcctttggattccccgattcttcgtcgtatcgaatcgggggatggcatttccgtgaaatcagtgatgaaattggaggtgagaagaagttatttctatctatgggcgtagtagctgaggtttggaggtcgagcgtgaggctattaacgaactcgcctcagcttaacggtggctctcacaagagtgcgttatggaagtggcgatttttctctgctcagcccaaaagaaccgtaatgtggacatgggtttgtggtttcatgcttttctctttaggagtcatctcacttttcactggtcacgttgtctcgcaccttgagtggtattctcagcaattaagcaaacggagcttactggatatgagccgtcgagaaccaattgatgtatggaagtcaaaatattcgaagtttttctatggatgcagtgagagaggaaggaacttccttcctgctgtccaggagcagtcatctaatggatatttgcttattgcagctagtggaggccttaaccaacaaagaacaggaataactgatgcagtggttgttgcacggattcttaatgctactttagttgtacccgagttggatcaccattcttactggaaagatgacagtgacttcagtgacatttttgatgttaactggttcatatcttctctcgccaaagatgtgactatagtaaagagagttcccgacagagtcatgcgtgcgatggagaaacctccttataccacacgtgtgcctcgaaagtctactcttgagtattatcttgaccaagtattgccaattctcacgaggagacatgttttacaattgacaaagtttgactacagactagcaaatgatctagatgaagacatgcaaaagttgcgctgcagggtcaactatcatgctttaagattcacaaagcggatacaatcagttgggatgaaagtggtcaagaggatgagaaagatggccaaacgttttattgctgtccatttgagatttgagcctgacatgctagccttttctggttgtgactttggtgggggtgaaaaagagagagctgagctagcagaaataagaaaacgatgggacacattgcctgatctggaccctcttgaagaaagaaagcgtgggaaatgccctcttacacctcatgaagtgggcttaatgctgcgcgctcttggttttacaaacgacacatatatctatgtcgcatctggagaaatatatggtggtgaaaagacactgaaaccactgagagagctgtttccaaacttttacaccaaggaaatgcttgccaacgatgagctcaagcctctgcttccctattcttcacgccttgctgccattgactacattgttagtgacgaaagcgatgtgtttatcactaataataatggaaatatggccaagattcttgcaggccgaaggaggtacatgggtcacaagaggaccatcaggccaaatgcaaagaagctcagtgcattgttcatggaccgggaaaagatggagtggcaaactttcgccaaaaaagtgaaatcttgtcaacgtggattcatgggtgatccagatgagttcaaaccaggacgcggtgaattccacgagtacccgcaatcttgcatttgtcagagacccttctcttacgacaaaacctcaacggatgatgaagaagaagacatgtcagaagagaaccacaacagcaccagccctggacatgtacatttgtcttcagcagacaatgagcgcgacgaagttttccctgactagcaaattggttctgaggtcgctggagattttactgtaaccagctgttgtaaggagattgatcaatcacagtagatcgaggagaggaataggaggcttcccgcgtagctacttgttgcttcaagtgttcatagatacttctatcgaataggcatacataacccaagctctctctttgtttctttctgattttgaaacaccaccaaaactctctcttgtcttgtacttgtcttatattattacctcatatctagtttttggttttcttttgtattcccttagatttcctgaaatgtataatcaagttttcatct

SEQ ID NO: 48430 - protein, 549 aa, Arabidopsis thaliana
  peptide (1)..(549): Ceres Seq. ID no. 12601186
MGVVAEVWRSSVRLLTNSPQLNGGSHKSALWKWRFFSAQPKRTVMWTWVCGFMLFSLGVISLFTGHVVSHLEWYSQQLSKRSLLDMSRREPIDVWKSKYSKFFYGCSERGRNFLPAVQEQSSNGYLLIAASGGLNQQRTGITDAVVVARILNATLVVPELDHHSYWKDDSDFSDIFDVNWFISSLAKDVTIVKRVPDRVMRAMEKPPYTTRVPRKSTLEYYLDQVLPILTRRHVLQLTKFDYRLANDLDEDMQKLRCRVNYHALRFTKRIQSVGMKVVKRMRKMAKRFIAVHLRFEPDMLAFSGCDFGGGEKERAELAEIRKRWDTLPDLDPLEERKRGKCPLTPHEVGLMLRALGFTNDTYIYVASGEIYGGEKTLKPLRELFPNFYTKEMLANDELKPLLPYSSRLAAIDYIVSDESDVFITNNNGNMAKILAGRRRYMGHKRTIRPNAKKLSALFMDREKMEWQTFAKKVKSCQRGFMGDPDEFKPGRGEFHEYPQSCICQRPFSYDKTSTDDEEEDMSEENHNSTSPGHVHLSSADNERDEVFPD

SEQ ID NO: 48431 - protein, 505 aa, Arabidopsis thaliana
  peptide (1)..(505): Ceres Seq. ID no. 12601187
MWTWVCGFMLFSLGVISLFTGHVVSHLEWYSQQLSKRSLLDMSRREPIDVWKSKYSKFFYGCSERGRNFLPAVQEQSSNGYLLIAASGGLNQQRTGITDAVVVARILNATLVVPELDHHSYWKDDSDFSDIFDVNWFISSLAKDVTIVKRVPDRVMRAMEKPPYTTRVPRKSTLEYYLDQVLPILTRRHVLQLTKFDYRLANDLDEDMQKLRCRVNYHALRFTKRIQSVGMKVVKRMRKMAKRFIAVHLRFEPDMLAFSGCDFGGGEKERAELAEIRKRWDTLPDLDPLEERKRGKCPLTPHEVGLMLRALGFTNDTYIYVASGEIYGGEKTLKPLRELFPNFYTKEMLANDELKPLLPYSSRLAAIDYIVSDESDVFITNNNGNMAKILAGRRRYMGHKRTIRPNAKKLSALFMDREKMEWQTFAKKVKSCQRGFMGDPDEFKPGRGEFHEYPQSCICQRPFSYDKTSTDDEEEDMSEENHNSTSPGHVHLSSADNERDEVFPD

SEQ ID NO: 48432 - protein, 497 aa, Arabidopsis thaliana
  peptide (1)..(497): Ceres Seq. ID no. 12601188
MLFSLGVISLFTGHVVSHLEWYSQQLSKRSLLDMSRREPIDVWKSKYSKFFYGCSERGRNFLPAVQEQSSNGYLLIAASGGLNQQRTGITDAVVVARILNATLVVPELDHHSYWKDDSDFSDIFDVNWFISSLAKDVTIVKRVPDRVMRAMEKPPYTTRVPRKSTLEYYLDQVLPILTRRHVLQLTKFDYRLANDLDEDMQKLRCRVNYHALRFTKRIQSVGMKVVKRMRKMAKRFIAVHLRFEPDMLAFSGCDFGGGEKERAELAEIRKRWDTLPDLDPLEERKRGKCPLTPHEVGLMLRALGFTNDTYIYVASGEIYGGEKTLKPLRELFPNFYTKEMLANDELKPLLPYSSRLAAIDYIVSDESDVFITNNNGNMAKILAGRRRYMGHKRTIRPNAKKLSALFMDREKMEWQTFAKKVKSCQRGFMGDPDEFKPGRGEFHEYPQSCICQRPFSYDKTSTDDEEEDMSEENHNSTSPGHVHLSSADNERDEVFPD

SEQ ID NO: 48433 - DNA, 2219 bp, Arabidopsis thaliana
  misc_feature (1)..(2219): Ceres Seq. ID no. 13591741
  misc_feature (1)..(2219): Ortholog of  Ceres SEQ ID NO 13595900 as cited in SEQ ID NO 69289
aaaaacccaaaacaaaaaaaaaacacaaaggcacgacaaaaaaatgtcacaaatctccatttcttctcgtctctcttcgtattaaccaatttacccaatatttcgtgcccaattctcgggtcaaatccatctaaaagtttgtgcttttcgtattgggattagttcgatttctaaatctgatttagggttttaatcaatttggcaatcgggtctcttgcgatgaagttttcggagatttattgatttcatggtgggtttttgttttcgaaggtcgttgatgaagaattgacttctggaatctcaatctctgaagggtttttcgatgttaaatccgtgaatctgagttttaaatgctgaattggaaaacagatccaggggctaattaacgaaaaaaggaggtttctttttgatatcgatttttgggaattttgaggtttgagagagatcggagaagatggatctcgtgatcggtgggaaatttaagcttgggaagaaaattggtagtggatcatttggagagctttatctaggtgtaaatgtccaaacaggagaagaagttgctgtcaagctggaaaatgtgaagaccaaacatccacaacttcattatgagtcaaagttgtatatgctgcttcaaggaggatctggtattccgaacatcaagtggtttggagttgaaggtgactacagcgtaatggttattgaccttctaggtcctagtcttgaagacttgtttaactactgcaacagaaagttaacattgaaaactgttctcatgcttgccgaccaattacttaacagggttgagtttatgcatactcgaggtttccttcaccgtgatataaaacctgacaactttttaatgggccttggacgcaaagcaaatcaggtgtatatcattgattttggactagggaagaaatacagagaccttcagactcacaagcacattccttacagagaaaacaaaaatcttactgggacagctcggtatgcaagtgttaacactcaccttggagtcgaacaaagtcgaagggatgatttggaatcacttggttatgttcttatgtattttctcaaaggaagcttaccttggcagggattaaaagctgggacaaagaagcagaagtatgacagaatcagcgagaaaaaagtgtcaactcctatagaggtattgtgtaaaaaccaaccgtccgagttcgtttcatactttcattactgccgatctttacggtttgatgacaaacctgattactcttacctcaagaggcttttccgtgacttgtttatccgagaaggttatcaattcgattatgtatttgactggacagtcttaaagtatcctcaaatcggatccagctctggttctagttcacgaacaaggcatcatacaacagcgaaacccggattcaacgcagatcctattgaaagacaagagaggatcctaggaaaggaaacaacccgatataaaatcccaggtgcagtggaggcattctccagaagacacccgactacaacttcttcgcctcgagatcgttctagatcaagaaactcagacgacggacctttctctaagcagacacatggagactccgaaagagcaaacagttcctcaagatatagagcatcttcttctaggaaagccgttgctgcttcaagctcccggccaagttctgcaggtggaccaagcgaaagccgaacttcaagtcgtctggtttcctcaagcggtggtggtggcagcggcagtggaaatggccgtccctcaactagccagagagtgcaagctggatatgaatccaagactctgtctttctctcgtgcaacagcggcaagaaacactcgggaagatcaattaagaagcttcgagcttctctctcttcggaaataaaggaaaatgatggagagagagacagcaaactccatgaaaacccaaagaaattacctctgaagaaagatgagaatcttggtttgagggaattcatatatttgaacctgatgaaatcctcagatctttttacatgtaatttcagcttcagcttgcagagatctttttcactcgttttgtttatgtaatcgtgatatgtgttagacaaacataacaatcaaaaatgtagagagagtttccatgtaaaaacggtaaaatttctatccgtatattcgattacttcgaacctatctgtactggtactgtaataaacaaaacaatcaactgctctttggtc

SEQ ID NO: 48434 - protein, 476 aa, Arabidopsis thaliana
  peptide (1)..(476): Ceres Seq. ID no. 13591742
MDLVIGGKFKLGKKIGSGSFGELYLGVNVQTGEEVAVKLENVKTKHPQLHYESKLYMLLQGGSGIPNIKWFGVEGDYSVMVIDLLGPSLEDLFNYCNRKLTLKTVLMLADQLLNRVEFMHTRGFLHRDIKPDNFLMGLGRKANQVYIIDFGLGKKYRDLQTHKHIPYRENKNLTGTARYASVNTHLGVEQSRRDDLESLGYVLMYFLKGSLPWQGLKAGTKKQKYDRISEKKVSTPIEVLCKNQPSEFVSYFHYCRSLRFDDKPDYSYLKRLFRDLFIREGYQFDYVFDWTVLKYPQIGSSSGSSSRTRHHTTAKPGFNADPIERQERILGKETTRYKIPGAVEAFSRRHPTTTSSPRDRSRSRNSDDGPFSKQTHGDSERANSSSRYRASSSRKAVAASSSRPSSAGGPSESRTSSRLVSSSGGGGSGSGNGRPSTSQRVQAGYESKTLSFSRATAARNTREDQLRSFELLSLRK

SEQ ID NO: 48435 - protein, 420 aa, Arabidopsis thaliana
  peptide (1)..(420): Ceres Seq. ID no. 13591743
MLLQGGSGIPNIKWFGVEGDYSVMVIDLLGPSLEDLFNYCNRKLTLKTVLMLADQLLNRVEFMHTRGFLHRDIKPDNFLMGLGRKANQVYIIDFGLGKKYRDLQTHKHIPYRENKNLTGTARYASVNTHLGVEQSRRDDLESLGYVLMYFLKGSLPWQGLKAGTKKQKYDRISEKKVSTPIEVLCKNQPSEFVSYFHYCRSLRFDDKPDYSYLKRLFRDLFIREGYQFDYVFDWTVLKYPQIGSSSGSSSRTRHHTTAKPGFNADPIERQERILGKETTRYKIPGAVEAFSRRHPTTTSSPRDRSRSRNSDDGPFSKQTHGDSERANSSSRYRASSSRKAVAASSSRPSSAGGPSESRTSSRLVSSSGGGGSGSGNGRPSTSQRVQAGYESKTLSFSRATAARNTREDQLRSFELLSLRK

SEQ ID NO: 48436 - protein, 397 aa, Arabidopsis thaliana
  peptide (1)..(397): Ceres Seq. ID no. 13591744
MVIDLLGPSLEDLFNYCNRKLTLKTVLMLADQLLNRVEFMHTRGFLHRDIKPDNFLMGLGRKANQVYIIDFGLGKKYRDLQTHKHIPYRENKNLTGTARYASVNTHLGVEQSRRDDLESLGYVLMYFLKGSLPWQGLKAGTKKQKYDRISEKKVSTPIEVLCKNQPSEFVSYFHYCRSLRFDDKPDYSYLKRLFRDLFIREGYQFDYVFDWTVLKYPQIGSSSGSSSRTRHHTTAKPGFNADPIERQERILGKETTRYKIPGAVEAFSRRHPTTTSSPRDRSRSRNSDDGPFSKQTHGDSERANSSSRYRASSSRKAVAASSSRPSSAGGPSESRTSSRLVSSSGGGGSGSGNGRPSTSQRVQAGYESKTLSFSRATAARNTREDQLRSFELLSLRK

SEQ ID NO: 48437 - DNA, 2452 bp, Arabidopsis thaliana
  misc_feature (1)..(2452): Ceres Seq. ID no. 12639042
  misc_feature (1)..(2452): Ortholog of  Ceres SEQ ID NO 13654989 as cited in SEQ ID NO 63117
  misc_feature (1)..(2452): Ortholog of  Ceres SEQ ID NO 13655640 as cited in SEQ ID NO 63844
aactaaaaacgcgggtcttcttctccaaaacccatttcctcacaaaatccatctgagaaaaagagcaacaagtttcattttcatggtggtgatgacgaacaaattcttcgaattaatcggcggagctccgtcgtattcttcagtatccgtcgctgttaaaggatccgtcggtgacgccgtaggaggaactgctagtcgtcgtgctcttcgttggacaatcgaaaatttccttcctaaaatcgatagattagttcttgttcatgtcatgcctacagttactactattccatctccttctggatcgaagattccaatagaggaattggatgagagtgttgtgtctatgtataaacgagatttgagaaaagaatttgaacaagtttttgttccgtttaagaggatctgcaaatccaacaaagttgagactttgttgttggaacatcatgatcctgcaaaggctcttttgaagtatatgtcagatactgatgttgagtgtttagtgattggctcttgctcttctaatttcctcacaaggaaaaaaggacaagaaatgccattaacggtgctaggagaagctccagagacatgtgagatatatgttgtttgtaaagatagaatcttaaccaaatcgacgaatcagtttaccgcagattcatcatctagtttccgtataccagaaggagctgaagcttatacagaatctttcagtcgcacacgctctgataagacagggttgtctgcttcatctataacatcttcaggcaggatgagaattggaaggcctggctctttaccgcatagtcatccgacctctcgagtgtattctgatgcacagtcttcttcaactgatattgttttggtcgatgacgaacactgtcgttctatccttaggcatagtactgtttccactagtaaaatacagatggatcctagacctcacttaaaaacaccaaagtcaggtgtaagagctgaggtagagcagctaaggaaagaagtgcaaaccactctttccatgtacaaacaagcttgtgaagagctagttcataaacaaacacaggtccagtctctttcctctgagtgtatcaaagaaacagaaagggtcatcactgctctggaaaaagaagaaatgcgaaggaaagcagcagcagaagagaaagaaaagcatctaaaagctgtaaaagaagtcgaggaagcaaaatcaatgctagccaaagagttctgcgagaggcaattagccgagctagatgctctcaaacagtccatagagaaacagaaagtcattgagcaactcttcttgagagacgggcgatacagaaagtacacaaaagaagaaatagctgcagctacagataatttctcttcccgtaaaataatcggcgaaggaggatatggaaaagtatacaaatgcagtcttgatcataccccagtagctcttaaagttctcaaacctgattctgttgaaaagaaagaggaattcttgaaagagatctcagtcttaagccagcttcgtcatccccatgtggttcttctccttggtgcttgtcctgaaaatggatgccttgtctatgagtacatggaaaatggtagcttagattgtcacatctctcccaaaaaagggaaaccatctctctcatggtttatcagattccgaatcatctatgaaacagcttgtggtttagctttcctccacaactctaagcctgagcccatcgtccaccgtgacctcaaaccaggcaacattctcttagacagaaactttgtcagcaaaatcggtgacgttggactcgcaaaactcatgtcagacgaagcaccagacagtgtgacggtttacagaaactcgattatcgccggtacactctactacatggacccggaataccaacgaaccggcacaatcagaccgaaatcagatctttacgcatttggaatcataattctccagcttttaaccgctcgacatcccaacggtcttcttttctgcgttgaagatgcagtaaagagaggctgttttgaagatatgttagatggatcagtcaaagactggcccatagccgaagcgaaagaactagctcgcattgcaatcaggtgttcgcagctcaaatgcagagacagaccagatcttagcacacaagtcttgcctgctctcaaacgtattcttgaatctgcaaatagtagactcaagacagaacaagctaacgcacgagcaccaactcactattactgtccaattcttaaggaaataatggaagatccacaaatagcagcagatggattcacatacgaacgaaaagcgataaaagaatggattcaaaaacatcaagatgtgtctcctgttactaagcatcggctcaaacattctgatcttacaccgaaccacactctcagatcggctatacgagagtggcgatctcgttcacgcttagacctctccactactcttggctcctactga

SEQ ID NO: 48438 - protein, 816 aa, Arabidopsis thaliana
  peptide (1)..(816): Ceres Seq. ID no. 12639043
TKNAGLLLQNPFPHKIHLRKRATSFIFMVVMTNKFFELIGGAPSYSSVSVAVKGSVGDAVGGTASRRALRWTIENFLPKIDRLVLVHVMPTVTTIPSPSGSKIPIEELDESVVSMYKRDLRKEFEQVFVPFKRICKSNKVETLLLEHHDPAKALLKYMSDTDVECLVIGSCSSNFLTRKKGQEMPLTVLGEAPETCEIYVVCKDRILTKSTNQFTADSSSSFRIPEGAEAYTESFSRTRSDKTGLSASSITSSGRMRIGRPGSLPHSHPTSRVYSDAQSSSTDIVLVDDEHCRSILRHSTVSTSKIQMDPRPHLKTPKSGVRAEVEQLRKEVQTTLSMYKQACEELVHKQTQVQSLSSECIKETERVITALEKEEMRRKAAAEEKEKHLKAVKEVEEAKSMLAKEFCERQLAELDALKQSIEKQKVIEQLFLRDGRYRKYTKEEIAAATDNFSSRKIIGEGGYGKVYKCSLDHTPVALKVLKPDSVEKKEEFLKEISVLSQLRHPHVVLLLGACPENGCLVYEYMENGSLDCHISPKKGKPSLSWFIRFRIIYETACGLAFLHNSKPEPIVHRDLKPGNILLDRNFVSKIGDVGLAKLMSDEAPDSVTVYRNSIIAGTLYYMDPEYQRTGTIRPKSDLYAFGIIILQLLTARHPNGLLFCVEDAVKRGCFEDMLDGSVKDWPIAEAKELARIAIRCSQLKCRDRPDLSTQVLPALKRILESANSRLKTEQANARAPTHYYCPILKEIMEDPQIAADGFTYERKAIKEWIQKHQDVSPVTKHRLKHSDLTPNHTLRSAIREWRSRSRLDLSTTLGSY

SEQ ID NO: 48439 - protein, 789 aa, Arabidopsis thaliana
  peptide (1)..(789): Ceres Seq. ID no. 12639044
MVVMTNKFFELIGGAPSYSSVSVAVKGSVGDAVGGTASRRALRWTIENFLPKIDRLVLVHVMPTVTTIPSPSGSKIPIEELDESVVSMYKRDLRKEFEQVFVPFKRICKSNKVETLLLEHHDPAKALLKYMSDTDVECLVIGSCSSNFLTRKKGQEMPLTVLGEAPETCEIYVVCKDRILTKSTNQFTADSSSSFRIPEGAEAYTESFSRTRSDKTGLSASSITSSGRMRIGRPGSLPHSHPTSRVYSDAQSSSTDIVLVDDEHCRSILRHSTVSTSKIQMDPRPHLKTPKSGVRAEVEQLRKEVQTTLSMYKQACEELVHKQTQVQSLSSECIKETERVITALEKEEMRRKAAAEEKEKHLKAVKEVEEAKSMLAKEFCERQLAELDALKQSIEKQKVIEQLFLRDGRYRKYTKEEIAAATDNFSSRKIIGEGGYGKVYKCSLDHTPVALKVLKPDSVEKKEEFLKEISVLSQLRHPHVVLLLGACPENGCLVYEYMENGSLDCHISPKKGKPSLSWFIRFRIIYETACGLAFLHNSKPEPIVHRDLKPGNILLDRNFVSKIGDVGLAKLMSDEAPDSVTVYRNSIIAGTLYYMDPEYQRTGTIRPKSDLYAFGIIILQLLTARHPNGLLFCVEDAVKRGCFEDMLDGSVKDWPIAEAKELARIAIRCSQLKCRDRPDLSTQVLPALKRILESANSRLKTEQANARAPTHYYCPILKEIMEDPQIAADGFTYERKAIKEWIQKHQDVSPVTKHRLKHSDLTPNHTLRSAIREWRSRSRLDLSTTLGSY

SEQ ID NO: 48440 - protein, 786 aa, Arabidopsis thaliana
  peptide (1)..(786): Ceres Seq. ID no. 12639045
MTNKFFELIGGAPSYSSVSVAVKGSVGDAVGGTASRRALRWTIENFLPKIDRLVLVHVMPTVTTIPSPSGSKIPIEELDESVVSMYKRDLRKEFEQVFVPFKRICKSNKVETLLLEHHDPAKALLKYMSDTDVECLVIGSCSSNFLTRKKGQEMPLTVLGEAPETCEIYVVCKDRILTKSTNQFTADSSSSFRIPEGAEAYTESFSRTRSDKTGLSASSITSSGRMRIGRPGSLPHSHPTSRVYSDAQSSSTDIVLVDDEHCRSILRHSTVSTSKIQMDPRPHLKTPKSGVRAEVEQLRKEVQTTLSMYKQACEELVHKQTQVQSLSSECIKETERVITALEKEEMRRKAAAEEKEKHLKAVKEVEEAKSMLAKEFCERQLAELDALKQSIEKQKVIEQLFLRDGRYRKYTKEEIAAATDNFSSRKIIGEGGYGKVYKCSLDHTPVALKVLKPDSVEKKEEFLKEISVLSQLRHPHVVLLLGACPENGCLVYEYMENGSLDCHISPKKGKPSLSWFIRFRIIYETACGLAFLHNSKPEPIVHRDLKPGNILLDRNFVSKIGDVGLAKLMSDEAPDSVTVYRNSIIAGTLYYMDPEYQRTGTIRPKSDLYAFGIIILQLLTARHPNGLLFCVEDAVKRGCFEDMLDGSVKDWPIAEAKELARIAIRCSQLKCRDRPDLSTQVLPALKRILESANSRLKTEQANARAPTHYYCPILKEIMEDPQIAADGFTYERKAIKEWIQKHQDVSPVTKHRLKHSDLTPNHTLRSAIREWRSRSRLDLSTTLGSY

SEQ ID NO: 48441 - DNA, 2071 bp, Arabidopsis thaliana
  misc_feature (1)..(2071): Ceres Seq. ID no. 12600712
  misc_feature (1)..(2071): Ortholog of  Ceres SEQ ID NO 14303672 as cited in SEQ ID NO 66475
gttgcgacattcgtcgtatccattgcttagggagagaagagataatgctgagagcttcgctgctctgttcttcgacctcaatcactttcacaccaattcaactattcaatcccaatagttcccatcgtttcccaagattcgaactatctcgtcctgtctcggctttgtctcgtaccaaatgtcacttgagtctcctgagagctcgtgggaaatccagcttcctcactcgcagcaccgctactgatgaagctgttgaaactagtagtaacagtggattggatttggttgaggttggattcttgtctggtgttcatggccttcaaggcgagatttgcataaaaccaaacactgattttcctgatttacgtttctctaagcctggtagaagatggttaaaacaacaattgttgggacaagataagattgatgaggttgaattagtcgaaggaagacctcatcctgcgcagaagagttggattcttaagtttcgagggttggacgatgttgatcaggtgagacaactcgttggtgcaactctgcttgctgaggacgatgatcgtcctgagcttgatgaaggagaattttactctcgagatcttgtaggcatgagagttcttctcaaggagaccggtcaacttgttggaactgttgctaatattttcgacaatggaggaaatgatcttctacatgttttgcttgactcatccatggaagtctgcaatgggaatgcaaagaccaatcagcttgtttggataccttttgtagatgcaattgttcctgatgttgatttggaaagaaaggagatgtatataactccaccgaagggactcctcgaggtgaatatgcgagcagatgatcggtccaagaaagaaaggcggcagcttgtgaggaatggaaagaaagaaaaaaacagcagaagcgccttattgctgctaaaaagaagttatgtgaaatggagcaaaagcatgtgtttgatggattaaggtttggagaaaagtctcaaaggaatttacttgctgatcatatccttaacgtaaactccacactacttcagaaagctttgcaaagtattgacacctcatcgaagagatggaatgtaactgaggaaatcaatgcactgagagctagagtatcggaatgtaatctgagtgtgtcacgagaatgccttagttttgatgcaagcaaagagaacatgggtgataacttcagtttccttcaacaagggcaaaatctgttctctgagggtaaagtttctatttgtttggttctcaatgatcacgagaatgaagaaccagaaggtgagaatggtgtagtctcgtaccttcacgcactacttgatgaggagcagaggttcataaaggaagaagatcgcgcttgcgtgccacttgtcatagtttcccctgaacataccattgaagctctgcagaagctatttcaggataatgatcattttggatttgagtcagaaaagatctggattctcaaagaagaaacgcttccagtagtttgcagctcaccagaggaaccgaaaaagcacaaaattttgatgaaatctccatgggagatacttgagtccccggttggctctggaggagtcttgagcatccttgcttcacatggaactacagactctctttccaccctgggaatcaattatcttcaggtacacagtattgaaacaaaaccacaaccgtcacaacattacatcaatcccatgcttgttggtttcgtgagcgcaagaggagcagagattgggatccaagtgaccgaagaatctgaactcaagaacttggaaatgacattctcaatgaagtttctgaagagattaaagggaaaaatcgagtttgaagctgtcatgaagatgaattcacatgttcagaatgttgaaaaggagtgggttgagtcagtaccatcagaaccaaactcgtttgagtttcgttctgatatttacagagtcttgagtgaatgttcttcatcagctaagatttgtttgatgaacattaccgtttagaacttgtacattttgctacttagttgtttgtcctcacatctaaaaagcttctagagacgc

SEQ ID NO: 48442 - protein, 352 aa, Arabidopsis thaliana
  peptide (1)..(352): Ceres Seq. ID no. 12600713
MEQKHVFDGLRFGEKSQRNLLADHILNVNSTLLQKALQSIDTSSKRWNVTEEINALRARVSECNLSVSRECLSFDASKENMGDNFSFLQQGQNLFSEGKVSICLVLNDHENEEPEGENGVVSYLHALLDEEQRFIKEEDRACVPLVIVSPEHTIEALQKLFQDNDHFGFESEKIWILKEETLPVVCSSPEEPKKHKILMKSPWEILESPVGSGGVLSILASHGTTDSLSTLGINYLQVHSIETKPQPSQHYINPMLVGFVSARGAEIGIQVTEESELKNLEMTFSMKFLKRLKGKIEFEAVMKMNSHVQNVEKEWVESVPSEPNSFEFRSDIYRVLSECSSSAKICLMNITV

SEQ ID NO: 48443 - protein, 326 aa, Arabidopsis thaliana
  peptide (1)..(326): Ceres Seq. ID no. 12600714
CDIRRIHCLGREEIMLRASLLCSSTSITFTPIQLFNPNSSHRFPRFELSRPVSALSRTKCHLSLLRARGKSSFLTRSTATDEAVETSSNSGLDLVEVGFLSGVHGLQGEICIKPNTDFPDLRFSKPGRRWLKQQLLGQDKIDEVELVEGRPHPAQKSWILKFRGLDDVDQVRQLVGATLLAEDDDRPELDEGEFYSRDLVGMRVLLKETGQLVGTVANIFDNGGNDLLHVLLDSSMEVCNGNAKTNQLVWIPFVDAIVPDVDLERKEMYITPPKGLLEVNMRADDRSKKERRQLVRNGKKEKNSRSALLLLKRSYVKWSKSMCLMD

SEQ ID NO: 48444 - protein, 312 aa, Arabidopsis thaliana
  peptide (1)..(312): Ceres Seq. ID no. 12600715
MLRASLLCSSTSITFTPIQLFNPNSSHRFPRFELSRPVSALSRTKCHLSLLRARGKSSFLTRSTATDEAVETSSNSGLDLVEVGFLSGVHGLQGEICIKPNTDFPDLRFSKPGRRWLKQQLLGQDKIDEVELVEGRPHPAQKSWILKFRGLDDVDQVRQLVGATLLAEDDDRPELDEGEFYSRDLVGMRVLLKETGQLVGTVANIFDNGGNDLLHVLLDSSMEVCNGNAKTNQLVWIPFVDAIVPDVDLERKEMYITPPKGLLEVNMRADDRSKKERRQLVRNGKKEKNSRSALLLLKRSYVKWSKSMCLMD

SEQ ID NO: 48445 - DNA, 1684 bp, Arabidopsis thaliana
  misc_feature (1)..(1684): Ceres Seq. ID no. 12575729
  misc_feature (1)..(1684): Ortholog of  Ceres SEQ ID NO 15170666 as cited in SEQ ID NO 63386
gacttcaaatcggagaaccgccaacgaagaatcgtcgtcttcttcgtcatctccgtcgctgatcgatctcattctttcttaaggtagagctggtggtttctgtaatcgccggtggtgatggcttctaacgatccaaaaaacggcggcggtttcttcgcctctcttgcttcatccatcaccaatttcggatcggccatgagtaaatcagtgaacggtttgatgggatatgaagggcttgaagtgattaatccagaaggaagtacagacgatgcagaggaagaagcagggagaggaagatggaagcaagaggaacgtgatggctattggaagatgatgcagaagtatatagggtctgatgttacatctatggttactcttcctgtgatcatttttgaacccatgacaatgttgcagaaaatggctgagttgatggaatactcatatttgctagacatggctgacaaaactgaagatccttacatgcgtatggtatatgcatcatcatgggctatatctgtgtattacgcctaccagcgtacctggaagccgttcaatccaattctcggtgagacttatgagatgactaatcataatgggatcaattttatagctgaacaggtctgccatcacccaccaatgagtgctggtcatgctgaaaacgagcatttcgcttacgattgcacttcaaaactgaaaacgaaattcctaggcaactcaattgatgtctacccagtaggaaggacacgagtgacacttaaaagagatggtgtcgttcttgatcttgtacctccactgacaaaggttcataaccttatcttcggtcgaacatgggtcgattcgccaggagagatggtcatgacgaacctgaccactggtgacaaagtggtgctttactttcaaccatgtggctggtttggatctggacgatatgaagtggacggttacgtgtataattcagctgaagagcccaagatgctaatgaccggaaaatggaacgagtccttgagttatcagccatgtgatgcggaaggcgaacctcttccaggcaccgaactgaaggaggtgtggaaggttgctgaagctccaaagaacgataaataccaatacacacattttgctcacaagatcaatagttttgacactgcccctaaaaagctactgtcatctgattcacgtctacgtcctgatagatacgcgctggagatgggtgatatgtccaaatctggattcgaaaagagcagcctagaggatagacaaagagctgagaagaaaagcagagaagagaaaggccaaaaatttgctccaaaatggtttgatgaaacagaagaagtcactcctacaccatggggtgatctcgaagtttaccaattcaatggaaagtactcggtgcaccgcgccacagctgaaaactctgaggatacaaccgatgtgaagttgacccaattcaacccttggcaattccaagatctctctgcttaatcctttggtgccatttgttgtgtaatgcgttgttactttcttagatctttcatttgtttttggtattaatcaccagtttcattgtaattttccataagaaagagtctatattttgataatctactctctttgtaaggctttaaagctgattactgattttctgagttgtcttgaaagcaattttatgaattgaagtgacgtcgtt

SEQ ID NO: 48446 - protein, 453 aa, Arabidopsis thaliana
  peptide (1)..(453): Ceres Seq. ID no. 12575730
MASNDPKNGGGFFASLASSITNFGSAMSKSVNGLMGYEGLEVINPEGSTDDAEEEAGRGRWKQEERDGYWKMMQKYIGSDVTSMVTLPVIIFEPMTMLQKMAELMEYSYLLDMADKTEDPYMRMVYASSWAISVYYAYQRTWKPFNPILGETYEMTNHNGINFIAEQVCHHPPMSAGHAENEHFAYDCTSKLKTKFLGNSIDVYPVGRTRVTLKRDGVVLDLVPPLTKVHNLIFGRTWVDSPGEMVMTNLTTGDKVVLYFQPCGWFGSGRYEVDGYVYNSAEEPKMLMTGKWNESLSYQPCDAEGEPLPGTELKEVWKVAEAPKNDKYQYTHFAHKINSFDTAPKKLLSSDSRLRPDRYALEMGDMSKSGFEKSSLEDRQRAEKKSREEKGQKFAPKWFDETEEVTPTPWGDLEVYQFNGKYSVHRATAENSEDTTDVKLTQFNPWQFQDLSA

SEQ ID NO: 48447 - protein, 427 aa, Arabidopsis thaliana
  peptide (1)..(427): Ceres Seq. ID no. 12575731
MSKSVNGLMGYEGLEVINPEGSTDDAEEEAGRGRWKQEERDGYWKMMQKYIGSDVTSMVTLPVIIFEPMTMLQKMAELMEYSYLLDMADKTEDPYMRMVYASSWAISVYYAYQRTWKPFNPILGETYEMTNHNGINFIAEQVCHHPPMSAGHAENEHFAYDCTSKLKTKFLGNSIDVYPVGRTRVTLKRDGVVLDLVPPLTKVHNLIFGRTWVDSPGEMVMTNLTTGDKVVLYFQPCGWFGSGRYEVDGYVYNSAEEPKMLMTGKWNESLSYQPCDAEGEPLPGTELKEVWKVAEAPKNDKYQYTHFAHKINSFDTAPKKLLSSDSRLRPDRYALEMGDMSKSGFEKSSLEDRQRAEKKSREEKGQKFAPKWFDETEEVTPTPWGDLEVYQFNGKYSVHRATAENSEDTTDVKLTQFNPWQFQDLSA

SEQ ID NO: 48448 - protein, 419 aa, Arabidopsis thaliana
  peptide (1)..(419): Ceres Seq. ID no. 12575732
MGYEGLEVINPEGSTDDAEEEAGRGRWKQEERDGYWKMMQKYIGSDVTSMVTLPVIIFEPMTMLQKMAELMEYSYLLDMADKTEDPYMRMVYASSWAISVYYAYQRTWKPFNPILGETYEMTNHNGINFIAEQVCHHPPMSAGHAENEHFAYDCTSKLKTKFLGNSIDVYPVGRTRVTLKRDGVVLDLVPPLTKVHNLIFGRTWVDSPGEMVMTNLTTGDKVVLYFQPCGWFGSGRYEVDGYVYNSAEEPKMLMTGKWNESLSYQPCDAEGEPLPGTELKEVWKVAEAPKNDKYQYTHFAHKINSFDTAPKKLLSSDSRLRPDRYALEMGDMSKSGFEKSSLEDRQRAEKKSREEKGQKFAPKWFDETEEVTPTPWGDLEVYQFNGKYSVHRATAENSEDTTDVKLTQFNPWQFQDLSA

SEQ ID NO: 48449 - DNA, 1312 bp, Arabidopsis thaliana; identical to SEQ ID NO: 47650
  misc_feature (1)..(1312): Ceres Seq. ID no. 13579070
  misc_feature (1)..(1312): Ortholog of  Ceres SEQ ID NO 14308787 as cited in SEQ ID NO 55614
  misc_feature (1)..(1312): Ortholog of  Ceres SEQ ID NO 13656547 as cited in SEQ ID NO 65935

SEQ ID NO: 48450 - protein, 395 aa, Arabidopsis thaliana; identical to SEQ ID NO: 47651
  peptide (1)..(395): Ceres Seq. ID no. 13579071

SEQ ID NO: 48451 - protein, 390 aa, Arabidopsis thaliana; identical to SEQ ID NO: 47652
  peptide (1)..(390): Ceres Seq. ID no. 13579072

SEQ ID NO: 48452 - protein, 283 aa, Arabidopsis thaliana; identical to SEQ ID NO: 47653
  peptide (1)..(283): Ceres Seq. ID no. 13579073

SEQ ID NO: 48453 - DNA, 2610 bp, Arabidopsis thaliana
  misc_feature (1)..(2610): Ceres Seq. ID no. 12601023
  misc_feature (1)..(2610): Ortholog of  Ceres SEQ ID NO 15170885 as cited in SEQ ID NO 54326
  misc_feature (1)..(2610): Ortholog of  Ceres SEQ ID NO 14311609 as cited in SEQ ID NO 58341
aagaggagaaagaaaagcaaaggaagggcatgtgactgatcacggctttgcctccaccgcataaagctcccttcacagatacatacactctctttctctctcttccggcgtttattcttcttatttcgccaccgtcctccgccgccgtggtggacttatatctctgcgtttcacgacctgccgccaccgccggcgataggtttcaatgatgaattaaggcgttggccagagagagaagagagattgagatctgtcgatatgctagcgaagaatcggctgccgggaagcggccacactactccgtctcctccggcatctcctcgccgttctcctcgttatcgtcacggtcggtctaaagccgccgccggtagtagatttcctacggttcaaccaagtcggaccctcgctcatcgcctctcgtggatcctcttatcggttcttctccgtcgtcaggggattttcttattcgctcctctaatctatatctcttgtatgctgctttacatgggaaccgtctccttcgacgttgttccaatcattcagcgtcgacctcctccaggatccgtttacaaaagccctcaggtttacgccaagctccgtcctgagatggacgccgataattccaccgctgatgccataacaaccatctggaaacattcctataaaggtggtgaatggaagccgtacgtgaacaagtctactggagacttgcctgagtcaaacggttacatatatgttgaggcaaatggaggcttgaatcagcagcggacatcgatatgcaatgcggttgctgtggcaggatatcttaatgcaactctagtaattcccaactttcactatcacagcatatggagagatccaagtaaatttggggacatctacgatgaagagttctttgtcagtaccttatcaaatgatgtgcgggtggttgatacaattcctgaatatctaatggagcgttttgaccataacatgacaaatgtctataacttcagagttaaagcatggtcacctattcaatattatcgagactcgatcttgccgaaacttcttgaggagaagattatacgaatatctccatttgcaaatagactttcttttgatgctcctcaagctgtccagagacttagatgtttggcgaattacgaagccctgaagttttcgaaaaccatactaaccctaggagaaacactggtgaagagaatgaaagagcaaagtgcaaaccacggtgcaaaatacgtgtctgtacatctgcgttttgaagaggacatggtagctttctcctgttgcatatttgatggtgggaaccaagaaaaacaagatatgattgcagcaagagaacgaggatggaaaggaaagttcacaaaaccaggccgtgttatacgacctggtgctatcaggcaaaacggaaaatgccctttaactcctttagaggtgggtttaatgcttagaggaatggggttcaacaaaagcacatatattttcctcgcgtctggtgaaatatatgatgcgaatcgaactatggccccgctactagagatgttcccaaatttacaaactaaggagatgcttgcatcagaggaggaacttgctccatataagaatttctcttccagaatggctgcaatagattacacggtctgtctccacagtgaggtatttgtgaccacgcaaggtggaaactttcctcatttcctcatgggtcatcggagatatatgtttggaggacattccaagaccattagaccagacaagcgaaagttagcaatcctctttgacaatccaaacatcggatggcggagttttaaacgtcagatgctaaacatgaggtctcatagtgactcaaaggggtttgagctaaaacgacctaatgactccatttacacattcccttgccctgactgcatgtcccgtaggaacaaaacaacaaccccagaatcgagaccacctcctgccacctgaaaacacacatttgattaccggccttccagaatctgcttctacaggctacgttcattccttgtaattctaattctttcaaatcagacacaggaccttagtgactcggcctgcccagaattttagggaagacagcgtttgaatgggccgtggaatcatctatttattctccggcgaggagtaacagccacaacattgtttgatacctttgacacattgaagctgatgtatctaacaggaaagacgagattgaagttttaacacattccctagctgctgctgggcaaagaataggacagcgtttggattttggtgtttttttcttggggtgttttggtggtttgaagaagcgtttgcgttttgtacattttgtgaacgcaggctttgtgttaggagatatgtagagagagacggacaagggggagaaaagaagctgccctaaaagttttgtacattgatttggttagagatcattgtctcttcttttcttttcttttctctgatcatagggttttttaattgtttcatcatcatattcttatgattcttttctttcacaagataattttttcaatagtgatttaattcatttttgcttcttccagtcgtgttcatgtttttcatttgttcttatatcagttttaaatttat

SEQ ID NO: 48454 - protein, 567 aa, Arabidopsis thaliana
  peptide (1)..(567): Ceres Seq. ID no. 12601024
MLAKNRLPGSGHTTPSPPASPRRSPRYRHGRSKAAAGSRFPTVQPSRTLAHRLSWILLSVLLRRQGIFLFAPLIYISCMLLYMGTVSFDVVPIIQRRPPPGSVYKSPQVYAKLRPEMDADNSTADAITTIWKHSYKGGEWKPYVNKSTGDLPESNGYIYVEANGGLNQQRTSICNAVAVAGYLNATLVIPNFHYHSIWRDPSKFGDIYDEEFFVSTLSNDVRVVDTIPEYLMERFDHNMTNVYNFRVKAWSPIQYYRDSILPKLLEEKIIRISPFANRLSFDAPQAVQRLRCLANYEALKFSKTILTLGETLVKRMKEQSANHGAKYVSVHLRFEEDMVAFSCCIFDGGNQEKQDMIAARERGWKGKFTKPGRVIRPGAIRQNGKCPLTPLEVGLMLRGMGFNKSTYIFLASGEIYDANRTMAPLLEMFPNLQTKEMLASEEELAPYKNFSSRMAAIDYTVCLHSEVFVTTQGGNFPHFLMGHRRYMFGGHSKTIRPDKRKLAILFDNPNIGWRSFKRQMLNMRSHSDSKGFELKRPNDSIYTFPCPDCMSRRNKTTTPESRPPPAT

SEQ ID NO: 48455 - protein, 489 aa, Arabidopsis thaliana
  peptide (1)..(489): Ceres Seq. ID no. 12601025
MLLYMGTVSFDVVPIIQRRPPPGSVYKSPQVYAKLRPEMDADNSTADAITTIWKHSYKGGEWKPYVNKSTGDLPESNGYIYVEANGGLNQQRTSICNAVAVAGYLNATLVIPNFHYHSIWRDPSKFGDIYDEEFFVSTLSNDVRVVDTIPEYLMERFDHNMTNVYNFRVKAWSPIQYYRDSILPKLLEEKIIRISPFANRLSFDAPQAVQRLRCLANYEALKFSKTILTLGETLVKRMKEQSANHGAKYVSVHLRFEEDMVAFSCCIFDGGNQEKQDMIAARERGWKGKFTKPGRVIRPGAIRQNGKCPLTPLEVGLMLRGMGFNKSTYIFLASGEIYDANRTMAPLLEMFPNLQTKEMLASEEELAPYKNFSSRMAAIDYTVCLHSEVFVTTQGGNFPHFLMGHRRYMFGGHSKTIRPDKRKLAILFDNPNIGWRSFKRQMLNMRSHSDSKGFELKRPNDSIYTFPCPDCMSRRNKTTTPESRPPPAT

SEQ ID NO: 48456 - protein, 485 aa, Arabidopsis thaliana
  peptide (1)..(485): Ceres Seq. ID no. 12601026
MGTVSFDVVPIIQRRPPPGSVYKSPQVYAKLRPEMDADNSTADAITTIWKHSYKGGEWKPYVNKSTGDLPESNGYIYVEANGGLNQQRTSICNAVAVAGYLNATLVIPNFHYHSIWRDPSKFGDIYDEEFFVSTLSNDVRVVDTIPEYLMERFDHNMTNVYNFRVKAWSPIQYYRDSILPKLLEEKIIRISPFANRLSFDAPQAVQRLRCLANYEALKFSKTILTLGETLVKRMKEQSANHGAKYVSVHLRFEEDMVAFSCCIFDGGNQEKQDMIAARERGWKGKFTKPGRVIRPGAIRQNGKCPLTPLEVGLMLRGMGFNKSTYIFLASGEIYDANRTMAPLLEMFPNLQTKEMLASEEELAPYKNFSSRMAAIDYTVCLHSEVFVTTQGGNFPHFLMGHRRYMFGGHSKTIRPDKRKLAILFDNPNIGWRSFKRQMLNMRSHSDSKGFELKRPNDSIYTFPCPDCMSRRNKTTTPESRPPPAT

SEQ ID NO: 48457 - DNA, 1514 bp, Arabidopsis thaliana
  misc_feature (1)..(1514): Ceres Seq. ID no. 13591887
  misc_feature (1)..(1514): Ortholog of  Ceres SEQ ID NO 14314792 as cited in SEQ ID NO 56837
tcctctcgatctctgatctccctgtcttctgtctacgcttcgtcgccggccgatttctcccagactcgtcttaccgcctccggtcgaaaccctagattcccggaggacgaaattcgttttttcgccggaactaaattaaggagatttgagaggctatgggtacaacaacgacaacaagcgctgtgtatatccatgttatcgaggatgtcgtcaacaaagttcgtgaggagttcattaacaacggaggtcctggcgagagtgttctcagcgagcttcaaggaatttgggagacgaagatgatgcaagccggagtcttgaatggaccaatagagaggtcatcggctcagaagccaacacctggtggtccactgactcatgatttgaatgttccttatgaaggtacagaggagtacgagactcccactgctgaaatgctcttccctcctacaccattgcagactccccttccaacgccgcttcccggtactgctgataactcatccatgtataacatccctaccggctcaagtgattatcccactcctggaactgagaatggagtcaacattgatgttaaagcaagacctagtccttatatgccaccgccttctccgtggacaaatcctagacttgatgtcaatgttgcttatgtggatggccgtgatgagcctgagagaggaaactctaaccagcagtttacgcaggatttatttgtgccatcctctgggaaacgaaaacgtgatgattcttctggacattatcaaaatggtggatctatacctcaacaggatggtgcaggcgatgctatccctgaggcaaactttgagtgtgatgcattccgcataacctctattggcgatagaaaggtaccacgagacttcttcagctcatcatcgaagattcctcaggttgatgggccaatgcctgacccttatgatgaaatgctctctacaccaaatatatatagttatcaaggacccagtgaagagtttaacgaggccagaactcctgctccaaacgagatccaaacgagcactcctgttgctgtacaaaacgatatcattgaagatgatgaagagctgttgaacgaagatgatgatgatgacgagttggacgacctagaaagtggcgaggatatgaacacacaacacctggttttagctcaatttgacaaggtgacgcgcacaaagagcaggtggaagtgcagtctgaaagacgggatcatgcatataaacgataaggacattctcttcaacaaagcagcaggcgagtttgacttctgatcttaacactagcaatgatgcttctaggaaagtccttcaaatgtccagtgtctttctttttaccttatgatttaagaccgaccgagagagacatgagtattcatgggaaagtgtactctggttggcttgttgtacaaaaagaaaagttttttctgtcgaagaaggcgtatcaactttcaccttgtttcatgaactcttattgtctttcacgcaatggaaaattaacttccc

SEQ ID NO: 48458 - protein, 375 aa, Arabidopsis thaliana
  peptide (1)..(375): Ceres Seq. ID no. 13591888
MGTTTTTSAVYIHVIEDVVNKVREEFINNGGPGESVLSELQGIWETKMMQAGVLNGPIERSSAQKPTPGGPLTHDLNVPYEGTEEYETPTAEMLFPPTPLQTPLPTPLPGTADNSSMYNIPTGSSDYPTPGTENGVNIDVKARPSPYMPPPSPWTNPRLDVNVAYVDGRDEPERGNSNQQFTQDLFVPSSGKRKRDDSSGHYQNGGSIPQQDGAGDAIPEANFECDAFRITSIGDRKVPRDFFSSSSKIPQVDGPMPDPYDEMLSTPNIYSYQGPSEEFNEARTPAPNEIQTSTPVAVQNDIIEDDEELLNEDDDDDELDDLESGEDMNTQHLVLAQFDKVTRTKSRWKCSLKDGIMHINDKDILFNKAAGEFDF

SEQ ID NO: 48459 - protein, 328 aa, Arabidopsis thaliana
  peptide (1)..(328): Ceres Seq. ID no. 13591889
MMQAGVLNGPIERSSAQKPTPGGPLTHDLNVPYEGTEEYETPTAEMLFPPTPLQTPLPTPLPGTADNSSMYNIPTGSSDYPTPGTENGVNIDVKARPSPYMPPPSPWTNPRLDVNVAYVDGRDEPERGNSNQQFTQDLFVPSSGKRKRDDSSGHYQNGGSIPQQDGAGDAIPEANFECDAFRITSIGDRKVPRDFFSSSSKIPQVDGPMPDPYDEMLSTPNIYSYQGPSEEFNEARTPAPNEIQTSTPVAVQNDIIEDDEELLNEDDDDDELDDLESGEDMNTQHLVLAQFDKVTRTKSRWKCSLKDGIMHINDKDILFNKAAGEFDF

SEQ ID NO: 48460 - protein, 327 aa, Arabidopsis thaliana
  peptide (1)..(327): Ceres Seq. ID no. 13591890
MQAGVLNGPIERSSAQKPTPGGPLTHDLNVPYEGTEEYETPTAEMLFPPTPLQTPLPTPLPGTADNSSMYNIPTGSSDYPTPGTENGVNIDVKARPSPYMPPPSPWTNPRLDVNVAYVDGRDEPERGNSNQQFTQDLFVPSSGKRKRDDSSGHYQNGGSIPQQDGAGDAIPEANFECDAFRITSIGDRKVPRDFFSSSSKIPQVDGPMPDPYDEMLSTPNIYSYQGPSEEFNEARTPAPNEIQTSTPVAVQNDIIEDDEELLNEDDDDDELDDLESGEDMNTQHLVLAQFDKVTRTKSRWKCSLKDGIMHINDKDILFNKAAGEFDF

SEQ ID NO: 48461 - DNA, 2889 bp, Arabidopsis thaliana
  misc_feature (1)..(2889): Ceres Seq. ID no. 13579098
  misc_feature (1)..(2889): Ortholog of  Ceres SEQ ID NO 13597380 as cited in SEQ ID NO 64054
  misc_feature (1)..(2889): Ortholog of  Ceres SEQ ID NO 12625474 as cited in SEQ ID NO 64169
  misc_feature (1)..(2889): Ortholog of  Ceres SEQ ID NO 13600220 as cited in SEQ ID NO 0
atgtttaggggaaaaatatttgtgttatcattattttctatttacgtcctctcatcagcggctgaaaaaaatacatcattttctgcgctttttgcttttggtgattcagtcttagatacgggaaacaataattttcttcttactcttctcaaaggaaattattggccatatggtttgagttttgactataaatttccgacgggaagattcggaaatggaagagttttcaccgatatagttgccgaaggtttacagatcaaaagacttgtaccagcttatagcaagattcgtcgcatcagttctgaagaccttaagactggcgtttgttttgcatcaggtggttcaggaattgacgatcttacatcccgaacactgagagttttatcggcaggtgaccaagtaaaagactttaaagactatttgaagaaactaagaagagtagtgaaacgtaagaaaaaagtaaaagaaatagtttcaaacgctgtgtttcttatttctgaaggaaataatgatcttggatactttgtcgctcccgctcttcttcgattacagtccacaacaacatacaccagtaaaatggttgtttggaccagaaagtttctaaaagatttatacgatcttggagcgagaaaatttgcggtgatgggagtgatgcctgtgggatgtttgcctatccatcgagcctcattcggtggggtattcggatggtgtaacttcctcttgaatagaattacggaggacttcaacatgaaattgcagaaaggtcttacaagttacgcagtagaatatgatttcaaagatgcaaagtttgtttacgtcgacatatacggtactcttatggatcttgtcaaaaatcctatggcctatgggtttacagaagcgaaaaaagcttgttgttgtatgccgaatgcaataataccatgcttccatccagataaatacgtcttctatgactttgctcacccttcccagaaagcctacgaacaaaaatcccttccaacatatttgccatttacacttcttcaagttttccatatactaatggggaggtttcataaatttcctctcctaggtttagttctgttcctcggtctgaccggctcacttatcgccgccaatgagtatgcctgttctagtaccgatatacactttactcgtgccaatttccctaaaggtttcatttttggtaccgcaactgctgcttttcaggttgaaggagctgtaaatgaaggatgtagaggtccaagcatgtgggacgtatacaccaagaaattcccacataaatgtaattatcacaatgccgacgttgctgtcgatttctaccatcgttacaaggaagatatcaagttgatgaaaaatctgaacactgatggctttagattttccattgcatggcccagaatattcccccatggtaggatggagaaaggaataagcaaagcaggtgtgcagtattaccacgatctgatcgatgagctcctcgcaaatggtataacaccattagtaactgtttttcactgggacactcctcaagacttagaagatgaatatggtggctttttaagcgaccgcataataaaggattttacggagtatgcaaacttcacattccaagagtacggagacaaagtgaagcattggatcacatttaacgaaccatgggtgttcagtcgagctggctacgacattgggaacaaagcaccgggacgttgttctaagtacatcaaagaacatggagagatgtgtcacgatggacggtcaggacacgaagcttatatcgttagtcataacatgctcttggcacatgccgatgccgttgatgcctttaggaaatgcgacaagtgcaaaggtggtaaaattgggattgctcacagtccagcttggtttgaggctcatgagctctcggatgaagagcacgaaactcctgtaactggcctgattgacttcatattgggatggcatttgcatccgaccacatatggagattatccacaatcaatgaaggatcacatcggacatcgactgccgaaattcacagaggcacagaaagagaagttgaaaaattcagctgattttgtaggaatcaactattacacatcagtgtttgcattgcacgacgaagagccagatccttcgcaaccaagttggcagagtgattctctcgtggactgggaaccaaggtatgtggataaattcaatgcttttgctaacaagcctgatgttgctaaagtggaagtctacgcaaagggtttgaggagcctcttgaaatatatcaaggacaaatacggcaatcctgaaatcatgatcaccgagaatggatacggagaggatctaggtgagcaagacacaagccttgtagtggcgctgtcagatcagcacagaacatactatatccagaaacatctcttgagcttgcacgaagcaatttgcgatgataaagtaaacgttacagggtattttcattggtcattgatggacaattttgaatggcaagatggatacaaggcgagatttgggctctactacgtcgattacaaaaataatttgacgcgccacgaaaaattatcagcccagtggtactcgagtttcctccacgatggatcaaaagagttcgaaatcgagcacgagttcgaacacgatgagttgtagagtgaattctctacaaacagactttgaaaatttgagtcatatatatattatatattcataaactatttgtttacagtttgctgcagtgaatgcatttccatattcaagtaaataaatcagatactcaatatacagacaagtaaagtttggattgtgttgtagtaagtatttggatagttgaatattgagatcaagggtattcacgaagattccgtactagttattgatattttctattgc

SEQ ID NO: 48462 - protein, 882 aa, Arabidopsis thaliana
  peptide (1)..(882): Ceres Seq. ID no. 13579099
MFRGKIFVLSLFSIYVLSSAAEKNTSFSALFAFGDSVLDTGNNNFLLTLLKGNYWPYGLSFDYKFPTGRFGNGRVFTDIVAEGLQIKRLVPAYSKIRRISSEDLKTGVCFASGGSGIDDLTSRTLRVLSAGDQVKDFKDYLKKLRRVVKRKKKVKEIVSNAVFLISEGNNDLGYFVAPALLRLQSTTTYTSKMVVWTRKFLKDLYDLGARKFAVMGVMPVGCLPIHRASFGGVFGWCNFLLNRITEDFNMKLQKGLTSYAVEYDFKDAKFVYVDIYGTLMDLVKNPMAYGFTEAKKACCCMPNAIIPCFHPDKYVFYDFAHPSQKAYEQKSLPTYLPFTLLQVFHILMGRFHKFPLLGLVLFLGLTGSLIAANEYACSSTDIHFTRANFPKGFIFGTATAAFQVEGAVNEGCRGPSMWDVYTKKFPHKCNYHNADVAVDFYHRYKEDIKLMKNLNTDGFRFSIAWPRIFPHGRMEKGISKAGVQYYHDLIDELLANGITPLVTVFHWDTPQDLEDEYGGFLSDRIIKDFTEYANFTFQEYGDKVKHWITFNEPWVFSRAGYDIGNKAPGRCSKYIKEHGEMCHDGRSGHEAYIVSHNMLLAHADAVDAFRKCDKCKGGKIGIAHSPAWFEAHELSDEEHETPVTGLIDFILGWHLHPTTYGDYPQSMKDHIGHRLPKFTEAQKEKLKNSADFVGINYYTSVFALHDEEPDPSQPSWQSDSLVDWEPRYVDKFNAFANKPDVAKVEVYAKGLRSLLKYIKDKYGNPEIMITENGYGEDLGEQDTSLVVALSDQHRTYYIQKHLLSLHEAICDDKVNVTGYFHWSLMDNFEWQDGYKARFGLYYVDYKNNLTRHEKLSAQWYSSFLHDGSKEFEIEHEFEHDEL

SEQ ID NO: 48463 - protein, 690 aa, Arabidopsis thaliana
  peptide (1)..(690): Ceres Seq. ID no. 13579100
MVVWTRKFLKDLYDLGARKFAVMGVMPVGCLPIHRASFGGVFGWCNFLLNRITEDFNMKLQKGLTSYAVEYDFKDAKFVYVDIYGTLMDLVKNPMAYGFTEAKKACCCMPNAIIPCFHPDKYVFYDFAHPSQKAYEQKSLPTYLPFTLLQVFHILMGRFHKFPLLGLVLFLGLTGSLIAANEYACSSTDIHFTRANFPKGFIFGTATAAFQVEGAVNEGCRGPSMWDVYTKKFPHKCNYHNADVAVDFYHRYKEDIKLMKNLNTDGFRFSIAWPRIFPHGRMEKGISKAGVQYYHDLIDELLANGITPLVTVFHWDTPQDLEDEYGGFLSDRIIKDFTEYANFTFQEYGDKVKHWITFNEPWVFSRAGYDIGNKAPGRCSKYIKEHGEMCHDGRSGHEAYIVSHNMLLAHADAVDAFRKCDKCKGGKIGIAHSPAWFEAHELSDEEHETPVTGLIDFILGWHLHPTTYGDYPQSMKDHIGHRLPKFTEAQKEKLKNSADFVGINYYTSVFALHDEEPDPSQPSWQSDSLVDWEPRYVDKFNAFANKPDVAKVEVYAKGLRSLLKYIKDKYGNPEIMITENGYGEDLGEQDTSLVVALSDQHRTYYIQKHLLSLHEAICDDKVNVTGYFHWSLMDNFEWQDGYKARFGLYYVDYKNNLTRHEKLSAQWYSSFLHDGSKEFEIEHEFEHDEL

SEQ ID NO: 48464 - protein, 668 aa, Arabidopsis thaliana
  peptide (1)..(668): Ceres Seq. ID no. 13579101
MGVMPVGCLPIHRASFGGVFGWCNFLLNRITEDFNMKLQKGLTSYAVEYDFKDAKFVYVDIYGTLMDLVKNPMAYGFTEAKKACCCMPNAIIPCFHPDKYVFYDFAHPSQKAYEQKSLPTYLPFTLLQVFHILMGRFHKFPLLGLVLFLGLTGSLIAANEYACSSTDIHFTRANFPKGFIFGTATAAFQVEGAVNEGCRGPSMWDVYTKKFPHKCNYHNADVAVDFYHRYKEDIKLMKNLNTDGFRFSIAWPRIFPHGRMEKGISKAGVQYYHDLIDELLANGITPLVTVFHWDTPQDLEDEYGGFLSDRIIKDFTEYANFTFQEYGDKVKHWITFNEPWVFSRAGYDIGNKAPGRCSKYIKEHGEMCHDGRSGHEAYIVSHNMLLAHADAVDAFRKCDKCKGGKIGIAHSPAWFEAHELSDEEHETPVTGLIDFILGWHLHPTTYGDYPQSMKDHIGHRLPKFTEAQKEKLKNSADFVGINYYTSVFALHDEEPDPSQPSWQSDSLVDWEPRYVDKFNAFANKPDVAKVEVYAKGLRSLLKYIKDKYGNPEIMITENGYGEDLGEQDTSLVVALSDQHRTYYIQKHLLSLHEAICDDKVNVTGYFHWSLMDNFEWQDGYKARFGLYYVDYKNNLTRHEKLSAQWYSSFLHDGSKEFEIEHEFEHDEL

SEQ ID NO: 48465 - DNA, 1577 bp, Arabidopsis thaliana; identical to SEQ ID NO: 21528
  misc_feature (1)..(1577): Ceres Seq. ID no. 12575042
  misc_feature (1)..(1577): Ortholog of  Ceres SEQ ID NO 13597656 as cited in SEQ ID NO 65561

SEQ ID NO: 48466 - protein, 465 aa, Arabidopsis thaliana; identical to SEQ ID NO: 21529
  peptide (1)..(465): Ceres Seq. ID no. 12575043

SEQ ID NO: 48467 - protein, 441 aa, Arabidopsis thaliana; identical to SEQ ID NO: 21530
  peptide (1)..(441): Ceres Seq. ID no. 12575044

SEQ ID NO: 48468 - protein, 388 aa, Arabidopsis thaliana; identical to SEQ ID NO: 21531
  peptide (1)..(388): Ceres Seq. ID no. 12575045

SEQ ID NO: 48469 - DNA, 1389 bp, Arabidopsis thaliana
  misc_feature (1)..(1389): Ceres Seq. ID no. 13591846
  misc_feature (1)..(1389): Ortholog of  Ceres SEQ ID NO 12609902 as cited in SEQ ID NO 51816
gaggtcagttctattcgtgaaatcgagtctcctcttattcgacgacctgccccaactataaacatgacttttacacacttgacataacttcgtttgtatcgcttttttgaaattctatatattattattgtttgagcagaaactaagacaaaattaagacttttctctcttcttcttctccactgggtcgatctttacgaggttcacttgtacggattcactttaacaacagattcgccatggccgccgccgtcgcagcaccgagactcatctccttgaaagccgtcgcgaagctaggtttccgtgagatctctcaaatccgacaattggctccgcttcactctgcgatacctcatttcggaatgctgcgatgtagatcgcggcagccgttttctacctctgttgtgaaagctcaagctactgctactgagcaatcaccaggggaagttgttcaaaaagtggaatctccagtggtcgttatcactggtgcctcgagagggattggtaaagcaattgctctagccttgggtaaagctggctgcaaggtcttggtgaattatgctaggtcagcaaaagaggctgaagaagttgctaaacagattgaagaatatggtggccaggctatcacttttgggggtgatgtctcgaaagcgactgatgtggatgcgatgatgaaaaccgctcttgacaaatggggaaccattgatgttgtggttaacaatgcaggaattactcgggataccttgttaatacgaatgaagcaatcacaatgggacgaagtgattgctttgaatctcactggtgtatttctctgtactcaggcagcagtaaagatcatgatgaagaaaaaaaggggaagaatcatcaatatctcgtcagttgttggtctcattggtaatattggtcaagcaaactacgcagcggctaaaggtggagttatttcgttttccaagactgctgccagagaaggtgcgagcaggaatataaatgtcaatgtggtttgccccggattcattgcatctgacatgactgcagagcttggagaagacatggaaaagaaaatcctgggaacaatcccattaggacggtatggaaaagctgaagaagtggctggcttggtagaattcttggctctcagtcctgcagccagttacataaccggacaggcattcaccattgatggaggtattgctatctagacatttggtatgagtcggcttttgtttagttaaaacaatttggtaaaagagacaaagttgagttctttttagcacttggtcggattgctattttgcggtttctgttaagaaatatgtaacacttactgcttaaactacgtatttggtcactttcagaaactagaaatcgattaatccaatctcgcattct

SEQ ID NO: 48470 - protein, 319 aa, Arabidopsis thaliana
  peptide (1)..(319): Ceres Seq. ID no. 13591847
MAAAVAAPRLISLKAVAKLGFREISQIRQLAPLHSAIPHFGMLRCRSRQPFSTSVVKAQATATEQSPGEVVQKVESPVVVITGASRGIGKAIALALGKAGCKVLVNYARSAKEAEEVAKQIEEYGGQAITFGGDVSKATDVDAMMKTALDKWGTIDVVVNNAGITRDTLLIRMKQSQWDEVIALNLTGVFLCTQAAVKIMMKKKRGRIINISSVVGLIGNIGQANYAAAKGGVISFSKTAAREGASRNINVNVVCPGFIASDMTAELGEDMEKKILGTIPLGRYGKAEEVAGLVEFLALSPAASYITGQAFTIDGGIAI

SEQ ID NO: 48471 - protein, 278 aa, Arabidopsis thaliana
  peptide (1)..(278): Ceres Seq. ID no. 13591848
MLRCRSRQPFSTSVVKAQATATEQSPGEVVQKVESPVVVITGASRGIGKAIALALGKAGCKVLVNYARSAKEAEEVAKQIEEYGGQAITFGGDVSKATDVDAMMKTALDKWGTIDVVVNNAGITRDTLLIRMKQSQWDEVIALNLTGVFLCTQAAVKIMMKKKRGRIINISSVVGLIGNIGQANYAAAKGGVISFSKTAAREGASRNINVNVVCPGFIASDMTAELGEDMEKKILGTIPLGRYGKAEEVAGLVEFLALSPAASYITGQAFTIDGGIAI

SEQ ID NO: 48472 - protein, 176 aa, Arabidopsis thaliana
  peptide (1)..(176): Ceres Seq. ID no. 13591849
MMKTALDKWGTIDVVVNNAGITRDTLLIRMKQSQWDEVIALNLTGVFLCTQAAVKIMMKKKRGRIINISSVVGLIGNIGQANYAAAKGGVISFSKTAAREGASRNINVNVVCPGFIASDMTAELGEDMEKKILGTIPLGRYGKAEEVAGLVEFLALSPAASYITGQAFTIDGGIAI

SEQ ID NO: 48473 - DNA, 2389 bp, Arabidopsis thaliana; identical to SEQ ID NO: 43744
  misc_feature (1)..(2389): Ceres Seq. ID no. 13591580
  misc_feature (1)..(2389): Ortholog of  Ceres SEQ ID NO 12465083 as cited in SEQ ID NO 68239

SEQ ID NO: 48474 - protein, 669 aa, Arabidopsis thaliana; identical to SEQ ID NO: 25857
  peptide (1)..(669): Ceres Seq. ID no. 15221053

SEQ ID NO: 48475 - protein, 516 aa, Arabidopsis thaliana; identical to SEQ ID NO: 25858
  peptide (1)..(516): Ceres Seq. ID no. 15221054

SEQ ID NO: 48476 - protein, 511 aa, Arabidopsis thaliana; identical to SEQ ID NO: 43747
  peptide (1)..(511): Ceres Seq. ID no. 15221055

SEQ ID NO: 48477 - DNA, 2086 bp, Arabidopsis thaliana; identical to SEQ ID NO: 46535
  misc_feature (1)..(2086): Ceres Seq. ID no. 12639069
  misc_feature (1)..(2086): Ortholog of  Ceres SEQ ID NO 13659971 as cited in SEQ ID NO 67565
  misc_feature (1)..(2086): Ortholog of  Ceres SEQ ID NO 13500385 as cited in SEQ ID NO 67583

SEQ ID NO: 48478 - protein, 528 aa, Arabidopsis thaliana; identical to SEQ ID NO: 46536
  peptide (1)..(528): Ceres Seq. ID no. 12639070

SEQ ID NO: 48479 - protein, 423 aa, Arabidopsis thaliana; identical to SEQ ID NO: 46537
  peptide (1)..(423): Ceres Seq. ID no. 12639071

SEQ ID NO: 48480 - protein, 397 aa, Arabidopsis thaliana; identical to SEQ ID NO: 46538
  peptide (1)..(397): Ceres Seq. ID no. 12639072

SEQ ID NO: 48481 - DNA, 1933 bp, Arabidopsis thaliana
  misc_feature (1)..(1933): Ceres Seq. ID no. 12600905
  misc_feature (1)..(1933): Ortholog of  Ceres SEQ ID NO 15177258 as cited in SEQ ID NO 51386
atcacaaaacaaaaacctcacttaaaaaaaaaaaacagaagacagaaaaaaacaaaaaaaaaaagaaaaagaaaaataaacaaattttcttttcttttttttcctctaaagtttctattttgtctattcgtgtttttttttttacttcctgataatgggagcctatgaaacagaaaaaccaactaaagatgcggcggctctagagacacagtcgccggaagatttcgatcaaccatctccgcttcgtaaaatcatctccgtcgcttccatcgccgccggtgtacagttcgggtgggccttacagctctctcttcttactccgtacgttcaactcctcggaatccctcacaaatggtcatctctcatttggctctgtggtccagtctccggcatgattgttcaaccaatcgtcggtttccacagtgaccgatgtaggtccaaatttggtcgccgtcgtcctttcatcgccaccggagccgcactcgtcgccgtcgctgttttcctcatcggttacgctgcggatttcggttataaaatgggagataaactcgaggagaaggttaaagttcgagctatagggatctttgctctcgggttctggatcctcgacgtagccaacaacaccttacaaggaccttgccgtgctttcttagccgacttagccgccggtgacgctaagagaacgcgagtcgcaaacgcgtttttctctttttttatggcggttggaaacgttttgggttatgcggctggttcgtacactaacctccacaagatgtttccgttcacaatgacaaaagcttgcgatatctattgcgccaatctcaagacttgtttcttcttatccatcactctcctcctcatcgtcaccgtcacgtctctttggtacgttaatgacaaacaatggtctccgccgccgcgaaatgccgacgacgacgagaagacctcaagcgttcctttgttcggtgaaatctttggagcattcaaagtcatgaaacgtcccatgtggatgcttctaatcgtcacggccttaaactggatcgcttggttcccatttcttttgttcgatactgattggatgggtcgtgaagtgttcggtggagattcagatggaaatgaacgatcgaagaaactatacagtcttggagtccaatctggtgcaatgggattgatgtttaactctatagttcttggtttcatgtcacttggtgttgaatggattggtcggaaattaggaggagctaaacggctttggggtattgtcaatttcatcctagccgctggtttggccatgacggttctcgttacgaaattcgccgaggatcaccggaaaaccgccggtgatttagccggaccgagcgctagtgttaaagctggagctttaagtctctttgctgttcttggtatcccattagctattactttcagtactccttttgctctagcatccatattctcaagctgctccggtgcaggccaaggactttcattaggagttttaaatttggcgattgtgataccacaaatgatagtctcactaggaggtggacctttcgacgccttgttcggcggtggaaacttaccggcgtttatcgttgcagcaattgcagcggcgattagtggagtattagcgttaaccgttttaccttcaccaccaccggacgcacccaaggcaacgaccatgggaggattccactagtttactattttttttttttaatgaaactcatcaaatacagtattactgtgcgaaactgcaaaaacccaaataaaagaaaagaatggataaaatgataaaatctaataaaccttgggtcgtctgtatttcacccttttttagttttttttcttctttttttataacttttgtcacttattttaatttgaaatagaatgttttttttttttgcccttaaataagatttgtgtgttgagt

SEQ ID NO: 48482 - protein, 513 aa, Arabidopsis thaliana
  peptide (1)..(513): Ceres Seq. ID no. 12600906
MGAYETEKPTKDAAALETQSPEDFDQPSPLRKIISVASIAAGVQFGWALQLSLLTPYVQLLGIPHKWSSLIWLCGPVSGMIVQPIVGFHSDRCRSKFGRRRPFIATGAALVAVAVFLIGYAADFGYKMGDKLEEKVKVRAIGIFALGFWILDVANNTLQGPCRAFLADLAAGDAKRTRVANAFFSFFMAVGNVLGYAAGSYTNLHKMFPFTMTKACDIYCANLKTCFFLSITLLLIVTVTSLWYVNDKQWSPPPRNADDDEKTSSVPLFGEIFGAFKVMKRPMWMLLIVTALNWIAWFPFLLFDTDWMGREVFGGDSDGNERSKKLYSLGVQSGAMGLMFNSIVLGFMSLGVEWIGRKLGGAKRLWGIVNFILAAGLAMTVLVTKFAEDHRKTAGDLAGPSASVKAGALSLFAVLGIPLAITFSTPFALASIFSSCSGAGQGLSLGVLNLAIVIPQMIVSLGGGPFDALFGGGNLPAFIVAAIAAAISGVLALTVLPSPPPDAPKATTMGGFH

SEQ ID NO: 48483 - protein, 434 aa, Arabidopsis thaliana
  peptide (1)..(434): Ceres Seq. ID no. 12600907
MIVQPIVGFHSDRCRSKFGRRRPFIATGAALVAVAVFLIGYAADFGYKMGDKLEEKVKVRAIGIFALGFWILDVANNTLQGPCRAFLADLAAGDAKRTRVANAFFSFFMAVGNVLGYAAGSYTNLHKMFPFTMTKACDIYCANLKTCFFLSITLLLIVTVTSLWYVNDKQWSPPPRNADDDEKTSSVPLFGEIFGAFKVMKRPMWMLLIVTALNWIAWFPFLLFDTDWMGREVFGGDSDGNERSKKLYSLGVQSGAMGLMFNSIVLGFMSLGVEWIGRKLGGAKRLWGIVNFILAAGLAMTVLVTKFAEDHRKTAGDLAGPSASVKAGALSLFAVLGIPLAITFSTPFALASIFSSCSGAGQGLSLGVLNLAIVIPQMIVSLGGGPFDALFGGGNLPAFIVAAIAAAISGVLALTVLPSPPPDAPKATTMGGFH

SEQ ID NO: 48484 - protein, 386 aa, Arabidopsis thaliana
  peptide (1)..(386): Ceres Seq. ID no. 12600908
MGDKLEEKVKVRAIGIFALGFWILDVANNTLQGPCRAFLADLAAGDAKRTRVANAFFSFFMAVGNVLGYAAGSYTNLHKMFPFTMTKACDIYCANLKTCFFLSITLLLIVTVTSLWYVNDKQWSPPPRNADDDEKTSSVPLFGEIFGAFKVMKRPMWMLLIVTALNWIAWFPFLLFDTDWMGREVFGGDSDGNERSKKLYSLGVQSGAMGLMFNSIVLGFMSLGVEWIGRKLGGAKRLWGIVNFILAAGLAMTVLVTKFAEDHRKTAGDLAGPSASVKAGALSLFAVLGIPLAITFSTPFALASIFSSCSGAGQGLSLGVLNLAIVIPQMIVSLGGGPFDALFGGGNLPAFIVAAIAAAISGVLALTVLPSPPPDAPKATTMGGFH

SEQ ID NO: 48485 - DNA, 1986 bp, Arabidopsis thaliana
  misc_feature (1)..(1986): Ceres Seq. ID no. 13578835
  misc_feature (1)..(1986): Ortholog of  Ceres SEQ ID NO 13599322 as cited in SEQ ID NO 0
gtttccattttaatttgaagatccttccctttctttctttctctctctctctcgctcgccgggaaaaatcgctgtccaaatctccggtcatttctccgaggatctcttctatcaatccaacggttttgttttcatcttctcagatctcacagaacaatagtcaaagactgatgcagaagaagcgttagtacaaggtttttgttggaaagcaattgaatctgaattcatctttcattttcacgctttgatccaatttgagttctctcttccactgaatccctcatacgtaaaacctagggtttctaaattagggttctcctgaggtctgtttatagtgcgtaaagccatgtttaagaagatcatgaaaggggcaaatcgaaaagcctctaaagctgaggcgaatgattcgtctatgtatgggtttgatccaccaggtaggtcaggtcctggatccaatatgattgtaaatcacgcatctcgtggttcgcttgttccttcttctccaaattcaatggcggcggccaccacacaaccgcctcctatgtattcagtcgagcctcttcccttgttcagagacgtctctgtctccgagcgtcaatccttgttcttgaggaaactccagatttgttgttttcaatttgattttacggatacgttgaagaatgcgagagagaaggagattaagaggcaaacgttattggagctagttgattttatacagtctggagcagggaagctcactgaagtttgtcaagaagaaatggtaaagatgatttcggttaatatattccggtgtcttcctccggcttcacacgagaatacaggtcaagagcctgctgatcttgaggaagaggagccttatttggaaccatcttggcctcatttacagctaatttatgagttgctgctgagatacattgttccttctgacacagatacaaaagttgcaaaacggtatattgatcattcttttgtgttgaggttgcttgaattgtttgaaactgaagatcctagagaaagggagtacttgaaaacgattcttcataggatttatggcaagtttatggttcacaggccctttattaggaaagcaatgaaccatattttctataggtttatttatgagacagagagacatagtgggattggggagcttttggagattctcggtagtattattaatgggtttgccttgccaatgaaggaggagcacaagctctttttgattagggcgttgataccgctgcataagccaaaaccaatcgctatgtatcaccaacaattgtcttactgcatcgttcagtttgtggagaaagattataagcttgcggatacggtgatcaggggcttgttaaagttttggcctgtgacaaattgtacaaaagaggttctctttcttggtgaacttgaagaggttcttgaggcaacacaaactgttgagttccaacgctgtatggtccctctgttccaacagattgctcgatgcctcagtagctctaattttcaggttgcagaacgagctctgttcttgtggaacaacgagcatgtggtgggtctaatagctcagaaccgaggagtgatccttcccatcatatttgcatccctggagaaaaacatagagtctcattggaaccaagcggtacacggtctaagtgcgaatataaagagaatgttcatggagatggaccctgagctctttgaagaatgtcagcaacagtacgaagaaaaacaagccaaatctaaacaagtggaagagcaacgccaaaataggtggaggagattagatgaagcagtggaggaacgagaaagagaagatcctatgatcacttcttagaaaaaaatatatcaaatcatcaaagtaataatattctctctcacttcttctcattttctctaatcgttgcaaattattatattttatttatttattttgaggtctggaaaaaaaaaagtccttaatctaagtcaataggaatttattttcct

SEQ ID NO: 48486 - protein, 495 aa, Arabidopsis thaliana
  peptide (1)..(495): Ceres Seq. ID no. 13578836
MFKKIMKGANRKASKAEANDSSMYGFDPPGRSGPGSNMIVNHASRGSLVPSSPNSMAAATTQPPPMYSVEPLPLFRDVSVSERQSLFLRKLQICCFQFDFTDTLKNAREKEIKRQTLLELVDFIQSGAGKLTEVCQEEMVKMISVNIFRCLPPASHENTGQEPADLEEEEPYLEPSWPHLQLIYELLLRYIVPSDTDTKVAKRYIDHSFVLRLLELFETEDPREREYLKTILHRIYGKFMVHRPFIRKAMNHIFYRFIYETERHSGIGELLEILGSIINGFALPMKEEHKLFLIRALIPLHKPKPIAMYHQQLSYCIVQFVEKDYKLADTVIRGLLKFWPVTNCTKEVLFLGELEEVLEATQTVEFQRCMVPLFQQIARCLSSSNFQVAERALFLWNNEHVVGLIAQNRGVILPIIFASLEKNIESHWNQAVHGLSANIKRMFMEMDPELFEECQQQYEEKQAKSKQVEEQRQNRWRRLDEAVEEREREDPMITS

SEQ ID NO: 48487 - protein, 490 aa, Arabidopsis thaliana
  peptide (1)..(490): Ceres Seq. ID no. 13578837
MKGANRKASKAEANDSSMYGFDPPGRSGPGSNMIVNHASRGSLVPSSPNSMAAATTQPPPMYSVEPLPLFRDVSVSERQSLFLRKLQICCFQFDFTDTLKNAREKEIKRQTLLELVDFIQSGAGKLTEVCQEEMVKMISVNIFRCLPPASHENTGQEPADLEEEEPYLEPSWPHLQLIYELLLRYIVPSDTDTKVAKRYIDHSFVLRLLELFETEDPREREYLKTILHRIYGKFMVHRPFIRKAMNHIFYRFIYETERHSGIGELLEILGSIINGFALPMKEEHKLFLIRALIPLHKPKPIAMYHQQLSYCIVQFVEKDYKLADTVIRGLLKFWPVTNCTKEVLFLGELEEVLEATQTVEFQRCMVPLFQQIARCLSSSNFQVAERALFLWNNEHVVGLIAQNRGVILPIIFASLEKNIESHWNQAVHGLSANIKRMFMEMDPELFEECQQQYEEKQAKSKQVEEQRQNRWRRLDEAVEEREREDPMITS

SEQ ID NO: 48488 - protein, 473 aa, Arabidopsis thaliana
  peptide (1)..(473): Ceres Seq. ID no. 13578838
MYGFDPPGRSGPGSNMIVNHASRGSLVPSSPNSMAAATTQPPPMYSVEPLPLFRDVSVSERQSLFLRKLQICCFQFDFTDTLKNAREKEIKRQTLLELVDFIQSGAGKLTEVCQEEMVKMISVNIFRCLPPASHENTGQEPADLEEEEPYLEPSWPHLQLIYELLLRYIVPSDTDTKVAKRYIDHSFVLRLLELFETEDPREREYLKTILHRIYGKFMVHRPFIRKAMNHIFYRFIYETERHSGIGELLEILGSIINGFALPMKEEHKLFLIRALIPLHKPKPIAMYHQQLSYCIVQFVEKDYKLADTVIRGLLKFWPVTNCTKEVLFLGELEEVLEATQTVEFQRCMVPLFQQIARCLSSSNFQVAERALFLWNNEHVVGLIAQNRGVILPIIFASLEKNIESHWNQAVHGLSANIKRMFMEMDPELFEECQQQYEEKQAKSKQVEEQRQNRWRRLDEAVEEREREDPMITS

SEQ ID NO: 48489 - DNA, 2104 bp, Arabidopsis thaliana
  misc_feature (1)..(2104): Ceres Seq. ID no. 13600798
  misc_feature (1)..(2104): Ortholog of  Ceres SEQ ID NO 15224912 as cited in SEQ ID NO 63475
  misc_feature (1)..(2104): Ortholog of  Ceres SEQ ID NO 13659394 as cited in SEQ ID NO 67049
atggaatctggtttctccggcggtggtggtgggtcggatttttacggcggtggtggtggtagatctatacctggaggtccaggaactgttatcaacgtcggtaacaataatcctcagacgacgtatagaaaccagattcctggaatcttctttgatcagatcggaaacagagtcgccggcggtaatggattctccgggaaaaggactttagcagattttcaagcggctcagcaacatcaacaacaacaacaacaacaaccgttttatagtcaagcagctctcaacgcttttctttcaaggtctgtgaagcctcgaaattatcagaattttcaatctccgtcgccgatgattgatctcacgtcggtgaatgatatgagtttgtttggtggttctggttcatctcagcgttacggtttaccggttcccaggtctcagacgcaacagcaacaatcggattacggtttatttggtgggatccgaatgggaatcgggtcgggtattaataattatccaacattaaccggcgttccgtgtattgaaccggttcaaaaccgggttcatgaatcggagaacatgttgaatagtttaagagagcttgagaaacagcttttagatgatgacgatgagagtggtggtgatgatgacgtgtcagttataacaaattcaaattccgattggattcaaaatctcgtgactccgaacccgaacccgaacccggttttgtctttttcaccgagctcttcttcttcgtcttcttcgccttctacagcttcgacgacgacatcggtatgttctaggcaaacggttatggaaatcgcgacggcgatcgcggaagggaaaacagagatagcgacggagattttggcgcgtgtttctcaaacgcctaatcttgagaggaattcagaggagaagcttgttgatttcatggtggctgcgcttcgatcgaggatagcttctccagtgacggaattgtatgggaaggagcatttaatctcgactcaattgctctacgagctctctccttgtttcaaactcggtttcgaggccgcgaatctcgccattctcgacgccgccgataacaacgacggtggaatgatgataccgcacgttatcgatttcgatatcggagaaggtggacaatacgttaaccttctccgtacattatccacgcgccggaatggtaaaagtcagagtcagaattctccggtggttaagatcaccgccgtggcgaacaacgtttacggatgtttagtcgatgacggtggagaagagaggttaaaagccgtcggagatttgttgagccaactcggtgatcgactcggtatctccgtaagtttcaacgtggtgacgagtttacgactcggtgatctgaatcgtgaatctctcgggtgtgatcccgacgagactttggctgtgaacttagctttcaagctttatcgtgttcccgacgaaagcgtatgcacggagaatccaagagacgaacttctccggcgcgtgaagggacttaaaccgcgcgtggttactctagtggagcaagaaatgaattcgaatacggcgccgtttttagggagagtgagtgagtcatgcgcgtgttacggtgcgttgcttgagtcggtcgagtctacggttcctagtacgaattccgaccgtgccaaagttgaggaaggaattggccggaagctagtaaacgcggtggcgtgcgaaggaatcgatcgtatagagcggtgcgaggtgttcgggaaatggcgaatgcggatgagcatggctgggtttgagttaatgccattgagtgagaagatagcggagtcgatgaagagtcgtggaaaccgagtccacccgggctttaccgttaaagaagataacggaggtgtgtgctttggttggatgggacgggcactcactgtcgcatccgcttggcgttaacttcacacactcttttttttcttcttattattaccatattattattattaattttcgagattattctgatattattatcattgtgattttccatttcgaaaagtgtaggaatcttatgtaacaaagaaaaaaaaaagacttttatgtttttctaataataaaagaaagagtgattgggttc

SEQ ID NO: 48490 - protein, 640 aa, Arabidopsis thaliana
  peptide (1)..(640): Ceres Seq. ID no. 13600799
MESGFSGGGGGSDFYGGGGGRSIPGGPGTVINVGNNNPQTTYRNQIPGIFFDQIGNRVAGGNGFSGKRTLADFQAAQQHQQQQQQQPFYSQAALNAFLSRSVKPRNYQNFQSPSPMIDLTSVNDMSLFGGSGSSQRYGLPVPRSQTQQQQSDYGLFGGIRMGIGSGINNYPTLTGVPCIEPVQNRVHESENMLNSLRELEKQLLDDDDESGGDDDVSVITNSNSDWIQNLVTPNPNPNPVLSFSPSSSSSSSSPSTASTTTSVCSRQTVMEIATAIAEGKTEIATEILARVSQTPNLERNSEEKLVDFMVAALRSRIASPVTELYGKEHLISTQLLYELSPCFKLGFEAANLAILDAADNNDGGMMIPHVIDFDIGEGGQYVNLLRTLSTRRNGKSQSQNSPVVKITAVANNVYGCLVDDGGEERLKAVGDLLSQLGDRLGISVSFNVVTSLRLGDLNRESLGCDPDETLAVNLAFKLYRVPDESVCTENPRDELLRRVKGLKPRVVTLVEQEMNSNTAPFLGRVSESCACYGALLESVESTVPSTNSDRAKVEEGIGRKLVNAVACEGIDRIERCEVFGKWRMRMSMAGFELMPLSEKIAESMKSRGNRVHPGFTVKEDNGGVCFGWMGRALTVASAWR

SEQ ID NO: 48491 - protein, 525 aa, Arabidopsis thaliana
  peptide (1)..(525): Ceres Seq. ID no. 13600800
MIDLTSVNDMSLFGGSGSSQRYGLPVPRSQTQQQQSDYGLFGGIRMGIGSGINNYPTLTGVPCIEPVQNRVHESENMLNSLRELEKQLLDDDDESGGDDDVSVITNSNSDWIQNLVTPNPNPNPVLSFSPSSSSSSSSPSTASTTTSVCSRQTVMEIATAIAEGKTEIATEILARVSQTPNLERNSEEKLVDFMVAALRSRIASPVTELYGKEHLISTQLLYELSPCFKLGFEAANLAILDAADNNDGGMMIPHVIDFDIGEGGQYVNLLRTLSTRRNGKSQSQNSPVVKITAVANNVYGCLVDDGGEERLKAVGDLLSQLGDRLGISVSFNVVTSLRLGDLNRESLGCDPDETLAVNLAFKLYRVPDESVCTENPRDELLRRVKGLKPRVVTLVEQEMNSNTAPFLGRVSESCACYGALLESVESTVPSTNSDRAKVEEGIGRKLVNAVACEGIDRIERCEVFGKWRMRMSMAGFELMPLSEKIAESMKSRGNRVHPGFTVKEDNGGVCFGWMGRALTVASAWR

SEQ ID NO: 48492 - protein, 516 aa, Arabidopsis thaliana
  peptide (1)..(516): Ceres Seq. ID no. 13600801
MSLFGGSGSSQRYGLPVPRSQTQQQQSDYGLFGGIRMGIGSGINNYPTLTGVPCIEPVQNRVHESENMLNSLRELEKQLLDDDDESGGDDDVSVITNSNSDWIQNLVTPNPNPNPVLSFSPSSSSSSSSPSTASTTTSVCSRQTVMEIATAIAEGKTEIATEILARVSQTPNLERNSEEKLVDFMVAALRSRIASPVTELYGKEHLISTQLLYELSPCFKLGFEAANLAILDAADNNDGGMMIPHVIDFDIGEGGQYVNLLRTLSTRRNGKSQSQNSPVVKITAVANNVYGCLVDDGGEERLKAVGDLLSQLGDRLGISVSFNVVTSLRLGDLNRESLGCDPDETLAVNLAFKLYRVPDESVCTENPRDELLRRVKGLKPRVVTLVEQEMNSNTAPFLGRVSESCACYGALLESVESTVPSTNSDRAKVEEGIGRKLVNAVACEGIDRIERCEVFGKWRMRMSMAGFELMPLSEKIAESMKSRGNRVHPGFTVKEDNGGVCFGWMGRALTVASAWR

SEQ ID NO: 48493 - DNA, 1807 bp, Arabidopsis thaliana
  misc_feature (1)..(1807): Ceres Seq. ID no. 15174505
  misc_feature (1)..(1807): Ortholog of  Ceres SEQ ID NO 12623490 as cited in SEQ ID NO 61136
  misc_feature (1)..(1807): Ortholog of  Ceres SEQ ID NO 14301870 as cited in SEQ ID NO 61501
  misc_feature (1)..(1807): Ortholog of  Ceres SEQ ID NO 12583993 as cited in SEQ ID NO 68098
gatgcaaaattcggcctcttaattttcaaaattttcgacctccgatctcccatctccgcttccatcatctttaggatctctcaatctctttcttcactgatcgattagggttttcgagctgaaatcgatactcctccaccgcgaagaagcgattacctagatttttcttctaggtttctggcggatctcgccaagttctccttattctcttcagctacggcgaagctttctctagctccactcctccctcgccaccatgttttggaagctcacatctctctctgcatcatctcctatggagataatattagacaaagaaaatttcacgttggaagagcttcttgatgaggaagagattattcaagaatgcaaggctttgaatagcaggctcattaactttctaagggataaagctcaagtggagcaattattgcggtacattgttgaagaacctccacaggatgctgatagtaaacgtgctttcaagtttccattcatctcttgtgaaatatttacatgtgaaatagatgttattctaaaaactttggtcgaggatgaagagctgatgaacttgcttttttcctttctggaaccaaatcgtcctcatagtgcattgctggcaggctatttcagcaaggatgtcatttgccttatgatcagaaaaactgcagcgcttatgaattatgtaaaagggcatcaaaatgttttctgccagttagttgatttgattgggataacatccatcatggaggttttggttcgcttggttggggctgatgaccaagtctatcccaactttctggatgtgatgcaatggttggctgatagcaatttacttgaaatgatcgtggacaaacttaaaccatctgtaagtggttaagcttttctataatcatcccagagacaagaggagctccctaggtttccccccccccccccgcgagaacttcaacaagagctcttatctataaaacattctaaagaaaaatgaagatgataatccaaattttcttcatcatctccctcatttcaaccatctcttttgcctctgttcaagacttttgtgtagctgatccaaagggtcctcaaagcccatcaggatactcttgcaagaaccctgaccaagtcaccgaaaatgactttgcatttaccggcctcggcaaagctggaaacacttccaacatcattaaagccgcagtgactccagcctttgctcctgcttacgcaggcatcaatggccttggcgtatctctggctcgtcttgacttagccggtggtggtgtcatccctctccacactcatcctggtgcttctgaggtccttgtagttattcaaggcaccatttgcgccgggtttatctcctctgctaacaaagtttacttaaagacacttaacagaggtgattctatggtgtttcctcaaggacttcttcattttcagctaaactctgggaaaggccctgccttagcctttgtcgcattcggaagctcctccccagggctccagattctaccatttgctctgtttgcaaacgatttgccttcagaacttgttgaagccacaacgttccttagcgatgcagaagttaagaagcttaagggtgtgcttggaggaactaattaagcttcacttagtttcattgttcattttttttcaaaaatgtggttgtgcgttttgttatttcgagttcctctagcattttgagtttgtttttctttatgagttgttattgttctcgaagttttcacttttatagtctctttggcttgaattgtaataactaataagcattacattgcagatttct

SEQ ID NO: 48494 - protein, 211 aa, Arabidopsis thaliana; identical to SEQ ID NO: 24661
  peptide (1)..(211): Ceres Seq. ID no. 15174506

SEQ ID NO: 48495 - protein, 209 aa, Arabidopsis thaliana; identical to SEQ ID NO: 24662
  peptide (1)..(209): Ceres Seq. ID no. 15174507

SEQ ID NO: 48496 - protein, 207 aa, Arabidopsis thaliana
  peptide (1)..(207): Ceres Seq. ID no. 15174508
MFWKLTSLSASSPMEIILDKENFTLEELLDEEEIIQECKALNSRLINFLRDKAQVEQLLRYIVEEPPQDADSKRAFKFPFISCEIFTCEIDVILKTLVEDEELMNLLFSFLEPNRPHSALLAGYFSKDVICLMIRKTAALMNYVKGHQNVFCQLVDLIGITSIMEVLVRLVGADDQVYPNFLDVMQWLADSNLLEMIVDKLKPSVSG

SEQ ID NO: 48497 - DNA, 1289 bp, Arabidopsis thaliana; identical to SEQ ID NO: 38904
  misc_feature (1)..(1289): Ceres Seq. ID no. 12580406
  misc_feature (1)..(1289): Ortholog of  Ceres SEQ ID NO 14313471 as cited in SEQ ID NO 64513
  misc_feature (1)..(1289): Ortholog of  Ceres SEQ ID NO 13591377 as cited in SEQ ID NO 66534

SEQ ID NO: 48498 - protein, 163 aa, Arabidopsis thaliana; identical to SEQ ID NO: 38905
  peptide (1)..(163): Ceres Seq. ID no. 12580407

SEQ ID NO: 48499 - protein, 103 aa, Arabidopsis thaliana; identical to SEQ ID NO: 38906
  peptide (1)..(103): Ceres Seq. ID no. 12580408

SEQ ID NO: 48500 - protein, 82 aa, Arabidopsis thaliana; identical to SEQ ID NO: 38907
  peptide (1)..(82): Ceres Seq. ID no. 12580409

SEQ ID NO: 48501 - DNA, 2141 bp, Arabidopsis thaliana
  misc_feature (1)..(2141): Ceres Seq. ID no. 14310346
  misc_feature (1)..(2141): Ortholog of  Ceres SEQ ID NO 14311870 as cited in SEQ ID NO 51574
  misc_feature (1)..(2141): Ortholog of  Ceres SEQ ID NO 15174583 as cited in SEQ ID NO 53693
  misc_feature (1)..(2141): Ortholog of  Ceres SEQ ID NO 13581563 as cited in SEQ ID NO 58942
  misc_feature (1)..(2141): Ortholog of  Ceres SEQ ID NO 13658707 as cited in SEQ ID NO 66286
  misc_feature (1)..(2141): Ortholog of  Ceres SEQ ID NO 13654528 as cited in SEQ ID NO 68080
gagattgtaacgcctcacaatccttcctacccgtgagtccgtgaccgattgtgtatcatccatcttctttcttcttctttcttcttctttcttcttcttttatatataaaccaaaatataattcgtgaagactttcactttctccttgccactttttgacgattcacatgcaccatccaatattttagtgcccttttcacgacatatctgtgtctgtatccaattttcttatttactacttcttttttctatttatatatacaaaaagaatcaaagagagagacgaattttcgaggtaaggtatctatcgactttctatcttcctccacctttgtttgttgtcaccaccacactacgctaatcattgccacacacatgcataattctctccaaccatctaaaagtcccactttagcattcttctgtttgtaattttatctcagagcttgcttcatgggcttttgagttttctctctgtttccaaaaaacaatggaaccggagaagaatccgaccacagtattgagagccattacaagaccttcgtgggcgtttcttctccttgttttcaccgtcttagcgattctctctctccaaatctcttccaattcttttctccctctctggatcccgacttctcaatatgacgaccctgttacctgctccgggtttttcaatcacgacccgttccctaaccggatcgttatgtcgattaccgatttcggcggtgttggagacggaaagacgtcgaacacggccgctttccgccgcgccgtaaggcaccttgaaggttttgcggcggagggtggggcccagctcaatgtcccggagggcacgtggctttctggaagcttcaacctcaccagcaatttcacgctctttctcgaacgcggcgctctcattttgggatccaaggacctagacgaatggccgataatagagccattgccttcttatggaagagggagagagagacctggtggtagacacatcagcctcattcatggagacaatctcactaatgttgtcattacaggagaaaatgggacaattgatggacaggggaaaatgtggtgggagttatggtggaacagaacattggtgcatacgagaggccatcttattgaactcaagaactctcataatatcctcatctctaacctcactttgctcaattctcctttctggacaatccatcctgtttattgcagtaatgttgttattagaaatatgaccatccttgctccgatgaatgctcctaacaccgacggtatagatccagactcaagcaccaatgtctgcattgaggattgttacatcgaaagtggtgatgatctagtagctgtaaagagcgggtgggatcaatatggaatggctgtggcacgtccgagttcaaacatcgtaatccgaagaatctctggtactactcgcacttgttcaggagttgggataggcagtgagatgtctggtgggattttcaacataaccgttgaagatattcacgtctgggattctgcggctgggctccgcataaaaacagataaagggagaggtgggtacatttcgaatatcacctttaataatgtgttattggagaaagtgaaagttccgattagattcagcagtggctcaaatgatcactcagacgataaatgggatccgaaagctcttccgagagtaaaagggatttacattagcaatgttgtgagtctgaattcgagaaaggcccctatgttgctcggtgttgaaggcacatcgtttcaagacgtatgcttgaggaatgttacgcttcttgggttaccgaagaccgagaaatggaaatgcaaggatgtttctggttacgcgagtgacgtttttcctctgtcatgtccacagttgttgcagaagaaaggttcaatagctcagtgttcatatagatgaggtttgagaaagtttttttttttgggtaaagatagagagaggaggccatgagttcgatcaagtttttttgagtgaagattcatggtcacttacgaaaaatgttaaatcttggatttcctttttcacatttttttgttcgtgttttgaatcttgattctttttatacatacattgtgtaacgaaatatactttgaattattccataaaagattttttcttattc

SEQ ID NO: 48502 - protein, 475 aa, Arabidopsis thaliana
  peptide (1)..(475): Ceres Seq. ID no. 14310347
MEPEKNPTTVLRAITRPSWAFLLLVFTVLAILSLQISSNSFLPLWIPTSQYDDPVTCSGFFNHDPFPNRIVMSITDFGGVGDGKTSNTAAFRRAVRHLEGFAAEGGAQLNVPEGTWLSGSFNLTSNFTLFLERGALILGSKDLDEWPIIEPLPSYGRGRERPGGRHISLIHGDNLTNVVITGENGTIDGQGKMWWELWWNRTLVHTRGHLIELKNSHNILISNLTLLNSPFWTIHPVYCSNVVIRNMTILAPMNAPNTDGIDPDSSTNVCIEDCYIESGDDLVAVKSGWDQYGMAVARPSSNIVIRRISGTTRTCSGVGIGSEMSGGIFNITVEDIHVWDSAAGLRIKTDKGRGGYISNITFNNVLLEKVKVPIRFSSGSNDHSDDKWDPKALPRVKGIYISNVVSLNSRKAPMLLGVEGTSFQDVCLRNVTLLGLPKTEKWKCKDVSGYASDVFPLSCPQLLQKKGSIAQCSYR

SEQ ID NO: 48503 - protein, 404 aa, Arabidopsis thaliana
  peptide (1)..(404): Ceres Seq. ID no. 14310348
MSITDFGGVGDGKTSNTAAFRRAVRHLEGFAAEGGAQLNVPEGTWLSGSFNLTSNFTLFLERGALILGSKDLDEWPIIEPLPSYGRGRERPGGRHISLIHGDNLTNVVITGENGTIDGQGKMWWELWWNRTLVHTRGHLIELKNSHNILISNLTLLNSPFWTIHPVYCSNVVIRNMTILAPMNAPNTDGIDPDSSTNVCIEDCYIESGDDLVAVKSGWDQYGMAVARPSSNIVIRRISGTTRTCSGVGIGSEMSGGIFNITVEDIHVWDSAAGLRIKTDKGRGGYISNITFNNVLLEKVKVPIRFSSGSNDHSDDKWDPKALPRVKGIYISNVVSLNSRKAPMLLGVEGTSFQDVCLRNVTLLGLPKTEKWKCKDVSGYASDVFPLSCPQLLQKKGSIAQCSYR

SEQ ID NO: 48504 - protein, 283 aa, Arabidopsis thaliana
  peptide (1)..(283): Ceres Seq. ID no. 14310349
MWWELWWNRTLVHTRGHLIELKNSHNILISNLTLLNSPFWTIHPVYCSNVVIRNMTILAPMNAPNTDGIDPDSSTNVCIEDCYIESGDDLVAVKSGWDQYGMAVARPSSNIVIRRISGTTRTCSGVGIGSEMSGGIFNITVEDIHVWDSAAGLRIKTDKGRGGYISNITFNNVLLEKVKVPIRFSSGSNDHSDDKWDPKALPRVKGIYISNVVSLNSRKAPMLLGVEGTSFQDVCLRNVTLLGLPKTEKWKCKDVSGYASDVFPLSCPQLLQKKGSIAQCSYR

SEQ ID NO: 48505 - DNA, 1727 bp, Arabidopsis thaliana; identical to SEQ ID NO: 45036
  misc_feature (1)..(1727): Ceres Seq. ID no. 12559281
  misc_feature (1)..(1727): Ortholog of  Ceres SEQ ID NO 15171626 as cited in SEQ ID NO 57201

SEQ ID NO: 48506 - protein, 362 aa, Arabidopsis thaliana; identical to SEQ ID NO: 45037
  peptide (1)..(362): Ceres Seq. ID no. 12559282

SEQ ID NO: 48507 - protein, 360 aa, Arabidopsis thaliana; identical to SEQ ID NO: 45038
  peptide (1)..(360): Ceres Seq. ID no. 12559283

SEQ ID NO: 48508 - protein, 211 aa, Arabidopsis thaliana; identical to SEQ ID NO: 45039
  peptide (1)..(211): Ceres Seq. ID no. 12559284

SEQ ID NO: 48509 - DNA, 1627 bp, Arabidopsis thaliana
  misc_feature (1)..(1627): Ceres Seq. ID no. 12575136
  misc_feature (1)..(1627): Ortholog of  Ceres SEQ ID NO 13594345 as cited in SEQ ID NO 58043
  misc_feature (1)..(1627): Ortholog of  Ceres SEQ ID NO 14314755 as cited in SEQ ID NO 59919
  misc_feature (1)..(1627): Ortholog of  Ceres SEQ ID NO 13597574 as cited in SEQ ID NO 64677
  misc_feature (1)..(1627): Ortholog of  Ceres SEQ ID NO 13597843 as cited in SEQ ID NO 64850
  misc_feature (1)..(1627): Ortholog of  Ceres SEQ ID NO 13597678 as cited in SEQ ID NO 65375
  misc_feature (1)..(1627): Ortholog of  Ceres SEQ ID NO 13662880 as cited in SEQ ID NO 65422
  misc_feature (1)..(1627): Ortholog of  Ceres SEQ ID NO 12779098 as cited in SEQ ID NO 67698
  misc_feature (1)..(1627): Ortholog of  Ceres SEQ ID NO 13596180 as cited in SEQ ID NO 67941
  misc_feature (1)..(1627): Ortholog of  Ceres SEQ ID NO 13591190 as cited in SEQ ID NO 68044
  misc_feature (1)..(1627): Ortholog of  Ceres SEQ ID NO 13595961 as cited in SEQ ID NO 68223
aatccaaaaaccacaaaacttgagagttcatcattgagttggaaccggtatggcttccgaaaaatcccacaaagttcatcctcctcttcactttattcttttccctttcatggctcagggccacatgattcccatgattgatatagcaaggctcttggctcagcgcggtgcgacagtaactattgtcacgacacgttataatgcagggaggttcgagaatgtcttaagtcgtgccatggagtctggtttacccatcaacatagtgcatgtgaattttccatatcaagaatttggtttgccagaaggaaaagagaatatagattcgtatgactcaatggagctgatggtacctttctttcaagcagttaacatgctcgaagatccggtcatgaagctcatggaagagatgaaacctagacctagctgtattatttctgatttgctcttgccttatacaagcaaaatcgcaaggaaattcagtataccaaagatagttttccacggcacgggttgctttaatcttttgtgtatgcatgttctacgcagaaacctcgagatcttgaagaacttaaagtcggataaagattatttcctggttcctagttttcctgatagagttgaatttacaaagcctcaagttccagtggaaacaactgcaagtggagattggaaagcgttcttggacgaaatggtagaagcagaatacacatcctatggtgtgatcgtcaacacatttcaggagttggagcctgcttatgtcaaagactacacgaaggctagggctggaaaagtatggtccattggacctgtttccttgtgcaacaaggcaggtgctgataaagctgagaggggaaaccaggccgccattgatcaagatgagtgtcttcaatggcttgattctaaagaagatggttcggtgttatatgtttgccttggaagtatctgtaatctacctttgtctcagctcaaggagctggggctaggccttgaaaaatcccaaagatcttttatttgggtcataagaggttgggaaaagtataatgaactatatgagtggatgatggagagcggttttgaagaaagaatcaaagagagaggacttcttattaaagggtggtcacctcaagtccttatcctttcacatccttccgttggaggattcctgacacactgtggatggaactcgactctcgaaggaatcacctcaggcattccactgatcacttggccgctgtttggagaccaattctgcaaccaaaaactggtcgttcaagtactaaaagccggtgtaagtgccggggttgaagaagtcatgaaatggggagaagaggagaaaataggagtgttagtggataaagaaggagtaaagaaggcagtggaagagttaatgggtgcgagtgatgatgcaaaagagaggagaagaagagtcaaagagcttggagaatcagctcacaaggctgtggaagaaggaggctcttctcattctaacatcacatacttgctacaagacataatgcaacaagtgaaatccaagaactgattacatcatttttagtaacattaccataatttaattcaaattaagtctgttcttctgagatgtattaaaaaaaacttataatgatgc

SEQ ID NO: 48510 - protein, 496 aa, Arabidopsis thaliana
  peptide (1)..(496): Ceres Seq. ID no. 12575137
MASEKSHKVHPPLHFILFPFMAQGHMIPMIDIARLLAQRGATVTIVTTRYNAGRFENVLSRAMESGLPINIVHVNFPYQEFGLPEGKENIDSYDSMELMVPFFQAVNMLEDPVMKLMEEMKPRPSCIISDLLLPYTSKIARKFSIPKIVFHGTGCFNLLCMHVLRRNLEILKNLKSDKDYFLVPSFPDRVEFTKPQVPVETTASGDWKAFLDEMVEAEYTSYGVIVNTFQELEPAYVKDYTKARAGKVWSIGPVSLCNKAGADKAERGNQAAIDQDECLQWLDSKEDGSVLYVCLGSICNLPLSQLKELGLGLEKSQRSFIWVIRGWEKYNELYEWMMESGFEERIKERGLLIKGWSPQVLILSHPSVGGFLTHCGWNSTLEGITSGIPLITWPLFGDQFCNQKLVVQVLKAGVSAGVEEVMKWGEEEKIGVLVDKEGVKKAVEELMGASDDAKERRRRVKELGESAHKAVEEGGSSHSNITYLLQDIMQQVKSKN

SEQ ID NO: 48511 - protein, 476 aa, Arabidopsis thaliana
  peptide (1)..(476): Ceres Seq. ID no. 12575138
MAQGHMIPMIDIARLLAQRGATVTIVTTRYNAGRFENVLSRAMESGLPINIVHVNFPYQEFGLPEGKENIDSYDSMELMVPFFQAVNMLEDPVMKLMEEMKPRPSCIISDLLLPYTSKIARKFSIPKIVFHGTGCFNLLCMHVLRRNLEILKNLKSDKDYFLVPSFPDRVEFTKPQVPVETTASGDWKAFLDEMVEAEYTSYGVIVNTFQELEPAYVKDYTKARAGKVWSIGPVSLCNKAGADKAERGNQAAIDQDECLQWLDSKEDGSVLYVCLGSICNLPLSQLKELGLGLEKSQRSFIWVIRGWEKYNELYEWMMESGFEERIKERGLLIKGWSPQVLILSHPSVGGFLTHCGWNSTLEGITSGIPLITWPLFGDQFCNQKLVVQVLKAGVSAGVEEVMKWGEEEKIGVLVDKEGVKKAVEELMGASDDAKERRRRVKELGESAHKAVEEGGSSHSNITYLLQDIMQQVKSKN

SEQ ID NO: 48512 - protein, 471 aa, Arabidopsis thaliana
  peptide (1)..(471): Ceres Seq. ID no. 12575139
MIPMIDIARLLAQRGATVTIVTTRYNAGRFENVLSRAMESGLPINIVHVNFPYQEFGLPEGKENIDSYDSMELMVPFFQAVNMLEDPVMKLMEEMKPRPSCIISDLLLPYTSKIARKFSIPKIVFHGTGCFNLLCMHVLRRNLEILKNLKSDKDYFLVPSFPDRVEFTKPQVPVETTASGDWKAFLDEMVEAEYTSYGVIVNTFQELEPAYVKDYTKARAGKVWSIGPVSLCNKAGADKAERGNQAAIDQDECLQWLDSKEDGSVLYVCLGSICNLPLSQLKELGLGLEKSQRSFIWVIRGWEKYNELYEWMMESGFEERIKERGLLIKGWSPQVLILSHPSVGGFLTHCGWNSTLEGITSGIPLITWPLFGDQFCNQKLVVQVLKAGVSAGVEEVMKWGEEEKIGVLVDKEGVKKAVEELMGASDDAKERRRRVKELGESAHKAVEEGGSSHSNITYLLQDIMQQVKSKN

SEQ ID NO: 48513 - DNA, 1498 bp, Arabidopsis thaliana
  misc_feature (1)..(1498): Ceres Seq. ID no. 12600965
  misc_feature (1)..(1498): Ortholog of  Ceres SEQ ID NO 13655382 as cited in SEQ ID NO 68949
aagctgtggaacgaatcttcgaagtcgaaactgcgtgtctacggattgaatctctgcagcagcttacgaccactgacccttttgcttttgattcaatcgatagacgacggatacaagttctcgctatcgccgagccggagccggagtctgagctgaagccctgtatctgtaactcttccaacagtggacataccttgagagatgaagatcgttcgcagggattttgttcgtaatggacccggaagcgttaagatggtggcagaggactctgatgatctctggtatgcttataacttgattgctgtgggcgatagtgtaatggctgtcactttcagaaaagttcagagagagatacctggtgggggaagagactctgaacgtgttaaactgaagctggaagtacaagttgaggaggtggactatgacaaagacggatctgttttgcgcatacgtggcaaaaatatcctggagaatgagcacgtaaagattggtgcattccatactttggaacttgagctgaaacgaccttttgtgttgagaaaggaaatgtgggactcaatggctcttgatacactcaaacaggcctcagatcccgctgctagtgctgatctagctgtagttctaatgcaagaaggactggcacaaatcttccttgtgggcagaagtgtgacaagtagccgtgcacgaatagaaacatccattcctaggaagcatggacctgcaattgctggttacgagtctgctttgaagaaattttttgagaatgttctgcaggcctttgtgaaacatgttgacttcagtgtcgttcgctgtgcagtagttgcaagtcccggcttcacaaaggatcagtttcatcgccacttattgttggaagcagaaagaagacaactgagacctattattgagaataaatcacgtataatattggtgcacacaaactctggatatagacatagcctgggtgaggttctccatgcccccaacgtgatgaatatgataaaagatacaaaagcagcaaaagaggtcaaagctctcaatgattttcacaacatgctttcaactgaaccagatcgggcatgctatggaccaaaacacgtggaagttgcaaatgaacgaatggcaattcaaacgcttctcataacggacgagcttttcaggaattctgacgtgaaaacaaggaagaagtatgtgaatttggtggagtcggtaaaagattcgggaggagatgcttttatattttcggcgatgcatgtgtcaggagaacaattggcacagctgactggaatagcagctcttctcaggttccctttaccagaactcgaagacattgagatgtaaaaaaatcttcggcttatagaaaacaatacaacaaatcatacacatctctcataatttatagtttatttgtactcagtgtcataaaaagagatttgtaactcattacaaattataagataaccattcgttgctgttttgttgttaagcaatttttctacat

SEQ ID NO: 48514 - protein, 378 aa, Arabidopsis thaliana
  peptide (1)..(378): Ceres Seq. ID no. 12600966
MKIVRRDFVRNGPGSVKMVAEDSDDLWYAYNLIAVGDSVMAVTFRKVQREIPGGGRDSERVKLKLEVQVEEVDYDKDGSVLRIRGKNILENEHVKIGAFHTLELELKRPFVLRKEMWDSMALDTLKQASDPAASADLAVVLMQEGLAQIFLVGRSVTSSRARIETSIPRKHGPAIAGYESALKKFFENVLQAFVKHVDFSVVRCAVVASPGFTKDQFHRHLLLEAERRQLRPIIENKSRIILVHTNSGYRHSLGEVLHAPNVMNMIKDTKAAKEVKALNDFHNMLSTEPDRACYGPKHVEVANERMAIQTLLITDELFRNSDVKTRKKYVNLVESVKDSGGDAFIFSAMHVSGEQLAQLTGIAALLRFPLPELEDIEM

SEQ ID NO: 48515 - protein, 361 aa, Arabidopsis thaliana
  peptide (1)..(361): Ceres Seq. ID no. 12600967
MVAEDSDDLWYAYNLIAVGDSVMAVTFRKVQREIPGGGRDSERVKLKLEVQVEEVDYDKDGSVLRIRGKNILENEHVKIGAFHTLELELKRPFVLRKEMWDSMALDTLKQASDPAASADLAVVLMQEGLAQIFLVGRSVTSSRARIETSIPRKHGPAIAGYESALKKFFENVLQAFVKHVDFSVVRCAVVASPGFTKDQFHRHLLLEAERRQLRPIIENKSRIILVHTNSGYRHSLGEVLHAPNVMNMIKDTKAAKEVKALNDFHNMLSTEPDRACYGPKHVEVANERMAIQTLLITDELFRNSDVKTRKKYVNLVESVKDSGGDAFIFSAMHVSGEQLAQLTGIAALLRFPLPELEDIEM

SEQ ID NO: 48516 - protein, 339 aa, Arabidopsis thaliana
  peptide (1)..(339): Ceres Seq. ID no. 12600968
MAVTFRKVQREIPGGGRDSERVKLKLEVQVEEVDYDKDGSVLRIRGKNILENEHVKIGAFHTLELELKRPFVLRKEMWDSMALDTLKQASDPAASADLAVVLMQEGLAQIFLVGRSVTSSRARIETSIPRKHGPAIAGYESALKKFFENVLQAFVKHVDFSVVRCAVVASPGFTKDQFHRHLLLEAERRQLRPIIENKSRIILVHTNSGYRHSLGEVLHAPNVMNMIKDTKAAKEVKALNDFHNMLSTEPDRACYGPKHVEVANERMAIQTLLITDELFRNSDVKTRKKYVNLVESVKDSGGDAFIFSAMHVSGEQLAQLTGIAALLRFPLPELEDIEM

SEQ ID NO: 48517 - DNA, 2658 bp, Arabidopsis thaliana
  misc_feature (1)..(2658): Ceres Seq. ID no. 13591878
  misc_feature (1)..(2658): Ortholog of  Ceres SEQ ID NO 12587870 as cited in SEQ ID NO 63523
gaaaagacgaccccattccccttctctatagatagatctcagaatctctccttttttgttggctttacccttatttggccattcctgtcttccactttgtcatcttttccctttctgatgggatccgccgccgaactcacggagcccaccaccgggaccgagaagcttcaccagccaatagaagttgaagaagatgacgaacaaattgttgatttggagaggaaaacattccgtcatggaaagggacacgatactagtgtggacagtagtacaatcaccaacaccagctcgtcgtcgtcttctagcttttccggtgatggtggaacggaagagacccccgatttccacagcaacggcgatggagaacataccgatttagtaaatttggaggtcccggagctagaaactgaaatcgtatttcaccaagagcatgacgacgggaagaattgcatcgtcttcttcgacggagaacaaggttctgagtcagctggtgccatacctgatgctcatgaggagtctcaaactgctgacttgaatggggagcaaacgcagttagaacctgaaaacggttcaacttctgaggataacgaaagatctcgtgaaattgaagaagtactagatggtgatgtctctaaagacttggatgctgttgatccactcgctggtgaggtgatagaggaggaggtggacttcgaagatgttgaatatcatgatgtggagaatatgatggataagcaagagacacatgatttgtactgtccaaactgcgattcttgcatcaccaaaaaggttatcctcaaaagaaggaaacggaagatccgtcgtcatgagctgggagattcaaagcggcctcatttgactgagcctctttttcattcggaagacaatttgccatctctagatggcggtgaaaactctgcaaatgagtcatttgtcttcaagtgcttgtcatgctttaccatatttattcccaaaggtacactagaccgtaaaagttaccttgatatatcaaaacttatttcagatgccatccctttttgtatccaaagcatgctttctttttctggaaaacaaaatcaggggtgagttcaaagccgattcctccccgtcaaggagttgaggggttaaagattcagccaaaccctcaagtggaagctacaggcgattccaattggttcagttcaatatttggcctcaacaaaaaggaatcagctattcagcaaggtggggcatcatctagtgtcttggaagctaatccgccaccacgtgagtccattgtcccagtagttaatccatcgcgtggtaacctaagtcctatgcgaaaggatacgacaggctcagccgttgttcagcctgatgcagccacttcgattcaagtgcaaaatcaaacgatacaagcgaaattgtaaacaatggagctattgttggagacgggcaaaagtttctggctcctatggtggaggagcaaacacagcaaaagattgacaatgatgattctagtacagcagacgggaatcacacgtcagacaaaggacgtctctccccaattcaaccatctcatggcatgagtatactaaacacagtgactaacggacccgacggattgaaagtagaaactacaattcatgaagaaggtgcccctcttctgtttgaaggaaaagacactcctgacacaagcacggcagattttggtctgaccaaagtaacaggtgtgatggacacaggtgacagaggagttattaccggtccagcaaatcctgaaattgatatttcagcagggaatttgctggaagaagggtctctaagggaaccgttaatgagacgagttgttgttcaaggacgtaaactggaaatcttgaaaagcattgtctacggaggtctactagaagccatcacaagccttggtgttatttcatctgccgctggttctggtgcttcaatgttgaatattctggtcttggggcttgcaaacttgcttggcgggcttattcttattattcataatctccaagaacttagagaggaggaacccataagaacaacaacagaagataaccagactaacggtagagaagaagaagaaggtcggtataagcgactccttggacgaagagaaaatttcacacttcacgcaacagtcgcaatcttatccttcataatcaccggaatactccctcctgtagtctactatttctcattcagtgaaaaacacaacaaagactacaaagttgcttcagttttcggggcatctctattctgcatcgtcttgctcgccatagccaaagctcatgtgaggtacccgagaggcagctacctgaagagcattctgtactacgggtcaattgctgtatcggtgtcggggatttcttatgtggttggtaactttctggaacagttgcttgagaagcatggatggtctgatggatcggaaacacctgtgggacagatgatgctttcatcacttatgggaagaaaagccggctttggatactcatcatcgtactgaaactgaatcttgcctggagaatgatccaaactgaaacttgctgcttttctcttttactctgcttttgtgagctctcgttccaaatctttgttgtcggcaaatctttgttgtgacttgtgagtgtagaagaaagtcgtttccacttgtagaat

SEQ ID NO: 48518 - protein, 361 aa, Arabidopsis thaliana
  peptide (1)..(361): Ceres Seq. ID no. 13591879
EKTTPFPFSIDRSQNLSFFVGFTLIWPFLSSTLSSFPFLMGSAAELTEPTTGTEKLHQPIEVEEDDEQIVDLERKTFRHGKGHDTSVDSSTITNTSSSSSSSFSGDGGTEETPDFHSNGDGEHTDLVNLEVPELETEIVFHQEHDDGKNCIVFFDGEQGSESAGAIPDAHEESQTADLNGEQTQLEPENGSTSEDNERSREIEEVLDGDVSKDLDAVDPLAGEVIEEEVDFEDVEYHDVENMMDKQETHDLYCPNCDSCITKKVILKRRKRKIRRHELGDSKRPHLTEPLFHSEDNLPSLDGGENSANESFVFKCLSCFTIFIPKGTLDRKSYLDISKLISDAIPFCIQSMLSFSGKQNQG

SEQ ID NO: 48519 - protein, 350 aa, Arabidopsis thaliana
  peptide (1)..(350): Ceres Seq. ID no. 13591880
MVEEQTQQKIDNDDSSTADGNHTSDKGRLSPIQPSHGMSILNTVTNGPDGLKVETTIHEEGAPLLFEGKDTPDTSTADFGLTKVTGVMDTGDRGVITGPANPEIDISAGNLLEEGSLREPLMRRVVVQGRKLEILKSIVYGGLLEAITSLGVISSAAGSGASMLNILVLGLANLLGGLILIIHNLQELREEEPIRTTTEDNQTNGREEEEGRYKRLLGRRENFTLHATVAILSFIITGILPPVVYYFSFSEKHNKDYKVASVFGASLFCIVLLAIAKAHVRYPRGSYLKSILYYGSIAVSVSGISYVVGNFLEQLLEKHGWSDGSETPVGQMMLSSLMGRKAGFGYSSSY

SEQ ID NO: 48520 - protein, 322 aa, Arabidopsis thaliana
  peptide (1)..(322): Ceres Seq. ID no. 13591881
MGSAAELTEPTTGTEKLHQPIEVEEDDEQIVDLERKTFRHGKGHDTSVDSSTITNTSSSSSSSFSGDGGTEETPDFHSNGDGEHTDLVNLEVPELETEIVFHQEHDDGKNCIVFFDGEQGSESAGAIPDAHEESQTADLNGEQTQLEPENGSTSEDNERSREIEEVLDGDVSKDLDAVDPLAGEVIEEEVDFEDVEYHDVENMMDKQETHDLYCPNCDSCITKKVILKRRKRKIRRHELGDSKRPHLTEPLFHSEDNLPSLDGGENSANESFVFKCLSCFTIFIPKGTLDRKSYLDISKLISDAIPFCIQSMLSFSGKQNQG

SEQ ID NO: 48521 - DNA, 2410 bp, Arabidopsis thaliana
  misc_feature (1)..(2410): Ceres Seq. ID no. 13591882
  misc_feature (1)..(2410): Ortholog of  Ceres SEQ ID NO 14308618 as cited in SEQ ID NO 58541
agtcgtcgcttctaatcaacttccacttcttccacggaaacaagcaattcgatcaaacgngaaagcaatatttaagatttttgtctcatactctaagcaagcaatatccaaataaacattcttatacctccactcctcctctgtctgattccttcacccaattcttgtctcgtttccatcaatccattgtctttgattccagaggttcttggtttatttggatgtggtgattatggatatggagtcttggaagttgctcagaagtgtttgtgtgctttcttttctccttggctcttgttttgtgtatcaaagccttcgtgttgttgatgctcaagaagatccaaaaccagccgtgactttgcaagtagatgcttctaatggaggtggacgacccattcctgaaacgctatttgggattttcttcgaggagatcaaccatgctggtgccggtggattatgggccgaacttgttagcaacagagggtttgaagctggtgggcaaaacacaccctctaatatttggccatggtccattgttggtgatcattcatccatatatgtagctacagaccgttcatcatgttttgaacggaataaaatcgcactgagaatggatgtgctttgtgatagcaaaggttgtccatcgggaggtgtcggagtttataaccctggttactggggcatgaatattgaagaaggaaagaagtacaaggtggctctttatgtgcgttcgactggtgatatcgatttgtctgtgtcgttgacgagctcgaatggatcacggactcttgcttctgaaaagatcatagcttctgcttctgatgtttcgaaatggattaaaaaagaggttcttttggaggcaaaagcgaccgatcctagtgcaagacttcagttaacaacaaccaagaaagggtcaatatggattgaccaagtctcggccatgccagtggatactcacaagggacatggttttagaaacgatcttttccaaatgatggccgatataaaaccccgtttcatccggttcccaggtggttgttttgtcgagggtgaatggttaagtaatgccttccgctggaaagaaaccgtaggaccttgggaagagagaccgggccattttggtgatgtttggaagtattggaccgatgatggccttggccactttgagttctttcaaatggcagaagacatcggtgcagccccgatatgggtgtttaacaacgggataagtcacaatgatgaagttgaaactgccagtatcatgccctttgttcaagaagcactcgacggtatcgagtttgcccgaggagatgccaattctacttggggatctgttcgagctaaaatgggacgccaagaaccttttgaacttaaatacgttgctattggaaatgaagattgtgggaaaacttactacagaggaaactacattgtgttctatgatgctatcaagaaagcctatccagatatcaaaatcatctccaactgcgatggatcctctcatccactcgaccacccagctgattactatgactatcacatttacacttctgctagcaatttgttttccatgtatcatcaatttgatcgcacttcacgcaaaggtccaaaggcttttgtcagtgaatatgctgttactggaaaagatgctggtacaggaagccttcttgcctctcttgcagaagctgcgtttctcattggtcttgaaaagaatagtgacattgttgaaatggcaagttatgctccactctttgtgaacacaaatgatagacggtggaaccctgatgcaatagtcttcaactcctctcatctatatggaacacctagctattgggttcaacggttttttgcagagtcaagcggagcaactcttctcacttcaacactcaagggaaactctacttctcttgttgcatctgctatctcttggaaaaacaatggcaaagattacatacgcataaaggctgtaaacttcggagctaactcagaaaatatgcaagtgttggtaactggattggacccgaacgtgatgagagtttcgggatcaaagaagacagtacttacctctaccaatgtgatggatgaaaattccttctcacagccagagaaggttgtaccacatgaaagcttgctagagttggcagaggaggatatgaccgttgttctcccgccacattccttttcttcattcgatttgttgaaggaatctgcaaagataagaatgccaatctctgattcttcttcccatcagaaaactaccactgtgtgaagagaaacaatgacaaggaagtatcaactttcatgtcaaaagtctctttgtggttcaaatctaattacattccataaatgcttataacgtacccttgtgtatatataataatagtctggtgaataaatttactttctttaa

SEQ ID NO: 48522 - protein, 678 aa, Arabidopsis thaliana
  peptide (1)..(678): Ceres Seq. ID no. 13591883
MDMESWKLLRSVCVLSFLLGSCFVYQSLRVVDAQEDPKPAVTLQVDASNGGGRPIPETLFGIFFEEINHAGAGGLWAELVSNRGFEAGGQNTPSNIWPWSIVGDHSSIYVATDRSSCFERNKIALRMDVLCDSKGCPSGGVGVYNPGYWGMNIEEGKKYKVALYVRSTGDIDLSVSLTSSNGSRTLASEKIIASASDVSKWIKKEVLLEAKATDPSARLQLTTTKKGSIWIDQVSAMPVDTHKGHGFRNDLFQMMADIKPRFIRFPGGCFVEGEWLSNAFRWKETVGPWEERPGHFGDVWKYWTDDGLGHFEFFQMAEDIGAAPIWVFNNGISHNDEVETASIMPFVQEALDGIEFARGDANSTWGSVRAKMGRQEPFELKYVAIGNEDCGKTYYRGNYIVFYDAIKKAYPDIKIISNCDGSSHPLDHPADYYDYHIYTSASNLFSMYHQFDRTSRKGPKAFVSEYAVTGKDAGTGSLLASLAEAAFLIGLEKNSDIVEMASYAPLFVNTNDRRWNPDAIVFNSSHLYGTPSYWVQRFFAESSGATLLTSTLKGNSTSLVASAISWKNNGKDYIRIKAVNFGANSENMQVLVTGLDPNVMRVSGSKKTVLTSTNVMDENSFSQPEKVVPHESLLELAEEDMTVVLPPHSFSSFDLLKESAKIRMPISDSSSHQKTTTV

SEQ ID NO: 48523 - protein, 676 aa, Arabidopsis thaliana
  peptide (1)..(676): Ceres Seq. ID no. 13591884
MESWKLLRSVCVLSFLLGSCFVYQSLRVVDAQEDPKPAVTLQVDASNGGGRPIPETLFGIFFEEINHAGAGGLWAELVSNRGFEAGGQNTPSNIWPWSIVGDHSSIYVATDRSSCFERNKIALRMDVLCDSKGCPSGGVGVYNPGYWGMNIEEGKKYKVALYVRSTGDIDLSVSLTSSNGSRTLASEKIIASASDVSKWIKKEVLLEAKATDPSARLQLTTTKKGSIWIDQVSAMPVDTHKGHGFRNDLFQMMADIKPRFIRFPGGCFVEGEWLSNAFRWKETVGPWEERPGHFGDVWKYWTDDGLGHFEFFQMAEDIGAAPIWVFNNGISHNDEVETASIMPFVQEALDGIEFARGDANSTWGSVRAKMGRQEPFELKYVAIGNEDCGKTYYRGNYIVFYDAIKKAYPDIKIISNCDGSSHPLDHPADYYDYHIYTSASNLFSMYHQFDRTSRKGPKAFVSEYAVTGKDAGTGSLLASLAEAAFLIGLEKNSDIVEMASYAPLFVNTNDRRWNPDAIVFNSSHLYGTPSYWVQRFFAESSGATLLTSTLKGNSTSLVASAISWKNNGKDYIRIKAVNFGANSENMQVLVTGLDPNVMRVSGSKKTVLTSTNVMDENSFSQPEKVVPHESLLELAEEDMTVVLPPHSFSSFDLLKESAKIRMPISDSSSHQKTTTV

SEQ ID NO: 48524 - protein, 552 aa, Arabidopsis thaliana
  peptide (1)..(552): Ceres Seq. ID no. 13591885
MDVLCDSKGCPSGGVGVYNPGYWGMNIEEGKKYKVALYVRSTGDIDLSVSLTSSNGSRTLASEKIIASASDVSKWIKKEVLLEAKATDPSARLQLTTTKKGSIWIDQVSAMPVDTHKGHGFRNDLFQMMADIKPRFIRFPGGCFVEGEWLSNAFRWKETVGPWEERPGHFGDVWKYWTDDGLGHFEFFQMAEDIGAAPIWVFNNGISHNDEVETASIMPFVQEALDGIEFARGDANSTWGSVRAKMGRQEPFELKYVAIGNEDCGKTYYRGNYIVFYDAIKKAYPDIKIISNCDGSSHPLDHPADYYDYHIYTSASNLFSMYHQFDRTSRKGPKAFVSEYAVTGKDAGTGSLLASLAEAAFLIGLEKNSDIVEMASYAPLFVNTNDRRWNPDAIVFNSSHLYGTPSYWVQRFFAESSGATLLTSTLKGNSTSLVASAISWKNNGKDYIRIKAVNFGANSENMQVLVTGLDPNVMRVSGSKKTVLTSTNVMDENSFSQPEKVVPHESLLELAEEDMTVVLPPHSFSSFDLLKESAKIRMPISDSSSHQKTTTV

SEQ ID NO: 48525 - DNA, 2928 bp, Arabidopsis thaliana
  misc_feature (1)..(2928): Ceres Seq. ID no. 12575576
  misc_feature (1)..(2928): Ortholog of  Ceres SEQ ID NO 15176051 as cited in SEQ ID NO 53434
  misc_feature (1)..(2928): Ortholog of  Ceres SEQ ID NO 15170306 as cited in SEQ ID NO 58219
  misc_feature (1)..(2928): Ortholog of  Ceres SEQ ID NO 12465091 as cited in SEQ ID NO 65947
actgccaaactccaaacaaaagtaaaaatgttcgtagcatctccggtaaagacgaacttcaacggcgtcagcctagttaaatctccggcgttttccgctctttcatgtcgtaaacaacaccgagttcctatatccagacaggttcgagctgtgatcagccgtgaagaaaaagcggtggatcaagaagacggcaaaaaaagtacaaacaaaccactaataaactcttctcaatttccatggcaaagatctaagtatacgggatcgaagactgttactgcggttgtgaaaatcaggaagaagatcaaagagaagctaacagagagatttgagcatcaattagagcttttcatgaaagctattggtcaagggatgttgattcagcttgtcagtgaagaaatcgatcctgaaactggtaaaggcagaaagagtttagaatctcctgtgatgggactcccaaaggctgtgaaagatccgagatacctcgtattcacagccgatttcactgtcccgattaactttggtaaacctggtgccattcttgtcaccaatcttctttccactgagatttgcttgtcagaaattatcatcgaagattccactgacaccattctcttccctgcaaacacttggattcactctaagaatgataatcctcaagccaggattatctttagaagtcaaccatgcctaccttccgagactccggatgggattaaagaactacgggaaaaggacttggtcagtgtccgtggtgacggaaaaggcgagagaaaacctcatgagagaatttatgactacgatgtttacaacgatttgggagatccacgtaaaacagaacgagttaggccagttctaggtgttccagagacgccttacccaagacgctgcaggaccggccggcctctcgtttcaaaagatccaccgtgtgagagcagaggaaaggagaaggaagaattttatgttccaagagatgaagttttcgaggaaatcaagagagataccttcagagcagggagatttaaggctctcttccacaatcttgtaccatctattgcagcagcattgtcaaacttagacattcccttcacatgcttctcggatatcgataatttatataaaagcaacattgtcttgggacatactgagccaaaagacactggccttggcggctttatcggcggtttcatgaatgggatcctcaacgttactgaaacactgctaaaatatgacactccagccgttataaaatgggacagatttgcgtggctgcgagataatgaattcggacgtcaagctcttgctggtgtcaaccctgtgaacattgagctactaaaggagctgccaattcgaagcaatcttgacccggctctatatggacctcaagaatctgttctcacagaagaaatcatagctcgagaagttgaacattatggaactactatagaaaaggcgcttgaggagaagagattgtttcttgtggattaccatgacatactcttgccatttgtagagaagataaactctatcaaagaagatccaaggaagacatatgcttcaagaacaatcttcttctattcaaagaatggagccctgcggccattggccatagagctctcgctgcctcctacagccgaatccgagaacaagtttgtttatactcatggacatgacgctactactcactggatttggaaactagccaaagctcatgtctgctcaaatgatgctggtgttcaccaacttgtgaaccactggctaaggactcatgcttccatggagccttacatcattgctactaacagacagttgagtacaatgcatccggtttacaagctacttcatcctcatatgcgctacacgcttgaaatcaatgctcgtgcgcgtaaaagcttaatcaacggaggaggaatcatcgaaagttgcttcactcccggaaaatacgcaatggaacttagctctgcagcgtacaagagcatgtggcgatttgacatggaaggacttcctgctgatcttgttcggaggggaatggcagaagaggattcatcagccgaatgtggcgtgaggcttgtgattgacgattatccatatgcagcagacggtcttttgatctggaaagccatcaaggacctagtggaatcttatgttaaacacttttactctgattccaagtccataacatctgaccttgagctgcaagcttggtgggatgagatcaagaacaaaggtcattacgacaagaaagacgagccttggtggcctaaactcaacacaacacaagacttgtcccaaatactaaccaacatgatatggatcgcctcgggtcaacacgcagccataaacttcggacagtacccgtttggagggtatgtcccaaaccgacctaccctgttgaggaaacttataccgcaagaaactgatccggactacgaaatgttcatgcgaaaccctcaatacagctttctaggctctctaccgacacagctccaagcaaccaaagtgatggcggtccaagaaacgctctcaacgcattcccctgacgaagagtacttgatcgagctgagagaagtgcaaagacattggttccaagatgaacaagtggttaagtattttaacaagttctcggaagaacttgtgaagatagagaagacgatcaacgagagaaacaaggacaagaaactaaagaacagaacaggtgctgggatgcctccttatgaactacttctccctacttcaccacatggagtcactggccgtggtattcccaacagcatttccatttagatgtatgcacaacagatttgtatcattattatgtcttatatgctggtagagtctctaatatgaggttacttcttttttttttccaatgtatcaatgataatattatgcacaagaaggtttaataatctctcactgaggttgacggcc

SEQ ID NO: 48526 - protein, 926 aa, Arabidopsis thaliana
  peptide (1)..(926): Ceres Seq. ID no. 12575577
TAKLQTKVKMFVASPVKTNFNGVSLVKSPAFSALSCRKQHRVPISRQVRAVISREEKAVDQEDGKKSTNKPLINSSQFPWQRSKYTGSKTVTAVVKIRKKIKEKLTERFEHQLELFMKAIGQGMLIQLVSEEIDPETGKGRKSLESPVMGLPKAVKDPRYLVFTADFTVPINFGKPGAILVTNLLSTEICLSEIIIEDSTDTILFPANTWIHSKNDNPQARIIFRSQPCLPSETPDGIKELREKDLVSVRGDGKGERKPHERIYDYDVYNDLGDPRKTERVRPVLGVPETPYPRRCRTGRPLVSKDPPCESRGKEKEEFYVPRDEVFEEIKRDTFRAGRFKALFHNLVPSIAAALSNLDIPFTCFSDIDNLYKSNIVLGHTEPKDTGLGGFIGGFMNGILNVTETLLKYDTPAVIKWDRFAWLRDNEFGRQALAGVNPVNIELLKELPIRSNLDPALYGPQESVLTEEIIAREVEHYGTTIEKALEEKRLFLVDYHDILLPFVEKINSIKEDPRKTYASRTIFFYSKNGALRPLAIELSLPPTAESENKFVYTHGHDATTHWIWKLAKAHVCSNDAGVHQLVNHWLRTHASMEPYIIATNRQLSTMHPVYKLLHPHMRYTLEINARARKSLINGGGIIESCFTPGKYAMELSSAAYKSMWRFDMEGLPADLVRRGMAEEDSSAECGVRLVIDDYPYAADGLLIWKAIKDLVESYVKHFYSDSKSITSDLELQAWWDEIKNKGHYDKKDEPWWPKLNTTQDLSQILTNMIWIASGQHAAINFGQYPFGGYVPNRPTLLRKLIPQETDPDYEMFMRNPQYSFLGSLPTQLQATKVMAVQETLSTHSPDEEYLIELREVQRHWFQDEQVVKYFNKFSEELVKIEKTINERNKDKKLKNRTGAGMPPYELLLPTSPHGVTGRGIPNSISI

SEQ ID NO: 48527 - protein, 917 aa, Arabidopsis thaliana
  peptide (1)..(917): Ceres Seq. ID no. 12575578
MFVASPVKTNFNGVSLVKSPAFSALSCRKQHRVPISRQVRAVISREEKAVDQEDGKKSTNKPLINSSQFPWQRSKYTGSKTVTAVVKIRKKIKEKLTERFEHQLELFMKAIGQGMLIQLVSEEIDPETGKGRKSLESPVMGLPKAVKDPRYLVFTADFTVPINFGKPGAILVTNLLSTEICLSEIIIEDSTDTILFPANTWIHSKNDNPQARIIFRSQPCLPSETPDGIKELREKDLVSVRGDGKGERKPHERIYDYDVYNDLGDPRKTERVRPVLGVPETPYPRRCRTGRPLVSKDPPCESRGKEKEEFYVPRDEVFEEIKRDTFRAGRFKALFHNLVPSIAAALSNLDIPFTCFSDIDNLYKSNIVLGHTEPKDTGLGGFIGGFMNGILNVTETLLKYDTPAVIKWDRFAWLRDNEFGRQALAGVNPVNIELLKELPIRSNLDPALYGPQESVLTEEIIAREVEHYGTTIEKALEEKRLFLVDYHDILLPFVEKINSIKEDPRKTYASRTIFFYSKNGALRPLAIELSLPPTAESENKFVYTHGHDATTHWIWKLAKAHVCSNDAGVHQLVNHWLRTHASMEPYIIATNRQLSTMHPVYKLLHPHMRYTLEINARARKSLINGGGIIESCFTPGKYAMELSSAAYKSMWRFDMEGLPADLVRRGMAEEDSSAECGVRLVIDDYPYAADGLLIWKAIKDLVESYVKHFYSDSKSITSDLELQAWWDEIKNKGHYDKKDEPWWPKLNTTQDLSQILTNMIWIASGQHAAINFGQYPFGGYVPNRPTLLRKLIPQETDPDYEMFMRNPQYSFLGSLPTQLQATKVMAVQETLSTHSPDEEYLIELREVQRHWFQDEQVVKYFNKFSEELVKIEKTINERNKDKKLKNRTGAGMPPYELLLPTSPHGVTGRGIPNSISI

SEQ ID NO: 48528 - protein, 810 aa, Arabidopsis thaliana
  peptide (1)..(810): Ceres Seq. ID no. 12575579
MKAIGQGMLIQLVSEEIDPETGKGRKSLESPVMGLPKAVKDPRYLVFTADFTVPINFGKPGAILVTNLLSTEICLSEIIIEDSTDTILFPANTWIHSKNDNPQARIIFRSQPCLPSETPDGIKELREKDLVSVRGDGKGERKPHERIYDYDVYNDLGDPRKTERVRPVLGVPETPYPRRCRTGRPLVSKDPPCESRGKEKEEFYVPRDEVFEEIKRDTFRAGRFKALFHNLVPSIAAALSNLDIPFTCFSDIDNLYKSNIVLGHTEPKDTGLGGFIGGFMNGILNVTETLLKYDTPAVIKWDRFAWLRDNEFGRQALAGVNPVNIELLKELPIRSNLDPALYGPQESVLTEEIIAREVEHYGTTIEKALEEKRLFLVDYHDILLPFVEKINSIKEDPRKTYASRTIFFYSKNGALRPLAIELSLPPTAESENKFVYTHGHDATTHWIWKLAKAHVCSNDAGVHQLVNHWLRTHASMEPYIIATNRQLSTMHPVYKLLHPHMRYTLEINARARKSLINGGGIIESCFTPGKYAMELSSAAYKSMWRFDMEGLPADLVRRGMAEEDSSAECGVRLVIDDYPYAADGLLIWKAIKDLVESYVKHFYSDSKSITSDLELQAWWDEIKNKGHYDKKDEPWWPKLNTTQDLSQILTNMIWIASGQHAAINFGQYPFGGYVPNRPTLLRKLIPQETDPDYEMFMRNPQYSFLGSLPTQLQATKVMAVQETLSTHSPDEEYLIELREVQRHWFQDEQVVKYFNKFSEELVKIEKTINERNKDKKLKNRTGAGMPPYELLLPTSPHGVTGRGIPNSISI

SEQ ID NO: 48529 - DNA, 2220 bp, Arabidopsis thaliana
  misc_feature (1)..(2220): Ceres Seq. ID no. 12575211
  misc_feature (1)..(2220): Ortholog of  Ceres SEQ ID NO 13654989 as cited in SEQ ID NO 63117
  misc_feature (1)..(2220): Ortholog of  Ceres SEQ ID NO 13657138 as cited in SEQ ID NO 65923
  misc_feature (1)..(2220): Ortholog of  Ceres SEQ ID NO 13584744 as cited in SEQ ID NO 69137
gatttattcacctttcttttcccttaaatataatctttataaaaaaaattaataattaaaaattaaaaaaaggaagtaaattgaaaaaacaaaattggtcccctgtcttcttttgttcactggacccttttcttggcttcgctaaatcatactatctctatcttctcaccgacactttcttcttctttgatcatatcatatttatcttcactacaaaaaaaaacaagtaaaataaagccaatcttcttaaatatctccagaagatctatcagcatttacgtattcaggtcctccaatttcttctcacaaagaaaaaggaagaaaaaaaagaagttgtgagagcaaaaaaaaatggcagtggataaagtgattgtgaagcagaggaacattatattggttggaattccaattgatgaaagtggcgtagaggttttaaaatgggcacttgaagaagttgcaaaacatggagattgtgttgttgttgtccatgtttgttttacttattaccgtgccttgaaaagcaagtcatcgctggatcggtacttaaaaccatacattgaattctgctcaacaaagaagattgagctcaaaggagaagtgttaaagggaaattcagttctaggggttttagttaaagaagcaaagagatacaacgccatgtcagttgttgttggagttaaacaacaaagtaaattaagatattttttcattagtctaaaaatagctaaaggctgcgcaaaagagcttccttcaaccaccgatattttggccatccacagagggaatatagtctttagacgttccaaccattaccaactacctcttgctcaaaagataagttcaagaccaagttctgaactctctgaaggattttcagacaaagatcttgcgaaaacaacgggtcaagagaagagaaagatatcaggaagatctctatctcttccatcggtagaggtagtagaccagacaccaggttggccattactaagaacatccactttagctactccaatggttcaacatcagactaggaaaatatcagttgtcaattgggtcatgagcttgcctgaaagatttccacatcatccgaatcagacttgtcaacagagcttttgtgataaacaacttaaagacatactcaaggacataaacagatggtttagctatgatgttctcaagacagcaacatcagatttctctttagagaatctgatcggaaaaggaggatgtaatgaagtttacaaagggtttcttgaagatggtaaaggcgtggcagtgaagatcttgaaaccatctgtaaaagaagcagtgaaggagtttgttcatgaagtgagcatagtctcttctttgagtcactcaaacatctctcctttgattggtgtatgcgttcattacaacgacctaatctctgtttacaatctctcttccaaagggagtttggaggagactcttcagggtaagcatgtcttgagatgggaagagagactcaagatagcaatagggttaggggaagctcttgattatctacataaccaatgttctaatcctgtgatccacagagatgtcaaatcttccaatgttcttctctcagatgagttcgaacctcagctttcggatttcggtctttcgatgtggggatcgaagtcttgtcgatacacgatacaaagagatgtggtgggtacatttggatatctagctcctgagtactttatgtatggaaaagttagcgataaagtcgatgtatatgcctttggagtagttttgcttgaactcatttcaggaagaacttctatttcatctgatagcccaagagggcaagagagtttggtcatgtgggcaaaaccaatgatcgaaaaaggcaatgcaaaagagctcttggatccgaatattgctggtactttcgacgaggatcagtttcataagatggttcttgctgctacacattgtctcacaagagcagccacttatcgtcccaatatcaaggagatattgaagctgctaagaggcgaagatgatgtctcgaaatgggtgaagatagaagaagatgacgaagatggtttcgacgacgaggtttacccaaattcgaacacagaattacacttgagcctcgcgatggttgacgtggaggataatgactctgtgtcaaacagtagcttggagagaagtaacaacagccttttttcttcttcttcttcttcctctcaggagcttcagtcttaa

SEQ ID NO: 48530 - protein, 622 aa, Arabidopsis thaliana
  peptide (1)..(622): Ceres Seq. ID no. 12575212
MAVDKVIVKQRNIILVGIPIDESGVEVLKWALEEVAKHGDCVVVVHVCFTYYRALKSKSSLDRYLKPYIEFCSTKKIELKGEVLKGNSVLGVLVKEAKRYNAMSVVVGVKQQSKLRYFFISLKIAKGCAKELPSTTDILAIHRGNIVFRRSNHYQLPLAQKISSRPSSELSEGFSDKDLAKTTGQEKRKISGRSLSLPSVEVVDQTPGWPLLRTSTLATPMVQHQTRKISVVNWVMSLPERFPHHPNQTCQQSFCDKQLKDILKDINRWFSYDVLKTATSDFSLENLIGKGGCNEVYKGFLEDGKGVAVKILKPSVKEAVKEFVHEVSIVSSLSHSNISPLIGVCVHYNDLISVYNLSSKGSLEETLQGKHVLRWEERLKIAIGLGEALDYLHNQCSNPVIHRDVKSSNVLLSDEFEPQLSDFGLSMWGSKSCRYTIQRDVVGTFGYLAPEYFMYGKVSDKVDVYAFGVVLLELISGRTSISSDSPRGQESLVMWAKPMIEKGNAKELLDPNIAGTFDEDQFHKMVLAATHCLTRAATYRPNIKEILKLLRGEDDVSKWVKIEEDDEDGFDDEVYPNSNTELHLSLAMVDVEDNDSVSNSSLERSNNSLFSSSSSSSQELQS

SEQ ID NO: 48531 - protein, 520 aa, Arabidopsis thaliana
  peptide (1)..(520): Ceres Seq. ID no. 12575213
MSVVVGVKQQSKLRYFFISLKIAKGCAKELPSTTDILAIHRGNIVFRRSNHYQLPLAQKISSRPSSELSEGFSDKDLAKTTGQEKRKISGRSLSLPSVEVVDQTPGWPLLRTSTLATPMVQHQTRKISVVNWVMSLPERFPHHPNQTCQQSFCDKQLKDILKDINRWFSYDVLKTATSDFSLENLIGKGGCNEVYKGFLEDGKGVAVKILKPSVKEAVKEFVHEVSIVSSLSHSNISPLIGVCVHYNDLISVYNLSSKGSLEETLQGKHVLRWEERLKIAIGLGEALDYLHNQCSNPVIHRDVKSSNVLLSDEFEPQLSDFGLSMWGSKSCRYTIQRDVVGTFGYLAPEYFMYGKVSDKVDVYAFGVVLLELISGRTSISSDSPRGQESLVMWAKPMIEKGNAKELLDPNIAGTFDEDQFHKMVLAATHCLTRAATYRPNIKEILKLLRGEDDVSKWVKIEEDDEDGFDDEVYPNSNTELHLSLAMVDVEDNDSVSNSSLERSNNSLFSSSSSSSQELQS

SEQ ID NO: 48532 - protein, 402 aa, Arabidopsis thaliana
  peptide (1)..(402): Ceres Seq. ID no. 12575214
MVQHQTRKISVVNWVMSLPERFPHHPNQTCQQSFCDKQLKDILKDINRWFSYDVLKTATSDFSLENLIGKGGCNEVYKGFLEDGKGVAVKILKPSVKEAVKEFVHEVSIVSSLSHSNISPLIGVCVHYNDLISVYNLSSKGSLEETLQGKHVLRWEERLKIAIGLGEALDYLHNQCSNPVIHRDVKSSNVLLSDEFEPQLSDFGLSMWGSKSCRYTIQRDVVGTFGYLAPEYFMYGKVSDKVDVYAFGVVLLELISGRTSISSDSPRGQESLVMWAKPMIEKGNAKELLDPNIAGTFDEDQFHKMVLAATHCLTRAATYRPNIKEILKLLRGEDDVSKWVKIEEDDEDGFDDEVYPNSNTELHLSLAMVDVEDNDSVSNSSLERSNNSLFSSSSSSSQELQS

SEQ ID NO: 48533 - DNA, 1720 bp, Arabidopsis thaliana
  misc_feature (1)..(1720): Ceres Seq. ID no. 12601134
  misc_feature (1)..(1720): Ortholog of  Ceres SEQ ID NO 14313491 as cited in SEQ ID NO 0
aaaaacaatcacgagccaacacctcttcatcttctccaaatcaatccatcaatggagtcttctcccatctctctctcttcctcctcagatctcacactctgaaaaatcccccaaagccatgtcttaccttcttcgctccgatccggtttcacgaatccacccagaacctcaatctctaacctctttcgaccacttcgatctcctccctgactctctcctcctcttaatcttcgacaaagtcgccgacgtcaaagatctcggccgttgctgcatcgtatctcgtagattccactctctcgtccctttcgttgagaacgttctcgtccgtgttgattgtgttatctccgacgatgattcctcttcctccgacgagaatcatcgattctctttaaacactgcatcgatctcagacgccggcggtgctggtggctccttctccgccttgttccgtctcgtattcgctccaattttcaaaccgtttcaaatgttagggcagattctaggaccgaaacgatcgtcttcttcgttcgatgcgtcgttttcagcgattaacgatgagatcggcgtaacgcatcactctccgactcaggtattgaaaaacttcggtgagattcggtttttgaaaatcgaacttcctacaggagaattaggtatcgaggatggtatattgttgaaatggagagctgattttggatctacgcttgataattgtatgatacttggagcatcttcggtgattcagtcgaattcagtgaagaatcatgagaattcggttgatgaagacaatggtaacatacctgagtcgttttacactaatggagggcttaagcttcgtgtggtttggacgataagctcgttaatcgctgcgtcggctcggcattatcttcttcaaccgattatcaatgagcataagtcgttagatcgtttggttttatctgatgctgatgggcaaggtgttttgtgtatgaatagagaacagcttgaagagcttagagttactcctttatcagcttcttctgcttcgaagaggacgcttgtgcctgcgttgaatatgaggttgtggtatgctccggaattggatttacctgatgggacggtgttgaaaggtgcgacattggtggctattaggccgagtgagtctaagaaggaagtttgtgatgcttcttggttgtctgatgcttttgaggaaccgtttgggactgtggcgaagatgttgatcaagaggaggacttattgtttggagatgaactcgttctgatttcgcattatgaccggtttcagatggtgggagcaaacaaatccacatatgttggagaatgaaggaaagagaacagagagttcacaaatgtcctgaagccaaaaaccgcaaatctctcgactttttttgagacatactgcttcgccagtcatgaggcctgcgtcgaatgaatctgcaggcatggaggatgccgaagggaggttctctgaaaccgaagaagaacgccattgtacatacactcttgtaaaagaagtctgcgagtgaggaagaacatgtgtgtgatctgtgttaaaaagaggcacatatgaaggatgtgaatcgtcgtaacacgtaagggattatgttacaaaagagtctgtaataatatgtataagctttatttcgacactttgatgttctgttcttgatacttggatactctgttcttgaagctaactactttagacattgatcttccttttt

SEQ ID NO: 48534 - protein, 418 aa, Arabidopsis thaliana
  peptide (1)..(418): Ceres Seq. ID no. 12601135
KTITSQHLFIFSKSIHQWSLLPSLSLPPQISHSEKSPKAMSYLLRSDPVSRIHPEPQSLTSFDHFDLLPDSLLLLIFDKVADVKDLGRCCIVSRRFHSLVPFVENVLVRVDCVISDDDSSSSDENHRFSLNTASISDAGGAGGSFSALFRLVFAPIFKPFQMLGQILGPKRSSSSFDASFSAINDEIGVTHHSPTQVLKNFGEIRFLKIELPTGELGIEDGILLKWRADFGSTLDNCMILGASSVIQSNSVKNHENSVDEDNGNIPESFYTNGGLKLRVVWTISSLIAASARHYLLQPIINEHKSLDRLVLSDADGQGVLCMNREQLEELRVTPLSASSASKRTLVPALNMRLWYAPELDLPDGTVLKGATLVAIRPSESKKEVCDASWLSDAFEEPFGTVAKMLIKRRTYCLEMNSF

SEQ ID NO: 48535 - protein, 379 aa, Arabidopsis thaliana
  peptide (1)..(379): Ceres Seq. ID no. 12601136
MSYLLRSDPVSRIHPEPQSLTSFDHFDLLPDSLLLLIFDKVADVKDLGRCCIVSRRFHSLVPFVENVLVRVDCVISDDDSSSSDENHRFSLNTASISDAGGAGGSFSALFRLVFAPIFKPFQMLGQILGPKRSSSSFDASFSAINDEIGVTHHSPTQVLKNFGEIRFLKIELPTGELGIEDGILLKWRADFGSTLDNCMILGASSVIQSNSVKNHENSVDEDNGNIPESFYTNGGLKLRVVWTISSLIAASARHYLLQPIINEHKSLDRLVLSDADGQGVLCMNREQLEELRVTPLSASSASKRTLVPALNMRLWYAPELDLPDGTVLKGATLVAIRPSESKKEVCDASWLSDAFEEPFGTVAKMLIKRRTYCLEMNSF

SEQ ID NO: 48536 - protein, 257 aa, Arabidopsis thaliana
  peptide (1)..(257): Ceres Seq. ID no. 12601137
MLGQILGPKRSSSSFDASFSAINDEIGVTHHSPTQVLKNFGEIRFLKIELPTGELGIEDGILLKWRADFGSTLDNCMILGASSVIQSNSVKNHENSVDEDNGNIPESFYTNGGLKLRVVWTISSLIAASARHYLLQPIINEHKSLDRLVLSDADGQGVLCMNREQLEELRVTPLSASSASKRTLVPALNMRLWYAPELDLPDGTVLKGATLVAIRPSESKKEVCDASWLSDAFEEPFGTVAKMLIKRRTYCLEMNSF

SEQ ID NO: 48537 - DNA, 1851 bp, Arabidopsis thaliana
  misc_feature (1)..(1851): Ceres Seq. ID no. 12600999
  misc_feature (1)..(1851): Ortholog of  Ceres SEQ ID NO 15170842 as cited in SEQ ID NO 50916
ctgcattaaaaaaacactgacgtgtaaattttatttatcccaataccgtttacctttagtcaacgatttttttcccaccaaagtccccaaatacactcgtttgcgtttaaacctttcacttgaaactctgttttagactcttttatttgttagacttttttgtttgtttcgtcgttgttgttttttgaccaaaccaccatgcgattcgtcgcgccaccgcctcgttccggcgataactcaccgtcaccttcaccatcttccggtatatccgaagagattctctcccgttcttcggatcctcctttagagtttagtcctccattgatcgccatggtggtggttctagccgccgcttttctattcgtaacttactctcgtctcatctcccgccgttttctttcacctctattccgtcgttttagaaggtggcgatgccgtcgacgccgtctccttcacttatcttcagcttcctctgcttcaacttcatcctccgatctccgatcattttcacctttccctttcgactcttttcattactcttcttactcaccttacggattagacgattccgttatcaaaactttaccgctgtttctctactccgccgctgcttgcaccggaaaacccgcggtggggaaaacctccgccgccaattgcagagattgtgctgtttgtttgttggaattcgaagaaggtgattatgtacgaacacttccgttatgcttccatgcttttcaccttgaatgcatcgatgaatggctccgatctcaccctaactgtccgttatgccgtacggcgattctcggatccgccggagttttaacgcctatgtcgccgttcgttccgttaatggctcctcgaattcgtccgagtctcgatgatgaagagaataacgcgatcatcatccgcggcgaaatcacaccgtcgcggagcaattggaacacaatcgctgccgatacgacgaacgatcaggagatcagagcgtcggtggaagagcaatcatcaccggcgatttctcggttccgggagctgaagagatcgtactcgttcgaatgcgagagagaatctgaatcagagagagtaacgatggagccagcgacggtgtctccatggagataccggagatctacatggaacaaacgtcaatcaccgttcggaaacctaatatcgaaatcaagagtgttctcgttccgttactacagaagcacgaaatcaccgttcttccgacggagatcatcggcgggagtgttttacccgatatcagaacggattccagcgacgggaagctcatcgcggcgaacgaaatcgatgacgagtccgatgttcttcagaacagcaccgcactcatcgagccggttaagatgcggagatccagaggcactgttatcgccggagagatggagaagaagagacacgtgtagggcagagatgtaagatgaaatttggacggtggtgatgataaaaagaaatattgaagtggaaggagagagcattaatggaatgtggggtttaagcatttaatggaattaaaatgaacgaaacagaagaagatagagagattcagaaattgctcagctgctcacattcacaacaagacaaaagacgccaagacgatgaaggttttggagcctgtacgacggcgttttggctgatgattcgttttttcctctctttggagttatcaaaatgcattaacttcaaaagctgccaaagttatcatagaaacgaaagtcaacaacacattgaatttcgtttctataataactttacatcgtcggtggctttactgttttctgttaccgaattttatgttcaaacttttagctgtcgatttaatttttgaccaaattt

SEQ ID NO: 48538 - protein, 411 aa, Arabidopsis thaliana
  peptide (1)..(411): Ceres Seq. ID no. 12601000
MRFVAPPPRSGDNSPSPSPSSGISEEILSRSSDPPLEFSPPLIAMVVVLAAAFLFVTYSRLISRRFLSPLFRRFRRWRCRRRRLLHLSSASSASTSSSDLRSFSPFPFDSFHYSSYSPYGLDDSVIKTLPLFLYSAAACTGKPAVGKTSAANCRDCAVCLLEFEEGDYVRTLPLCFHAFHLECIDEWLRSHPNCPLCRTAILGSAGVLTPMSPFVPLMAPRIRPSLDDEENNAIIIRGEITPSRSNWNTIAADTTNDQEIRASVEEQSSPAISRFRELKRSYSFECERESESERVTMEPATVSPWRYRRSTWNKRQSPFGNLISKSRVFSFRYYRSTKSPFFRRRSSAGVFYPISERIPATGSSSRRTKSMTSPMFFRTAPHSSSRLRCGDPEALLSPERWRRRDTCRAEM

SEQ ID NO: 48539 - protein, 367 aa, Arabidopsis thaliana
  peptide (1)..(367): Ceres Seq. ID no. 12601001
MVVVLAAAFLFVTYSRLISRRFLSPLFRRFRRWRCRRRRLLHLSSASSASTSSSDLRSFSPFPFDSFHYSSYSPYGLDDSVIKTLPLFLYSAAACTGKPAVGKTSAANCRDCAVCLLEFEEGDYVRTLPLCFHAFHLECIDEWLRSHPNCPLCRTAILGSAGVLTPMSPFVPLMAPRIRPSLDDEENNAIIIRGEITPSRSNWNTIAADTTNDQEIRASVEEQSSPAISRFRELKRSYSFECERESESERVTMEPATVSPWRYRRSTWNKRQSPFGNLISKSRVFSFRYYRSTKSPFFRRRSSAGVFYPISERIPATGSSSRRTKSMTSPMFFRTAPHSSSRLRCGDPEALLSPERWRRRDTCRAEM

SEQ ID NO: 48540 - DNA, 1962 bp, Arabidopsis thaliana
  misc_feature (1)..(1962): Ceres Seq. ID no. 12575215
  misc_feature (1)..(1962): Ortholog of  Ceres SEQ ID NO 13656177 as cited in SEQ ID NO 64997
gtgaccctttaaaggaaagctattagcgattgattcgagagatgtgcaaagcttgttgatttgaggctctctctctactagggtttgttgatttgagttttctattcctcctatacgtgttcttcgattctcctgggatttttttttgaaaaagggaatagaagaagaagttgctgaattctcgatatggaatccatcatggaagaagctgatagttacattgagtatgtatcagtggcggagcggagagcgattgcagcgcagaagatacttcagcggaagggaaaagcttcggaattggaagaagaagctgacaaggaaaagctcgctgaagctaaacctagtttacttgttcaagcaactcagctcaagcgagatgtacccgaagttagtgctactgagcaaatcatcttacaagagaaagagatgatggagcatttatctgataagaagacgcttatgtctgttcgtgaacttgccaaaggtatcacttatacagagcctctcttaactgggtggaaacctcctttgcatattaggaagatgtctagtaagcagagagatttgattaggaagcaatggcatattattgttaatggtgatgatattcctcctcctattaagaactttaaggatatgaagtttcctagacctgttctcgatactctcaaggagaaaggtattgtgcagcctactcctattcaagttcagggtcttcctgtgattttggctgggagagatatgattgggattgctttcactggttccggaaagactttggttttcgtgcttcccatgatcatgattgctctccaagaagagatgatgatgcctattgctgctggtgaaggtcccattgggcttattgtttgcccttctagagagcttgctaggcagacttatgaagtggttgagcagtttgtggctcctttggttgaggctgggtacccgccattgaggtcgttgctatgtattggaggtattgatatgagatcccagttggaggttgtcaagagaggtgtccatattgttgttgcaacccctgggaggttaaaggatatgctcgccaagaaaaagatgagcttagatgcttgcaggtacctgacactagatgaggcagataggttggttgatttgggtttcgaagatgacataagggaagtctttgaccactttaagtctcaacgtcaaacactattgttctctgccacaatgcccacaaagattcaaatctttgccagaagtgctctggtgaaacctgtgacagttaatgtaggaagagctggagctgcgaatctggatgtgatccaggaggtagaatacgtcaaacaagaagcaaagattgtttacctcctcgagtgtctacagaaaacctctccgccggttttgatattctgtgagaacaaagctgatgttgatgatattcacgagtacttgttactgaaaggagtggaagcagtggccatccatggaggaaaagatcaagaagacagagagtacgcaatctcttcgtttaaagctgggaaaaaagatgtgttggttgcgactgatgttgcttcaaagggtctagatttccctgatatacaacacgtaatcaactacgacatgccagcagagattgagaactatgtgcataggataggacgaacaggtcggtgtggtaaaactgggatagcaacgacgtttataaacaagaatcaaagcgaaaccactctgctggatttgaaacacttgttgcaagaagctaaacagaggattccacctgtccttgctgagctgaatgatccaatggaagaagcagagaccattgctaatgcaagtggtgtcaagggttgtgcctattgtggtggtcttggacatcgtatccgagactgtccaaaacttgagcaccagaagagtgtcgccatttctaactcaagaaaagattattttggctcgggtggctacagaggagaaatataa

SEQ ID NO: 48541 - protein, 591 aa, Arabidopsis thaliana
  peptide (1)..(591): Ceres Seq. ID no. 12575216
MESIMEEADSYIEYVSVAERRAIAAQKILQRKGKASELEEEADKEKLAEAKPSLLVQATQLKRDVPEVSATEQIILQEKEMMEHLSDKKTLMSVRELAKGITYTEPLLTGWKPPLHIRKMSSKQRDLIRKQWHIIVNGDDIPPPIKNFKDMKFPRPVLDTLKEKGIVQPTPIQVQGLPVILAGRDMIGIAFTGSGKTLVFVLPMIMIALQEEMMMPIAAGEGPIGLIVCPSRELARQTYEVVEQFVAPLVEAGYPPLRSLLCIGGIDMRSQLEVVKRGVHIVVATPGRLKDMLAKKKMSLDACRYLTLDEADRLVDLGFEDDIREVFDHFKSQRQTLLFSATMPTKIQIFARSALVKPVTVNVGRAGAANLDVIQEVEYVKQEAKIVYLLECLQKTSPPVLIFCENKADVDDIHEYLLLKGVEAVAIHGGKDQEDREYAISSFKAGKKDVLVATDVASKGLDFPDIQHVINYDMPAEIENYVHRIGRTGRCGKTGIATTFINKNQSETTLLDLKHLLQEAKQRIPPVLAELNDPMEEAETIANASGVKGCAYCGGLGHRIRDCPKLEHQKSVAISNSRKDYFGSGGYRGEI

SEQ ID NO: 48542 - protein, 587 aa, Arabidopsis thaliana
  peptide (1)..(587): Ceres Seq. ID no. 12575217
MEEADSYIEYVSVAERRAIAAQKILQRKGKASELEEEADKEKLAEAKPSLLVQATQLKRDVPEVSATEQIILQEKEMMEHLSDKKTLMSVRELAKGITYTEPLLTGWKPPLHIRKMSSKQRDLIRKQWHIIVNGDDIPPPIKNFKDMKFPRPVLDTLKEKGIVQPTPIQVQGLPVILAGRDMIGIAFTGSGKTLVFVLPMIMIALQEEMMMPIAAGEGPIGLIVCPSRELARQTYEVVEQFVAPLVEAGYPPLRSLLCIGGIDMRSQLEVVKRGVHIVVATPGRLKDMLAKKKMSLDACRYLTLDEADRLVDLGFEDDIREVFDHFKSQRQTLLFSATMPTKIQIFARSALVKPVTVNVGRAGAANLDVIQEVEYVKQEAKIVYLLECLQKTSPPVLIFCENKADVDDIHEYLLLKGVEAVAIHGGKDQEDREYAISSFKAGKKDVLVATDVASKGLDFPDIQHVINYDMPAEIENYVHRIGRTGRCGKTGIATTFINKNQSETTLLDLKHLLQEAKQRIPPVLAELNDPMEEAETIANASGVKGCAYCGGLGHRIRDCPKLEHQKSVAISNSRKDYFGSGGYRGEI

SEQ ID NO: 48543 - protein, 511 aa, Arabidopsis thaliana
  peptide (1)..(511): Ceres Seq. ID no. 12575218
MMEHLSDKKTLMSVRELAKGITYTEPLLTGWKPPLHIRKMSSKQRDLIRKQWHIIVNGDDIPPPIKNFKDMKFPRPVLDTLKEKGIVQPTPIQVQGLPVILAGRDMIGIAFTGSGKTLVFVLPMIMIALQEEMMMPIAAGEGPIGLIVCPSRELARQTYEVVEQFVAPLVEAGYPPLRSLLCIGGIDMRSQLEVVKRGVHIVVATPGRLKDMLAKKKMSLDACRYLTLDEADRLVDLGFEDDIREVFDHFKSQRQTLLFSATMPTKIQIFARSALVKPVTVNVGRAGAANLDVIQEVEYVKQEAKIVYLLECLQKTSPPVLIFCENKADVDDIHEYLLLKGVEAVAIHGGKDQEDREYAISSFKAGKKDVLVATDVASKGLDFPDIQHVINYDMPAEIENYVHRIGRTGRCGKTGIATTFINKNQSETTLLDLKHLLQEAKQRIPPVLAELNDPMEEAETIANASGVKGCAYCGGLGHRIRDCPKLEHQKSVAISNSRKDYFGSGGYRGEI

SEQ ID NO: 48544 - DNA, 1495 bp, Arabidopsis thaliana
  misc_feature (1)..(1495): Ceres Seq. ID no. 12575219
  misc_feature (1)..(1495): Ortholog of  Ceres SEQ ID NO 12597287 as cited in SEQ ID NO 63982
aaaccctactctcgaagaaacttgctgtgctcaagcttcttcaatggcggatgatggctccgcctctaatcgaagggacccaataaagtcttcagttggaaatgttgcgggacaaagaagacgaaaacaagctgttacagtggcgaaggaaagaagggaattactggttagggcaaagcggctttgtagggtgggtactaatggcgatgttgaggatgctcttgttgagaatgagatgatggttgatgaagagcagcctatattggaggctcaagccagtaaatctgtggaagagctcaagtccgctgttcaataccagggaaaaggtgcaatgcagaagagggtgactgctcttcgggaactcaggcgtttattatcaaaatctgagttccctcctgttgaagctgcgctccgtgctggtgcaatacctttacttgtgcagtgtctttcatttggctcccccgacgaacagttacttgagtcagcttggtgtcttaccaacattgctgctggaaaacctgaagaaacaaaagctctattacctgcattgccgttactcattgctcaccttggagaaaagagctccgcaccggtggctgagcagtgcgcatgggcaattggtaatgttgccggtgaaggagaagatttgagaaatgttcttttgtctcaaggggctttgccacctctagcacgtatgatttttcccgacaagggttcaacagtgagaacagctgcatgggcattgtcaaatctgattaagggacctgagtcaaaggcagcagcacaacttgttaaaattgatgggatactggatgcaattcttcgacacttgaagaaaacggatgaggaaactgccacggaaattgcatggatcattgtttacctatctgccctctcagatatcgctacaagtatgctcttgaagggaggcattcttcaactacttattgacagattagcaacctcaagtagcctacaacttctcatcccgtgcttaagaagcgagcaccgtgttttaaagaaggaagctgcttgggtgctatctaatatagcggcgggatctattgaacacaagagaatgatacattctactgaagtaatgccattgttgctacggattctttccacatccccctttgatataaggaaagaagttgcctatgtcttgggaaatctctgtgtagaatctgcagaaggagacagaaaaccaaggataattcaagagcatttagtctctattgtcagtggcggttgcctccggggtttcattgagctggtcagatctcctgatatcgaagctgctaggcttggtcttcagttcattgagctggttttaagaggaatgccaaacggggaagggccaaagcttgtggaaggagaagacggtatcgatgcaatggaacggtttcagtttcatgagaacgaagagctgagagtcatggcgaacagtcttgtggataaatactttggtgaagattatggaatcgatgaatga

SEQ ID NO: 48545 - protein, 497 aa, Arabidopsis thaliana
  peptide (1)..(497): Ceres Seq. ID no. 12575220
NPTLEETCCAQASSMADDGSASNRRDPIKSSVGNVAGQRRRKQAVTVAKERRELLVRAKRLCRVGTNGDVEDALVENEMMVDEEQPILEAQASKSVEELKSAVQYQGKGAMQKRVTALRELRRLLSKSEFPPVEAALRAGAIPLLVQCLSFGSPDEQLLESAWCLTNIAAGKPEETKALLPALPLLIAHLGEKSSAPVAEQCAWAIGNVAGEGEDLRNVLLSQGALPPLARMIFPDKGSTVRTAAWALSNLIKGPESKAAAQLVKIDGILDAILRHLKKTDEETATEIAWIIVYLSALSDIATSMLLKGGILQLLIDRLATSSSLQLLIPCLRSEHRVLKKEAAWVLSNIAAGSIEHKRMIHSTEVMPLLLRILSTSPFDIRKEVAYVLGNLCVESAEGDRKPRIIQEHLVSIVSGGCLRGFIELVRSPDIEAARLGLQFIELVLRGMPNGEGPKLVEGEDGIDAMERFQFHENEELRVMANSLVDKYFGEDYGIDE

SEQ ID NO: 48546 - protein, 483 aa, Arabidopsis thaliana
  peptide (1)..(483): Ceres Seq. ID no. 12575221
MADDGSASNRRDPIKSSVGNVAGQRRRKQAVTVAKERRELLVRAKRLCRVGTNGDVEDALVENEMMVDEEQPILEAQASKSVEELKSAVQYQGKGAMQKRVTALRELRRLLSKSEFPPVEAALRAGAIPLLVQCLSFGSPDEQLLESAWCLTNIAAGKPEETKALLPALPLLIAHLGEKSSAPVAEQCAWAIGNVAGEGEDLRNVLLSQGALPPLARMIFPDKGSTVRTAAWALSNLIKGPESKAAAQLVKIDGILDAILRHLKKTDEETATEIAWIIVYLSALSDIATSMLLKGGILQLLIDRLATSSSLQLLIPCLRSEHRVLKKEAAWVLSNIAAGSIEHKRMIHSTEVMPLLLRILSTSPFDIRKEVAYVLGNLCVESAEGDRKPRIIQEHLVSIVSGGCLRGFIELVRSPDIEAARLGLQFIELVLRGMPNGEGPKLVEGEDGIDAMERFQFHENEELRVMANSLVDKYFGEDYGIDE

SEQ ID NO: 48547 - protein, 419 aa, Arabidopsis thaliana
  peptide (1)..(419): Ceres Seq. ID no. 12575222
MMVDEEQPILEAQASKSVEELKSAVQYQGKGAMQKRVTALRELRRLLSKSEFPPVEAALRAGAIPLLVQCLSFGSPDEQLLESAWCLTNIAAGKPEETKALLPALPLLIAHLGEKSSAPVAEQCAWAIGNVAGEGEDLRNVLLSQGALPPLARMIFPDKGSTVRTAAWALSNLIKGPESKAAAQLVKIDGILDAILRHLKKTDEETATEIAWIIVYLSALSDIATSMLLKGGILQLLIDRLATSSSLQLLIPCLRSEHRVLKKEAAWVLSNIAAGSIEHKRMIHSTEVMPLLLRILSTSPFDIRKEVAYVLGNLCVESAEGDRKPRIIQEHLVSIVSGGCLRGFIELVRSPDIEAARLGLQFIELVLRGMPNGEGPKLVEGEDGIDAMERFQFHENEELRVMANSLVDKYFGEDYGIDE

SEQ ID NO: 48548 - DNA, 1598 bp, Arabidopsis thaliana
  misc_feature (1)..(1598): Ceres Seq. ID no. 12575223
  misc_feature (1)..(1598): Ortholog of  Ceres SEQ ID NO 13656177 as cited in SEQ ID NO 64997
ggttttctgctttcttaggtactcagtgcaggtttctctgctccaactccaattcaagctcagtcatggcccattgcgatgcaaggtagggacatagtagccattgctaaaactggctcgggaaaaactttgggttacttgattcctggatttttgcatcttcaacgtatccgaaatgattcgcgaatgggcccaacaatcttggtattgtctccaacgagagagctggccacacaaatccaagaagaagctgttaaatttgggaggtcatcaagaatttcgtgtacgtgtttgtatggtggtgcaccaaagggccctcagttgagggatttagaaagaggagcagatatcgtggttgcaactcctgggagattgaatgatatccttgaaatgaggaggattagtctgcgtcagatatcttatcttgtgctagatgaggcagatagaatgttggacatgggttttgaacctcagataaggaagattgtgaaagaaattcccactaagcgtcaaacccttatgtacacagctacatggccaaagggagttaggaaaattgcagctgacttgcttgttaaccctgctcaagtcaacattggcaatgttgacgagcttgtggctaacaagtcaatcacacagcatattgaagtggtagcaccaatggagaaacagaggaggttagagcagatcttgcggtctcaggaaccaggctcaaaggtgataatattctgctcaaccaaaaggatgtgtgatcaactaacacgcaatctaacccgccaatttggagctgctgctatacatggagacaagtcccagcctgagagagacaatgttcttaatcaattccgcagtggcagaactccggttcttgtagcaaccgatgttgctgctcgtggtctggacgttaaggacatcagggcggtcgtaaactatgatttccccaatggagtggaagactatgttcatagaatcggaagaacaggaagagctggagcgactggtcaggcattcacattctttggtgatcaagattcgaaacatgcttcggatctgatcaagattttggaaggagcaaaccagcgagttcctcctcagatccgcgaaatggctacacgtggtggtgggggaatgaacaaattcagtcgttggggacctccttccggcggccgtggtcgtggtggcgactctggttatggtggcagaggtagctttgcttcccgtgacagaagcagcaatggatggggaagagagcgagaaaggagccgtagccctgagagattcaacagagctccaccaccgtcttccaccggatctcctcctcgcagcttccacgagacgatgatgatgaaacacagatgaaaagagagatacaaagctctgataaagccaagtgacagaagattgtgttgtgggggatttcccttatcattgtgacattatatattttttggccgatgaagaaacaaaagaaaaaaaaacaagaccaagaagactgttccctcccattggaaatttacgctcaaaactacaattgatatcttacagtttgtatttcatcttatttattattgcagctcagagattggtaagaatgtttc

SEQ ID NO: 48549 - protein, 426 aa, Arabidopsis thaliana
  peptide (1)..(426): Ceres Seq. ID no. 12575224
MQGRDIVAIAKTGSGKTLGYLIPGFLHLQRIRNDSRMGPTILVLSPTRELATQIQEEAVKFGRSSRISCTCLYGGAPKGPQLRDLERGADIVVATPGRLNDILEMRRISLRQISYLVLDEADRMLDMGFEPQIRKIVKEIPTKRQTLMYTATWPKGVRKIAADLLVNPAQVNIGNVDELVANKSITQHIEVVAPMEKQRRLEQILRSQEPGSKVIIFCSTKRMCDQLTRNLTRQFGAAAIHGDKSQPERDNVLNQFRSGRTPVLVATDVAARGLDVKDIRAVVNYDFPNGVEDYVHRIGRTGRAGATGQAFTFFGDQDSKHASDLIKILEGANQRVPPQIREMATRGGGGMNKFSRWGPPSGGRGRGGDSGYGGRGSFASRDRSSNGWGRERERSRSPERFNRAPPPSSTGSPPRSFHETMMMKHR

SEQ ID NO: 48550 - protein, 390 aa, Arabidopsis thaliana
  peptide (1)..(390): Ceres Seq. ID no. 12575225
MGPTILVLSPTRELATQIQEEAVKFGRSSRISCTCLYGGAPKGPQLRDLERGADIVVATPGRLNDILEMRRISLRQISYLVLDEADRMLDMGFEPQIRKIVKEIPTKRQTLMYTATWPKGVRKIAADLLVNPAQVNIGNVDELVANKSITQHIEVVAPMEKQRRLEQILRSQEPGSKVIIFCSTKRMCDQLTRNLTRQFGAAAIHGDKSQPERDNVLNQFRSGRTPVLVATDVAARGLDVKDIRAVVNYDFPNGVEDYVHRIGRTGRAGATGQAFTFFGDQDSKHASDLIKILEGANQRVPPQIREMATRGGGGMNKFSRWGPPSGGRGRGGDSGYGGRGSFASRDRSSNGWGRERERSRSPERFNRAPPPSSTGSPPRSFHETMMMKHR

SEQ ID NO: 48551 - protein, 322 aa, Arabidopsis thaliana
  peptide (1)..(322): Ceres Seq. ID no. 12575226
MRRISLRQISYLVLDEADRMLDMGFEPQIRKIVKEIPTKRQTLMYTATWPKGVRKIAADLLVNPAQVNIGNVDELVANKSITQHIEVVAPMEKQRRLEQILRSQEPGSKVIIFCSTKRMCDQLTRNLTRQFGAAAIHGDKSQPERDNVLNQFRSGRTPVLVATDVAARGLDVKDIRAVVNYDFPNGVEDYVHRIGRTGRAGATGQAFTFFGDQDSKHASDLIKILEGANQRVPPQIREMATRGGGGMNKFSRWGPPSGGRGRGGDSGYGGRGSFASRDRSSNGWGRERERSRSPERFNRAPPPSSTGSPPRSFHETMMMKHR

SEQ ID NO: 48552 - DNA, 1763 bp, Arabidopsis thaliana
  misc_feature (1)..(1763): Ceres Seq. ID no. 12575385
  misc_feature (1)..(1763): Ortholog of  Ceres SEQ ID NO 13581563 as cited in SEQ ID NO 58942
  misc_feature (1)..(1763): Ortholog of  Ceres SEQ ID NO 13658707 as cited in SEQ ID NO 66286
  misc_feature (1)..(1763): Ortholog of  Ceres SEQ ID NO 13654528 as cited in SEQ ID NO 68080
gctaggttgtccctttctcggaattgctcttcttcatcgtttctttaactatttacttctctatttttcatcattccgttggatcggattctaaacagtttgacaaacctggatctgtaattctaactcagattcttctgttgtagcaggtggtaacaatcttgatactggcattaaccagtgttattcccatttacgcaaacgttcacggcgccgggaaaatatgcgacgaacttggccggcgatcattgagtacaagaccacacagtgtctccattacagattttggagctgttggagatggcaaaacgctcaacactcttgcgtttcaaaacgccgttttctatcttatgtctttcgccgacaaaggtggggcccagctctatgttccgccgggacattggctcaccgggagttttagcctcaccagccacctcactctctttctcgaaaacggcgccgttatagtcgcttctcaggatccatcgcattgggaagtggttgatcctttaccttcatacggaaggggaattgatttgcctgggaagcgatacaagagtttgatcaacggtaacaagctacatgatgttgttgtaacaggtgataatggaactatagatggtcaaggcttggtttggtgggatcggtttacttctcattccttaaagtataaccgtcctcacctcatcgagtttctttcttctgaaaatgtaattgtctccaatcttacgttcttgaatgctcctgcttattcaatctattcaatctactctagccatgtatatattcataagatattggcccattcttctcctaaatctccttatacaatcggtattgtaccagattcttctgattacgtctgcatccaaaactctaccattaacgtggggtatgacgcgatttccctcaaaagcggttgggatgaatatggaattgcctattctcgtcccactgaaaatgttcatataagaaatgtgtaccttcgaggagcttctggttcctctatctcctttggcagtgaaatgtctggtggaatatctgatgtcgtggttgataacgctcatatacactactcgttaaccggcattgcctttagaaccacaaaaggcagaggtggttatatcaaagagatcgatatttcaaacatcgatatgttgagaataggtactgccattgttgctaatggtagctttggatctcaccctgatgataaatatgatgtgaatgctctcccacttgtgagtcacatcagattaagcaacatttctggagagaacattggcattgcggggaaattgtttgggatcaaagaatctccatttagctcagtgactttgtcgaatgtttctttgtcgatgagctcaggttcttctgtttcttggcaatgctcctacgtttacgggtcctcggagtcagtcattcctgaaccgtgtcccgagctgaagagagatgctgatgcttacggtagagctgcagtctagtgaaacagactgcaaaagaaaaaagaaaaaaaaagcaagaaacatttcttgggattctttgataggattcaattcatcaatcatttcatattttgtggagttagagaaggtcagattctttcctcaagtaaaccacattgtctttagatcatacatgttcctttcggttattctggtttcctatttttatgttgtttgcatattctgagataagaaatctgtacaggttcatttcttcattcatgtgtaaacaaagaaattttgtttcagcagttttcc

SEQ ID NO: 48553 - protein, 377 aa, Arabidopsis thaliana
  peptide (1)..(377): Ceres Seq. ID no. 12575386
MSFADKGGAQLYVPPGHWLTGSFSLTSHLTLFLENGAVIVASQDPSHWEVVDPLPSYGRGIDLPGKRYKSLINGNKLHDVVVTGDNGTIDGQGLVWWDRFTSHSLKYNRPHLIEFLSSENVIVSNLTFLNAPAYSIYSIYSSHVYIHKILAHSSPKSPYTIGIVPDSSDYVCIQNSTINVGYDAISLKSGWDEYGIAYSRPTENVHIRNVYLRGASGSSISFGSEMSGGISDVVVDNAHIHYSLTGIAFRTTKGRGGYIKEIDISNIDMLRIGTAIVANGSFGSHPDDKYDVNALPLVSHIRLSNISGENIGIAGKLFGIKESPFSSVTLSNVSLSMSSGSSVSWQCSYVYGSSESVIPEPCPELKRDADAYGRAAV

SEQ ID NO: 48554 - DNA, 739 bp, Arabidopsis thaliana
  misc_feature (1)..(739): Ceres Seq. ID no. 14310314
  misc_feature (1)..(739): Ortholog of  Ceres SEQ ID NO 14312423 as cited in SEQ ID NO 55259
tcactagtcccccccccccccccctgccgattcttcgtccccgcggctaaggagtgtaccgtttccggtggtattttccgatcaaaggcgccggcgaagcatggaacctagcaatgtctatgtggagcaggcaaggctcttgcttatggtgcaaaagaaaagggggccaaagttgtaattgctaatcgaacttacgaacgagcactagaactcgcagaagcaataggaggcaaagcgttatctctgacagatttagataactatcacccagaagatggcatggttttggcaaacaccacatctatgggtatgcaaccaaatgttgaggagactccaatttctaaggatgcattgaagcactatgcactggtctttgatgcggtatacactccgagaatcaccagactgttgagggaagcagaagaaagtggagccataactgtctcagggtcagagatgtttgtcaggcaggcttacgagcagtttgagatcttcaccggtttacccgctccaaaggaactctactggcaaataatgtcaaagtactgagacatagcttaagtgtgtgtgtgtgtacttccatgaaaagtcgtcgattcaataaagctttagattgccatttgtatgttccgagaatgtccttttttgaggccataagctgaatgactggttctctctttgtatttatatatatgtataaactattaagcctaacattaatcttttttaagtttctttg

SEQ ID NO: 48555 - protein, 89 aa, Arabidopsis thaliana
  peptide (1)..(89): Ceres Seq. ID no. 14310315
MVLANTTSMGMQPNVEETPISKDALKHYALVFDAVYTPRITRLLREAEESGAITVSGSEMFVRQAYEQFEIFTGLPAPKELYWQIMSKY

SEQ ID NO: 48556 - protein, 81 aa, Arabidopsis thaliana
  peptide (1)..(81): Ceres Seq. ID no. 14310316
MGMQPNVEETPISKDALKHYALVFDAVYTPRITRLLREAEESGAITVSGSEMFVRQAYEQFEIFTGLPAPKELYWQIMSKY

SEQ ID NO: 48557 - protein, 79 aa, Arabidopsis thaliana
  peptide (1)..(79): Ceres Seq. ID no. 14310317
MQPNVEETPISKDALKHYALVFDAVYTPRITRLLREAEESGAITVSGSEMFVRQAYEQFEIFTGLPAPKELYWQIMSKY

SEQ ID NO: 48558 - DNA, 1371 bp, Arabidopsis thaliana
  misc_feature (1)..(1371): Ceres Seq. ID no. 15168697
  misc_feature (1)..(1371): Ortholog of  Ceres SEQ ID NO 14304502 as cited in SEQ ID NO 53212
acttgacagaaacattcgcatttaacttcatcgtcttctctctgtttctttcttctccaacaaatcaccaaaaatggagagattcaatttctttaatctgatgatcatagctttatgtttatcatccttcgttcacagtctcgagatgggagaaacatgtagttcgaccagcgaatgcgacgccggattgagctgtcaaagttgtccggcgaatggaaataccggctctacttgtacccggatccaacctcttaacccgacttcaaaggtgaatggtttgccgtttaacaagtactcgtggctaacaacacacaattcgtacgcaatcacgggggcaaattcggcaactggttcattccttgtctctccaaagaatcaagaagactccatcaccaatcagcttaagaatggtgtgagaggtataatgctagatacatatgattttcaaaacgatatatggttgtgtcattccactggagggacttgctttaacttcacagcctttcaaccagctatcaatgcacttaaagagatcaatgattttcttgaatcaaacttgtctgagattgttactatcatacttgaagattatgtcaaatctcaaatgggattgactaatgtattcaatgcatctggattgagtaagttcttgttaccaatctcgagaatgccgaaagacggtacagactggccaacggttgatgatatggtgaagcagaaccaaaggcttgtggtttttacttccaagaaggataaagaagcttctgaaggtcttgcttaccagtggaattacatggttgaaaatcaatatggtaatgatggaatgaaggatggatcatgctcgagtcgatctgaatcttcttcactagataccatgtctcggtctttggtgtttcagaactactttgaaaccagtccgaattcaacgcaagcgtgtgcggataattcctctccgttgatcgaaatgatgagaacttgccatgaagcagcgggtaaaaggtggcctaacttcatagctgttgatttttatcagaggagtgatagtggaggagctgccgaagctgtagatgaagcaaacggtcgtctcacatgtggttgtgacagcttagtctattgcaagtcaaacgcaccttttggcacttgtgatgctcctcctccgaagtcgtctccatcaccagtctccggagggaaggatacttcacggaaaccaagaaatcttcctgcgggtaatgctgattctacagctattggattgtcatctctctttctaatctctgcggcgactctcttgctgtggtgatagttcctcagtgagctcagtttgctttgatctgatacaaatgatttttgatttcccctttatacgtttcc

SEQ ID NO: 48559 - protein, 408 aa, Arabidopsis thaliana
  peptide (1)..(408): Ceres Seq. ID no. 15168698
MERFNFFNLMIIALCLSSFVHSLEMGETCSSTSECDAGLSCQSCPANGNTGSTCTRIQPLNPTSKVNGLPFNKYSWLTTHNSYAITGANSATGSFLVSPKNQEDSITNQLKNGVRGIMLDTYDFQNDIWLCHSTGGTCFNFTAFQPAINALKEINDFLESNLSEIVTIILEDYVKSQMGLTNVFNASGLSKFLLPISRMPKDGTDWPTVDDMVKQNQRLVVFTSKKDKEASEGLAYQWNYMVENQYGNDGMKDGSCSSRSESSSLDTMSRSLVFQNYFETSPNSTQACADNSSPLIEMMRTCHEAAGKRWPNFIAVDFYQRSDSGGAAEAVDEANGRLTCGCDSLVYCKSNAPFGTCDAPPPKSSPSPVSGGKDTSRKPRNLPAGNADSTAIGLSSLFLISAATLLLW

SEQ ID NO: 48560 - protein, 399 aa, Arabidopsis thaliana
  peptide (1)..(399): Ceres Seq. ID no. 15168699
MIIALCLSSFVHSLEMGETCSSTSECDAGLSCQSCPANGNTGSTCTRIQPLNPTSKVNGLPFNKYSWLTTHNSYAITGANSATGSFLVSPKNQEDSITNQLKNGVRGIMLDTYDFQNDIWLCHSTGGTCFNFTAFQPAINALKEINDFLESNLSEIVTIILEDYVKSQMGLTNVFNASGLSKFLLPISRMPKDGTDWPTVDDMVKQNQRLVVFTSKKDKEASEGLAYQWNYMVENQYGNDGMKDGSCSSRSESSSLDTMSRSLVFQNYFETSPNSTQACADNSSPLIEMMRTCHEAAGKRWPNFIAVDFYQRSDSGGAAEAVDEANGRLTCGCDSLVYCKSNAPFGTCDAPPPKSSPSPVSGGKDTSRKPRNLPAGNADSTAIGLSSLFLISAATLLLW

SEQ ID NO: 48561 - protein, 384 aa, Arabidopsis thaliana
  peptide (1)..(384): Ceres Seq. ID no. 15168700
MGETCSSTSECDAGLSCQSCPANGNTGSTCTRIQPLNPTSKVNGLPFNKYSWLTTHNSYAITGANSATGSFLVSPKNQEDSITNQLKNGVRGIMLDTYDFQNDIWLCHSTGGTCFNFTAFQPAINALKEINDFLESNLSEIVTIILEDYVKSQMGLTNVFNASGLSKFLLPISRMPKDGTDWPTVDDMVKQNQRLVVFTSKKDKEASEGLAYQWNYMVENQYGNDGMKDGSCSSRSESSSLDTMSRSLVFQNYFETSPNSTQACADNSSPLIEMMRTCHEAAGKRWPNFIAVDFYQRSDSGGAAEAVDEANGRLTCGCDSLVYCKSNAPFGTCDAPPPKSSPSPVSGGKDTSRKPRNLPAGNADSTAIGLSSLFLISAATLLLW

SEQ ID NO: 48562 - DNA, 1933 bp, Arabidopsis thaliana; identical to SEQ ID NO: 48481
  misc_feature (1)..(1933): Ceres Seq. ID no. 12600905
  misc_feature (1)..(1933): Ortholog of  Ceres SEQ ID NO 15177258 as cited in SEQ ID NO 51386

SEQ ID NO: 48563 - protein, 513 aa, Arabidopsis thaliana; identical to SEQ ID NO: 48482
  peptide (1)..(513): Ceres Seq. ID no. 12600906

SEQ ID NO: 48564 - protein, 434 aa, Arabidopsis thaliana; identical to SEQ ID NO: 48483
  peptide (1)..(434): Ceres Seq. ID no. 12600907

SEQ ID NO: 48565 - protein, 386 aa, Arabidopsis thaliana; identical to SEQ ID NO: 48484
  peptide (1)..(386): Ceres Seq. ID no. 12600908

SEQ ID NO: 48566 - DNA, 1557 bp, Arabidopsis thaliana
  misc_feature (1)..(1557): Ceres Seq. ID no. 13578925
  misc_feature (1)..(1557): Ortholog of  Ceres SEQ ID NO 13656435 as cited in SEQ ID NO 65853
gaaaaaccaatccaagaaaaaaaagaaacctcaaagaagaagaagattctctctgtagaggtaaatatgaagcaaatgtcgcatcttgatgatattccttcgacgcctggcaagttcaagccctacttccaccgtacgcggtggcaatcctccgtcgccaagctcgccttttggtctctcgtcttcgttggtttgatcttcatcttcttctaccgatctcccgtttcctccaatcccgccgatccttctcgccgttctcttcgtacctactcctggggtggacccgcttgggagaaacgggtcagatcctccgcccgtctccgtacccgccgcggtttctctgttctcgtcaccggagccgccggtttcgtcggtacccatgtctccgccgctctcaaacgccgcggagatggcgttctggggcttgacaacttcaacgattactacgatccatcgctcaagagagcaaggcaagcccttttggagagaagcggagtgtttgttgttgaaggagacatcaatgacgctgctctcttgaagaagctctttgaagttgttccctttacccacgttatgcatttggctgctcaagctggtgtcaggtacgccatggaaaatcctagctcttatgttcacagtaacatcgctggcttcgtcaatctccttgaggtttgcaaatctgccaatccccaacccgccattgtctgggcttcctctagctctgtctacgggctcaacactaaggtccccttctccgagaaagacagaactgaccaaccagctagtctctatgctgctactaagaaggctggtgaagagattgctcacacttacaatcacatctatggactctctcttactggcttgaggtttttcaccgtctatggtccttggggaaggcctgacatggcctatttcttcttcaccagagacattctcaaagggaaagccatttcaatctttgagggggtcaaccatggaaccgtggctagggacttcacttacattgatgacattgtcaaggggtgtttaggggctttggacacggctgagaagagcactggtagtggtggtaagaagcgcggtgcggctcagttacgggttttcaatctcggcaacacttcgcccgttccagtgactgatcttgtcaccattcttgagagacttctcaaagtcaaggccaagaggaacattatgaagttgccgaggaacggggatgtgcagttcactcatgctaatatcagttctgcgcagagagagctcggctacaaacccaccaccgatcttcagacgggtctcaagaagtttgcgagatggtatttgggttactacaatggcggaaagaaagctgcaagctgatgattgactatctgcaatgagtttgtagcctctctttttttttttgattctgagattcttgtgattgtttcactctttaacacttgctctttttgttggttctttggccggctcataccctgtctttgccgtatatgtttttactcaaaaccatttatactccataagaaccattatttcgggattacattctttgtc

SEQ ID NO: 48567 - protein, 452 aa, Arabidopsis thaliana
  peptide (1)..(452): Ceres Seq. ID no. 13578926
EKPIQEKKETSKKKKILSVEVNMKQMSHLDDIPSTPGKFKPYFHRTRWQSSVAKLAFWSLVFVGLIFIFFYRSPVSSNPADPSRRSLRTYSWGGPAWEKRVRSSARLRTRRGFSVLVTGAAGFVGTHVSAALKRRGDGVLGLDNFNDYYDPSLKRARQALLERSGVFVVEGDINDAALLKKLFEVVPFTHVMHLAAQAGVRYAMENPSSYVHSNIAGFVNLLEVCKSANPQPAIVWASSSSVYGLNTKVPFSEKDRTDQPASLYAATKKAGEEIAHTYNHIYGLSLTGLRFFTVYGPWGRPDMAYFFFTRDILKGKAISIFEGVNHGTVARDFTYIDDIVKGCLGALDTAEKSTGSGGKKRGAAQLRVFNLGNTSPVPVTDLVTILERLLKVKAKRNIMKLPRNGDVQFTHANISSAQRELGYKPTTDLQTGLKKFARWYLGYYNGGKKAAS

SEQ ID NO: 48568 - protein, 430 aa, Arabidopsis thaliana
  peptide (1)..(430): Ceres Seq. ID no. 13578927
MKQMSHLDDIPSTPGKFKPYFHRTRWQSSVAKLAFWSLVFVGLIFIFFYRSPVSSNPADPSRRSLRTYSWGGPAWEKRVRSSARLRTRRGFSVLVTGAAGFVGTHVSAALKRRGDGVLGLDNFNDYYDPSLKRARQALLERSGVFVVEGDINDAALLKKLFEVVPFTHVMHLAAQAGVRYAMENPSSYVHSNIAGFVNLLEVCKSANPQPAIVWASSSSVYGLNTKVPFSEKDRTDQPASLYAATKKAGEEIAHTYNHIYGLSLTGLRFFTVYGPWGRPDMAYFFFTRDILKGKAISIFEGVNHGTVARDFTYIDDIVKGCLGALDTAEKSTGSGGKKRGAAQLRVFNLGNTSPVPVTDLVTILERLLKVKAKRNIMKLPRNGDVQFTHANISSAQRELGYKPTTDLQTGLKKFARWYLGYYNGGKKAAS

SEQ ID NO: 48569 - protein, 427 aa, Arabidopsis thaliana
  peptide (1)..(427): Ceres Seq. ID no. 13578928
MSHLDDIPSTPGKFKPYFHRTRWQSSVAKLAFWSLVFVGLIFIFFYRSPVSSNPADPSRRSLRTYSWGGPAWEKRVRSSARLRTRRGFSVLVTGAAGFVGTHVSAALKRRGDGVLGLDNFNDYYDPSLKRARQALLERSGVFVVEGDINDAALLKKLFEVVPFTHVMHLAAQAGVRYAMENPSSYVHSNIAGFVNLLEVCKSANPQPAIVWASSSSVYGLNTKVPFSEKDRTDQPASLYAATKKAGEEIAHTYNHIYGLSLTGLRFFTVYGPWGRPDMAYFFFTRDILKGKAISIFEGVNHGTVARDFTYIDDIVKGCLGALDTAEKSTGSGGKKRGAAQLRVFNLGNTSPVPVTDLVTILERLLKVKAKRNIMKLPRNGDVQFTHANISSAQRELGYKPTTDLQTGLKKFARWYLGYYNGGKKAAS

SEQ ID NO: 48570 - DNA, 1786 bp, Arabidopsis thaliana
  misc_feature (1)..(1786): Ceres Seq. ID no. 12575003
  misc_feature (1)..(1786): Ortholog of  Ceres SEQ ID NO 14311203 as cited in SEQ ID NO 53639
  misc_feature (1)..(1786): Ortholog of  Ceres SEQ ID NO 14311175 as cited in SEQ ID NO 60223
  misc_feature (1)..(1786): Ortholog of  Ceres SEQ ID NO 14307972 as cited in SEQ ID NO 66436
  misc_feature (1)..(1786): Ortholog of  Ceres SEQ ID NO 12614670 as cited in SEQ ID NO 68565
aacttgtataatcaaaactccagtgacagccaaaaagtctcaatctttataaagacccacaaaaacttgcggactccagagtgagtgtgagaatcggagatgtctttttcagtagtagcagctttaccggtgcttgtagcagtagtggtactgtggacatggcggatcgtgaagtgggtctggataaaaccaaagatgcttgagagttctttgaaaagacagggtcttaccggaactccttacactcctctcgtcggagatataaagaggaatgttgatatgatgatggaagcgagatctaaacccatcaatgtaacggatgatatcaccccacgtctccttcctcttgccttaaagatgctcaattctcacggaaagactttcttcatatggattggaccacttccaacgattgtgataacgaatcctgagcagatcaaggaagtctttaataaagtcaacgactttgagaaagcttctacattccctttgatcagattgttagcaggtgggcttgcaagttacaagggagataaatgggcgagtcacaggaggatcatcaacccggcttttcacctcgaaaaaatcaagaacatgatccctgcgttctaccattgttgcagcgaggttgtctgtcaatgggagaagctatttacagataaagaatcgcctcttgaagtcgatgtttggccttggcttgtgaatatgactgcggatgtcatctcacatactgcttttggaagtagctataaagaagggcagagaatatttcaactacaaggggaattggctgagcttatcgcacaagcttttaagaaatcttacatccctggatcgaggttttacccaacaaagagcaatagaaggatgaaagcaatagatagagaagtagacgtaatattgagaggtattgtgagcaaacgggagaaagcgagagaagctggagaaccagcaaacgatgatttgttggggatattgcttgaatccaattcagaggaatctcaaggaaatggaatgagcgtagaagatgtgatgaaagagtgcaagttgttttatttcgcgggacaagagacaacttcagtacttttggtgtggactatggttttattaagccatcaccaagactggcaagctcgcgcacgagaggaagtgatgcaagtactcggtgaaaataataaacctgatatggagtcccttaacaaccttaaagtcatgactatgatcttcaatgaggttttgaggctataccctccggtggctcagcttaaacgagttgtcaacaaagaaatgaagctcggagagttgacccttccagctggaattcaaatttacttaccaactattcttgtccagcgtgacaccgagctttggggcgatgatgcagcggattttaaacccgagcggttcagagacgggctctcaaaggcaacaaagaaccaggtctctttcttcccctttggatggggacctaggatttgcatcggtcagaattttgctatgttggaggcaaagatggcaatggctttgattctacaaaagttctccttcgagctctctccttcttatgttcacgcgcctcaaacagtcatgaccactcgtccccaattcggagctcatctaattctgcacaagctctgattttgtatatccatggatatgtcatcaaaagtctcatattatgtaacaaaaagatgtcatagaaagccctgtagccatatgttgtgaaattgtcaatatctttgtctgaaactagtcgctattctataaggtaaaagtcttcttcagt

SEQ ID NO: 48571 - protein, 512 aa, Arabidopsis thaliana
  peptide (1)..(512): Ceres Seq. ID no. 12575004
MSFSVVAALPVLVAVVVLWTWRIVKWVWIKPKMLESSLKRQGLTGTPYTPLVGDIKRNVDMMMEARSKPINVTDDITPRLLPLALKMLNSHGKTFFIWIGPLPTIVITNPEQIKEVFNKVNDFEKASTFPLIRLLAGGLASYKGDKWASHRRIINPAFHLEKIKNMIPAFYHCCSEVVCQWEKLFTDKESPLEVDVWPWLVNMTADVISHTAFGSSYKEGQRIFQLQGELAELIAQAFKKSYIPGSRFYPTKSNRRMKAIDREVDVILRGIVSKREKAREAGEPANDDLLGILLESNSEESQGNGMSVEDVMKECKLFYFAGQETTSVLLVWTMVLLSHHQDWQARAREEVMQVLGENNKPDMESLNNLKVMTMIFNEVLRLYPPVAQLKRVVNKEMKLGELTLPAGIQIYLPTILVQRDTELWGDDAADFKPERFRDGLSKATKNQVSFFPFGWGPRICIGQNFAMLEAKMAMALILQKFSFELSPSYVHAPQTVMTTRPQFGAHLILHKL

SEQ ID NO: 48572 - protein, 480 aa, Arabidopsis thaliana
  peptide (1)..(480): Ceres Seq. ID no. 12575005
MLESSLKRQGLTGTPYTPLVGDIKRNVDMMMEARSKPINVTDDITPRLLPLALKMLNSHGKTFFIWIGPLPTIVITNPEQIKEVFNKVNDFEKASTFPLIRLLAGGLASYKGDKWASHRRIINPAFHLEKIKNMIPAFYHCCSEVVCQWEKLFTDKESPLEVDVWPWLVNMTADVISHTAFGSSYKEGQRIFQLQGELAELIAQAFKKSYIPGSRFYPTKSNRRMKAIDREVDVILRGIVSKREKAREAGEPANDDLLGILLESNSEESQGNGMSVEDVMKECKLFYFAGQETTSVLLVWTMVLLSHHQDWQARAREEVMQVLGENNKPDMESLNNLKVMTMIFNEVLRLYPPVAQLKRVVNKEMKLGELTLPAGIQIYLPTILVQRDTELWGDDAADFKPERFRDGLSKATKNQVSFFPFGWGPRICIGQNFAMLEAKMAMALILQKFSFELSPSYVHAPQTVMTTRPQFGAHLILHKL

SEQ ID NO: 48573 - protein, 452 aa, Arabidopsis thaliana
  peptide (1)..(452): Ceres Seq. ID no. 12575006
MMMEARSKPINVTDDITPRLLPLALKMLNSHGKTFFIWIGPLPTIVITNPEQIKEVFNKVNDFEKASTFPLIRLLAGGLASYKGDKWASHRRIINPAFHLEKIKNMIPAFYHCCSEVVCQWEKLFTDKESPLEVDVWPWLVNMTADVISHTAFGSSYKEGQRIFQLQGELAELIAQAFKKSYIPGSRFYPTKSNRRMKAIDREVDVILRGIVSKREKAREAGEPANDDLLGILLESNSEESQGNGMSVEDVMKECKLFYFAGQETTSVLLVWTMVLLSHHQDWQARAREEVMQVLGENNKPDMESLNNLKVMTMIFNEVLRLYPPVAQLKRVVNKEMKLGELTLPAGIQIYLPTILVQRDTELWGDDAADFKPERFRDGLSKATKNQVSFFPFGWGPRICIGQNFAMLEAKMAMALILQKFSFELSPSYVHAPQTVMTTRPQFGAHLILHKL

SEQ ID NO: 48574 - DNA, 2268 bp, Arabidopsis thaliana
  misc_feature (1)..(2268): Ceres Seq. ID no. 13591988
  misc_feature (1)..(2268): Ortholog of  Ceres SEQ ID NO 15174626 as cited in SEQ ID NO 59393
  misc_feature (1)..(2268): Ortholog of  Ceres SEQ ID NO 13656177 as cited in SEQ ID NO 64997
aaaagttggacatccttgcttttggtctaactttctctctcttgcttctacgcttcttcttgtggcgtagattgttatagagagggaaaccaaaaaagggaatctcaaaagctcgagttcacagatttgacccgagtctttaatccaatctgctggttcgttttccacattcaaactcgactcttgaatatcaaatcagaagtctttgctatggctgctaccgctgctgcttctgttgtccgttacgcacctgaggatcatactcttcccaagccctggaaaggccttatcgatgatagaactggttacttgtacttttggaatcctgagaccaatgttactcagtacgagaaaccaaccccctctctacctcctaagttttctcccgccgtttctgttagctcttccgttcaggttcaacaaactgatgcctatgctcctcccaaggatgacgataagtactccagaggctctgaacgtgtgtccaggttttctgagggtggcaggagtggaccgccttattcgaacggtgctgctaatggagttggggattctgcttatggtgcagcatctaccagagttcctcttccttcatcagctccagcaagtgaactatcccctgaggcctattcccgccgtcatgaaattactgtcagtgggggccaagtaccaccacctctaatgtcctttgaagctactggttttccacctgagcttctgcgggaggtactcagtgcaggtttctctgctccaactccaattcaagctcagtcatggcccattgctatgcaaggtagggacatagtagccattgctaaaactggctcgggaaaaactttgggttacttgattcctggatttttgcatcttcaacgtatccgaaatgattcgcgaatgggcccaacaatcttggtattgtctccaacgagagagctggccacacaaatccaagaagaagctgttaaatttgggaggtcatcaagaatttcgtgtacgtgtttgtatggtggtgcaccaaagggccctcagttgagggatttagaaagaggagcagatatcgtggttgcaactcctgggagattgaatgatatccttgaaatgaggaggattagtctgcgtcagatatcttatcttgtgctagatgaggcagatagaatgttggacatgggttttgaacctcagataaggaagattgtgaaagaaattcccactaagcgtcaaacccttatgtacacagctacatggccaaagggagttaggaaaattgcagctgacttgcttgttaaccctgctcaagtcaacattggcaatgttgacgagcttgtggctaacaagtcaatcacacagcatattgaagtggtagcaccaatggagaaacagaggaggttagagcagatcttgcggtctcaggaaccaggctcaaaggtgataatattctgctcaaccaaaaggatgtgtgatcaactaacacgcaatctaacccgccaatttggagctgctgctatacatggagacaagtcccagcctgagagagacaatgttcttaatcaattccgcagtggcagaactccggttcttgtagcaaccgatgttgctgctcgtggtctggacgttaaggacatcagggcggtcgtaaactatgatttccccaatggagtggaagactatgttcatagaatcggaagaacaggaagagctggagcgactggtcaggcattcacattctttggtgatcaagattcgaaacatgcttcggatctgatcaagattttggaaggagcaaaccagcgagttcctcctcagatccgcgaaatggctacacgtggtggtgggggaatgaacaaattcagtcgttggggacctccttccggcggccgtggtcgtggtggcgactctggttatggtggcagaggtagctttgcttcccgtgacagaagcagcaatggatggggaagagagcgagaaaggagccgtagccctgagagattcaacagagctccaccaccgtcttccaccggatctcctcctcgcagcttccacgagacgatgatgatgaaacacagatgaaaagagagatacaaagctctgataaagccaagtgacagaagattgtgttgtgggggatttcccttatcattgtgacattatatattttttggccgatgaagaaacaaaagaaaaaaaaacaagaccaagaagactgttccctcccattggaaatttacgctcaaaactacaattgatatcttacagtttgtatttcatctt

SEQ ID NO: 48575 - protein, 618 aa, Arabidopsis thaliana
  peptide (1)..(618): Ceres Seq. ID no. 13591989
MAATAAASVVRYAPEDHTLPKPWKGLIDDRTGYLYFWNPETNVTQYEKPTPSLPPKFSPAVSVSSSVQVQQTDAYAPPKDDDKYSRGSERVSRFSEGGRSGPPYSNGAANGVGDSAYGAASTRVPLPSSAPASELSPEAYSRRHEITVSGGQVPPPLMSFEATGFPPELLREVLSAGFSAPTPIQAQSWPIAMQGRDIVAIAKTGSGKTLGYLIPGFLHLQRIRNDSRMGPTILVLSPTRELATQIQEEAVKFGRSSRISCTCLYGGAPKGPQLRDLERGADIVVATPGRLNDILEMRRISLRQISYLVLDEADRMLDMGFEPQIRKIVKEIPTKRQTLMYTATWPKGVRKIAADLLVNPAQVNIGNVDELVANKSITQHIEVVAPMEKQRRLEQILRSQEPGSKVIIFCSTKRMCDQLTRNLTRQFGAAAIHGDKSQPERDNVLNQFRSGRTPVLVATDVAARGLDVKDIRAVVNYDFPNGVEDYVHRIGRTGRAGATGQAFTFFGDQDSKHASDLIKILEGANQRVPPQIREMATRGGGGMNKFSRWGPPSGGRGRGGDSGYGGRGSFASRDRSSNGWGRERERSRSPERFNRAPPPSSTGSPPRSFHETMMMKHR

SEQ ID NO: 48576 - protein, 461 aa, Arabidopsis thaliana
  peptide (1)..(461): Ceres Seq. ID no. 13591990
MSFEATGFPPELLREVLSAGFSAPTPIQAQSWPIAMQGRDIVAIAKTGSGKTLGYLIPGFLHLQRIRNDSRMGPTILVLSPTRELATQIQEEAVKFGRSSRISCTCLYGGAPKGPQLRDLERGADIVVATPGRLNDILEMRRISLRQISYLVLDEADRMLDMGFEPQIRKIVKEIPTKRQTLMYTATWPKGVRKIAADLLVNPAQVNIGNVDELVANKSITQHIEVVAPMEKQRRLEQILRSQEPGSKVIIFCSTKRMCDQLTRNLTRQFGAAAIHGDKSQPERDNVLNQFRSGRTPVLVATDVAARGLDVKDIRAVVNYDFPNGVEDYVHRIGRTGRAGATGQAFTFFGDQDSKHASDLIKILEGANQRVPPQIREMATRGGGGMNKFSRWGPPSGGRGRGGDSGYGGRGSFASRDRSSNGWGRERERSRSPERFNRAPPPSSTGSPPRSFHETMMMKHR

SEQ ID NO: 48577 - protein, 426 aa, Arabidopsis thaliana; identical to SEQ ID NO: 48549
  peptide (1)..(426): Ceres Seq. ID no. 13591991

SEQ ID NO: 48578 - DNA, 1918 bp, Arabidopsis thaliana
  misc_feature (1)..(1918): Ceres Seq. ID no. 13591992
  misc_feature (1)..(1918): Ortholog of  Ceres SEQ ID NO 14307374 as cited in SEQ ID NO 54073
gggcctcttcttttgaatcctcttagctctggcatcttcagatcgagacttggatttatcagcttctccgtgctcctttagcttctgctcggttttgttttttttagtctgacgatgagtaacaactggaaatccgttcgattaaggcttcaaaatcgtactctcgtgtttcttctggtgattttgagcttcggttcttgctattcgttgaaatctcaaggtgatggttttctggaatccgtgacgaaagatctatggtcagatatagatgctgaggatttgagagcagttggttttcacaggaaattacttggccgttttcgtaacccgtacacccatttgaatgcgttcagggaccgccctgtggcaagagctacacctccgtcatcttcggtttctacgagacctgatgccaaaagatcctctacattgcctccgccacaaaaaagtcctcctgcgcaacatgtttctgctccacctccttttgtgcaccatgtgactttacctagtctaacaagcagctccaaaacttcttcaaacagcacaattcctatagtggctggctgcatagcgggtgctgtgtttatcctccttttagctactggtgttttcttttttaaaagtaaggctgggaaatctgtgaatccctggcgtacaggtcttagtggacaacttcagaaagtgttcataactggtgtccccaaactcaaaagatctgagattgaagctgcctgtgaagattttagtaatgtcattgggtcttgccccattggtacattgttcaaagggacgctatcaagtggggtggagatagctgtggcttctgttgctactgcgtctgccaaagaatggacaaataatatagaaatgcagttcagaaagaagatcgaaatgttatccaagataaaccacaagaattttgtcaaccttcttggttactgtgaagaagaagaacctttcactaggatcttggtctttgaatatgcatcaaacggaacagtctttgaacatttacactataaagaatcagaacacttggactgggtaatgcggctaagaatagcaatgggcatagcttattgccttgaccatatgcacggactcaagccacctatagtccacagcaatcttctctcatcatcagttcaactcacagaggactacgcagtcaaaattgcggatttcaattttggatatttaaaaggcccatccgagacagaaagcagcaccaatgcactcatagatacaaacatctcagaaacaacacaagaagacaatgttcacagcttcgggttgctgttgtttgaactgatgacaggaaaactcccagagtcagttcaaaaaggtgactcgatagataccggattggctgtcttcttgagaggaaagacattaagggagatggtggatccgacaattgaaagctttgacgagaagattgagaatataggtgaagtgatcaaaagctgcataagagcagacgcgaaacagagaccgataatgaaggaagtcacagggagattacgagagatcactggattatcaccagacgacactatcccaaaactttcaccactctggtgggcagagctggaagttctgtccactgcgtgaagagacaactactgaacttcacaaaaaaatctgtaagtattaatatgaagatttgagtgaggtttttgagtctcttagaagctcttggcttctctttaggctactttcatctatctatctatatataagtatggaacttagtttatataacggctttaaaattcggtggatctatttggtcgtttatgtcgtaaacagaaaatgtcctaatcacggtaatacccctttttggtgtgcataatgttggtgggtggttactgtctttgtaaattagtgttactatgttcttggcggccgcgaattc

SEQ ID NO: 48579 - protein, 499 aa, Arabidopsis thaliana; identical to SEQ ID NO: 46195
  peptide (1)..(499): Ceres Seq. ID no. 13591993

SEQ ID NO: 48580 - DNA, 2282 bp, Arabidopsis thaliana
  misc_feature (1)..(2282): Ceres Seq. ID no. 12575395
  misc_feature (1)..(2282): Ortholog of  Ceres SEQ ID NO 13584744 as cited in SEQ ID NO 69137
aaacatgcctaactcgattctctttcttcttctttcattcctgtatctcacaaactgcgttgctcaatctccatcacaaacttgtcctttagatttctctcatgtcctaacaatcccatggaacacaacagattgtcaaaagtccgacaaatcagccgatagcaagaacagttgttgccaatctcttttaactctaatcggaatccctctagctcatcgtctcaaacaaacttccaatttccgtctcccaaatctcgctacttcaatctcttgtctcaacaatctccaaacgaagcttagttcactctctctatcttcgaatctcacctctctctgtttcgatccgaatcagttcgtcatcaataacgaaacctgtgctggaatccaaacgactcaagattgggtatctcgtctcggtccatctacggcgcttgactccgcctgtagcagtggtctcactgatctaacgcgatgcgacgcttgcgtggcggctgggtttagggttcaaaaacagctcatcactttggacggtaatagctctcacggtgtttattgttaccattttgtggttacttacgctgctggtattgttaacaagaaaggacctgagagtgatgatgctttgtcttgtctcttctctttgagtttgagatctccattgaactcaaagaagaaaagacacacggtggctcttgctttagggataaccggagctattttcggggctctggttattgccggtttgatttgtttgtatttccggtttggtaaagctgttaaaggaggagaggttggttgggaggatcaagggtctagaccgaaatggagaccaaacactggctctatctggttcaaaatcgaggaactagagaaagctacgaataacttctcgcagaagaatttcatcggtcgaggcgggtttggttttgtttacaaaggggttttaccagatggatcggttatcgcggttaagaaggtgatagagtctgagtttcaaggggatgcagagtttcgtaatgaggttgagatcattagcaatttgaaacataggaatcttgttccgcttagaggttgtagtatggtggatgatgatagtgagagtcagagatatcttgtttatgattacatgtctaatggaaatctcgatgatcacttgtttcctcgaggtgagactacgaagatgccattgagctggcctcagagaaagagcatcattttggatgtggctaaagggttggcttatttgcattacggtgtgaaacccgctatttatcaccgggatattaaaggtacgaacatattgttagatgtcgatatgagagcgagagttgcggatttcggtttagctaaacagagtagagaaggagagtctcatctcactaccagagttgcgggaacacacggttacttggctccagagtatgccctctatggtcaattaaccgagaaaagcgatgtgtatagcttcggggttgttatattggagatcatgtgtggaaggaaagctcttgatctgtctacttctggatcaccaaacacttttctgatcacagattgggcttggtcattggtaaaagcagggaaaacagaggaagctcttgagcagtctttgttgagagaggaaggctcagggctctcgaatccgaaagggataatggagagattcttgcaagttgggatattgtgtgcccatgtattggttgctttaaggccaacaatattagatgcattgaaaatgcttgaaggagacatcgaggttcctcctattccggaccgaccagtcccgctcgcgcatccttcgtaccgtatggacggaaacggattcacaatatcgcctgcgcttagcggactacaaatacattccggagatatgctcagatgaaaaaactaggctcatgtgagattttattttgtaaatatttgaaagcaacgatcacgtcttttgattacatcatgtaaaacaatttcagaatgttgtagtatatcataagtagggaaaacatatagttcattgtaggattatattctaaatcaaagtagaggcgaaggctgagatgcgggggtgagggcggtagctggtggaagccttccggtacaagtgcaaaagttattaaggcactcacatttggtgcagtggttcacagtcctgcaccatcttgacactaatggtcctctcgcctcagccaccatgtaaaattctgcaaccattcaaatttgtgtttatttttgtccgttgcaaaatttatatgtatataaataagaagaaattacatatttttttt

SEQ ID NO: 48581 - protein, 626 aa, Arabidopsis thaliana
  peptide (1)..(626): Ceres Seq. ID no. 12575396
NMPNSILFLLLSFLYLTNCVAQSPSQTCPLDFSHVLTIPWNTTDCQKSDKSADSKNSCCQSLLTLIGIPLAHRLKQTSNFRLPNLATSISCLNNLQTKLSSLSLSSNLTSLCFDPNQFVINNETCAGIQTTQDWVSRLGPSTALDSACSSGLTDLTRCDACVAAGFRVQKQLITLDGNSSHGVYCYHFVVTYAAGIVNKKGPESDDALSCLFSLSLRSPLNSKKKRHTVALALGITGAIFGALVIAGLICLYFRFGKAVKGGEVGWEDQGSRPKWRPNTGSIWFKIEELEKATNNFSQKNFIGRGGFGFVYKGVLPDGSVIAVKKVIESEFQGDAEFRNEVEIISNLKHRNLVPLRGCSMVDDDSESQRYLVYDYMSNGNLDDHLFPRGETTKMPLSWPQRKSIILDVAKGLAYLHYGVKPAIYHRDIKGTNILLDVDMRARVADFGLAKQSREGESHLTTRVAGTHGYLAPEYALYGQLTEKSDVYSFGVVILEIMCGRKALDLSTSGSPNTFLITDWAWSLVKAGKTEEALEQSLLREEGSGLSNPKGIMERFLQVGILCAHVLVALRPTILDALKMLEGDIEVPPIPDRPVPLAHPSYRMDGNGFTISPALSGLQIHSGDMLR

SEQ ID NO: 48582 - protein, 625 aa, Arabidopsis thaliana
  peptide (1)..(625): Ceres Seq. ID no. 12575397
MPNSILFLLLSFLYLTNCVAQSPSQTCPLDFSHVLTIPWNTTDCQKSDKSADSKNSCCQSLLTLIGIPLAHRLKQTSNFRLPNLATSISCLNNLQTKLSSLSLSSNLTSLCFDPNQFVINNETCAGIQTTQDWVSRLGPSTALDSACSSGLTDLTRCDACVAAGFRVQKQLITLDGNSSHGVYCYHFVVTYAAGIVNKKGPESDDALSCLFSLSLRSPLNSKKKRHTVALALGITGAIFGALVIAGLICLYFRFGKAVKGGEVGWEDQGSRPKWRPNTGSIWFKIEELEKATNNFSQKNFIGRGGFGFVYKGVLPDGSVIAVKKVIESEFQGDAEFRNEVEIISNLKHRNLVPLRGCSMVDDDSESQRYLVYDYMSNGNLDDHLFPRGETTKMPLSWPQRKSIILDVAKGLAYLHYGVKPAIYHRDIKGTNILLDVDMRARVADFGLAKQSREGESHLTTRVAGTHGYLAPEYALYGQLTEKSDVYSFGVVILEIMCGRKALDLSTSGSPNTFLITDWAWSLVKAGKTEEALEQSLLREEGSGLSNPKGIMERFLQVGILCAHVLVALRPTILDALKMLEGDIEVPPIPDRPVPLAHPSYRMDGNGFTISPALSGLQIHSGDMLR

SEQ ID NO: 48583 - DNA, 2452 bp, Arabidopsis thaliana; identical to SEQ ID NO: 48437
  misc_feature (1)..(2452): Ceres Seq. ID no. 12639042
  misc_feature (1)..(2452): Ortholog of  Ceres SEQ ID NO 13654989 as cited in SEQ ID NO 63117
  misc_feature (1)..(2452): Ortholog of  Ceres SEQ ID NO 13655640 as cited in SEQ ID NO 63844

SEQ ID NO: 48584 - protein, 816 aa, Arabidopsis thaliana; identical to SEQ ID NO: 48438
  peptide (1)..(816): Ceres Seq. ID no. 12639043

SEQ ID NO: 48585 - protein, 789 aa, Arabidopsis thaliana; identical to SEQ ID NO: 48439
  peptide (1)..(789): Ceres Seq. ID no. 12639044

SEQ ID NO: 48586 - protein, 786 aa, Arabidopsis thaliana; identical to SEQ ID NO: 48440
  peptide (1)..(786): Ceres Seq. ID no. 12639045

SEQ ID NO: 48587 - DNA, 2566 bp, Arabidopsis thaliana; identical to SEQ ID NO: 39024
  misc_feature (1)..(2566): Ceres Seq. ID no. 13497704
  misc_feature (1)..(2566): Ortholog of  Ceres SEQ ID NO 13600595 as cited in SEQ ID NO 629

SEQ ID NO: 48588 - protein, 724 aa, Arabidopsis thaliana; identical to SEQ ID NO: 39025
  peptide (1)..(724): Ceres Seq. ID no. 13497705

SEQ ID NO: 48589 - protein, 666 aa, Arabidopsis thaliana; identical to SEQ ID NO: 39026
  peptide (1)..(666): Ceres Seq. ID no. 13497706

SEQ ID NO: 48590 - protein, 585 aa, Arabidopsis thaliana; identical to SEQ ID NO: 39027
  peptide (1)..(585): Ceres Seq. ID no. 13497707

SEQ ID NO: 48591 - DNA, 2058 bp, Arabidopsis thaliana
  misc_feature (1)..(2058): Ceres Seq. ID no. 12600909
  misc_feature (1)..(2058): Ortholog of  Ceres SEQ ID NO 13655463 as cited in SEQ ID NO 69035
  misc_feature (1)..(2058): Ortholog of  Ceres SEQ ID NO 15180063 as cited in SEQ ID NO 0
agatccaaagaggacttttttcagcttcattgctctcttaaaatctgtggtaatctctcttccattgttattcttcaagtaaataatgccctttgctcctctctcaacaccatttatcttataaaccctagacactccgccgaatttttacccttctccactggtcatccgcgttttttttccgggtctaaggtcaccggaaaaatggctttccggcgagtgttaaccactgtaatcctcttctgctacttactaatttcatctcaatccattgaattcaaaaactcccagaaaccccacaagatccaaggaccaatcaagactatagtcgttgtagtcatggagaatcgctccttcgatcacatcctcggttggctcaaatcgacccgacccgaaatcgacggattaaccggcaaagagtcaaatcccctcaacgtctccgatccaaattccaaaaagatcttcgtctcagacgacgccgtcttcgtagacatggatccgggtcactcattccaagcgatccgagaacagatattcgggtctaacgatacatccggcgacccgaaaatgaacggattcgcacagcaatcagagagtatggagcctggaatggctaagaacgttatgagcgggttcaaacccgaagtcttaccggtttacaccgagttagcgaacgagttcggagttttcgatcgatggttcgcttcagtaccaacttcgactcaaccgaatcggttctacgttcactcagctacttctcatggatgctcaagcaacgtgaagaaagatctcgttaaagggtttcctcaaaagacgatctttgattcgttagatgagaacggactcagttttgggatttattaccaaaacatccctgcgacgttcttcttcaagtctcttcgtaggcttaagcatttggtgaaattccatagctatgcacttaagttcaagctcgacgctaagcttgggaagcttccgaattattctgtcgtggaacagagatatttcgatatcgatctttttccggctaatgatgatcatccgtcgcatgacgtggcggcgggtcaacggtttgttaaggaagtttatgagacgttacggagtagtccacagtggaaagagatggctttgctcattacttatgatgagcacggtgggttttatgaccatgttcccacgccggttaaaggtgtgcctaaccctgatggtatcattggacctgatccgttttactttgggtttgaccgattgggtgttcgggtccctacctttctgatctcctcctggattgagaagggcactgtgatacatgaacctgaaggtccaacaccacattcacaatttgagcattcttctatccctgcaacggtgaagaaactcttcaacctaaagtctcacttccttacaaagagagatgcatgggctggtacatttgagaaatacttccgtatccgagattctcctcgccaagattgtccagagaaactgccggaagtgaaactatcgctgaggccatggggagcaaaagaagactcaaagctctcagaattccaggtggagctgatccaactggcctctcaactcgttggagaccatctcctaaactcatatccagacattgggaagaacatgacagtaagtgaaggcaacaaatacgcagaagacgctgttcagaagtttctggaagcagggatggctgcactggaagcaggagcagacgaaaacactatagtcactatgaggccgtctctgacaaccaggaccagtcccagtgaagggaccaacaagtatattggaagctactgaaatctataactaaaaaacggattttatgtaaatatatgtgccctctgcatgtacccacttttacttagatgcatatatgatgtggtgaaagtatatatattatataatggatcaaagaatatggtaacggaatgtagtacccttgcgatgattgtcgggtatggcctccatctccatagttggaatggatcgaggcttcctgtaatactaaaatgtatccttatcctaaaatagacaaagaatcattgtatt

SEQ ID NO: 48592 - protein, 601 aa, Arabidopsis thaliana
  peptide (1)..(601): Ceres Seq. ID no. 12600910
RSKEDFFQLHCSLKICGNLSSIVILQVNNALCSSLNTIYLINPRHSAEFLPFSTGHPRFFSGSKVTGKMAFRRVLTTVILFCYLLISSQSIEFKNSQKPHKIQGPIKTIVVVVMENRSFDHILGWLKSTRPEIDGLTGKESNPLNVSDPNSKKIFVSDDAVFVDMDPGHSFQAIREQIFGSNDTSGDPKMNGFAQQSESMEPGMAKNVMSGFKPEVLPVYTELANEFGVFDRWFASVPTSTQPNRFYVHSATSHGCSSNVKKDLVKGFPQKTIFDSLDENGLSFGIYYQNIPATFFFKSLRRLKHLVKFHSYALKFKLDAKLGKLPNYSVVEQRYFDIDLFPANDDHPSHDVAAGQRFVKEVYETLRSSPQWKEMALLITYDEHGGFYDHVPTPVKGVPNPDGIIGPDPFYFGFDRLGVRVPTFLISSWIEKGTVIHEPEGPTPHSQFEHSSIPATVKKLFNLKSHFLTKRDAWAGTFEKYFRIRDSPRQDCPEKLPEVKLSLRPWGAKEDSKLSEFQVELIQLASQLVGDHLLNSYPDIGKNMTVSEGNKYAEDAVQKFLEAGMAALEAGADENTIVTMRPSLTTRTSPSEGTNKYIGSY

SEQ ID NO: 48593 - protein, 533 aa, Arabidopsis thaliana
  peptide (1)..(533): Ceres Seq. ID no. 12600911
MAFRRVLTTVILFCYLLISSQSIEFKNSQKPHKIQGPIKTIVVVVMENRSFDHILGWLKSTRPEIDGLTGKESNPLNVSDPNSKKIFVSDDAVFVDMDPGHSFQAIREQIFGSNDTSGDPKMNGFAQQSESMEPGMAKNVMSGFKPEVLPVYTELANEFGVFDRWFASVPTSTQPNRFYVHSATSHGCSSNVKKDLVKGFPQKTIFDSLDENGLSFGIYYQNIPATFFFKSLRRLKHLVKFHSYALKFKLDAKLGKLPNYSVVEQRYFDIDLFPANDDHPSHDVAAGQRFVKEVYETLRSSPQWKEMALLITYDEHGGFYDHVPTPVKGVPNPDGIIGPDPFYFGFDRLGVRVPTFLISSWIEKGTVIHEPEGPTPHSQFEHSSIPATVKKLFNLKSHFLTKRDAWAGTFEKYFRIRDSPRQDCPEKLPEVKLSLRPWGAKEDSKLSEFQVELIQLASQLVGDHLLNSYPDIGKNMTVSEGNKYAEDAVQKFLEAGMAALEAGADENTIVTMRPSLTTRTSPSEGTNKYIGSY

SEQ ID NO: 48594 - protein, 488 aa, Arabidopsis thaliana
  peptide (1)..(488): Ceres Seq. ID no. 12600912
MENRSFDHILGWLKSTRPEIDGLTGKESNPLNVSDPNSKKIFVSDDAVFVDMDPGHSFQAIREQIFGSNDTSGDPKMNGFAQQSESMEPGMAKNVMSGFKPEVLPVYTELANEFGVFDRWFASVPTSTQPNRFYVHSATSHGCSSNVKKDLVKGFPQKTIFDSLDENGLSFGIYYQNIPATFFFKSLRRLKHLVKFHSYALKFKLDAKLGKLPNYSVVEQRYFDIDLFPANDDHPSHDVAAGQRFVKEVYETLRSSPQWKEMALLITYDEHGGFYDHVPTPVKGVPNPDGIIGPDPFYFGFDRLGVRVPTFLISSWIEKGTVIHEPEGPTPHSQFEHSSIPATVKKLFNLKSHFLTKRDAWAGTFEKYFRIRDSPRQDCPEKLPEVKLSLRPWGAKEDSKLSEFQVELIQLASQLVGDHLLNSYPDIGKNMTVSEGNKYAEDAVQKFLEAGMAALEAGADENTIVTMRPSLTTRTSPSEGTNKYIGSY

SEQ ID NO: 48595 - DNA, 1885 bp, Arabidopsis thaliana
  misc_feature (1)..(1885): Ceres Seq. ID no. 14313182
  misc_feature (1)..(1885): Ortholog of  Ceres SEQ ID NO 14308540 as cited in SEQ ID NO 58898
gaacgaagattctcttgctcgaacaaaaaaattctctccgcgatacttacaaagcacaagtgagctagctttgagaaagattcaatttttgagccttaagattgtgatgggagttgtgtctatttcaagttcagcttcaagatctccactcgggttgggcaacgatcttttgacacatcggtcttcacttaaaaagccatccattgttgcttttaaagccgatgattccagcaattcagctttgatcattcctcctcgtgagcaagttttgattcctgctgaaaagcataatgagaagaagagagaagtaacgaggagaaagccttgtaaaaccccgaaaaaaccgctttccttggaacataattcggctccttcgtgttcgttaggagtagattacaatgaagctgctgcaagacttgaaagcatatacaagcttagtcctgcaacaaccacattagtcgaggatgatgttgaagatggcggctctaaagccaaagtttcacggaggagaaaaaggaaagaaagtggtgaggagaagaaagtggttgtgaggaataatgtgaagaaggaaaaacgtatgagtcttgataaacggattgctttgaagagaaacgttcaagagaaaccagtcgttgcttctgttgataagaaagtaacaaagaggcagcaagaagaggagaagatcgagaggcttgtgcgggactattcagcttctaatgatatagtgagcttggactggaaaaaaatgaagatacctcctgttctttcttctactgaacatgcttggttgttcaagttgatgcaacctatgaaggctcttcttgaagtgaaagatgtattgcaaaagagcttgggaagagagcctagggaagctgaaatagccggggagatcaatatgactgcgggtgaagtaaaaaagaaaatcgaaataggtagagctgcaagaaacaaacttattaagcacaatctccggcttgtcttgtttgttatgaacaaatactttcatgagtttaccaacggaccaaaattccaagacctttgtcaagcgggtatgagagggcttatcacagcaattgaccgctttgagccgaaaaggaagtttcgtctttcgacttatggtttgttttggattagacatgccatcatacggtcaatgacaacttcaaacttcactcgtgtcccatttggacttgaatcggttagagtggagatatataaagcaaagactgagctatggtttgagatgggaagacctccaacggaggacgaggtagttgagagactcaagataacacctgagagataccgtgaagtattgagggctgcaaaaccggttttgtcactaaattcaaaacattcggttactcaagaagaattcatcaacggaatcacagatgttgatggtgttggagctaataacagcagacagcctgctcttctcaggctcgctctcgacgatgtgctcgattcattgaagccgaaagagagtctggttattcgacagaggtacggtcttgatggaaaaggcgacaggactctaggagagatagctggaaatctcaacatctctagagaaatggttaggaaacatgaagtcaaggccttgatgaagcttaagcatcaggccagagttgattaccttcgtcaatacatcgtctaaaaccaaaccgaaccgaactgagccgcctcactcaaccatttgtgcatacttggtatgatttcccgactttacgagatacttcacaccctcttataaccgttgtatagtagtgtatgtaatagcggagttacttatagctgcgttaaatcgatcagtgaatcgcaatcgttgtattatatcattagtatactcatactgaaaagttatacatgtaaagtttgagat

SEQ ID NO: 48596 - protein, 552 aa, Arabidopsis thaliana
  peptide (1)..(552): Ceres Seq. ID no. 14313183
NEDSLARTKKFSPRYLQSTSELALRKIQFLSLKIVMGVVSISSSASRSPLGLGNDLLTHRSSLKKPSIVAFKADDSSNSALIIPPREQVLIPAEKHNEKKREVTRRKPCKTPKKPLSLEHNSAPSCSLGVDYNEAAARLESIYKLSPATTTLVEDDVEDGGSKAKVSRRRKRKESGEEKKVVVRNNVKKEKRMSLDKRIALKRNVQEKPVVASVDKKVTKRQQEEEKIERLVRDYSASNDIVSLDWKKMKIPPVLSSTEHAWLFKLMQPMKALLEVKDVLQKSLGREPREAEIAGEINMTAGEVKKKIEIGRAARNKLIKHNLRLVLFVMNKYFHEFTNGPKFQDLCQAGMRGLITAIDRFEPKRKFRLSTYGLFWIRHAIIRSMTTSNFTRVPFGLESVRVEIYKAKTELWFEMGRPPTEDEVVERLKITPERYREVLRAAKPVLSLNSKHSVTQEEFINGITDVDGVGANNSRQPALLRLALDDVLDSLKPKESLVIRQRYGLDGKGDRTLGEIAGNLNISREMVRKHEVKALMKLKHQARVDYLRQYIV

SEQ ID NO: 48597 - protein, 517 aa, Arabidopsis thaliana
  peptide (1)..(517): Ceres Seq. ID no. 14313184
MGVVSISSSASRSPLGLGNDLLTHRSSLKKPSIVAFKADDSSNSALIIPPREQVLIPAEKHNEKKREVTRRKPCKTPKKPLSLEHNSAPSCSLGVDYNEAAARLESIYKLSPATTTLVEDDVEDGGSKAKVSRRRKRKESGEEKKVVVRNNVKKEKRMSLDKRIALKRNVQEKPVVASVDKKVTKRQQEEEKIERLVRDYSASNDIVSLDWKKMKIPPVLSSTEHAWLFKLMQPMKALLEVKDVLQKSLGREPREAEIAGEINMTAGEVKKKIEIGRAARNKLIKHNLRLVLFVMNKYFHEFTNGPKFQDLCQAGMRGLITAIDRFEPKRKFRLSTYGLFWIRHAIIRSMTTSNFTRVPFGLESVRVEIYKAKTELWFEMGRPPTEDEVVERLKITPERYREVLRAAKPVLSLNSKHSVTQEEFINGITDVDGVGANNSRQPALLRLALDDVLDSLKPKESLVIRQRYGLDGKGDRTLGEIAGNLNISREMVRKHEVKALMKLKHQARVDYLRQYIV

SEQ ID NO: 48598 - protein, 360 aa, Arabidopsis thaliana
  peptide (1)..(360): Ceres Seq. ID no. 14313185
MSLDKRIALKRNVQEKPVVASVDKKVTKRQQEEEKIERLVRDYSASNDIVSLDWKKMKIPPVLSSTEHAWLFKLMQPMKALLEVKDVLQKSLGREPREAEIAGEINMTAGEVKKKIEIGRAARNKLIKHNLRLVLFVMNKYFHEFTNGPKFQDLCQAGMRGLITAIDRFEPKRKFRLSTYGLFWIRHAIIRSMTTSNFTRVPFGLESVRVEIYKAKTELWFEMGRPPTEDEVVERLKITPERYREVLRAAKPVLSLNSKHSVTQEEFINGITDVDGVGANNSRQPALLRLALDDVLDSLKPKESLVIRQRYGLDGKGDRTLGEIAGNLNISREMVRKHEVKALMKLKHQARVDYLRQYIV

SEQ ID NO: 48599 - DNA, 1739 bp, Arabidopsis thaliana
  misc_feature (1)..(1739): Ceres Seq. ID no. 14313206
  misc_feature (1)..(1739): Ortholog of  Ceres SEQ ID NO 15174947 as cited in SEQ ID NO 236
aacaaaaaatggcagaacttattccttggtactacacttcagggtcagggatcgtacttgtacttcaaaccatttttctcttctcgatcgtacgtgctgatttaccaggctcatgggaactcattgtacaagacgccggtatagcttctatgcacacggcggtgacccggttcaacacggtcatccttctagaccgaactaacatcggaccgtcgagaaaggctcttgaccgtcaccggtgccggagagacccaaaagacgccgctttgaaacgcgattgttacgctcactcggttctgttcgaccttggtacaaatcagatcagaccactgatgatacaaaccgacacgtggtgctcgtcgggccagtttttatccgacggatcgttgctacaaacgggtggggataaagacgggtttaaaaagatacgtaaattcgaaccctgtgacccgaacgaaacgtgcgattgggtggagcttcaagataccgaattgataaccggacgctggtacgcttctaaccagatattaccggatggttcggttatcatcgtcggtggtagaggaactaatacggttgagtattaccctccacgcgaaaacggtgccgttccgtttcagtttcttgctgacgtggaagacaaacaaatggataatctctatccgtacgttcatctcctccccgacgacgacggtggcaatctcttcatcttcgccaacagtcgcgccgttaaatacgatcaccggataaacgccgtcgtgaaagagtatccaccgttagacggtggtccgaggaattatccgtcaggtggatcatcggcgatgctagctatccaaggagatttcaccacagcggagattctaatctgcggcggagcacaatccggagccttcacagcacgtgcaattgatgctccggcgcatggaacctgcggacgaatcgtagctaccgcggcggatcctgtttgggtgacggaggagatgccgttcgggagaatcatgggagatatggtgaatttaccgacgggagagattctgatcataaacggagctcaagacggaagccaaggattcgaaatgggatccgatccgtgtttatacccgcttttataccgacccgatcaaccaattggtttacgattcatgacgttgaacccaggaactgtaccgagaatgtaccattccacggcgaatcttttaccggacggtagaattcttctcgccggaagcaatcctcactatttctacaaattcaacgccgaattcccaacggagctacggatcgaagcgttttcaccggagtatctgtcaccggatcgagctaatctccgaccagagatccaagaaatcccgcagatcatacggtacggagaggttttcgacgtgttcgtgaccgtgccgttgccggtggtggggataattcagatgaattggggaagtgcgccttttgcgactcattcgttttctcaaggtcaacggctcgttaagttgaccgttgctccgtctgtgcctgacggagtaggtcgttataggattcagtgtacggctccacctaacggcgccgtttctccgcctgggtattatatggccttcgctgttaaccagggagttcctagcattgctcgatggatacgaatagtttcttgatttaaaaccagaggagatatttaaaatgttaatttgttaaatagttaaacacatcatgtaatataaatattttcatggaaaaacttactccgc

SEQ ID NO: 48600 - protein, 547 aa, Arabidopsis thaliana
  peptide (1)..(547): Ceres Seq. ID no. 14313207
QKMAELIPWYYTSGSGIVLVLQTIFLFSIVRADLPGSWELIVQDAGIASMHTAVTRFNTVILLDRTNIGPSRKALDRHRCRRDPKDAALKRDCYAHSVLFDLGTNQIRPLMIQTDTWCSSGQFLSDGSLLQTGGDKDGFKKIRKFEPCDPNETCDWVELQDTELITGRWYASNQILPDGSVIIVGGRGTNTVEYYPPRENGAVPFQFLADVEDKQMDNLYPYVHLLPDDDGGNLFIFANSRAVKYDHRINAVVKEYPPLDGGPRNYPSGGSSAMLAIQGDFTTAEILICGGAQSGAFTARAIDAPAHGTCGRIVATAADPVWVTEEMPFGRIMGDMVNLPTGEILIINGAQDGSQGFEMGSDPCLYPLLYRPDQPIGLRFMTLNPGTVPRMYHSTANLLPDGRILLAGSNPHYFYKFNAEFPTELRIEAFSPEYLSPDRANLRPEIQEIPQIIRYGEVFDVFVTVPLPVVGIIQMNWGSAPFATHSFSQGQRLVKLTVAPSVPDGVGRYRIQCTAPPNGAVSPPGYYMAFAVNQGVPSIARWIRIVS

SEQ ID NO: 48601 - protein, 545 aa, Arabidopsis thaliana
  peptide (1)..(545): Ceres Seq. ID no. 14313208
MAELIPWYYTSGSGIVLVLQTIFLFSIVRADLPGSWELIVQDAGIASMHTAVTRFNTVILLDRTNIGPSRKALDRHRCRRDPKDAALKRDCYAHSVLFDLGTNQIRPLMIQTDTWCSSGQFLSDGSLLQTGGDKDGFKKIRKFEPCDPNETCDWVELQDTELITGRWYASNQILPDGSVIIVGGRGTNTVEYYPPRENGAVPFQFLADVEDKQMDNLYPYVHLLPDDDGGNLFIFANSRAVKYDHRINAVVKEYPPLDGGPRNYPSGGSSAMLAIQGDFTTAEILICGGAQSGAFTARAIDAPAHGTCGRIVATAADPVWVTEEMPFGRIMGDMVNLPTGEILIINGAQDGSQGFEMGSDPCLYPLLYRPDQPIGLRFMTLNPGTVPRMYHSTANLLPDGRILLAGSNPHYFYKFNAEFPTELRIEAFSPEYLSPDRANLRPEIQEIPQIIRYGEVFDVFVTVPLPVVGIIQMNWGSAPFATHSFSQGQRLVKLTVAPSVPDGVGRYRIQCTAPPNGAVSPPGYYMAFAVNQGVPSIARWIRIVS

SEQ ID NO: 48602 - protein, 498 aa, Arabidopsis thaliana
  peptide (1)..(498): Ceres Seq. ID no. 14313209
MHTAVTRFNTVILLDRTNIGPSRKALDRHRCRRDPKDAALKRDCYAHSVLFDLGTNQIRPLMIQTDTWCSSGQFLSDGSLLQTGGDKDGFKKIRKFEPCDPNETCDWVELQDTELITGRWYASNQILPDGSVIIVGGRGTNTVEYYPPRENGAVPFQFLADVEDKQMDNLYPYVHLLPDDDGGNLFIFANSRAVKYDHRINAVVKEYPPLDGGPRNYPSGGSSAMLAIQGDFTTAEILICGGAQSGAFTARAIDAPAHGTCGRIVATAADPVWVTEEMPFGRIMGDMVNLPTGEILIINGAQDGSQGFEMGSDPCLYPLLYRPDQPIGLRFMTLNPGTVPRMYHSTANLLPDGRILLAGSNPHYFYKFNAEFPTELRIEAFSPEYLSPDRANLRPEIQEIPQIIRYGEVFDVFVTVPLPVVGIIQMNWGSAPFATHSFSQGQRLVKLTVAPSVPDGVGRYRIQCTAPPNGAVSPPGYYMAFAVNQGVPSIARWIRIVS

SEQ ID NO: 48603 - DNA, 1959 bp, Arabidopsis thaliana
  misc_feature (1)..(1959): Ceres Seq. ID no. 15174959
  misc_feature (1)..(1959): Ortholog of  Ceres SEQ ID NO 13592961 as cited in SEQ ID NO 20522
  misc_feature (1)..(1959): Ortholog of  Ceres SEQ ID NO 14303381 as cited in SEQ ID NO 53959
  misc_feature (1)..(1959): Ortholog of  Ceres SEQ ID NO 15226378 as cited in SEQ ID NO 62741
  misc_feature (1)..(1959): Ortholog of  Ceres SEQ ID NO 13597389 as cited in SEQ ID NO 63426
  misc_feature (1)..(1959): Ortholog of  Ceres SEQ ID NO 15169639 as cited in SEQ ID NO 64624
  misc_feature (1)..(1959): Ortholog of  Ceres SEQ ID NO 14303071 as cited in SEQ ID NO 67114
  misc_feature (1)..(1959): Ortholog of  Ceres SEQ ID NO 13595998 as cited in SEQ ID NO 68161
  misc_feature (1)..(1959): Ortholog of  Ceres SEQ ID NO 14303635 as cited in SEQ ID NO 68503
aaatcaatcatacagaagcagctaatggcgttgagaatcaggaaggcgacgacgacacttctcttctccggtgggattactcatggaacggatcggatcgcgagaaccggagcattgctcagccgttggatctcctctgtttcgtcatcttccgctgttgtagcggatgatgaatctggtgggatttacggattgggaagtgcgttgaaagagtatgaagattatagaagatctctctatggtgagatcactcataaggcgttgcttgttgatgctgttggtactctccttgttccagctcaacctactgctcagatatataagaatattggagagaagtacggagtggagtactcggaggctgagatacttactagatacagaagagcttatcagaaaccatggggtggatctcatcttagatatgtaaacgatgcaagacctttctggcagtatatagtgactgcatcaacaggctgctcggattcacagtagagagagctcactagtcccccccccccccgaaaaaaagtcattttgaaaagtttctaacctctaggccacccactcatggctactctgttcatgaagctggtgagcttctttctaattctatctactttttgtctcactactgtgaactcggagccacagtgccataatttcaaatcgatcattagtttcggtgattctattgccgacactggaaacttgctcgccctctccgatcctaccaatctccctaaggtcgcgtttctaccgtacggagaaaccttcttccaccatccgaccggccgtttctcaaacggccgcctcatcatcgatttcattgctgaatttttgggttttccgcttgtgcctcctttttatggatctcaaaatgcaaattttgagaaaggagttaattttgcggttggaggagcaacggcactggaacgttcctttcttgaagagagaggcattcattttccttacaccaacgttagtttagccgtacagcttagtagcttcaaggagagtttgcctaacttatgtgtctctccttcagactgcagagatatgatagaaaattctttgattctcatgggagaaattggagggaatgactataactacgcattctttgtgggcaaaaacattgaagagatcaaagagctggttccgcttgttattgaaactatctcttctgcaatcacggagttgattggtatgggggggaaaacatttctggtgcccggagagttcccgctcggatgctcagtagcctatttgagtttatatcaaacatcaaacatagaagaatatgatcctctaacaggatgtttgaaatggctgaacaagttttcagaataccacgacgagcagcttcaagcagaactcaacagacttcagaagttgtaccctcatgtcaacatcatatacgctgactactacaacacactgttgcgtcttgcccaagaaccagccaaattcgggttcataagcagacccttgccggcttgctgcgctttaggaggaccgtttaacttcacattaggtaggaaacgtgggactcaagtacctgaatgttgtgacgatccttcaaagtatgtgagttgggatggtgttcatatgactgaagctgcatatagattgatggctgagggtatacttaagggaccttatgcgattcctcctttcgattggtcttgcctcagctctgaaattaagaacacacagaattctttgatgaacaactgatgtatgttggtcaaaaatttgagacaagaatactgataatatcatgtatgttcccagtcctgaacatttggtcatttggatcatgtgttgtgtgttactgtgtttgacaatctgtattgttgttatggtaaataacggttgtgttgtatcacacactataacaggtttacgtttacctaaacatattaagttataattaatgggccacaggcccatatt

SEQ ID NO: 48604 - protein, 389 aa, Arabidopsis thaliana
  peptide (1)..(389): Ceres Seq. ID no. 15174960
MATLFMKLVSFFLILSTFCLTTVNSEPQCHNFKSIISFGDSIADTGNLLALSDPTNLPKVAFLPYGETFFHHPTGRFSNGRLIIDFIAEFLGFPLVPPFYGSQNANFEKGVNFAVGGATALERSFLEERGIHFPYTNVSLAVQLSSFKESLPNLCVSPSDCRDMIENSLILMGEIGGNDYNYAFFVGKNIEEIKELVPLVIETISSAITELIGMGGKTFLVPGEFPLGCSVAYLSLYQTSNIEEYDPLTGCLKWLNKFSEYHDEQLQAELNRLQKLYPHVNIIYADYYNTLLRLAQEPAKFGFISRPLPACCALGGPFNFTLGRKRGTQVPECCDDPSKYVSWDGVHMTEAAYRLMAEGILKGPYAIPPFDWSCLSSEIKNTQNSLMNN

SEQ ID NO: 48605 - protein, 384 aa, Arabidopsis thaliana
  peptide (1)..(384): Ceres Seq. ID no. 15174961
MKLVSFFLILSTFCLTTVNSEPQCHNFKSIISFGDSIADTGNLLALSDPTNLPKVAFLPYGETFFHHPTGRFSNGRLIIDFIAEFLGFPLVPPFYGSQNANFEKGVNFAVGGATALERSFLEERGIHFPYTNVSLAVQLSSFKESLPNLCVSPSDCRDMIENSLILMGEIGGNDYNYAFFVGKNIEEIKELVPLVIETISSAITELIGMGGKTFLVPGEFPLGCSVAYLSLYQTSNIEEYDPLTGCLKWLNKFSEYHDEQLQAELNRLQKLYPHVNIIYADYYNTLLRLAQEPAKFGFISRPLPACCALGGPFNFTLGRKRGTQVPECCDDPSKYVSWDGVHMTEAAYRLMAEGILKGPYAIPPFDWSCLSSEIKNTQNSLMNN

SEQ ID NO: 48606 - protein, 226 aa, Arabidopsis thaliana
  peptide (1)..(226): Ceres Seq. ID no. 15174962
MIENSLILMGEIGGNDYNYAFFVGKNIEEIKELVPLVIETISSAITELIGMGGKTFLVPGEFPLGCSVAYLSLYQTSNIEEYDPLTGCLKWLNKFSEYHDEQLQAELNRLQKLYPHVNIIYADYYNTLLRLAQEPAKFGFISRPLPACCALGGPFNFTLGRKRGTQVPECCDDPSKYVSWDGVHMTEAAYRLMAEGILKGPYAIPPFDWSCLSSEIKNTQNSLMNN

SEQ ID NO: 48607 - DNA, 783 bp, Arabidopsis thaliana
  misc_feature (1)..(783): Ceres Seq. ID no. 12575408
  misc_feature (1)..(783): Ortholog of  Ceres SEQ ID NO 13597679 as cited in SEQ ID NO 65073
atggataaaaggtggagtctccaaggtttgactgctcttgtgaccggtggagccagcggaatcggtcatgctatagtagaagaactcgccggttttggggccaaaatccatgtgtgtgacatatcgaaaactctgctcaatcaaagtttatccgaatgggagaagaaagggtttcaagtgagtggttcagtctgcgatgcatccaatcgtctcgaaagagaaacacttatgcaaactgtcaccacaatatttgatggcaagcttaacattcttgtgaacaatgttggcacaattcgcacaaagccaacaatagaatatgaggcagaagatttttcgttccttatttcaacaaacttggaatctgcttatcatctaagccaactttcacatccactcctaaaggcttcaggcaacggaattattacttttatttcctctgctgcagggatcgtatcatttgatgctgcatccatttatggtctaacgaaaggagctttgaatcagctagcacgaaatttggcgtgtgaatgggcaaaagacggcattcgagccaacgcggttgcgcctaattttatcaccactgctctggctaaaccttttctcgaagacgctggttttaacgagattttgtcgagtagaactccacttggtcgcgctggagaaccaagagaggttgcctcacttgtggcttttctgtgtctacctgctgcttcatatattactggtcagaccatttgtgttgatggaggtctcactgttaatggcttctcatatcagccatag

SEQ ID NO: 48608 - protein, 260 aa, Arabidopsis thaliana
  peptide (1)..(260): Ceres Seq. ID no. 12575409
MDKRWSLQGLTALVTGGASGIGHAIVEELAGFGAKIHVCDISKTLLNQSLSEWEKKGFQVSGSVCDASNRLERETLMQTVTTIFDGKLNILVNNVGTIRTKPTIEYEAEDFSFLISTNLESAYHLSQLSHPLLKASGNGIITFISSAAGIVSFDAASIYGLTKGALNQLARNLACEWAKDGIRANAVAPNFITTALAKPFLEDAGFNEILSSRTPLGRAGEPREVASLVAFLCLPAASYITGQTICVDGGLTVNGFSYQP

SEQ ID NO: 48609 - protein, 184 aa, Arabidopsis thaliana
  peptide (1)..(184): Ceres Seq. ID no. 12575410
MQTVTTIFDGKLNILVNNVGTIRTKPTIEYEAEDFSFLISTNLESAYHLSQLSHPLLKASGNGIITFISSAAGIVSFDAASIYGLTKGALNQLARNLACEWAKDGIRANAVAPNFITTALAKPFLEDAGFNEILSSRTPLGRAGEPREVASLVAFLCLPAASYITGQTICVDGGLTVNGFSYQP

SEQ ID NO: 48610 - DNA, 2775 bp, Arabidopsis thaliana; identical to SEQ ID NO: 40224
  misc_feature (1)..(2775): Ceres Seq. ID no. 12344987
  misc_feature (1)..(2775): Ortholog of  Ceres SEQ ID NO 13595900 as cited in SEQ ID NO 69289

SEQ ID NO: 48611 - protein, 701 aa, Arabidopsis thaliana; identical to SEQ ID NO: 40225
  peptide (1)..(701): Ceres Seq. ID no. 12344988

SEQ ID NO: 48612 - protein, 583 aa, Arabidopsis thaliana; identical to SEQ ID NO: 40226
  peptide (1)..(583): Ceres Seq. ID no. 12344989

SEQ ID NO: 48613 - protein, 577 aa, Arabidopsis thaliana; identical to SEQ ID NO: 40227
  peptide (1)..(577): Ceres Seq. ID no. 12344990

SEQ ID NO: 48614 - DNA, 1871 bp, Arabidopsis thaliana; identical to SEQ ID NO: 48272
  misc_feature (1)..(1871): Ceres Seq. ID no. 13578936
  misc_feature (1)..(1871): Ortholog of  Ceres SEQ ID NO 14312423 as cited in SEQ ID NO 55259

SEQ ID NO: 48615 - protein, 622 aa, Arabidopsis thaliana; identical to SEQ ID NO: 48273
  peptide (1)..(622): Ceres Seq. ID no. 13578937

SEQ ID NO: 48616 - protein, 603 aa, Arabidopsis thaliana; identical to SEQ ID NO: 48274
  peptide (1)..(603): Ceres Seq. ID no. 13578938

SEQ ID NO: 48617 - protein, 536 aa, Arabidopsis thaliana; identical to SEQ ID NO: 48275
  peptide (1)..(536): Ceres Seq. ID no. 13578939

SEQ ID NO: 48618 - DNA, 1129 bp, Arabidopsis thaliana
  misc_feature (1)..(1129): Ceres Seq. ID no. 15168772
  misc_feature (1)..(1129): Ortholog of  Ceres SEQ ID NO 15227289 as cited in SEQ ID NO 58851
  misc_feature (1)..(1129): Ortholog of  Ceres SEQ ID NO 13584416 as cited in SEQ ID NO 63441
gagcaaagatctctatttcaatcctctcatggaaactgcttctctttcttttcctgtcccaaacacgagcttcggtgtaaacaaatctatgcctctcggtctaaaccagctcacaccataccaaattcatcagattcagaaccagcttaaccatagacgtagcacaatctcaaacctctctccaaaccgtatcagaatgaagaacttaacaccttctacctccaaaaccaagaatctctacagaggcgtaaggcaaaggcactgggggaaatgggtcgctgagatccgtttgcccaagaaccggacccgtctctggctcgggacattcgaaaccgccgaaaaagccgccttagcttacgaccaagctgcttttcagctccgtggagatatcgcgaagcttaacttcccaaacctcatacacgaagacatgaatcctctcccttcctctgttgataccaagcttcaagctatctgcaaaagtttgagaaaaacagaggaaatttgctctgtttctgatcaaacaaaggagtactctgtttactctgtttcagataaaacagagcttttcctgccaaaaacagagcttttcttgcctaaaagagagcatttggagacaaatgagctctccaatgagtcaccgagaagcgatgagacctcgttgttggatgagtcgcaggcggaatattcatcgtcggataaaacattcctggatttctcggatactgagtttgaagagattggaagtttcgggcttcggaagtttccttcggtggagattgattgggatgcaattagtaaactggccaattcttaaagtcttctattttatattaatcttctgtgcaactgaaattttcaacaagttgcagatgagtttattaggtttgaatctgtcctagttttctttgttggtcgtatagagttttactatgtagctaatctccatgtttggtttggcttggtaagtttttaaggtcctcgtcattcacaaaccggagaaagtttatgtattcaaaagctatgtattatatcctcacatctacttatgagagtgagatcaaagtttgtaaaatgaagtcttgatttcttcttttagttctctctttttaaaaccaaatgtatttctttt

SEQ ID NO: 48619 - protein, 270 aa, Arabidopsis thaliana
  peptide (1)..(270): Ceres Seq. ID no. 15168773
SKDLYFNPLMETASLSFPVPNTSFGVNKSMPLGLNQLTPYQIHQIQNQLNHRRSTISNLSPNRIRMKNLTPSTSKTKNLYRGVRQRHWGKWVAEIRLPKNRTRLWLGTFETAEKAALAYDQAAFQLRGDIAKLNFPNLIHEDMNPLPSSVDTKLQAICKSLRKTEEICSVSDQTKEYSVYSVSDKTELFLPKTELFLPKREHLETNELSNESPRSDETSLLDESQAEYSSSDKTFLDFSDTEFEEIGSFGLRKFPSVEIDWDAISKLANS

SEQ ID NO: 48620 - protein, 261 aa, Arabidopsis thaliana
  peptide (1)..(261): Ceres Seq. ID no. 15168774
METASLSFPVPNTSFGVNKSMPLGLNQLTPYQIHQIQNQLNHRRSTISNLSPNRIRMKNLTPSTSKTKNLYRGVRQRHWGKWVAEIRLPKNRTRLWLGTFETAEKAALAYDQAAFQLRGDIAKLNFPNLIHEDMNPLPSSVDTKLQAICKSLRKTEEICSVSDQTKEYSVYSVSDKTELFLPKTELFLPKREHLETNELSNESPRSDETSLLDESQAEYSSSDKTFLDFSDTEFEEIGSFGLRKFPSVEIDWDAISKLANS

SEQ ID NO: 48621 - protein, 241 aa, Arabidopsis thaliana
  peptide (1)..(241): Ceres Seq. ID no. 15168775
MPLGLNQLTPYQIHQIQNQLNHRRSTISNLSPNRIRMKNLTPSTSKTKNLYRGVRQRHWGKWVAEIRLPKNRTRLWLGTFETAEKAALAYDQAAFQLRGDIAKLNFPNLIHEDMNPLPSSVDTKLQAICKSLRKTEEICSVSDQTKEYSVYSVSDKTELFLPKTELFLPKREHLETNELSNESPRSDETSLLDESQAEYSSSDKTFLDFSDTEFEEIGSFGLRKFPSVEIDWDAISKLANS

SEQ ID NO: 48622 - DNA, 3024 bp, Arabidopsis thaliana
  misc_feature (1)..(3024): Ceres Seq. ID no. 12575116
  misc_feature (1)..(3024): Ortholog of  Ceres SEQ ID NO 14308747 as cited in SEQ ID NO 55372
atggtggatcgcagatcttttggctctataactcctcctctccaattagatatggaacagttgctgtcagaagcccaacacaggtggcttaggcctactgagatttgtgaaattcttcagaactatcacaagtttcatatagcatcagagtctcccacccgacccgccagtggttcactttttctttttgataggaaggtactgagatattttaggaaagacggacataactggaggaagaagaaagatggtaaaaccataagagaagctcatgagaagctcaaggtaggaagcatagatgtgctacattgttactatgcacatggggaagccaacgagaatttccagagacgttgctactggatgcttgaacaacatttgatgcatatcgtttttgtgcactacttgcaggttaagggtaaccggaccagtataggaatgaaagaaaacaattcaaattctgtaaatggcacagcttcagtgaatattgattcaacagcaagcccaactagcacattgtcatcattatgtgaagatgctgataccggggatagtcaacaagcaagttccgtcttacgaccatctcctgaacctcaaactggaaatcgctatggttggacacctgctcctggcatgcgtaatgtttcacaggttcatgggaacagagtcagagaaagtgattcccagagattagttgatgtcagagctttggataccgttgggaattcgctgacaagatttcatgatcagccttattgtaataatttgttgactcagatgcagccttctaatactgactcaatgctggtggaagaaaattcagaaaaaggtgggcggttaaaggcagagcatatcagaaatcctcttcaaactcaatttaattggcaggatgacactgatctggcgttatttgagcaaagtgcacaagataattttgagacattttccagtctccttggcagtgaaaatctgcaaccttttggaattagttatcaagctcctccttcaaatatggactctgaatatatgcctgtaatgaaaatattgcgaagaagcgaagatagtttgaaaaaagtcgatagtttttctaagtgggctattaaagaacttggggagatggaggatttgcagatgcagtcttcacgtggagatattgcatggaccactgttgaatgtgaaactgcagcagctgggatctccttgagcccttctctctctgaggatcagcgtttcaccatagttgatttttggccaaaaagtgcaaagacagacgcagaagttgaggtcatggttattgggacatttctacttagtccgcaagaagtaactaaatataattggtcatgcatgtttggtgaagtggaagttcctgctgagattttagtagatggtgttctttgctgtcatgctccaccgcatacagctggtcacgtccccttttatgttacatgttccaacagatttgcttgcagtgaagtacgagaatttgatttcctttctggttctacccaaaaaatcaatgctacagatgtttatggtacctatacaaatgaagcatcacttcagttgcggtttgagaagatgcttgctcacagggattttgttcacgaacaccatatattcgaagatgttggggacaaacgaagacaaatcagtaaaattatgttgctaaaggaggagaaagagtatctccttccagggacatatcagagagactcaaccaaacaagaaccaaaaggacagctttttagggaactgtttgaagaagaactatatatatggctcatacataaagtgactgaagagggtaaaggtccaaacatattggatgaagatggacagggtattttacactttgttgcagcgcttgggtatgactgggccattaaaccggtgttagcagcaggagttaacattaacttccgtgatgccaatggctggtctgcccttcattgggctgcgtttagtggcagggaggaaactgtcgctgtgcttgtctctctaggtgctgatgctggggcattaacggatccatctccagagcttccattgggtaaaacagcagctgatttggcttacgcaaatggacacaggggaatttcgggatttcttgcagagtcttccttaactagttatcttgaaaagctaacagtggactcaaaggaaaatagccctgccaactcttgtggagaaaaagctgttcaaacagtctctgagcgaaccgctgctcctatgacctatggcgatgtaccagagaaactttccttgaaggattcacttactgctgtccgtaatgctacgcaagcggctgatcgtctccatcaagtattcaggatgcaatcattccaacggaaacagctgtgtgatattggcgatgatgaaaagattgatatctccgaccagttagctgtttcttttgcagcttctaaaactaagaatccaggacagggtgatgtctctcttagttgtgctgctacccatatccagaagaaatatcgtggttggaagaagagaaaagagtttcttttaatccgacaaagaatcgttaaaattcaggctcatgtgagaggacatcaggtccggaaacaataccgaacagtcatctggtctgtgggattactcgagaaaatcattttgcgttggagacgcaaaggtaatggtttgagagggtttaaacgcaatgcagtcgccaaaaccgtggaaccggaaccgcctgtatcagctatatgtcctaggatcccacaggaagatgagtatgattatcttaaagagggaagaaaacaaacagaggaaaggctacagaaggctctgactcgtgttaagtcgatggttcaatacccagaagcacgggatcaataccgtagactcctaacggttgttgagggcttccgtgaaaatgaggcttcatcaagtgcatctataaacaataaagaagaagaagcagtcaactgtgaagaagacgattttattgacattgagtctcttttgaacgatgacacattgatgatgtctatttctccttga

SEQ ID NO: 48623 - protein, 1007 aa, Arabidopsis thaliana
  peptide (1)..(1007): Ceres Seq. ID no. 12575117
MVDRRSFGSITPPLQLDMEQLLSEAQHRWLRPTEICEILQNYHKFHIASESPTRPASGSLFLFDRKVLRYFRKDGHNWRKKKDGKTIREAHEKLKVGSIDVLHCYYAHGEANENFQRRCYWMLEQHLMHIVFVHYLQVKGNRTSIGMKENNSNSVNGTASVNIDSTASPTSTLSSLCEDADTGDSQQASSVLRPSPEPQTGNRYGWTPAPGMRNVSQVHGNRVRESDSQRLVDVRALDTVGNSLTRFHDQPYCNNLLTQMQPSNTDSMLVEENSEKGGRLKAEHIRNPLQTQFNWQDDTDLALFEQSAQDNFETFSSLLGSENLQPFGISYQAPPSNMDSEYMPVMKILRRSEDSLKKVDSFSKWAIKELGEMEDLQMQSSRGDIAWTTVECETAAAGISLSPSLSEDQRFTIVDFWPKSAKTDAEVEVMVIGTFLLSPQEVTKYNWSCMFGEVEVPAEILVDGVLCCHAPPHTAGHVPFYVTCSNRFACSEVREFDFLSGSTQKINATDVYGTYTNEASLQLRFEKMLAHRDFVHEHHIFEDVGDKRRQISKIMLLKEEKEYLLPGTYQRDSTKQEPKGQLFRELFEEELYIWLIHKVTEEGKGPNILDEDGQGILHFVAALGYDWAIKPVLAAGVNINFRDANGWSALHWAAFSGREETVAVLVSLGADAGALTDPSPELPLGKTAADLAYANGHRGISGFLAESSLTSYLEKLTVDSKENSPANSCGEKAVQTVSERTAAPMTYGDVPEKLSLKDSLTAVRNATQAADRLHQVFRMQSFQRKQLCDIGDDEKIDISDQLAVSFAASKTKNPGQGDVSLSCAATHIQKKYRGWKKRKEFLLIRQRIVKIQAHVRGHQVRKQYRTVIWSVGLLEKIILRWRRKGNGLRGFKRNAVAKTVEPEPPVSAICPRIPQEDEYDYLKEGRKQTEERLQKALTRVKSMVQYPEARDQYRRLLTVVEGFRENEASSSASINNKEEEAVNCEEDDFIDIESLLNDDTLMMSISP

SEQ ID NO: 48624 - protein, 990 aa, Arabidopsis thaliana
  peptide (1)..(990): Ceres Seq. ID no. 12575118
MEQLLSEAQHRWLRPTEICEILQNYHKFHIASESPTRPASGSLFLFDRKVLRYFRKDGHNWRKKKDGKTIREAHEKLKVGSIDVLHCYYAHGEANENFQRRCYWMLEQHLMHIVFVHYLQVKGNRTSIGMKENNSNSVNGTASVNIDSTASPTSTLSSLCEDADTGDSQQASSVLRPSPEPQTGNRYGWTPAPGMRNVSQVHGNRVRESDSQRLVDVRALDTVGNSLTRFHDQPYCNNLLTQMQPSNTDSMLVEENSEKGGRLKAEHIRNPLQTQFNWQDDTDLALFEQSAQDNFETFSSLLGSENLQPFGISYQAPPSNMDSEYMPVMKILRRSEDSLKKVDSFSKWAIKELGEMEDLQMQSSRGDIAWTTVECETAAAGISLSPSLSEDQRFTIVDFWPKSAKTDAEVEVMVIGTFLLSPQEVTKYNWSCMFGEVEVPAEILVDGVLCCHAPPHTAGHVPFYVTCSNRFACSEVREFDFLSGSTQKINATDVYGTYTNEASLQLRFEKMLAHRDFVHEHHIFEDVGDKRRQISKIMLLKEEKEYLLPGTYQRDSTKQEPKGQLFRELFEEELYIWLIHKVTEEGKGPNILDEDGQGILHFVAALGYDWAIKPVLAAGVNINFRDANGWSALHWAAFSGREETVAVLVSLGADAGALTDPSPELPLGKTAADLAYANGHRGISGFLAESSLTSYLEKLTVDSKENSPANSCGEKAVQTVSERTAAPMTYGDVPEKLSLKDSLTAVRNATQAADRLHQVFRMQSFQRKQLCDIGDDEKIDISDQLAVSFAASKTKNPGQGDVSLSCAATHIQKKYRGWKKRKEFLLIRQRIVKIQAHVRGHQVRKQYRTVIWSVGLLEKIILRWRRKGNGLRGFKRNAVAKTVEPEPPVSAICPRIPQEDEYDYLKEGRKQTEERLQKALTRVKSMVQYPEARDQYRRLLTVVEGFRENEASSSASINNKEEEAVNCEEDDFIDIESLLNDDTLMMSISP

SEQ ID NO: 48625 - protein, 886 aa, Arabidopsis thaliana
  peptide (1)..(886): Ceres Seq. ID no. 12575119
MLEQHLMHIVFVHYLQVKGNRTSIGMKENNSNSVNGTASVNIDSTASPTSTLSSLCEDADTGDSQQASSVLRPSPEPQTGNRYGWTPAPGMRNVSQVHGNRVRESDSQRLVDVRALDTVGNSLTRFHDQPYCNNLLTQMQPSNTDSMLVEENSEKGGRLKAEHIRNPLQTQFNWQDDTDLALFEQSAQDNFETFSSLLGSENLQPFGISYQAPPSNMDSEYMPVMKILRRSEDSLKKVDSFSKWAIKELGEMEDLQMQSSRGDIAWTTVECETAAAGISLSPSLSEDQRFTIVDFWPKSAKTDAEVEVMVIGTFLLSPQEVTKYNWSCMFGEVEVPAEILVDGVLCCHAPPHTAGHVPFYVTCSNRFACSEVREFDFLSGSTQKINATDVYGTYTNEASLQLRFEKMLAHRDFVHEHHIFEDVGDKRRQISKIMLLKEEKEYLLPGTYQRDSTKQEPKGQLFRELFEEELYIWLIHKVTEEGKGPNILDEDGQGILHFVAALGYDWAIKPVLAAGVNINFRDANGWSALHWAAFSGREETVAVLVSLGADAGALTDPSPELPLGKTAADLAYANGHRGISGFLAESSLTSYLEKLTVDSKENSPANSCGEKAVQTVSERTAAPMTYGDVPEKLSLKDSLTAVRNATQAADRLHQVFRMQSFQRKQLCDIGDDEKIDISDQLAVSFAASKTKNPGQGDVSLSCAATHIQKKYRGWKKRKEFLLIRQRIVKIQAHVRGHQVRKQYRTVIWSVGLLEKIILRWRRKGNGLRGFKRNAVAKTVEPEPPVSAICPRIPQEDEYDYLKEGRKQTEERLQKALTRVKSMVQYPEARDQYRRLLTVVEGFRENEASSSASINNKEEEAVNCEEDDFIDIESLLNDDTLMMSISP

SEQ ID NO: 48626 - DNA, 2038 bp, Arabidopsis thaliana; identical to SEQ ID NO: 45643
  misc_feature (1)..(2038): Ceres Seq. ID no. 13591671
  misc_feature (1)..(2038): Ortholog of  Ceres SEQ ID NO 14314585 as cited in SEQ ID NO 59345

SEQ ID NO: 48627 - protein, 531 aa, Arabidopsis thaliana; identical to SEQ ID NO: 45644
  peptide (1)..(531): Ceres Seq. ID no. 13591672

SEQ ID NO: 48628 - protein, 529 aa, Arabidopsis thaliana; identical to SEQ ID NO: 45645
  peptide (1)..(529): Ceres Seq. ID no. 13591673

SEQ ID NO: 48629 - protein, 480 aa, Arabidopsis thaliana; identical to SEQ ID NO: 45646
  peptide (1)..(480): Ceres Seq. ID no. 13591674

SEQ ID NO: 48630 - DNA, 1561 bp, Arabidopsis thaliana
  misc_feature (1)..(1561): Ceres Seq. ID no. 13578940
  misc_feature (1)..(1561): Ortholog of  Ceres SEQ ID NO 15169627 as cited in SEQ ID NO 64517
  misc_feature (1)..(1561): Ortholog of  Ceres SEQ ID NO 14307952 as cited in SEQ ID NO 66029
  misc_feature (1)..(1561): Ortholog of  Ceres SEQ ID NO 12614124 as cited in SEQ ID NO 68392
gaaagagcaaaccagtgaaggaaaaatggagatatggttacttatcttgggctcgctcttcctctctctccttgtcaatcacctcctctttcgccgccgtgactccttctcctctcttccattaccacctgaccctaactttttccctttcattggaaccctcaaatggctccggaaaggtttaggtggtctcgacaactacctccgctccgtccaccaccatctcggtcccatcatcaccctccgtatcacttcccgccccgccatcttcgtcaccgatcgttctcttgctcaccaggctctcgttttgaacggtgccgttttcgccgatcgtccaccggcggaatcgatcagtaagattatttcgagtaaccaacataacatcagctcttgtttatatggagctacgtggcgtcttcttcgccggaatctcacttctgagattcttcacccctcgcgcctgagatcttactctcatgcgcggcgttgggttcttgagattctttttggtcgatttggtaaaaacagaggtgaagaaccgattgttgttgttgatcatcttcactatgcgatgtttgcgcttcttgttctcatgtgttttggagataagcttgacgagaagcaaataaaacaagtggaatatgttcagagacgacagcttcttggattttccagatttaacatccttaccctttggcctaagttcactaaattgatttatcgaaagagatgggaagagttcttccagatgcagagcgaacagcaggatgttttgcttccgctgattcgtgctcggaggaagatcgttgatgagaggaagaagagatcatcagaggaagaaaaagacaacaaagagtatgtacaatcatatgttgatactctgctcgatgtggagcttccagatgagaagaggaagctaaacgaggatgagattgtgagtttgtgttcggagtttcttaatgccgggactgatacaactgccaccgcgttgcaatggatcatggcgaaccttgtgaaaaacccggagattcagaggaggttatatgaggagatcaaaagcatagttggggaagaagcaaaggaagtagaggaacaagacgcgcaaaagatgccgtatctaaaggcagtggtgatggagggtctccgaagacatcctccgggacattttgtgctcccccacagtgtcactgaggacactgtgttaggaggatacaaagtgccgaagaaggggacaattaatttcatggtggcagagatagggagggatccaaaagtgtgggaggaaccaatggcgtttaagccagagaggtttatggaagaagcggtggacataaccggaagcagagggataaagatgatgccgtttggagcgggaagaaggatatgtcccgggattgggctagcgatgctgcatcttgagtactatgtggcgaatatggtgagggagtttgagtggcaggaggtccaaggtcatgaagtggacttgacggagaagctcgagtttaccgtagtcatgaagcatccgcttaaggcccttgctgttcctaggagaagtcactag

SEQ ID NO: 48631 - protein, 519 aa, Arabidopsis thaliana
  peptide (1)..(519): Ceres Seq. ID no. 13578941
KEQTSEGKMEIWLLILGSLFLSLLVNHLLFRRRDSFSSLPLPPDPNFFPFIGTLKWLRKGLGGLDNYLRSVHHHLGPIITLRITSRPAIFVTDRSLAHQALVLNGAVFADRPPAESISKIISSNQHNISSCLYGATWRLLRRNLTSEILHPSRLRSYSHARRWVLEILFGRFGKNRGEEPIVVVDHLHYAMFALLVLMCFGDKLDEKQIKQVEYVQRRQLLGFSRFNILTLWPKFTKLIYRKRWEEFFQMQSEQQDVLLPLIRARRKIVDERKKRSSEEEKDNKEYVQSYVDTLLDVELPDEKRKLNEDEIVSLCSEFLNAGTDTTATALQWIMANLVKNPEIQRRLYEEIKSIVGEEAKEVEEQDAQKMPYLKAVVMEGLRRHPPGHFVLPHSVTEDTVLGGYKVPKKGTINFMVAEIGRDPKVWEEPMAFKPERFMEEAVDITGSRGIKMMPFGAGRRICPGIGLAMLHLEYYVANMVREFEWQEVQGHEVDLTEKLEFTVVMKHPLKALAVPRRSH

SEQ ID NO: 48632 - protein, 511 aa, Arabidopsis thaliana
  peptide (1)..(511): Ceres Seq. ID no. 13578942
MEIWLLILGSLFLSLLVNHLLFRRRDSFSSLPLPPDPNFFPFIGTLKWLRKGLGGLDNYLRSVHHHLGPIITLRITSRPAIFVTDRSLAHQALVLNGAVFADRPPAESISKIISSNQHNISSCLYGATWRLLRRNLTSEILHPSRLRSYSHARRWVLEILFGRFGKNRGEEPIVVVDHLHYAMFALLVLMCFGDKLDEKQIKQVEYVQRRQLLGFSRFNILTLWPKFTKLIYRKRWEEFFQMQSEQQDVLLPLIRARRKIVDERKKRSSEEEKDNKEYVQSYVDTLLDVELPDEKRKLNEDEIVSLCSEFLNAGTDTTATALQWIMANLVKNPEIQRRLYEEIKSIVGEEAKEVEEQDAQKMPYLKAVVMEGLRRHPPGHFVLPHSVTEDTVLGGYKVPKKGTINFMVAEIGRDPKVWEEPMAFKPERFMEEAVDITGSRGIKMMPFGAGRRICPGIGLAMLHLEYYVANMVREFEWQEVQGHEVDLTEKLEFTVVMKHPLKALAVPRRSH

SEQ ID NO: 48633 - protein, 329 aa, Arabidopsis thaliana
  peptide (1)..(329): Ceres Seq. ID no. 13578943
MFALLVLMCFGDKLDEKQIKQVEYVQRRQLLGFSRFNILTLWPKFTKLIYRKRWEEFFQMQSEQQDVLLPLIRARRKIVDERKKRSSEEEKDNKEYVQSYVDTLLDVELPDEKRKLNEDEIVSLCSEFLNAGTDTTATALQWIMANLVKNPEIQRRLYEEIKSIVGEEAKEVEEQDAQKMPYLKAVVMEGLRRHPPGHFVLPHSVTEDTVLGGYKVPKKGTINFMVAEIGRDPKVWEEPMAFKPERFMEEAVDITGSRGIKMMPFGAGRRICPGIGLAMLHLEYYVANMVREFEWQEVQGHEVDLTEKLEFTVVMKHPLKALAVPRRSH

SEQ ID NO: 48634 - DNA, 1027 bp, Arabidopsis thaliana
  misc_feature (1)..(1027): Ceres Seq. ID no. 12575158
  misc_feature (1)..(1027): Ortholog of  Ceres SEQ ID NO 13595072 as cited in SEQ ID NO 55971
aatcactctcaccagtcacaaccaaaaaaaagaaaacacaaaaacaaagattataatggcttcctcaaccatggctttgtcctcccctgccttcgccggaaaggctgtgaagcctgccgcatcagatgtcctcggaagcggccgtgtgaccatgaggaagactgtcgccaagccaaagggtccatcaggcagcccatggtacggatctgaccgagtcaagtacttgggtccattctccggcgagcccccgagctaccttaccggtgagttccccggtgactacggatgggacaccgctggtctatccgccgacccagagaccttcgccaggaaccgtgagctagaagttatccacagcagatgggccatgctcggagccctaggctgcgttttccctgagctattggctaggaacggagtgaagttcggagaagcggtttggttcaaggccggttcacagatcttcagcgacggaggattggactacttgggcaacccgagcttggtccacgctcagagcatcttagccatttgggctactcaagttatcctcatgggagctgttgaaggctacagagtcgccggagatggtccattgggagaagcagaggacttgctttacccaggtggcagcttcgacccattgggcctcgctactgaccccgaggctttcgcagagttgaaggtgaaggagctcaagaacggaaggttggctatgttctctatgtttggattcttcgttcaagccatcgtcaccggaaagggacctttggagaacctcgccgaccatttggccgacccagtcaacaacaacgcttgggccttcgccaccaacttcgtccccggaaagtgagcggctgcttattatgtgaatgagagcagagaaagagagtttgtttgtggtctattctatgtaaatttgtgaactttcctttgtggtatctttgtatagaaatcgaacctctttttctctaactgtgttggcgttttatctgaagactcaattgaattgaaatatccactcttg

SEQ ID NO: 48635 - protein, 283 aa, Arabidopsis thaliana
  peptide (1)..(283): Ceres Seq. ID no. 12575159
ITLTSHNQKKENTKTKIIMASSTMALSSPAFAGKAVKPAASDVLGSGRVTMRKTVAKPKGPSGSPWYGSDRVKYLGPFSGEPPSYLTGEFPGDYGWDTAGLSADPETFARNRELEVIHSRWAMLGALGCVFPELLARNGVKFGEAVWFKAGSQIFSDGGLDYLGNPSLVHAQSILAIWATQVILMGAVEGYRVAGDGPLGEAEDLLYPGGSFDPLGLATDPEAFAELKVKELKNGRLAMFSMFGFFVQAIVTGKGPLENLADHLADPVNNNAWAFATNFVPGK

SEQ ID NO: 48636 - protein, 265 aa, Arabidopsis thaliana; identical to SEQ ID NO: 29587
  peptide (1)..(265): Ceres Seq. ID no. 12575160

SEQ ID NO: 48637 - protein, 260 aa, Arabidopsis thaliana; identical to SEQ ID NO: 29588
  peptide (1)..(260): Ceres Seq. ID no. 12575161

SEQ ID NO: 48638 - DNA, 1232 bp, Arabidopsis thaliana
  misc_feature (1)..(1232): Ceres Seq. ID no. 15168779
  misc_feature (1)..(1232): Ortholog of  Ceres SEQ ID NO 13595861 as cited in SEQ ID NO 58153
  misc_feature (1)..(1232): Ortholog of  Ceres SEQ ID NO 13584292 as cited in SEQ ID NO 63687
ggcgtacgtcaatttgtagaagcaatctcactttttccctttctctgtacatcatcatccttcaagctcggagctctctcttcccgccggcgatctcctccgcttctctccgattttaagtcgatcgaatggggaaaatcaagaaagtgaatcaaaggggtcatattgctacaccgtatccatcaccatgttgtaagaaagaatgggctggctcaacctgtccagtatgcttggagtctccacacaatgcggttcttctcctgtgttcgtcttatcacaaaggatgccgtccttacatgtgtgctacaaacagccgttttgccaactgccttgatcaatacaggaaatcctacggtaacgaaaactcaggacaacccgagcttttgtgtccactgtgtagaggtcaagtgaaaggctggactgttgtgaaagatgctcggatgcattttaactccaagagaaggacttgtatgcaggataactgttcctttttaggaaatttccgaaagctcaagaaacacatgaaggaaaaacacccacatgcttgcccaagagccattgatccagctttagaaactaaatggaagaggcttgagagggaaagagacagaagagacgtgataagcacgataatgtcatcgacaccaggtgctgttgtgttgggagattatgtgatagagccgcataaccgaggtgtttatgatgaagaagacgaagaagaagattacagctcagatgactctctaagcaacgggatactggatctagaatcatcatggcaaggacaaagccatcatattcggtttcttgatatggaatcaagtgacttcgcatcctcttccagctcccctgcttctccaagccgttcgcttcaccgtttgctctttccaaggaaccagagaggcggcaatagaggagcagtataaaaaggctaacatgactagccaattagccatacacagggaattggaaaaaaaaaactcgcagtcgtccctttcttttatttattttcatgtaaattattgtattctgtgtaattgtattattgtttctgcattgttgtactttaatgaggaatgatctcttatgcctcatttcataatttctcttttatttccactttttttcctctgtatagatatgatcttcatcttcctcaagttctggaagaacaataaaaaggttatgtgaaaagaaaagaaaagaaaaaaagcttttctcacttcttaacg

SEQ ID NO: 48639 - protein, 265 aa, Arabidopsis thaliana
  peptide (1)..(265): Ceres Seq. ID no. 15168780
MGKIKKVNQRGHIATPYPSPCCKKEWAGSTCPVCLESPHNAVLLLCSSYHKGCRPYMCATNSRFANCLDQYRKSYGNENSGQPELLCPLCRGQVKGWTVVKDARMHFNSKRRTCMQDNCSFLGNFRKLKKHMKEKHPHACPRAIDPALETKWKRLERERDRRDVISTIMSSTPGAVVLGDYVIEPHNRGVYDEEDEEEDYSSDDSLSNGILDLESSWQGQSHHIRFLDMESSDFASSSSSPASPSRSLHRLLFPRNQRGGNRGAV

SEQ ID NO: 48640 - protein, 209 aa, Arabidopsis thaliana
  peptide (1)..(209): Ceres Seq. ID no. 15168781
MCATNSRFANCLDQYRKSYGNENSGQPELLCPLCRGQVKGWTVVKDARMHFNSKRRTCMQDNCSFLGNFRKLKKHMKEKHPHACPRAIDPALETKWKRLERERDRRDVISTIMSSTPGAVVLGDYVIEPHNRGVYDEEDEEEDYSSDDSLSNGILDLESSWQGQSHHIRFLDMESSDFASSSSSPASPSRSLHRLLFPRNQRGGNRGAV

SEQ ID NO: 48641 - protein, 161 aa, Arabidopsis thaliana
  peptide (1)..(161): Ceres Seq. ID no. 15168782
MHFNSKRRTCMQDNCSFLGNFRKLKKHMKEKHPHACPRAIDPALETKWKRLERERDRRDVISTIMSSTPGAVVLGDYVIEPHNRGVYDEEDEEEDYSSDDSLSNGILDLESSWQGQSHHIRFLDMESSDFASSSSSPASPSRSLHRLLFPRNQRGGNRGAV

SEQ ID NO: 48642 - DNA, 2383 bp, Arabidopsis thaliana
  misc_feature (1)..(2383): Ceres Seq. ID no. 13578847
  misc_feature (1)..(2383): Ortholog of  Ceres SEQ ID NO 15225907 as cited in SEQ ID NO 0
ggtcccaaatccaaaattactccttcttcttcgctgtaacgctttatacctaatcggagataaaacaatgcaatcgtcgaaaggacggcggaaagttggctccacaaccgccggagccggtatagattcggcggagaagctcgacgagctcttgatatcgtctgccatttgtaacggtgaagatttaggaccatttgttcggaaaactttcggtacagggaaaccagagactcttcttcaccatctcaagtttttcgcacgatctaaggaatcagagatcgaagaggtatgtaaagctcactatcaagactttatccacgccgtagacgatcttaaatcgcttctctcagatgttgaatcgcttaaatctgcgctttccgattcaaactctaaactccaatctgttgcggcgccgcttctttcgtctctcgattcgcttgttgaggctcagactgtgtctaagaacgtcgatctggcgattggagcggtgactcattgtgttcgtgttatggaacttgtctctcgagctaatcagcatcttcagagcggtaatttctacatggcgttgaaatgtgtggactcgattgagagtgatttcatggagaaaactccttcgtcaacgctgaaacggatgcttgagaataggattccggcgattcgatcttatgtggagaggaaagtgaataaggagtttggagattggttggttgagatccgtgtggtgagtcggaatttaggtcagttggctattggtgaagcttccgcggctcgtcagcgagaggaggagctcaggatcaagcagagacaagcggaggagcagagtagacttagtctacgcgattgcgtttatgcgctaaacgaagaagaggatgatgaatttggttctggccatgaaggcagcgatggtggtagttccggaggtggattgctaggttttgatttgacaccactttatagagcttatcacattcatcagacactatctcttggggatacttttaagcagtactattataacaatagggatcttcagcttacctctgacttccagattgctgggtttttcatagtagaggatagagttttaaggactggaggagggttgatttcgaagctggaagtggagactttgtgggatactgctgttactaagatgtgtgctgtgttggaggatcagttctctagaatgcagacggctaatcatctcttactgattaaggattatgtgagcttgttgggggtgagtctacgcagggacaagtatcatgagttgttactatctgattgccgtaaacagatcacagaagctttatcagcagataagtttgagcagatgttgatgaagaaagaatatgagtattccatgaatgtgctctctttccagttacaaacatcagaaatagtaccggcattccctttcattgctccattttcgaccaccgtcccagattgttgccggattgtgaggtcttttatcgaggattcggttagtttcatgtctcacggaggtcagcttgatttctatgatgtagtgaagaagtatctggataggcttctaggcgaggttctcgatgaggctctgttgaagctgattagcacgtcggttcatggagtttctcaggcaatgcaagttgcagcaaacatggccgtatttgaacgagcttgcgatttcttcttccgtcacgctgcacatctttcaggagttcctttgagaatggcggagagaggtaggaggcatttcccattgacgaaatctcaaaacactgcagaagatacactctcaggaatgcttaagaagaagatagatggtttcatgacattactcgagaatgtcaattggacaagcgacgatataccacaaggtgggaatgagtacatgaacgaagtgttgatctacttggaaactttggtttccaccgcacaacagatcttacccgctaaagtcttgaaaagggttttgcgtgatgtccttgctcacatttctgagaaaatcgttggaacgttatgcggggatctagtaaaaagattgagcatggctgcaatcaaaggacttgatgtggatattcagttgttggactcgtttacagagaacctaactccattgctcacggataaagaagcaagagagatgaaaaaagcgtttgtcgagataagacagatgatcaatttacttctgagtagtcatcctgagaattttgtaaacccggtgatcagagaaagaagctacaatgctttggattaccggaaagtagccacggtttcagagaaattcagagatccatcagatagtattttcgggacttttggaacaagagggtcgaggcaaaacccgaagaacaaatctttagatgcgttgataaagagattgaaagatgtgagctga

SEQ ID NO: 48643 - protein, 793 aa, Arabidopsis thaliana
  peptide (1)..(793): Ceres Seq. ID no. 13578848
VPNPKLLLLLRCNALYLIGDKTMQSSKGRRKVGSTTAGAGIDSAEKLDELLISSAICNGEDLGPFVRKTFGTGKPETLLHHLKFFARSKESEIEEVCKAHYQDFIHAVDDLKSLLSDVESLKSALSDSNSKLQSVAAPLLSSLDSLVEAQTVSKNVDLAIGAVTHCVRVMELVSRANQHLQSGNFYMALKCVDSIESDFMEKTPSSTLKRMLENRIPAIRSYVERKVNKEFGDWLVEIRVVSRNLGQLAIGEASAARQREEELRIKQRQAEEQSRLSLRDCVYALNEEEDDEFGSGHEGSDGGSSGGGLLGFDLTPLYRAYHIHQTLSLGDTFKQYYYNNRDLQLTSDFQIAGFFIVEDRVLRTGGGLISKLEVETLWDTAVTKMCAVLEDQFSRMQTANHLLLIKDYVSLLGVSLRRDKYHELLLSDCRKQITEALSADKFEQMLMKKEYEYSMNVLSFQLQTSEIVPAFPFIAPFSTTVPDCCRIVRSFIEDSVSFMSHGGQLDFYDVVKKYLDRLLGEVLDEALLKLISTSVHGVSQAMQVAANMAVFERACDFFFRHAAHLSGVPLRMAERGRRHFPLTKSQNTAEDTLSGMLKKKIDGFMTLLENVNWTSDDIPQGGNEYMNEVLIYLETLVSTAQQILPAKVLKRVLRDVLAHISEKIVGTLCGDLVKRLSMAAIKGLDVDIQLLDSFTENLTPLLTDKEAREMKKAFVEIRQMINLLLSSHPENFVNPVIRERSYNALDYRKVATVSEKFRDPSDSIFGTFGTRGSRQNPKNKSLDALIKRLKDVS

SEQ ID NO: 48644 - protein, 771 aa, Arabidopsis thaliana
  peptide (1)..(771): Ceres Seq. ID no. 13578849
MQSSKGRRKVGSTTAGAGIDSAEKLDELLISSAICNGEDLGPFVRKTFGTGKPETLLHHLKFFARSKESEIEEVCKAHYQDFIHAVDDLKSLLSDVESLKSALSDSNSKLQSVAAPLLSSLDSLVEAQTVSKNVDLAIGAVTHCVRVMELVSRANQHLQSGNFYMALKCVDSIESDFMEKTPSSTLKRMLENRIPAIRSYVERKVNKEFGDWLVEIRVVSRNLGQLAIGEASAARQREEELRIKQRQAEEQSRLSLRDCVYALNEEEDDEFGSGHEGSDGGSSGGGLLGFDLTPLYRAYHIHQTLSLGDTFKQYYYNNRDLQLTSDFQIAGFFIVEDRVLRTGGGLISKLEVETLWDTAVTKMCAVLEDQFSRMQTANHLLLIKDYVSLLGVSLRRDKYHELLLSDCRKQITEALSADKFEQMLMKKEYEYSMNVLSFQLQTSEIVPAFPFIAPFSTTVPDCCRIVRSFIEDSVSFMSHGGQLDFYDVVKKYLDRLLGEVLDEALLKLISTSVHGVSQAMQVAANMAVFERACDFFFRHAAHLSGVPLRMAERGRRHFPLTKSQNTAEDTLSGMLKKKIDGFMTLLENVNWTSDDIPQGGNEYMNEVLIYLETLVSTAQQILPAKVLKRVLRDVLAHISEKIVGTLCGDLVKRLSMAAIKGLDVDIQLLDSFTENLTPLLTDKEAREMKKAFVEIRQMINLLLSSHPENFVNPVIRERSYNALDYRKVATVSEKFRDPSDSIFGTFGTRGSRQNPKNKSLDALIKRLKDVS

SEQ ID NO: 48645 - protein, 624 aa, Arabidopsis thaliana
  peptide (1)..(624): Ceres Seq. ID no. 13578850
MELVSRANQHLQSGNFYMALKCVDSIESDFMEKTPSSTLKRMLENRIPAIRSYVERKVNKEFGDWLVEIRVVSRNLGQLAIGEASAARQREEELRIKQRQAEEQSRLSLRDCVYALNEEEDDEFGSGHEGSDGGSSGGGLLGFDLTPLYRAYHIHQTLSLGDTFKQYYYNNRDLQLTSDFQIAGFFIVEDRVLRTGGGLISKLEVETLWDTAVTKMCAVLEDQFSRMQTANHLLLIKDYVSLLGVSLRRDKYHELLLSDCRKQITEALSADKFEQMLMKKEYEYSMNVLSFQLQTSEIVPAFPFIAPFSTTVPDCCRIVRSFIEDSVSFMSHGGQLDFYDVVKKYLDRLLGEVLDEALLKLISTSVHGVSQAMQVAANMAVFERACDFFFRHAAHLSGVPLRMAERGRRHFPLTKSQNTAEDTLSGMLKKKIDGFMTLLENVNWTSDDIPQGGNEYMNEVLIYLETLVSTAQQILPAKVLKRVLRDVLAHISEKIVGTLCGDLVKRLSMAAIKGLDVDIQLLDSFTENLTPLLTDKEAREMKKAFVEIRQMINLLLSSHPENFVNPVIRERSYNALDYRKVATVSEKFRDPSDSIFGTFGTRGSRQNPKNKSLDALIKRLKDVS

SEQ ID NO: 48646 - DNA, 2049 bp, Arabidopsis thaliana; identical to SEQ ID NO: 48182
  misc_feature (1)..(2049): Ceres Seq. ID no. 12575434
  misc_feature (1)..(2049): Ortholog of  Ceres SEQ ID NO 15169623 as cited in SEQ ID NO 67523

SEQ ID NO: 48647 - protein, 595 aa, Arabidopsis thaliana; identical to SEQ ID NO: 48183
  peptide (1)..(595): Ceres Seq. ID no. 12575435

SEQ ID NO: 48648 - protein, 593 aa, Arabidopsis thaliana; identical to SEQ ID NO: 48184
  peptide (1)..(593): Ceres Seq. ID no. 12575436

SEQ ID NO: 48649 - protein, 496 aa, Arabidopsis thaliana; identical to SEQ ID NO: 48185
  peptide (1)..(496): Ceres Seq. ID no. 12575437

SEQ ID NO: 48650 - DNA, 1677 bp, Arabidopsis thaliana
  misc_feature (1)..(1677): Ceres Seq. ID no. 13618556
  misc_feature (1)..(1677): Ortholog of  Ceres SEQ ID NO 14302343 as cited in SEQ ID NO 67343
ccaactacgttcacagagagactcataaaccataactctctctccctctctctctgctcgaatcgaaccgttcccaggagctgctttgatttggtttatcgttgatctgtgaaaatggggacgaatgatctcgacatcgaagaagggactctggagatcggcatggagtatagaactgtttctggtgttgctggaccattggtcattcttgacaaagtgaagggtccaaagtaccaggagattgttaatattcgcttaggagatggatcaacgagacgtggtcaggttttggaagttgatggcgagaaagcagttgtgcaggtttttgaaggaacatctggaattgacaacaagtttacaaccgtgcaattcacaggagaggttttgaaaacacctgtatcattggacatgcttgggcgcatatttaacggttcaggaaagccgattgataatggccctcctattctgccagaagcataccttgatatttcaggaagttcaatcaaccccagtgaaagaacctatcctgaagagatgatacagacaggcatatcgaccatcgatgtcatgaattccattgctcgtggacagaagattccacttttctctgctgctggtcttccacataatgaaatagctgctcagatttgtcgtcaggctggtctagtcaagcgtttggaaaagactgttgatctacttgaggatcatggagaggacaattttgcaattgtgtttgcagctatgggtgtgaacatggagacagctcagttcttcaagcgagattttgaagaaaatggatcaatggagagagttactcttttcctgaacctggtaaatttgacttctatagctgattgccatatcatggagttttttcaagtatttagatgtttcttagctttaaacagatttaaccttcctttattccaacaggccaatgacccaaccattgagagaatcatcactcctcgaattgccctcacaacagctgaatatctggcttatgaatgtgggaaacacgtccttgttatattgacggatatgagttcttatgctgatgctcttcgtgaggtttccgctgcccgagaagaggttcccggaagacgtggatatccaggttatatgtacactgatcttgcaactatttatgaacgtgctgggcgtatagaaggaagaaaaggttccatcacccaaattccaatcctcactatgcccaatgacgatatcactcatccaactccggatcttactggttacattactgaaggtcagatatatatcgataggcaacttcacaacagacagatatatccacccatcaacgtgcttccatccctttctcgtttaatgaagagtgctatcggcgagggcatgactcgtaaagaccattctgatgtgtcgaaccagctgtatgcaaattatgcaatcgggaaagatgttcaagcgatgaaagctgttgttggagaagaagcactttcttcagaggatttgctttatctagagtttttggataagtttgagaggaagtttgtgatgcaaggagcttatgatacacgcaacatcttccagtcgctggacttagcttggacattgctccgtatcttcccacgggagcttcttcatcgtatccctgcaaagacacttgaccaattctacagccgcgactcaaccagttaa

SEQ ID NO: 48651 - protein, 520 aa, Arabidopsis thaliana
  peptide (1)..(520): Ceres Seq. ID no. 13618557
MGTNDLDIEEGTLEIGMEYRTVSGVAGPLVILDKVKGPKYQEIVNIRLGDGSTRRGQVLEVDGEKAVVQVFEGTSGIDNKFTTVQFTGEVLKTPVSLDMLGRIFNGSGKPIDNGPPILPEAYLDISGSSINPSERTYPEEMIQTGISTIDVMNSIARGQKIPLFSAAGLPHNEIAAQICRQAGLVKRLEKTVDLLEDHGEDNFAIVFAAMGVNMETAQFFKRDFEENGSMERVTLFLNLVNLTSIADCHIMEFFQVFRCFLALNRFNLPLFQQANDPTIERIITPRIALTTAEYLAYECGKHVLVILTDMSSYADALREVSAAREEVPGRRGYPGYMYTDLATIYERAGRIEGRKGSITQIPILTMPNDDITHPTPDLTGYITEGQIYIDRQLHNRQIYPPINVLPSLSRLMKSAIGEGMTRKDHSDVSNQLYANYAIGKDVQAMKAVVGEEALSSEDLLYLEFLDKFERKFVMQGAYDTRNIFQSLDLAWTLLRIFPRELLHRIPAKTLDQFYSRDSTS

SEQ ID NO: 48652 - protein, 504 aa, Arabidopsis thaliana
  peptide (1)..(504): Ceres Seq. ID no. 13618558
MEYRTVSGVAGPLVILDKVKGPKYQEIVNIRLGDGSTRRGQVLEVDGEKAVVQVFEGTSGIDNKFTTVQFTGEVLKTPVSLDMLGRIFNGSGKPIDNGPPILPEAYLDISGSSINPSERTYPEEMIQTGISTIDVMNSIARGQKIPLFSAAGLPHNEIAAQICRQAGLVKRLEKTVDLLEDHGEDNFAIVFAAMGVNMETAQFFKRDFEENGSMERVTLFLNLVNLTSIADCHIMEFFQVFRCFLALNRFNLPLFQQANDPTIERIITPRIALTTAEYLAYECGKHVLVILTDMSSYADALREVSAAREEVPGRRGYPGYMYTDLATIYERAGRIEGRKGSITQIPILTMPNDDITHPTPDLTGYITEGQIYIDRQLHNRQIYPPINVLPSLSRLMKSAIGEGMTRKDHSDVSNQLYANYAIGKDVQAMKAVVGEEALSSEDLLYLEFLDKFERKFVMQGAYDTRNIFQSLDLAWTLLRIFPRELLHRIPAKTLDQFYSRDSTS

SEQ ID NO: 48653 - protein, 422 aa, Arabidopsis thaliana
  peptide (1)..(422): Ceres Seq. ID no. 13618559
MLGRIFNGSGKPIDNGPPILPEAYLDISGSSINPSERTYPEEMIQTGISTIDVMNSIARGQKIPLFSAAGLPHNEIAAQICRQAGLVKRLEKTVDLLEDHGEDNFAIVFAAMGVNMETAQFFKRDFEENGSMERVTLFLNLVNLTSIADCHIMEFFQVFRCFLALNRFNLPLFQQANDPTIERIITPRIALTTAEYLAYECGKHVLVILTDMSSYADALREVSAAREEVPGRRGYPGYMYTDLATIYERAGRIEGRKGSITQIPILTMPNDDITHPTPDLTGYITEGQIYIDRQLHNRQIYPPINVLPSLSRLMKSAIGEGMTRKDHSDVSNQLYANYAIGKDVQAMKAVVGEEALSSEDLLYLEFLDKFERKFVMQGAYDTRNIFQSLDLAWTLLRIFPRELLHRIPAKTLDQFYSRDSTS

SEQ ID NO: 48654 - DNA, 2564 bp, Arabidopsis thaliana
  misc_feature (1)..(2564): Ceres Seq. ID no. 12601257
  misc_feature (1)..(2564): Ortholog of  Ceres SEQ ID NO 14308243 as cited in SEQ ID NO 60493
gagagattccttctctctactcttttctctctctgtctctcactttcttcaaatttcaaatattttgcgtctgaatcacaccgcgtccaccaaatcctccatctccatctcttaaaatccgattctttcctccgcaaatctcgattactccaacaccctttttctctaagattccaaaccttttaggttttttgttgcagccacttgtgaattgtatggtggtcaaaatgaaacagatcatgcgttggccaccgtggcctccgctcttcgccgttaaattcgacgtgatcgtcgttgttcaccagatggatggtttgttggattccgatggtggtggcgatgatagtactgatcagagtcagcgaggaggagggacaacaacgaggaagagacctgttgttgagatcaaatggaaaggacctaaatcggttactctcaaacgctccgtcgtacggaatctcaccgaagaaggtggatttcgcggcgatggcgtcgttgaatggaacgaagagtttaagagggtttgcgaattctctgtttacaaggaaggatcgtttcttccttggttcgtttctttaaccgtcttcagtggactgaatcaaggatcgaaggagaaagttcgtagctttggaaaggcatcactgaacattgcagaatacttttcattgatgaaagaagatgatgttcaagtcaaagtgcctctcaaggattgtgactcatcatctgtgagaagtccacatgttcatatatcccttcagttttctcctaaagaatcgttgcctgaaagacagaggtctgctcttcctgttctatggtctcctctttccgcagaggctgagaaagctgagtctgttgttaaagtaggcctgagaaagatgaagaccttcaacaattgcatgtctagtacacaggcatcggaaaaggagagtgagaaagatggaagcagtggaagcggaagtgacggcaaaagtccggagagaaatcttgattctgactctagttatccttttgatacagattctttagatgaaggtgatgctgcagatgaatcagaagagaacaaagagaatgaaagtagcttagctgatccagttaattacaaaacacttcgttctgctaattgggctagaggctcatttcatactgttacaaaccccgaagacgaggatttgatatattacagtcaccgcagtccattagcagagacaggacattgcagtgatgaggtttccaatgatgtagtaagcttggagcaggcgaaaggacaaatgtctaagaagagaatgttatcttggaagaagagaaaacttagttttagatctcctaaacagaaaggcgagcctcttcttaagaaggattgtcttgaagaaggaggtgatgatatcgattttgaccgcagacaactaagttcatccgatgagtctaactctgattggtataggtctgatgatgcaatcatgaaaccattatcccagtttggagatgatgatttcgttgttggtagctgggagaccaaagagattataagccgtgatgggctgatgaaactcacggctcgagtatttctcgcatcaattgatcagagaagcgagagagctgctggagaaagcgcctgcacagctctagttgcagtgatggcacattggttaggatccaacagagacataatcccaacaaggtcagagtttgacagtcttatcagagaaggatcatccgagtggagaaatatgtgtgaaaacgaggaataccgggaacggtttccagacaaacatttcgatctcgagacggttctccaggcaaaagtcagacccatctgtgtagtccctgaaagatcattcatcgggtttttccatccagagaaatcagaggaagaagaaggaaaagaagatgctagtctagattttctcaaaggtgtaatgtcctttgacagtatctgggaagagctcatgaaacaagaaccagaagagtcggcaagcgaacctgtgatctacattgtaagctggaatgatcatttctttgtactccttgtgaaccacgatgcttattacatcatagacacgcttggagagaggctctatgagggttgcaaccaagcgtatgtcttgaaatttgacaaagatgcagagatcaaaagattaccatccgtcatcaaagacaacaaagccgacatgggaaaccagaaacaaggtggtaagaacaagtctgagcaacccgaaagatcaaaagaatcagaagaacaagaagaagaagaagtagtgtgtagaggtaaagagtcatgtagagagtatataaagagctttctcgcagcgattccaatacagcaagtgaaagctgatatgaagaaaggactggtttcatctttgcatcaccgtcttcaaatagagcttcactacacgaaacaccttcatcaccaccaacctaatatgtttgaatcctctgcaaccgaagtaactgtgtcagaagctgctgtgtctgtgacagtggcttggtcattggcgagccaattcagcaatagtggtgggtttagttgcgaaatggctgagcttttgggggttaaagtttaa

SEQ ID NO: 48655 - protein, 782 aa, Arabidopsis thaliana
  peptide (1)..(782): Ceres Seq. ID no. 12601258
MVVKMKQIMRWPPWPPLFAVKFDVIVVVHQMDGLLDSDGGGDDSTDQSQRGGGTTTRKRPVVEIKWKGPKSVTLKRSVVRNLTEEGGFRGDGVVEWNEEFKRVCEFSVYKEGSFLPWFVSLTVFSGLNQGSKEKVRSFGKASLNIAEYFSLMKEDDVQVKVPLKDCDSSSVRSPHVHISLQFSPKESLPERQRSALPVLWSPLSAEAEKAESVVKVGLRKMKTFNNCMSSTQASEKESEKDGSSGSGSDGKSPERNLDSDSSYPFDTDSLDEGDAADESEENKENESSLADPVNYKTLRSANWARGSFHTVTNPEDEDLIYYSHRSPLAETGHCSDEVSNDVVSLEQAKGQMSKKRMLSWKKRKLSFRSPKQKGEPLLKKDCLEEGGDDIDFDRRQLSSSDESNSDWYRSDDAIMKPLSQFGDDDFVVGSWETKEIISRDGLMKLTARVFLASIDQRSERAAGESACTALVAVMAHWLGSNRDIIPTRSEFDSLIREGSSEWRNMCENEEYRERFPDKHFDLETVLQAKVRPICVVPERSFIGFFHPEKSEEEEGKEDASLDFLKGVMSFDSIWEELMKQEPEESASEPVIYIVSWNDHFFVLLVNHDAYYIIDTLGERLYEGCNQAYVLKFDKDAEIKRLPSVIKDNKADMGNQKQGGKNKSEQPERSKESEEQEEEEVVCRGKESCREYIKSFLAAIPIQQVKADMKKGLVSSLHHRLQIELHYTKHLHHHQPNMFESSATEVTVSEAAVSVTVAWSLASQFSNSGGFSCEMAELLGVKV

SEQ ID NO: 48656 - protein, 778 aa, Arabidopsis thaliana
  peptide (1)..(778): Ceres Seq. ID no. 12601259
MKQIMRWPPWPPLFAVKFDVIVVVHQMDGLLDSDGGGDDSTDQSQRGGGTTTRKRPVVEIKWKGPKSVTLKRSVVRNLTEEGGFRGDGVVEWNEEFKRVCEFSVYKEGSFLPWFVSLTVFSGLNQGSKEKVRSFGKASLNIAEYFSLMKEDDVQVKVPLKDCDSSSVRSPHVHISLQFSPKESLPERQRSALPVLWSPLSAEAEKAESVVKVGLRKMKTFNNCMSSTQASEKESEKDGSSGSGSDGKSPERNLDSDSSYPFDTDSLDEGDAADESEENKENESSLADPVNYKTLRSANWARGSFHTVTNPEDEDLIYYSHRSPLAETGHCSDEVSNDVVSLEQAKGQMSKKRMLSWKKRKLSFRSPKQKGEPLLKKDCLEEGGDDIDFDRRQLSSSDESNSDWYRSDDAIMKPLSQFGDDDFVVGSWETKEIISRDGLMKLTARVFLASIDQRSERAAGESACTALVAVMAHWLGSNRDIIPTRSEFDSLIREGSSEWRNMCENEEYRERFPDKHFDLETVLQAKVRPICVVPERSFIGFFHPEKSEEEEGKEDASLDFLKGVMSFDSIWEELMKQEPEESASEPVIYIVSWNDHFFVLLVNHDAYYIIDTLGERLYEGCNQAYVLKFDKDAEIKRLPSVIKDNKADMGNQKQGGKNKSEQPERSKESEEQEEEEVVCRGKESCREYIKSFLAAIPIQQVKADMKKGLVSSLHHRLQIELHYTKHLHHHQPNMFESSATEVTVSEAAVSVTVAWSLASQFSNSGGFSCEMAELLGVKV

SEQ ID NO: 48657 - protein, 774 aa, Arabidopsis thaliana
  peptide (1)..(774): Ceres Seq. ID no. 12601260
MRWPPWPPLFAVKFDVIVVVHQMDGLLDSDGGGDDSTDQSQRGGGTTTRKRPVVEIKWKGPKSVTLKRSVVRNLTEEGGFRGDGVVEWNEEFKRVCEFSVYKEGSFLPWFVSLTVFSGLNQGSKEKVRSFGKASLNIAEYFSLMKEDDVQVKVPLKDCDSSSVRSPHVHISLQFSPKESLPERQRSALPVLWSPLSAEAEKAESVVKVGLRKMKTFNNCMSSTQASEKESEKDGSSGSGSDGKSPERNLDSDSSYPFDTDSLDEGDAADESEENKENESSLADPVNYKTLRSANWARGSFHTVTNPEDEDLIYYSHRSPLAETGHCSDEVSNDVVSLEQAKGQMSKKRMLSWKKRKLSFRSPKQKGEPLLKKDCLEEGGDDIDFDRRQLSSSDESNSDWYRSDDAIMKPLSQFGDDDFVVGSWETKEIISRDGLMKLTARVFLASIDQRSERAAGESACTALVAVMAHWLGSNRDIIPTRSEFDSLIREGSSEWRNMCENEEYRERFPDKHFDLETVLQAKVRPICVVPERSFIGFFHPEKSEEEEGKEDASLDFLKGVMSFDSIWEELMKQEPEESASEPVIYIVSWNDHFFVLLVNHDAYYIIDTLGERLYEGCNQAYVLKFDKDAEIKRLPSVIKDNKADMGNQKQGGKNKSEQPERSKESEEQEEEEVVCRGKESCREYIKSFLAAIPIQQVKADMKKGLVSSLHHRLQIELHYTKHLHHHQPNMFESSATEVTVSEAAVSVTVAWSLASQFSNSGGFSCEMAELLGVKV

SEQ ID NO: 48658 - DNA, 2078 bp, Arabidopsis thaliana; identical to SEQ ID NO: 47217
  misc_feature (1)..(2078): Ceres Seq. ID no. 12601002
  misc_feature (1)..(2078): Ortholog of  Ceres SEQ ID NO 13579556 as cited in SEQ ID NO 53743

SEQ ID NO: 48659 - protein, 442 aa, Arabidopsis thaliana; identical to SEQ ID NO: 47218
  peptide (1)..(442): Ceres Seq. ID no. 12601003

SEQ ID NO: 48660 - protein, 279 aa, Arabidopsis thaliana; identical to SEQ ID NO: 47219
  peptide (1)..(279): Ceres Seq. ID no. 12601004

SEQ ID NO: 48661 - protein, 231 aa, Arabidopsis thaliana; identical to SEQ ID NO: 47220
  peptide (1)..(231): Ceres Seq. ID no. 12601005

SEQ ID NO: 48662 - DNA, 975 bp, Arabidopsis thaliana
  misc_feature (1)..(975): Ceres Seq. ID no. 12601261
  misc_feature (1)..(975): Ortholog of  Ceres SEQ ID NO 15226526 as cited in SEQ ID NO 54159
atgtatctgaagagaccgatatggagcgatggcgcgtcagcaacgccggagaatccatcagaatcggagaccggagaagaatcagacgcggcgtcgatggtagtcgaagagctggtgacttctctcaatacacagagactttacagggagctgacactatccctcaggaccggtttacgcgatgcttgcgctgaattctccttccttcgcatccgtggtcttagatctcttctcaaaactctccgaactgtcgctgattcagattcaatcattcgtctcttctctcatacccaaaccatttccgatctccaactggttccggtgctttttcaacattcattgaaagaagcggaggatgataaagtgacgagcttggatcatatattcagtgtggagccgatgaagataacaagtccttctacggatgctgaggttgctgttgctcttagagttctcgaaggatgctgccttctccatcctcagagcactgtcctggctcataagcatggtgcagtccgcgtaatgatgaatgtattatcaacacgaggagtacttgagcaaggagcctgcttggatgccttaatctcagtattgctggattcatcagcaaatcaggtggattttggagcttgcaatggcattgaagaggttgcaatgctcatgcgagacaaacaagctgatgaaaacctcagtatttacacgataaaaattgccgtcaacgaagattcatttcctttttgtctcttctggttaagatgcggagagttcttactactgttagttggacacgtaaatgggaaggatcgatctccaatagcgagtgtaaatgaagacatcaggcgcctcttgggtgaaaaatctgcttctttaatatgggcggcgagtcaattcggttcaacaggtgatcctgaacaaagaatcacggcgcttcatatccaggctggtagagtgctcgagtctcttgacttgtactaa

SEQ ID NO: 48663 - protein, 324 aa, Arabidopsis thaliana
  peptide (1)..(324): Ceres Seq. ID no. 12601262
MYLKRPIWSDGASATPENPSESETGEESDAASMVVEELVTSLNTQRLYRELTLSLRTGLRDACAEFSFLRIRGLRSLLKTLRTVADSDSIIRLFSHTQTISDLQLVPVLFQHSLKEAEDDKVTSLDHIFSVEPMKITSPSTDAEVAVALRVLEGCCLLHPQSTVLAHKHGAVRVMMNVLSTRGVLEQGACLDALISVLLDSSANQVDFGACNGIEEVAMLMRDKQADENLSIYTIKIAVNEDSFPFCLFWLRCGEFLLLLVGHVNGKDRSPIASVNEDIRRLLGEKSASLIWAASQFGSTGDPEQRITALHIQAGRVLESLDLY

SEQ ID NO: 48664 - protein, 292 aa, Arabidopsis thaliana
  peptide (1)..(292): Ceres Seq. ID no. 12601263
MVVEELVTSLNTQRLYRELTLSLRTGLRDACAEFSFLRIRGLRSLLKTLRTVADSDSIIRLFSHTQTISDLQLVPVLFQHSLKEAEDDKVTSLDHIFSVEPMKITSPSTDAEVAVALRVLEGCCLLHPQSTVLAHKHGAVRVMMNVLSTRGVLEQGACLDALISVLLDSSANQVDFGACNGIEEVAMLMRDKQADENLSIYTIKIAVNEDSFPFCLFWLRCGEFLLLLVGHVNGKDRSPIASVNEDIRRLLGEKSASLIWAASQFGSTGDPEQRITALHIQAGRVLESLDLY

SEQ ID NO: 48665 - protein, 191 aa, Arabidopsis thaliana
  peptide (1)..(191): Ceres Seq. ID no. 12601264
MKITSPSTDAEVAVALRVLEGCCLLHPQSTVLAHKHGAVRVMMNVLSTRGVLEQGACLDALISVLLDSSANQVDFGACNGIEEVAMLMRDKQADENLSIYTIKIAVNEDSFPFCLFWLRCGEFLLLLVGHVNGKDRSPIASVNEDIRRLLGEKSASLIWAASQFGSTGDPEQRITALHIQAGRVLESLDLY

SEQ ID NO: 48666 - DNA, 1313 bp, Arabidopsis thaliana
  misc_feature (1)..(1313): Ceres Seq. ID no. 14310152
  misc_feature (1)..(1313): Ortholog of  Ceres SEQ ID NO 15224803 as cited in SEQ ID NO 56572
  misc_feature (1)..(1313): Ortholog of  Ceres SEQ ID NO 13502952 as cited in SEQ ID NO 62271
  misc_feature (1)..(1313): Ortholog of  Ceres SEQ ID NO 13502973 as cited in SEQ ID NO 68052
  misc_feature (1)..(1313): Ortholog of  Ceres SEQ ID NO 13596000 as cited in SEQ ID NO 68188
gaccatcaacaaactcaatcacaatcacaagtaaatacaaaaatcaccatagaaaaatatgaagcgatttattgttcttgcgctttgcatgcttatggttcttgaaaccacaaagggtttagatttccatgacaaagatgtggaatcagagaatagcttgtgggagctatacgaacggtggaggagtcaccacactgttgctaggagccttgaagagaaagctaagaggttcaacgtgttcaagcacaacgtgaagcacatccatgagaccaacaagaaggataaatcttacaagctcaagctaaacaagtttggtgacatgactagtgaagaatttaggagaacatacgctggttcaaacatcaaacatcataggatgtttcaaggcaaaaaaaaggccacaaagagcttcatgtatgcaaatgtaaatactctcccaacctccgttgattggagaaagaatggagccgtcactcctgtcaaaaaccaaggccaatgcgggagttgttgggcgttttcaacagttgttgcggtggaagggatcaaccaaataagaactaaaaagctgacatcactctcagagcaagagctagtagattgtgatacaaaccagaaccaaggatgcaatggaggtctaatggaccttgcttttgagttcatcaaggagaaaggaggactcacaagtgagctagtgtacccttacaaggcttctgatgaaacttgtgacacaaacaaagaaaatgctccggtagtttcaatcgatggacacgaagatgttcctaagaacagcgaggatgatctaatgaaagctgttgctaatcagcctgtttctgttgctattgatgctggaggctcagactttcaattctactccgagggagtgtttaccgggagatgcggaacagagctaaaccatggagttgcggtagtagggtatggaacaacgatagacggaacaaagtattggattgttaagaattcatggggagaggaatggggagagaaaggatacataagaatgcagagagggattcgtcataaagaaggactttgtggtattgctatggaagcttcttatcctctcaagaactccaacactaacccttctagactttccttggactcgcttaaggatgaactctaaattaaatctctttatattaagattaaatagacattgacaagtttgtttatgatgattgtttttttttaaatatatttctttttcattaataggttatggttttcaatgtatgaagttgatgggaatcgtttgaattcgttaaatgaataaataaatggttttatgtagc

SEQ ID NO: 48667 - protein, 361 aa, Arabidopsis thaliana
  peptide (1)..(361): Ceres Seq. ID no. 14310153
MKRFIVLALCMLMVLETTKGLDFHDKDVESENSLWELYERWRSHHTVARSLEEKAKRFNVFKHNVKHIHETNKKDKSYKLKLNKFGDMTSEEFRRTYAGSNIKHHRMFQGKKKATKSFMYANVNTLPTSVDWRKNGAVTPVKNQGQCGSCWAFSTVVAVEGINQIRTKKLTSLSEQELVDCDTNQNQGCNGGLMDLAFEFIKEKGGLTSELVYPYKASDETCDTNKENAPVVSIDGHEDVPKNSEDDLMKAVANQPVSVAIDAGGSDFQFYSEGVFTGRCGTELNHGVAVVGYGTTIDGTKYWIVKNSWGEEWGEKGYIRMQRGIRHKEGLCGIAMEASYPLKNSNTNPSRLSLDSLKDEL

SEQ ID NO: 48668 - protein, 351 aa, Arabidopsis thaliana
  peptide (1)..(351): Ceres Seq. ID no. 14310154
MLMVLETTKGLDFHDKDVESENSLWELYERWRSHHTVARSLEEKAKRFNVFKHNVKHIHETNKKDKSYKLKLNKFGDMTSEEFRRTYAGSNIKHHRMFQGKKKATKSFMYANVNTLPTSVDWRKNGAVTPVKNQGQCGSCWAFSTVVAVEGINQIRTKKLTSLSEQELVDCDTNQNQGCNGGLMDLAFEFIKEKGGLTSELVYPYKASDETCDTNKENAPVVSIDGHEDVPKNSEDDLMKAVANQPVSVAIDAGGSDFQFYSEGVFTGRCGTELNHGVAVVGYGTTIDGTKYWIVKNSWGEEWGEKGYIRMQRGIRHKEGLCGIAMEASYPLKNSNTNPSRLSLDSLKDEL

SEQ ID NO: 48669 - protein, 349 aa, Arabidopsis thaliana
  peptide (1)..(349): Ceres Seq. ID no. 14310155
MVLETTKGLDFHDKDVESENSLWELYERWRSHHTVARSLEEKAKRFNVFKHNVKHIHETNKKDKSYKLKLNKFGDMTSEEFRRTYAGSNIKHHRMFQGKKKATKSFMYANVNTLPTSVDWRKNGAVTPVKNQGQCGSCWAFSTVVAVEGINQIRTKKLTSLSEQELVDCDTNQNQGCNGGLMDLAFEFIKEKGGLTSELVYPYKASDETCDTNKENAPVVSIDGHEDVPKNSEDDLMKAVANQPVSVAIDAGGSDFQFYSEGVFTGRCGTELNHGVAVVGYGTTIDGTKYWIVKNSWGEEWGEKGYIRMQRGIRHKEGLCGIAMEASYPLKNSNTNPSRLSLDSLKDEL

SEQ ID NO: 48670 - DNA, 3452 bp, Arabidopsis thaliana
  misc_feature (1)..(3452): Ceres Seq. ID no. 14316172
  misc_feature (1)..(3452): Ortholog of  Ceres SEQ ID NO 13666169 as cited in SEQ ID NO 0
ttatgccatggagcaagtctctcttcactttggcttcctcttgatctagtatttgaagatgcaatggatggatatcaagtaaacccaactagtgcgattgaaatcattaccggtctagctaaaacacttaaagaaattaatgggagcacttggcatgacactttcttggggctttggatagcagctctccgacttgttcaaagggaaagggatcctattgagggacctattcctcgactggacacaaggctgtgcatgtcattatgtattgtgcctcttgtggtcgcaaaccttattgaagaggggaaatacgaatctgtcatggaaaagctgcgagatgaccttgttacaagtttgcaggtcctcggtgatttccctggattgctggctcctcccaaatgcgttgtttctgctgccaacaaggctgccacaaaggcaatcttgtttttgtctggtggcaatgttggaaagtcatgttttgatgtcataaacatgaaggacatgcctgtcaactgctctggaaacatgcgccacctgatagtcgaggcttgtattgcaagaaacatactggatatgtcggcttattcgtggcctggctatgttaatggccgaatcaaccaaatacctcagagtctgccgaatgaagtaccctgctggtcatcatttgtgaaaggggctccactaaatgccgcaatggtgaatacattagtttcagttcctgcttcaaggtagaatgagttattatcttctttttgtttctttttcctctattagctccacactacttcatccacatagtcttccctccaaatcatacagtcagtggtaatttaaaattactatacaaaattaagctacggagtttcaaagtcgtaacctaaggaaaccattgccacaatgagaatagtggttgcattctagtttgacttaagttctgcttcttcttcagttattcatttttgtttcttagccaggtaatgctctttttttaatttaccgagagtaaagcaactgaaatacctcatggatttgatggaagcttagcagagctcgagaaactatttgaggttgcagtcaaaggatcggatgacgagaagatatctgctgctacagttctttgcggggcatctctcacacggggttggaacatacaggaacacactgttgaatatcttacaagattactatccccacccgttccagcagattattccagggctgaaaatcatttgattggttatgcctgcatgttgaatgttgttattgttgggataggatctgttgacagcattcaaattttctctttacatggcatggttccgcaacttgcttgctcactaatgccaatttgtgaagagtttggatcttacaccccgagtgtatcatggactcttccttctggagaagcaatatcagcatattctgttttctcaaatgcattcactcttcttttaaagctatggagattcaatcatcctcctattgagcatggtgtgggagatgttcccacagttggctcccaactcactcctgaacatcttctttcagtgcgtaattcttatcttgtttcatcggagatccttgatagagaccgaaacagaaagagactttcagaagttgcaagggcagcatcttgccagcccgtgtttgtggactcgttccccaagctgaaagtctggtataggcagcaccaaagatgcatagcagccacattatctggacttacacatggatctcccgttcatcagacagttgaagcacttctcaacatgacgttcggaaaggtcagaggcagtcagactttaaatccagtaaattcgggcacaagcagttcatcaggagctgcaagtgaagatagcaatataagacctgagtttcctgcttgggatatcctcaaagccgttccatatgttgtcgatgctgctttaaccgcttgtactcatggaaggctttcgcctcgtcagttagctacagggctgaaagacttagcagattttctcccggcatcattagcaacgatagtaagctatttctcagctgaggtgagtagaggtgtttggaagccagtattcatgaacggcgtggattggccaagtccagctacaaatctatccactgttgaggaatatataacgaaaattcttgcaacaacaggcgtcgatatccctagccttgctccaggagggagttctccggcaacgcttcctttacctctagccgcatttgttagtctaaccattacttacaaaattgacaaagcctcagagcggtttctcaacctggctggcccagctctggagtgcttggctgcaggctgcccttggccttgcatgcccattgtagcttcattatggacccaaaaggcgaaacgttggtttgacttccttgttttctctgcctctcgcaccgtcttccttcacaaccaagacgctgtgattcagctcctcagaaactgcttcagtgccactctgggtttgaatgctgcccccatgtcaaatgatggtggcgttggagctcttcttggccatggattcggctctcatttctatggagggatctctcctgtagcaccagggattctttatctccgtatgtatcgtgctctcagagatactgtctccgtatcggaagagattctctctctgctgatacattcggtggaggatatagcccagaacaggctctcaaaggagaagctggaaaagctgaagacagtgaagaacggatcaagatacggccaaagttctctagcaacagcaatgactcaagtgaagcttgctgcttcgctgagtgcctcgttggtatggctaaccggtggcttaggtgtggtccacgttctcatcaaagaaacgatcccatcttggtttctatcaactgacaaatcagaccgagaacaaggaccatcagatctagttgcagagctaagaggtcatgcccttgcctactttgtggtcctatgtggagcacttacttggggcgtggattcaagatcatctgcatccaaacgccgccgccaagcaatcttgggaagccacttggagttcatcgcgagtgccttagatgggaaaatatcagtgggatgtgaaacagcaacttggcgaacatatatttccggtttggtgagtctaatggtgagctgtttgccgctctgggtgacagagatcgatacagaagtgttaaagagtctaagcaatggactaagaaaatggggaaaagacgagctagcgattgtattactctccttgggaggtctcaaaacaatggattacgcagctgatttcatcattcatttgcgttcatagcttcttaaaaagttttgatcttctccagatttcagatagttgtttgatagatgtttttcttctagtgtttgcttccttgttgtgacttgtgttctctagctccagtgttgtgtgatgaaatcaatcacgcatatgtatagagagaaacag

SEQ ID NO: 48671 - protein, 684 aa, Arabidopsis thaliana
  peptide (1)..(684): Ceres Seq. ID no. 14316173
MLNVVIVGIGSVDSIQIFSLHGMVPQLACSLMPICEEFGSYTPSVSWTLPSGEAISAYSVFSNAFTLLLKLWRFNHPPIEHGVGDVPTVGSQLTPEHLLSVRNSYLVSSEILDRDRNRKRLSEVARAASCQPVFVDSFPKLKVWYRQHQRCIAATLSGLTHGSPVHQTVEALLNMTFGKVRGSQTLNPVNSGTSSSSGAASEDSNIRPEFPAWDILKAVPYVVDAALTACTHGRLSPRQLATGLKDLADFLPASLATIVSYFSAEVSRGVWKPVFMNGVDWPSPATNLSTVEEYITKILATTGVDIPSLAPGGSSPATLPLPLAAFVSLTITYKIDKASERFLNLAGPALECLAAGCPWPCMPIVASLWTQKAKRWFDFLVFSASRTVFLHNQDAVIQLLRNCFSATLGLNAAPMSNDGGVGALLGHGFGSHFYGGISPVAPGILYLRMYRALRDTVSVSEEILSLLIHSVEDIAQNRLSKEKLEKLKTVKNGSRYGQSSLATAMTQVKLAASLSASLVWLTGGLGVVHVLIKETIPSWFLSTDKSDREQGPSDLVAELRGHALAYFVVLCGALTWGVDSRSSASKRRRQAILGSHLEFIASALDGKISVGCETATWRTYISGLVSLMVSCLPLWVTEIDTEVLKSLSNGLRKWGKDELAIVLLSLGGLKTMDYAADFIIHLRS

SEQ ID NO: 48672 - protein, 662 aa, Arabidopsis thaliana
  peptide (1)..(662): Ceres Seq. ID no. 14316174
MVPQLACSLMPICEEFGSYTPSVSWTLPSGEAISAYSVFSNAFTLLLKLWRFNHPPIEHGVGDVPTVGSQLTPEHLLSVRNSYLVSSEILDRDRNRKRLSEVARAASCQPVFVDSFPKLKVWYRQHQRCIAATLSGLTHGSPVHQTVEALLNMTFGKVRGSQTLNPVNSGTSSSSGAASEDSNIRPEFPAWDILKAVPYVVDAALTACTHGRLSPRQLATGLKDLADFLPASLATIVSYFSAEVSRGVWKPVFMNGVDWPSPATNLSTVEEYITKILATTGVDIPSLAPGGSSPATLPLPLAAFVSLTITYKIDKASERFLNLAGPALECLAAGCPWPCMPIVASLWTQKAKRWFDFLVFSASRTVFLHNQDAVIQLLRNCFSATLGLNAAPMSNDGGVGALLGHGFGSHFYGGISPVAPGILYLRMYRALRDTVSVSEEILSLLIHSVEDIAQNRLSKEKLEKLKTVKNGSRYGQSSLATAMTQVKLAASLSASLVWLTGGLGVVHVLIKETIPSWFLSTDKSDREQGPSDLVAELRGHALAYFVVLCGALTWGVDSRSSASKRRRQAILGSHLEFIASALDGKISVGCETATWRTYISGLVSLMVSCLPLWVTEIDTEVLKSLSNGLRKWGKDELAIVLLSLGGLKTMDYAADFIIHLRS

SEQ ID NO: 48673 - protein, 653 aa, Arabidopsis thaliana
  peptide (1)..(653): Ceres Seq. ID no. 14316175
MPICEEFGSYTPSVSWTLPSGEAISAYSVFSNAFTLLLKLWRFNHPPIEHGVGDVPTVGSQLTPEHLLSVRNSYLVSSEILDRDRNRKRLSEVARAASCQPVFVDSFPKLKVWYRQHQRCIAATLSGLTHGSPVHQTVEALLNMTFGKVRGSQTLNPVNSGTSSSSGAASEDSNIRPEFPAWDILKAVPYVVDAALTACTHGRLSPRQLATGLKDLADFLPASLATIVSYFSAEVSRGVWKPVFMNGVDWPSPATNLSTVEEYITKILATTGVDIPSLAPGGSSPATLPLPLAAFVSLTITYKIDKASERFLNLAGPALECLAAGCPWPCMPIVASLWTQKAKRWFDFLVFSASRTVFLHNQDAVIQLLRNCFSATLGLNAAPMSNDGGVGALLGHGFGSHFYGGISPVAPGILYLRMYRALRDTVSVSEEILSLLIHSVEDIAQNRLSKEKLEKLKTVKNGSRYGQSSLATAMTQVKLAASLSASLVWLTGGLGVVHVLIKETIPSWFLSTDKSDREQGPSDLVAELRGHALAYFVVLCGALTWGVDSRSSASKRRRQAILGSHLEFIASALDGKISVGCETATWRTYISGLVSLMVSCLPLWVTEIDTEVLKSLSNGLRKWGKDELAIVLLSLGGLKTMDYAADFIIHLRS

SEQ ID NO: 48674 - DNA, 1675 bp, Arabidopsis thaliana
  misc_feature (1)..(1675): Ceres Seq. ID no. 12575235
  misc_feature (1)..(1675): Ortholog of  Ceres SEQ ID NO 13596816 as cited in SEQ ID NO 62287
ttcttctccgtttctctttagattatctcaaccatacagccataaatccatcggaagaggaggaagataatgcaagaatcagtcgctgagtctgaatctgaaggggaagagttgcacaataagctcaagctcctcttcaatggctttcactagcatggtttccaccgttcctgttctcttcttcttcttcactcttcttttgatttctgcgaattcgtcgtctttatctcacaacattaaggttcaggaacaagacaaagatcccttcgttggtttcaacatcggcacagatgtctctaatcttctctcgccgacggaattagtcaaatttctccaagctcagaaagtaaatcacgtccgattatacgatgctgatccagaattgctcaaagcattagctaaaaccaaggtacgagtcataatcagtgtaccaaacaatcagcttctcgctattggatcatccaacagtactgctgcgtcatggattggtagaaatgttgttgcttattaccctgaaacattaatcacagccatttctgttggagatgaggttttaacaactgtgccttcttcagctcctttgcttttacctgctattgagtctttatacaatgctcttgttgcttctaatctccacactcaaatcaaggtctctacgcctcacgcagcttccatcatgctcgatactttcccgccttctcaagcttactttaaccagacttggcattcgattatggttcctctgcttcagttcttgtcgaaaacaggttctcctttgatgatgaatctgtatccttactatgtttatatgcagaacaaaggtgtggttccgctcgataactgtttgtttgagccattgacaccgtctaaagaaatggtggatccgaacactttgttgcattacacgaatgttcttgatgctatggttgatgctgcttatgtctcgatgaaaaacttaaatgtgtctgatgtggctgtgcttgtgactgagagtggctggccttcgaaaggtgactcgaaagagccttatgctactatcgacaatgctgatacgtacaactcgaatttgatcaagcatgtgtttgatagaactggtactcctttgcaccctgagatgacttcaagtgtctacatttatgagttgtttaatgaggatttgagggctcctccggttagtgaagctagttgggggttattctatgggaactctacaccggtttatttgcttcatgtatctggaagtggaacgttcttagcgaatgatacaacaaaccagacttactgcattgctatggatggtgtggatgcgaagacgcttcaagctgcattggattgggcttgtggacctgggagatctaactgtagtgagattcaacctggggagagttgttaccagccgaataatgtgaagggacatgcttcgtttgcttttaatagttattaccagaaggaaggaagagcttctggttcatgtgacttcaaaggtgtggctatgatcactactactgacccaagtcatggaagctgcattttcccgggaagcaagaaggtcggaaataggacacagacagtggtgaattcgactgaagttgccgcgggtgaagctacttcaaggagtctctcaagaggcttctgtgtcactattatgattcttgtaacattttccatattgtaa

SEQ ID NO: 48675 - protein, 511 aa, Arabidopsis thaliana
  peptide (1)..(511): Ceres Seq. ID no. 12575236
MAFTSMVSTVPVLFFFFTLLLISANSSSLSHNIKVQEQDKDPFVGFNIGTDVSNLLSPTELVKFLQAQKVNHVRLYDADPELLKALAKTKVRVIISVPNNQLLAIGSSNSTAASWIGRNVVAYYPETLITAISVGDEVLTTVPSSAPLLLPAIESLYNALVASNLHTQIKVSTPHAASIMLDTFPPSQAYFNQTWHSIMVPLLQFLSKTGSPLMMNLYPYYVYMQNKGVVPLDNCLFEPLTPSKEMVDPNTLLHYTNVLDAMVDAAYVSMKNLNVSDVAVLVTESGWPSKGDSKEPYATIDNADTYNSNLIKHVFDRTGTPLHPEMTSSVYIYELFNEDLRAPPVSEASWGLFYGNSTPVYLLHVSGSGTFLANDTTNQTYCIAMDGVDAKTLQAALDWACGPGRSNCSEIQPGESCYQPNNVKGHASFAFNSYYQKEGRASGSCDFKGVAMITTTDPSHGSCIFPGSKKVGNRTQTVVNSTEVAAGEATSRSLSRGFCVTIMILVTFSIL

SEQ ID NO: 48676 - protein, 506 aa, Arabidopsis thaliana
  peptide (1)..(506): Ceres Seq. ID no. 12575237
MVSTVPVLFFFFTLLLISANSSSLSHNIKVQEQDKDPFVGFNIGTDVSNLLSPTELVKFLQAQKVNHVRLYDADPELLKALAKTKVRVIISVPNNQLLAIGSSNSTAASWIGRNVVAYYPETLITAISVGDEVLTTVPSSAPLLLPAIESLYNALVASNLHTQIKVSTPHAASIMLDTFPPSQAYFNQTWHSIMVPLLQFLSKTGSPLMMNLYPYYVYMQNKGVVPLDNCLFEPLTPSKEMVDPNTLLHYTNVLDAMVDAAYVSMKNLNVSDVAVLVTESGWPSKGDSKEPYATIDNADTYNSNLIKHVFDRTGTPLHPEMTSSVYIYELFNEDLRAPPVSEASWGLFYGNSTPVYLLHVSGSGTFLANDTTNQTYCIAMDGVDAKTLQAALDWACGPGRSNCSEIQPGESCYQPNNVKGHASFAFNSYYQKEGRASGSCDFKGVAMITTTDPSHGSCIFPGSKKVGNRTQTVVNSTEVAAGEATSRSLSRGFCVTIMILVTFSIL

SEQ ID NO: 48677 - protein, 332 aa, Arabidopsis thaliana
  peptide (1)..(332): Ceres Seq. ID no. 12575238
MLDTFPPSQAYFNQTWHSIMVPLLQFLSKTGSPLMMNLYPYYVYMQNKGVVPLDNCLFEPLTPSKEMVDPNTLLHYTNVLDAMVDAAYVSMKNLNVSDVAVLVTESGWPSKGDSKEPYATIDNADTYNSNLIKHVFDRTGTPLHPEMTSSVYIYELFNEDLRAPPVSEASWGLFYGNSTPVYLLHVSGSGTFLANDTTNQTYCIAMDGVDAKTLQAALDWACGPGRSNCSEIQPGESCYQPNNVKGHASFAFNSYYQKEGRASGSCDFKGVAMITTTDPSHGSCIFPGSKKVGNRTQTVVNSTEVAAGEATSRSLSRGFCVTIMILVTFSIL

SEQ ID NO: 48678 - DNA, 2089 bp, Arabidopsis thaliana
  misc_feature (1)..(2089): Ceres Seq. ID no. 13591931
  misc_feature (1)..(2089): Ortholog of  Ceres SEQ ID NO 13599900 as cited in SEQ ID NO 531
  misc_feature (1)..(2089): Ortholog of  Ceres SEQ ID NO 14310498 as cited in SEQ ID NO 55066
  misc_feature (1)..(2089): Ortholog of  Ceres SEQ ID NO 13659971 as cited in SEQ ID NO 67565
  misc_feature (1)..(2089): Ortholog of  Ceres SEQ ID NO 13500385 as cited in SEQ ID NO 67583
gaatttaacttttaaattccttccaccatcgaatcacaatctctctctctctcgcttgctgttactcgctttttcccagaaccggcttcgatttttctaaagcagccgaaatttacgattcccagaattttccctactgacaaaatttcacttcaaatacaaatctcgtcttcatgagtcttcttcttcgtccaaattgaattttctccgcacacgagagttgaattttgattttcggctgtttatatggtctccggtcccttagggttttaattcttctgcagatctctcacgatgagcgttgcgaaatcccaagtatggcagccatgcaagaagaagaggtcctcctcctgattcaatagagatctatctatatatatataagagaccgagatatatatatagagagagagatggcttctcgaacaacgccttcacgatcgactccttcacgatcaacgccttctggtagttcttctggtggtaggacacgagttggtaagtatgagcttggacgaactttgggtgaaggaactttcgctaaggtcaaattcgctagaaatgttgagaatggtgataatgtcgctattaaggttattgataaagagaaagttctgaaaaataagatgatcgctcagatcaagcgtgagatttcgacgatgaaattgatcaagcacccgaatgtcattcgtatgtttgaggtgatggctagcaaaactaagatctacttcgttttggaattcgtcactggtggggagcttttcgataaaatttcaagcaatgggagattgaaggaagatgaggcgaggaagtatttccaacagctgattaatgcggttgattattgtcatagcaggggagtttatcatagagaccttaagccagaaaatttgcttttggatgctaatggtgctttgaaagtgtctgactttggattgagcgctctacctcagcaagttcgagaggatgggttacttcacacaacctgtggaacacccaattatgttgctccggaggtaatcaacaacaaaggttatgatggagcgaaggctgatttgtggtcttgtggagtaattctctttgttttaatggctggttatttaccttttgaagattctaacctgacgtcgttatataaaaagatattcaaagcagaatttacttgccctccctggttctctgcaagtgctaagaagttaatcaaaagaattctggatcccaatccagcaacgaggattacatttgctgaggtcattgaaaatgagtggtttaaaaaagggtataaagcacctaaatttgagaatgctgatgtcagccttgatgatgttgatgcaatctttgatgactcaggggagtctaagaatcttgttgtggagaggcgagaagaaggactcaaaacaccagtaacgatgaatgcttttgagctcatctcgacatcccagggtctcaatctcggttcacttttcgaaaaacaaatggggctggtgaaacgaaaaactcgatttacttccaaatcttcggctaatgagatagttacaaaaattgaggctgcggcagcacctatggggtttgatgtcaagacaaataactacaagatgaagctgacaggagagaaatcaggccgcaagggtcagttggcagttgccactgaggtttttcaagttgctccatctctttacatggttgaaatgcgaaaatcagggggtgacacattggaattccacaagttttacaagaaccttaccacgggacttaaggacattgtttggaaaaccatcgacgaagagaaagaggaaggaaccgatggtggtggtactaatggtgccatggctaaccggacaattgcaaaacagtcgacataagctgtttacttttttctaatatagattttgttcgttataaattactatagtagtacggagtggttttgaagttaatacaaaaggaagcgtcaagaagtggagcagaagcagtttgaaactatattggggaatggggattattgatattttaatcatgtttgattccatggaatgttgtgaatagcatatgcgtgttgcgaggttcttggcttgaatcgattaaccgg

SEQ ID NO: 48679 - protein, 482 aa, Arabidopsis thaliana
  peptide (1)..(482): Ceres Seq. ID no. 13591932
MASRTTPSRSTPSRSTPSGSSSGGRTRVGKYELGRTLGEGTFAKVKFARNVENGDNVAIKVIDKEKVLKNKMIAQIKREISTMKLIKHPNVIRMFEVMASKTKIYFVLEFVTGGELFDKISSNGRLKEDEARKYFQQLINAVDYCHSRGVYHRDLKPENLLLDANGALKVSDFGLSALPQQVREDGLLHTTCGTPNYVAPEVINNKGYDGAKADLWSCGVILFVLMAGYLPFEDSNLTSLYKKIFKAEFTCPPWFSASAKKLIKRILDPNPATRITFAEVIENEWFKKGYKAPKFENADVSLDDVDAIFDDSGESKNLVVERREEGLKTPVTMNAFELISTSQGLNLGSLFEKQMGLVKRKTRFTSKSSANEIVTKIEAAAAPMGFDVKTNNYKMKLTGEKSGRKGQLAVATEVFQVAPSLYMVEMRKSGGDTLEFHKFYKNLTTGLKDIVWKTIDEEKEEGTDGGGTNGAMANRTIAKQST

SEQ ID NO: 48680 - protein, 411 aa, Arabidopsis thaliana
  peptide (1)..(411): Ceres Seq. ID no. 13591933
MIAQIKREISTMKLIKHPNVIRMFEVMASKTKIYFVLEFVTGGELFDKISSNGRLKEDEARKYFQQLINAVDYCHSRGVYHRDLKPENLLLDANGALKVSDFGLSALPQQVREDGLLHTTCGTPNYVAPEVINNKGYDGAKADLWSCGVILFVLMAGYLPFEDSNLTSLYKKIFKAEFTCPPWFSASAKKLIKRILDPNPATRITFAEVIENEWFKKGYKAPKFENADVSLDDVDAIFDDSGESKNLVVERREEGLKTPVTMNAFELISTSQGLNLGSLFEKQMGLVKRKTRFTSKSSANEIVTKIEAAAAPMGFDVKTNNYKMKLTGEKSGRKGQLAVATEVFQVAPSLYMVEMRKSGGDTLEFHKFYKNLTTGLKDIVWKTIDEEKEEGTDGGGTNGAMANRTIAKQST

SEQ ID NO: 48681 - protein, 400 aa, Arabidopsis thaliana
  peptide (1)..(400): Ceres Seq. ID no. 13591934
MKLIKHPNVIRMFEVMASKTKIYFVLEFVTGGELFDKISSNGRLKEDEARKYFQQLINAVDYCHSRGVYHRDLKPENLLLDANGALKVSDFGLSALPQQVREDGLLHTTCGTPNYVAPEVINNKGYDGAKADLWSCGVILFVLMAGYLPFEDSNLTSLYKKIFKAEFTCPPWFSASAKKLIKRILDPNPATRITFAEVIENEWFKKGYKAPKFENADVSLDDVDAIFDDSGESKNLVVERREEGLKTPVTMNAFELISTSQGLNLGSLFEKQMGLVKRKTRFTSKSSANEIVTKIEAAAAPMGFDVKTNNYKMKLTGEKSGRKGQLAVATEVFQVAPSLYMVEMRKSGGDTLEFHKFYKNLTTGLKDIVWKTIDEEKEEGTDGGGTNGAMANRTIAKQST

SEQ ID NO: 48682 - DNA, 2092 bp, Arabidopsis thaliana
  misc_feature (1)..(2092): Ceres Seq. ID no. 13592139
  misc_feature (1)..(2092): Ortholog of  Ceres SEQ ID NO 14307496 as cited in SEQ ID NO 58986
gaacgaaactagaaaacgcctatctctgctcattggcttctccatctccgatcaaatccgcggtcgtagtcagagagagagacaaatggctatgcctagggcaacctctggtcccgcttacccggagaggttctacgctgctgcatcttatgtcggtctcgacggatctgattcgtcggcgaaaaacgtcatctcgaaattccccgatgatactgcactacttctctatgcgctataccagcaggctactgtaggaccatgcaacactccgaaacctagtgcctggagaccagtggagcaaagcaaatggaaaagttggcaggggctcggaaccatgccctccattgaggcaatgcgtctctttgtgaaaattctggaggaagatgatcctggttggtattcgagggcatctaatgatattccagatcctgttgtagatgtccaaattaatagagcaaaagatgagcctgttgttgagaatgggagcacatttagtgagacaaaaacaatttctacggagaatggacgtttggctgaaacccaagataaagatgtagtctcagaagactcaaatactgtttctgtatataaccagtggactgcaccccaaacatcaggtcagcgtccaaaagctcgttacgagcatggcgcagcagttattcaagataagatgtatatatatggtggaaatcacaatggccgttaccttggtgatcttcatgttctagatttaaaaagttggacttggtcaagagttgaaaccaaggttgcaacagaatctcaggaaacatcaactccgacattgttagctccttgtgctggtcattctttgatagcatgggacaacaagctgctgtctatcggtggtcacacaaaggatccctcagaatctatgcaagtgaaggtctttgatccccataccattacatggtcaatgttaaagacatatggaaaaccaccggtttcacgtggaggccagtcagttacaatggtgggtaaaaccttggtgatatttggcgggcaagatgcaaagagatcacttctgaacgatttgcatatacttgacctagacacgatgacctgggatgagatagatgccgtgggtgtatctccatctccgaggtctgatcatgctgctgcagtgcatgcagaacggttccttcttatctttggtggcggctcacatgcaacctgtttcgatgacctgcatgtccttgatttgcaaactatggagtggtcaagaccagcacagcaaggtgatgcaccaactccaagagctggacatgctggcgtgacaattggggagaactggtttattgttggtggcggtgataacaagagtggggcatcggagagtgttgtactaaacatgtcaactcttgcatggtcggtcgttgcttcagttcaaggacgtgtacctcttgctagcgagggattaagtttagtggtgagttcatacaatggtgaagatgtactagtcgcttttggtggatacaatggacgttacaataacgaaattaatcttcttaaaccaagccacaaatcaacattgcaaacaaagactctggaagcgcctttgccaggtagtctttctgctgttaataatgccacaaccagagacattgagtctgaggttgaggtgagccaagaaggcagggtacgggaaattgtcatggacaatgttaaccctggatcaaaggttgaaggaaacagcgaacgcattattgcgactattaaatctgagaaggaagagctggaggcatcactgaacaaagagaggatgcagactctccaactaaggcaagagttaggagaagcagaattacgaaacacagatttgtacaaggaacttcaatctgttcgtggccaacttgcagccgaacaatcaaggtgtttcaaactggaggttgatgttgcagagctaagacaaaagcttcaaacattggaaacactacagaaggaactcgaactcctgcaacgtcaaaaggctgcctcagaacaagctgcaatgaacgctaaacgacagggctcgggtggcgtatggggctggctcgctggaagccctcaggaaaaagatgatgattcgccttga

SEQ ID NO: 48683 - protein, 696 aa, Arabidopsis thaliana
  peptide (1)..(696): Ceres Seq. ID no. 13592140
NETRKRLSLLIGFSISDQIRGRSQRERQMAMPRATSGPAYPERFYAAASYVGLDGSDSSAKNVISKFPDDTALLLYALYQQATVGPCNTPKPSAWRPVEQSKWKSWQGLGTMPSIEAMRLFVKILEEDDPGWYSRASNDIPDPVVDVQINRAKDEPVVENGSTFSETKTISTENGRLAETQDKDVVSEDSNTVSVYNQWTAPQTSGQRPKARYEHGAAVIQDKMYIYGGNHNGRYLGDLHVLDLKSWTWSRVETKVATESQETSTPTLLAPCAGHSLIAWDNKLLSIGGHTKDPSESMQVKVFDPHTITWSMLKTYGKPPVSRGGQSVTMVGKTLVIFGGQDAKRSLLNDLHILDLDTMTWDEIDAVGVSPSPRSDHAAAVHAERFLLIFGGGSHATCFDDLHVLDLQTMEWSRPAQQGDAPTPRAGHAGVTIGENWFIVGGGDNKSGASESVVLNMSTLAWSVVASVQGRVPLASEGLSLVVSSYNGEDVLVAFGGYNGRYNNEINLLKPSHKSTLQTKTLEAPLPGSLSAVNNATTRDIESEVEVSQEGRVREIVMDNVNPGSKVEGNSERIIATIKSEKEELEASLNKERMQTLQLRQELGEAELRNTDLYKELQSVRGQLAAEQSRCFKLEVDVAELRQKLQTLETLQKELELLQRQKAASEQAAMNAKRQGSGGVWGWLAGSPQEKDDDSP

SEQ ID NO: 48684 - protein, 668 aa, Arabidopsis thaliana
  peptide (1)..(668): Ceres Seq. ID no. 13592141
MAMPRATSGPAYPERFYAAASYVGLDGSDSSAKNVISKFPDDTALLLYALYQQATVGPCNTPKPSAWRPVEQSKWKSWQGLGTMPSIEAMRLFVKILEEDDPGWYSRASNDIPDPVVDVQINRAKDEPVVENGSTFSETKTISTENGRLAETQDKDVVSEDSNTVSVYNQWTAPQTSGQRPKARYEHGAAVIQDKMYIYGGNHNGRYLGDLHVLDLKSWTWSRVETKVATESQETSTPTLLAPCAGHSLIAWDNKLLSIGGHTKDPSESMQVKVFDPHTITWSMLKTYGKPPVSRGGQSVTMVGKTLVIFGGQDAKRSLLNDLHILDLDTMTWDEIDAVGVSPSPRSDHAAAVHAERFLLIFGGGSHATCFDDLHVLDLQTMEWSRPAQQGDAPTPRAGHAGVTIGENWFIVGGGDNKSGASESVVLNMSTLAWSVVASVQGRVPLASEGLSLVVSSYNGEDVLVAFGGYNGRYNNEINLLKPSHKSTLQTKTLEAPLPGSLSAVNNATTRDIESEVEVSQEGRVREIVMDNVNPGSKVEGNSERIIATIKSEKEELEASLNKERMQTLQLRQELGEAELRNTDLYKELQSVRGQLAAEQSRCFKLEVDVAELRQKLQTLETLQKELELLQRQKAASEQAAMNAKRQGSGGVWGWLAGSPQEKDDDSP

SEQ ID NO: 48685 - protein, 666 aa, Arabidopsis thaliana
  peptide (1)..(666): Ceres Seq. ID no. 13592142
MPRATSGPAYPERFYAAASYVGLDGSDSSAKNVISKFPDDTALLLYALYQQATVGPCNTPKPSAWRPVEQSKWKSWQGLGTMPSIEAMRLFVKILEEDDPGWYSRASNDIPDPVVDVQINRAKDEPVVENGSTFSETKTISTENGRLAETQDKDVVSEDSNTVSVYNQWTAPQTSGQRPKARYEHGAAVIQDKMYIYGGNHNGRYLGDLHVLDLKSWTWSRVETKVATESQETSTPTLLAPCAGHSLIAWDNKLLSIGGHTKDPSESMQVKVFDPHTITWSMLKTYGKPPVSRGGQSVTMVGKTLVIFGGQDAKRSLLNDLHILDLDTMTWDEIDAVGVSPSPRSDHAAAVHAERFLLIFGGGSHATCFDDLHVLDLQTMEWSRPAQQGDAPTPRAGHAGVTIGENWFIVGGGDNKSGASESVVLNMSTLAWSVVASVQGRVPLASEGLSLVVSSYNGEDVLVAFGGYNGRYNNEINLLKPSHKSTLQTKTLEAPLPGSLSAVNNATTRDIESEVEVSQEGRVREIVMDNVNPGSKVEGNSERIIATIKSEKEELEASLNKERMQTLQLRQELGEAELRNTDLYKELQSVRGQLAAEQSRCFKLEVDVAELRQKLQTLETLQKELELLQRQKAASEQAAMNAKRQGSGGVWGWLAGSPQEKDDDSP

SEQ ID NO: 48686 - DNA, 2611 bp, Arabidopsis thaliana; identical to SEQ ID NO: 44956
  misc_feature (1)..(2611): Ceres Seq. ID no. 13591498
  misc_feature (1)..(2611): Ortholog of  Ceres SEQ ID NO 15176095 as cited in SEQ ID NO 59699

SEQ ID NO: 48687 - protein, 798 aa, Arabidopsis thaliana; identical to SEQ ID NO: 44957
  peptide (1)..(798): Ceres Seq. ID no. 13591499

SEQ ID NO: 48688 - protein, 757 aa, Arabidopsis thaliana; identical to SEQ ID NO: 44958
  peptide (1)..(757): Ceres Seq. ID no. 13591500

SEQ ID NO: 48689 - protein, 722 aa, Arabidopsis thaliana; identical to SEQ ID NO: 44959
  peptide (1)..(722): Ceres Seq. ID no. 13591501

SEQ ID NO: 48690 - DNA, 1512 bp, Arabidopsis thaliana; identical to SEQ ID NO: 30958
  misc_feature (1)..(1512): Ceres Seq. ID no. 13591994
  misc_feature (1)..(1512): Ortholog of  Ceres SEQ ID NO 13654285 as cited in SEQ ID NO 68661

SEQ ID NO: 48691 - protein, 325 aa, Arabidopsis thaliana; identical to SEQ ID NO: 30959
  peptide (1)..(325): Ceres Seq. ID no. 13591995

SEQ ID NO: 48692 - protein, 258 aa, Arabidopsis thaliana; identical to SEQ ID NO: 30960
  peptide (1)..(258): Ceres Seq. ID no. 13591996

SEQ ID NO: 48693 - protein, 255 aa, Arabidopsis thaliana; identical to SEQ ID NO: 30961
  peptide (1)..(255): Ceres Seq. ID no. 13591997

SEQ ID NO: 48694 - DNA, 3396 bp, Arabidopsis thaliana
  misc_feature (1)..(3396): Ceres Seq. ID no. 15168803
  misc_feature (1)..(3396): Ortholog of  Ceres SEQ ID NO 15178310 as cited in SEQ ID NO 1089
  misc_feature (1)..(3396): Ortholog of  Ceres SEQ ID NO 14303173 as cited in SEQ ID NO 66550
  misc_feature (1)..(3396): Ortholog of  Ceres SEQ ID NO 15179672 as cited in SEQ ID NO 0
ggtcgtcttcacttaccttctctctacactcacaccatctcacaaccctaatctctcccacacaagagagatagagagaaacaatgaaactttttcttctccttctttttcttctccacatttctcataccttcaccgcaagccgaccaatctccgagttccgtgctctcctctcactcaaaacctctctcaccggcgccggagatgacaaaaactcgcctctctcttcctggaaagtctcaacaagcttctgtacatggattggtgtcacgtgcgatgtctctcgccgtcacgtgacttctcttgatctctccggtctcaacctctccggtactctttccccagatgtttctcatttacgtcttcttcagaatctatcactcgctgaaaatctaatctccggtccgattccgccggaaatctcgagcctttccggtcttcgtcacttaaatctctcgaacaatgtcttcaacggttcgtttcccgatgagatttcttctggattggtgaatctccgagttcttgatgtctacaacaacaatctaaccggagatttaccggtttccgtcaccaatctgactcagctccggcaccttcacctcggcgttaactacttcgctggaaagatcccgccttcgtacggaagctggccagttattgagtatctagcggtttccggcaacgagcttgtcgggaaaatccctccagagatcggaaacctaacgactctccgggagctttacatcggctactacaacgctttcgaagacggtcttcctccagagatcggaaatctatcggagctagtcagattcgacggagctaattgcggattaaacggtgagattccgccggagattgggaagcttcagaaactcgatacgcttttcttgcaagtgaatgtcttctccggtccattaacttgggagctaggaacgctatcgagtttaaaatcaatggatttgtctaacaacatgttcaccggagagattccagcgagtttcgcagagttgaagaatctcacgcttttgaatctcttccgtaacaaacttcacggcgagataccggagttcatcggagatttgccggagcttgaagtgttacagctttgggagaacaatttcaccggaagcatcccgcagaaattaggagaaaacggtaaactaaatctcgtcgatctctcttccaataagctgaccggaactttaccgccgaacatgtgctccggtaacaagttagaaactttaatcactcttggtaactttctctttggttcaatccctgattctcttggtaaatgtgagtctttgacccggatccgaatgggtgagaatttcctgaacgggtcaatcccaaaaggactattcggattacccaaattaactcaagtggagctccaagataattatctctccggagagttaccagtcgccggaggtgtctctgttaatcttggtcagatcagtttatcaaacaaccagctctcaggtccattacctccggcgatcgggaacttcaccggcgttcagaaacttcttcttgatggaaacaagttccaaggtcctattccttcagaggtagggaagcttcagcagctctcgaagattgatttcagccacaacttgttctacggtcgaatcgcgccggagattagtcgttgcaagctcttaacgtttgttgatctgagcagaaacgagctctccggtgaaatcccaaatgagatcactgctatgaagatattgaattacttgaacctgtcgagaaaccatctggttggatcaatccctggttcaatctcgtcaatgcagagcttaacatctcttgatttctcttacaacaacctctccggtttagttccgggaacaggacaattcagttacttcaactacacatcgttcttgggtaatcctgatctctgtggtccttatcttggtccttgtaaagacggtgttgctaaaggaggtcaccagagtcatagtaaaggacctttatcagcttctatgaagttattgcttgttcttggactacttgtttgttcgattgcgttcgcggtagtagccataatcaaagctagatcattgaaaaaggcgagtgagtcacgggcttggaggttaacagctttccagagactagacttcacgtgtgacgatgtcttggattctctcaaagaagacaacattataggcaaaggaggagctggtattgtctataaaggcgtaatgcctaatggtgatctagtcgcggttaaaagactcgctgcaatgtctcgtggatcttcccatgatcacggcttcaacgcagagattcaaaccttaggaaggataagacacagacacatagtgaggcttctcggattttgctcaaaccacgagacgaatctacttgtctatgagtacatgcctaatggtagtctcggtgaggtgcttcacggtaagaaaggaggacacttgcattgggacacacgttacaagattgctcttgaagctgctaaaggactctgttaccttcatcacgattgttctccattgatcgttcacagagatgtcaaatcaaacaacatcctccttgattcaaactttgaagctcatgttgctgactttggtctcgctaaattccttcaagattccggtacttctgaatgtatgtctgcaatcgctggctcttacggctacatagctccagagtatgcgtatacgttgaaggtagatgagaagagcgatgtgtatagtttcggtgtggttcttttggaactcgtcaccggaagaaaacctgtcggagaatttggagacggtgtcgatatagtgcaatgggttcgtaaaatgactgattcgaacaaggattcggttctgaaagtattggatccgagactttcttcgattccgattcatgaagtgacgcacgtcttctatgtagcgatgctctgtgtagaagaacaagctgttgagaggccgactatgagagaagttgttcagattctcactgagatcccgaagttgccaccgtcgaaggatcagccgatgacggaatcagcgccggagagtgagctttcgccgaagtctggtgttcaaagtccgccggatctactcaatctatgagagttttatgattcacggcggttaatttagggtaccggtataaggggtaaatctgtcttttcataaatgttattagcgatgagatttggttgttaatttactttaatccctcttagtacggtttgtgctttggtccggtttagtagggttttttttgaaagaaggttgtttaaactctttttaagtgtgtttcattttccttttttatgtttttaatcggtattcggctttatttagtttgtaatttgtgttaatgaaaatgtacagttttttttttttgaaggaatttcaaaatatcttg

SEQ ID NO: 48695 - protein, 1003 aa, Arabidopsis thaliana
  peptide (1)..(1003): Ceres Seq. ID no. 15168804
MKLFLLLLFLLHISHTFTASRPISEFRALLSLKTSLTGAGDDKNSPLSSWKVSTSFCTWIGVTCDVSRRHVTSLDLSGLNLSGTLSPDVSHLRLLQNLSLAENLISGPIPPEISSLSGLRHLNLSNNVFNGSFPDEISSGLVNLRVLDVYNNNLTGDLPVSVTNLTQLRHLHLGVNYFAGKIPPSYGSWPVIEYLAVSGNELVGKIPPEIGNLTTLRELYIGYYNAFEDGLPPEIGNLSELVRFDGANCGLNGEIPPEIGKLQKLDTLFLQVNVFSGPLTWELGTLSSLKSMDLSNNMFTGEIPASFAELKNLTLLNLFRNKLHGEIPEFIGDLPELEVLQLWENNFTGSIPQKLGENGKLNLVDLSSNKLTGTLPPNMCSGNKLETLITLGNFLFGSIPDSLGKCESLTRIRMGENFLNGSIPKGLFGLPKLTQVELQDNYLSGELPVAGGVSVNLGQISLSNNQLSGPLPPAIGNFTGVQKLLLDGNKFQGPIPSEVGKLQQLSKIDFSHNLFYGRIAPEISRCKLLTFVDLSRNELSGEIPNEITAMKILNYLNLSRNHLVGSIPGSISSMQSLTSLDFSYNNLSGLVPGTGQFSYFNYTSFLGNPDLCGPYLGPCKDGVAKGGHQSHSKGPLSASMKLLLVLGLLVCSIAFAVVAIIKARSLKKASESRAWRLTAFQRLDFTCDDVLDSLKEDNIIGKGGAGIVYKGVMPNGDLVAVKRLAAMSRGSSHDHGFNAEIQTLGRIRHRHIVRLLGFCSNHETNLLVYEYMPNGSLGEVLHGKKGGHLHWDTRYKIALEAAKGLCYLHHDCSPLIVHRDVKSNNILLDSNFEAHVADFGLAKFLQDSGTSECMSAIAGSYGYIAPEYAYTLKVDEKSDVYSFGVVLLELVTGRKPVGEFGDGVDIVQWVRKMTDSNKDSVLKVLDPRLSSIPIHEVTHVFYVAMLCVEEQAVERPTMREVVQILTEIPKLPPSKDQPMTESAPESELSPKSGVQSPPDLLNL

SEQ ID NO: 48696 - protein, 712 aa, Arabidopsis thaliana
  peptide (1)..(712): Ceres Seq. ID no. 15168805
MDLSNNMFTGEIPASFAELKNLTLLNLFRNKLHGEIPEFIGDLPELEVLQLWENNFTGSIPQKLGENGKLNLVDLSSNKLTGTLPPNMCSGNKLETLITLGNFLFGSIPDSLGKCESLTRIRMGENFLNGSIPKGLFGLPKLTQVELQDNYLSGELPVAGGVSVNLGQISLSNNQLSGPLPPAIGNFTGVQKLLLDGNKFQGPIPSEVGKLQQLSKIDFSHNLFYGRIAPEISRCKLLTFVDLSRNELSGEIPNEITAMKILNYLNLSRNHLVGSIPGSISSMQSLTSLDFSYNNLSGLVPGTGQFSYFNYTSFLGNPDLCGPYLGPCKDGVAKGGHQSHSKGPLSASMKLLLVLGLLVCSIAFAVVAIIKARSLKKASESRAWRLTAFQRLDFTCDDVLDSLKEDNIIGKGGAGIVYKGVMPNGDLVAVKRLAAMSRGSSHDHGFNAEIQTLGRIRHRHIVRLLGFCSNHETNLLVYEYMPNGSLGEVLHGKKGGHLHWDTRYKIALEAAKGLCYLHHDCSPLIVHRDVKSNNILLDSNFEAHVADFGLAKFLQDSGTSECMSAIAGSYGYIAPEYAYTLKVDEKSDVYSFGVVLLELVTGRKPVGEFGDGVDIVQWVRKMTDSNKDSVLKVLDPRLSSIPIHEVTHVFYVAMLCVEEQAVERPTMREVVQILTEIPKLPPSKDQPMTESAPESELSPKSGVQSPPDLLNL

SEQ ID NO: 48697 - protein, 706 aa, Arabidopsis thaliana
  peptide (1)..(706): Ceres Seq. ID no. 15168806
MFTGEIPASFAELKNLTLLNLFRNKLHGEIPEFIGDLPELEVLQLWENNFTGSIPQKLGENGKLNLVDLSSNKLTGTLPPNMCSGNKLETLITLGNFLFGSIPDSLGKCESLTRIRMGENFLNGSIPKGLFGLPKLTQVELQDNYLSGELPVAGGVSVNLGQISLSNNQLSGPLPPAIGNFTGVQKLLLDGNKFQGPIPSEVGKLQQLSKIDFSHNLFYGRIAPEISRCKLLTFVDLSRNELSGEIPNEITAMKILNYLNLSRNHLVGSIPGSISSMQSLTSLDFSYNNLSGLVPGTGQFSYFNYTSFLGNPDLCGPYLGPCKDGVAKGGHQSHSKGPLSASMKLLLVLGLLVCSIAFAVVAIIKARSLKKASESRAWRLTAFQRLDFTCDDVLDSLKEDNIIGKGGAGIVYKGVMPNGDLVAVKRLAAMSRGSSHDHGFNAEIQTLGRIRHRHIVRLLGFCSNHETNLLVYEYMPNGSLGEVLHGKKGGHLHWDTRYKIALEAAKGLCYLHHDCSPLIVHRDVKSNNILLDSNFEAHVADFGLAKFLQDSGTSECMSAIAGSYGYIAPEYAYTLKVDEKSDVYSFGVVLLELVTGRKPVGEFGDGVDIVQWVRKMTDSNKDSVLKVLDPRLSSIPIHEVTHVFYVAMLCVEEQAVERPTMREVVQILTEIPKLPPSKDQPMTESAPESELSPKSGVQSPPDLLNL

SEQ ID NO: 48698 - DNA, 1548 bp, Arabidopsis thaliana
  misc_feature (1)..(1548): Ceres Seq. ID no. 14316132
  misc_feature (1)..(1548): Ortholog of  Ceres SEQ ID NO 14306538 as cited in SEQ ID NO 53117
ggtaaagttttttttcccaaatagtactttttgttttgtttggccttcttatagaaagaagaactcaaagcacagagagaagatgagcgaagaacaaccacacgccaatctagcggttcccgcgtttaaaactgagaaagatcccgtaacgcaaacgcaaaatggtcaaagtagcgtttggcgtttcggtggaagtgataaggcagcgaaagcatccaccgtaacgcttagaggtgtcatctacatgatcttcgacaactgcagcaaagacgtcaataagaccattttacccctcggccacggtgaccttccgtctacccttgcttccgtacctgtatcgaagctgaagacgccgtcgtcgacgtccttcgctccggcaaaggcaattcttacggtcccggagctgggattctccccgcaagacgagccgttgctgattatatgaaccgagatcttccgcacaagttaacgcctgaagatatttttctgaccgctggatgcaaccaagggatagagatcgtgttcgaatcgttggctcgaccaaacgcaaacatcttgctcccacgtcctggcttccctcattacgacgctcgtgctgcttacagtggtctcgaggttcgcaagtttgatcttcttcccgagaaagaatgggagattgatcttgaaggtatcgaagccattgcagacgagaaaactgtggctatggttgtaattaaccccaacaatccctgtggaaatgtctactctcacgaccatctcaaaaaggttgcagagacggctaggaagctcgggataatggtgatctcagacgaagtatatgaccgaactatattcggagacaatccatttgttccaatggggaagtttgcttcgatagtccctgtattgacactagcaggcatatctaagggatgggttgttcctggatggaaaattggctggatcgccttgaatgatcccgagggcgttttcgagaccaccaaggtgttacaatccatcaaacagaatcttgacgtaactcctgaccctgccacaataattcaggctgcacttccagcgatcctggagaaagcggacaaaaacttctttgcaagaagaacaagatactcaaacataatgttgatttggtgtgtgataggctcaaggacatcccctgtgtcgtctgtcccaagaaacctgagtcttgcacttacttattgacaaagttggagctgtcactgatggataatatcaaggacgatatagatttttgcgtaaaactggccagagaggagaatctcgtgtttctaccaggggatgctctgggtttgaagaactggatgaggataaccatcggagtcgaagctcatatgcttgaggatgcacttgagagactgaagggtttctgtacacgtcatgccaagaagacagagacagaaactgagtcacttcaagctttgaaactgagtgataataatctcgaaatgtaaaacagaagaggatgtgtgtgcccaaaagaatattcttatgatagataattttgattcttgcttttccatttgatttccc

SEQ ID NO: 48699 - protein, 252 aa, Arabidopsis thaliana
  peptide (1)..(252): Ceres Seq. ID no. 14316133
MNRDLPHKLTPEDIFLTAGCNQGIEIVFESLARPNANILLPRPGFPHYDARAAYSGLEVRKFDLLPEKEWEIDLEGIEAIADEKTVAMVVINPNNPCGNVYSHDHLKKVAETARKLGIMVISDEVYDRTIFGDNPFVPMGKFASIVPVLTLAGISKGWVVPGWKIGWIALNDPEGVFETTKVLQSIKQNLDVTPDPATIIQAALPAILEKADKNFFARRTRYSNIMLIWCVIGSRTSPVSSVPRNLSLALTY

SEQ ID NO: 48700 - protein, 165 aa, Arabidopsis thaliana
  peptide (1)..(165): Ceres Seq. ID no. 14316134
MVVINPNNPCGNVYSHDHLKKVAETARKLGIMVISDEVYDRTIFGDNPFVPMGKFASIVPVLTLAGISKGWVVPGWKIGWIALNDPEGVFETTKVLQSIKQNLDVTPDPATIIQAALPAILEKADKNFFARRTRYSNIMLIWCVIGSRTSPVSSVPRNLSLALTY

SEQ ID NO: 48701 - protein, 147 aa, Arabidopsis thaliana
  peptide (1)..(147): Ceres Seq. ID no. 14316135
VKFFFPNSTFCFVWPSYRKKNSKHREKMSEEQPHANLAVPAFKTEKDPVTQTQNGQSSVWRFGGSDKAAKASTVTLRGVIYMIFDNCSKDVNKTILPLGHGDLPSTLASVPVSKLKTPSSTSFAPAKAILTVPELGFSPQDEPLLII

SEQ ID NO: 48702 - DNA, 2543 bp, Arabidopsis thaliana; identical to SEQ ID NO: 47501
  misc_feature (1)..(2543): Ceres Seq. ID no. 12601296
  misc_feature (1)..(2543): Ortholog of  Ceres SEQ ID NO 14307896 as cited in SEQ ID NO 66915
  misc_feature (1)..(2543): Ortholog of  Ceres SEQ ID NO 13657008 as cited in SEQ ID NO 69164

SEQ ID NO: 48703 - protein, 673 aa, Arabidopsis thaliana; identical to SEQ ID NO: 47502
  peptide (1)..(673): Ceres Seq. ID no. 12601297

SEQ ID NO: 48704 - protein, 605 aa, Arabidopsis thaliana; identical to SEQ ID NO: 47503
  peptide (1)..(605): Ceres Seq. ID no. 12601298

SEQ ID NO: 48705 - protein, 507 aa, Arabidopsis thaliana; identical to SEQ ID NO: 47504
  peptide (1)..(507): Ceres Seq. ID no. 12601299

SEQ ID NO: 48706 - DNA, 2386 bp, Arabidopsis thaliana; identical to SEQ ID NO: 46186
  misc_feature (1)..(2386): Ceres Seq. ID no. 12601233
  misc_feature (1)..(2386): Ortholog of  Ceres SEQ ID NO 12778278 as cited in SEQ ID NO 63035

SEQ ID NO: 48707 - protein, 619 aa, Arabidopsis thaliana; identical to SEQ ID NO: 46187
  peptide (1)..(619): Ceres Seq. ID no. 12601234

SEQ ID NO: 48708 - protein, 612 aa, Arabidopsis thaliana; identical to SEQ ID NO: 46188
  peptide (1)..(612): Ceres Seq. ID no. 12601235

SEQ ID NO: 48709 - protein, 490 aa, Arabidopsis thaliana; identical to SEQ ID NO: 46189
  peptide (1)..(490): Ceres Seq. ID no. 12601236

SEQ ID NO: 48710 - DNA, 1322 bp, Arabidopsis thaliana
  misc_feature (1)..(1322): Ceres Seq. ID no. 13592047
  misc_feature (1)..(1322): Ortholog of  Ceres SEQ ID NO 15174737 as cited in SEQ ID NO 52912
  misc_feature (1)..(1322): Ortholog of  Ceres SEQ ID NO 13624551 as cited in SEQ ID NO 0
ttcgttaagctctttcatactctgttccatctctctctctctttctcactgatctcatttcattccttatctttccaattttaccctcacgttaccttcgaattctccatctcctaccattcaaagcttctctcagatgtctatagtctctaagcttcgttctccggttaaaccaatagatgagtcacgagctatcctctgttcgaccgggaacagatttaaggttacgaaaacagaaatgacgaagaagccacaactgaatccacgagtgacgaaatctccggcgacgaagaagcccgattccaatttctcagtttcgactgatgattcctcttcttcttcttcatcctcggaacgttcgtcagtgaacacgacaaactctgggaaagtaaccactccgtcgaaacggaacggagttgagaagctcaataatgtcgttgcctccgtcgccgtcgttgaagacattagtcctaaaattccgggaccggtcaagagatgccactggatcacacctaattcagacccgatctatgttttgttccacgacgaggaatggggtgttccagttcgtgatgacaagaaactcttcgagctacttgtcttctcacaagctttggctgagtttagctggccttcaatcctacgcagaagagacgactttaggaagctctttgaagagtttgatccttcagctatagcacaattcacagagaagaggttgatgtctcttagagttaatgggtgtctaattctatccgaacagaaactgcgagcaattgtagagaacgcgaaatctgttctcaaggtcaagcaggaatttggatcgttcagtaattattgttggagatttgtgaaccacaagccattaagaaatggctatcgatatggtcgtcaagtaccggttaagtccccaaaggcagagtacattagcaaagatatgatgcagagagggtttcgctgcgttggtcctactgttatgtattccttcttgcaggcctctggcattgttaatgatcatctcacagcttgtttcagataccaagaatgtaatgttgagactgagagagaaacaaaaagccatgagactgaaaccaaactggatctgcattctccattacttgtttgatcagaaacagggattggactattaagaagatgagtgaccagtgtttgtattcgttatggaatgtaccatttgtagctagctgtgttcattgattatgctactatcctagctagctttgtctaactagatatttgatgatgtgttagtgtttgaccaaaagattgattgcagggaaataaagaatttaacattttgt

SEQ ID NO: 48711 - protein, 329 aa, Arabidopsis thaliana
  peptide (1)..(329): Ceres Seq. ID no. 13592048
MSIVSKLRSPVKPIDESRAILCSTGNRFKVTKTEMTKKPQLNPRVTKSPATKKPDSNFSVSTDDSSSSSSSSERSSVNTTNSGKVTTPSKRNGVEKLNNVVASVAVVEDISPKIPGPVKRCHWITPNSDPIYVLFHDEEWGVPVRDDKKLFELLVFSQALAEFSWPSILRRRDDFRKLFEEFDPSAIAQFTEKRLMSLRVNGCLILSEQKLRAIVENAKSVLKVKQEFGSFSNYCWRFVNHKPLRNGYRYGRQVPVKSPKAEYISKDMMQRGFRCVGPTVMYSFLQASGIVNDHLTACFRYQECNVETERETKSHETETKLDLHSPLLV

SEQ ID NO: 48712 - protein, 295 aa, Arabidopsis thaliana
  peptide (1)..(295): Ceres Seq. ID no. 13592049
MTKKPQLNPRVTKSPATKKPDSNFSVSTDDSSSSSSSSERSSVNTTNSGKVTTPSKRNGVEKLNNVVASVAVVEDISPKIPGPVKRCHWITPNSDPIYVLFHDEEWGVPVRDDKKLFELLVFSQALAEFSWPSILRRRDDFRKLFEEFDPSAIAQFTEKRLMSLRVNGCLILSEQKLRAIVENAKSVLKVKQEFGSFSNYCWRFVNHKPLRNGYRYGRQVPVKSPKAEYISKDMMQRGFRCVGPTVMYSFLQASGIVNDHLTACFRYQECNVETERETKSHETETKLDLHSPLLV

SEQ ID NO: 48713 - DNA, 1855 bp, Arabidopsis thaliana
  misc_feature (1)..(1855): Ceres Seq. ID no. 15175604
  misc_feature (1)..(1855): Ortholog of  Ceres SEQ ID NO 13639636 as cited in SEQ ID NO 60184
tgtctctctctctctctctcggttctcttcttcactgagctcaaagcgattacctcccatgggaaaaatctctgaagtgattatttagcactactttttctttgtctccttctgaatccattttttatggatcttggagttcgtgtttctggtcatgaaaccgtttcttctccgggtcaaactgaactcggatctggtttcagtaacaagcaagaaagatccggtttcgatggtgaagattgctggagaagttcaaagctctcacgaacatcaactgatggattctcttcttcccctgcctctgctaaaacgctgtcgtttcatcaaggcatccctttactgagatctaccactaatgatcctcgtaaaggacaagaacacatgcttagcttctcttctgcttcagacaaatcagatgtctcaccttatcttcagtactgtagaaactcaggatatggtttaggaggaatgatgaacacaagcaacatgcatggaaacttgttgacaggagtaaaaggacctttttcattgactcagtgggcagagctagagcaacaggcgttgatctataagtatatcacagccaatgtccctgttccatctagtttacttctctctctcaagaaatcttttttcccttatggttccttgcctcctaattcttttggatggggctcttttcatctgggcttttccggtggtaacatggatcccgagccagggagatgtcgccggacagatggaaagaaatggcggtgctcgagggacgctgttcccgatcaaaagtactgtgaacgacatattaacagaggccgccatcgttcaagaaagcctgtggaaggccaaaatggccacaatactaatgctgccgccgctgcttctgctgctgccgcttctaccgctgctgctgtgtccaaagcggcagcggggacttcagctgttgcgatgcgtggatcagataataacaatagccttgccgctgctgttggaacacaacatcataccaataatcaatctacagattctttggctaacagagttcaaaattctcgaggggcttcggtttttcctgccacgatgaacttacagtcgaaggaaactcatccgaaacaaagcaataatccctttgaattcggactcatctcctctgattcgttacttaatccgtcgcataaacaagcctcgtatgcaacctcttccaaaggctttggatcgtatcttgacttcggcaaccaagccaagcacgcggggaatcacaacaatgtcgattcttggcccgaagagctgaaatcggattggactcagctctcaatgtcaatccctatggctccatcttcccctgttcaagataaacttgcactctcacctttaaggttatcgcgtgagtttgaccccgcgatccacatgggattaggcgtcaacaccgagtttcttgaccccgggaaaaagacgaataactggataccaatctcctggggtaataacaactccatgggaggtccactcggcgaggtactaaacagcacgaccaatagtcccaagtttggttcctctccaacaggcgtcttgcaaaagtcgacatttggttctctttctaacagcagctcggcaagcagcaccatcattggcgataacaacaataagaacggtgatggaaaagatccgcttggcccgaccacgctgatgaatacttctgctactgctccttctctgtgaaactgaaaaaaaaaaaactaaggacaattgcgaaaacaaaaacactctgtttttctctgtttctggtttttcttacttgatgcattgttgtttctgttgctgttttctttctatataaagcaagaagaaactaaaggag

SEQ ID NO: 48714 - protein, 529 aa, Arabidopsis thaliana
  peptide (1)..(529): Ceres Seq. ID no. 15175605
MDLGVRVSGHETVSSPGQTELGSGFSNKQERSGFDGEDCWRSSKLSRTSTDGFSSSPASAKTLSFHQGIPLLRSTTNDPRKGQEHMLSFSSASDKSDVSPYLQYCRNSGYGLGGMMNTSNMHGNLLTGVKGPFSLTQWAELEQQALIYKYITANVPVPSSLLLSLKKSFFPYGSLPPNSFGWGSFHLGFSGGNMDPEPGRCRRTDGKKWRCSRDAVPDQKYCERHINRGRHRSRKPVEGQNGHNTNAAAAASAAAASTAAAVSKAAAGTSAVAMRGSDNNNSLAAAVGTQHHTNNQSTDSLANRVQNSRGASVFPATMNLQSKETHPKQSNNPFEFGLISSDSLLNPSHKQASYATSSKGFGSYLDFGNQAKHAGNHNNVDSWPEELKSDWTQLSMSIPMAPSSPVQDKLALSPLRLSREFDPAIHMGLGVNTEFLDPGKKTNNWIPISWGNNNSMGGPLGEVLNSTTNSPKFGSSPTGVLQKSTFGSLSNSSSASSTIIGDNNNKNGDGKDPLGPTTLMNTSATAPSL

SEQ ID NO: 48715 - protein, 444 aa, Arabidopsis thaliana
  peptide (1)..(444): Ceres Seq. ID no. 15175606
MLSFSSASDKSDVSPYLQYCRNSGYGLGGMMNTSNMHGNLLTGVKGPFSLTQWAELEQQALIYKYITANVPVPSSLLLSLKKSFFPYGSLPPNSFGWGSFHLGFSGGNMDPEPGRCRRTDGKKWRCSRDAVPDQKYCERHINRGRHRSRKPVEGQNGHNTNAAAAASAAAASTAAAVSKAAAGTSAVAMRGSDNNNSLAAAVGTQHHTNNQSTDSLANRVQNSRGASVFPATMNLQSKETHPKQSNNPFEFGLISSDSLLNPSHKQASYATSSKGFGSYLDFGNQAKHAGNHNNVDSWPEELKSDWTQLSMSIPMAPSSPVQDKLALSPLRLSREFDPAIHMGLGVNTEFLDPGKKTNNWIPISWGNNNSMGGPLGEVLNSTTNSPKFGSSPTGVLQKSTFGSLSNSSSASSTIIGDNNNKNGDGKDPLGPTTLMNTSATAPSL

SEQ ID NO: 48716 - protein, 415 aa, Arabidopsis thaliana; identical to SEQ ID NO: 45498
  peptide (1)..(415): Ceres Seq. ID no. 15175607

SEQ ID NO: 48717 - DNA, 1877 bp, Arabidopsis thaliana
  misc_feature (1)..(1877): Ceres Seq. ID no. 13592013
  misc_feature (1)..(1877): Ortholog of  Ceres SEQ ID NO 14308359 as cited in SEQ ID NO 55097
  misc_feature (1)..(1877): Ortholog of  Ceres SEQ ID NO 15169195 as cited in SEQ ID NO 55200
  misc_feature (1)..(1877): Ortholog of  Ceres SEQ ID NO 15226540 as cited in SEQ ID NO 58479
  misc_feature (1)..(1877): Ortholog of  Ceres SEQ ID NO 13581611 as cited in SEQ ID NO 59028
  misc_feature (1)..(1877): Ortholog of  Ceres SEQ ID NO 13596689 as cited in SEQ ID NO 62728
  misc_feature (1)..(1877): Ortholog of  Ceres SEQ ID NO 14301693 as cited in SEQ ID NO 69246
gacgtaagattcttctccttttgaactgtaaaattcactcttttttaatttcttaatctttcttatcattactttctctattttattttgncattttctcttaaaccttcttcttcttcttcctttgatcagtaaaaaaagtcaccgccttcttcttctctttcctctttcccctaattgatcaatcatgcttcttcatttctagttctctcttcctgactcatttccctcattagatcttcttctccactaaacccataattgaaagaagctctttttttgcttacattgaagttaaaaaatcatcacttgttttgtttttgaagaaacacacataaagtttgtctttttacttctcaaatttggttgttttcactcaatttcaatcttgctttctgattcagattctgggttttcttcagaattcccagagaagttgttggaattgaatttttcacttttttgttcataaaagttctagtctttttagatgaacatggacaaggaaacagagcaaaccctaaattacttacctttgggtcagagcgatccctttggcaatggcaatgaaggaacaattggagatttccttggaagatactgcaacaaccctcaggagatttcaccgttaactctacaatccttctctctgaattctcagatctccgagaatttcccaatctctggtggaatcagattccctccatatccaggtcaatttggatccgatcgtgaatttgggtcacaaccaacaacgcaggagagtaacaagagctctttgttggatccagattcagtttcggatcgagttcacaccacgaaatctaactctagaaagaggaagtcgattcctagtggtaatggcaaggagtctccagcttcatcgtctcttacagcttccaattcaaaggtttcaggagagaatggtggatctaaaggtgggaagagaagcaagcaagatgtagctgggagtagtaaaaacggagtagagaagtgcgatagtaaaggcgacaataaggacgatgctaagcctcctgaggcgcctaaagattatattcatgtcagagctagaaggggtcaagcaactgatagccatagtcttgctgaaagagcaagaagagaaaagattagtgagagaatgacgttgcttcaggatctggttcctggttgcaaccggattacagggaaagcagtcatgcttgatgaaattataaattatgtgcagtccttgcagagacaagttgagttcttgtccatgaagctggctaccgtaaatccaaggatggagtttaatgctaatgcttctttatccacagagatgattcaaccgggggagtcgttaacgcagtctctttacgcaatggcttgctcagagcaaagacttccatcagcatactattcacttggcaagaacatgccaagattctcagacacacaattcccctcaaacgatggatttgttcacactgagacaccaggattctgggaaaataatgacctgcaaagcattgttcagatgggttttggagatatcctccagcaacagagcaacaacaacaacaacaactgttctgagccaacgcttcagatgaagcttgaaccatagtccatagctatgattattatctctgttgtacatacagaaaaccaagtagtgatgagtaacggagtgaatcatattggaattttaatgtttacaatcgttgcttctttgcttgtgtctctgttgatttcttctcaaccttaaacaaaaaaaaaacaagaaaacttcagattaagtatgtaaaaatatgacaagaacttttctctgtactgttttacaatcgttatgtattatgattgctctaagcttgtaagaaacaggaataaatttgttc

SEQ ID NO: 48718 - protein, 371 aa, Arabidopsis thaliana
  peptide (1)..(371): Ceres Seq. ID no. 13592014
MNMDKETEQTLNYLPLGQSDPFGNGNEGTIGDFLGRYCNNPQEISPLTLQSFSLNSQISENFPISGGIRFPPYPGQFGSDREFGSQPTTQESNKSSLLDPDSVSDRVHTTKSNSRKRKSIPSGNGKESPASSSLTASNSKVSGENGGSKGGKRSKQDVAGSSKNGVEKCDSKGDNKDDAKPPEAPKDYIHVRARRGQATDSHSLAERARREKISERMTLLQDLVPGCNRITGKAVMLDEIINYVQSLQRQVEFLSMKLATVNPRMEFNANASLSTEMIQPGESLTQSLYAMACSEQRLPSAYYSLGKNMPRFSDTQFPSNDGFVHTETPGFWENNDLQSIVQMGFGDILQQQSNNNNNNCSEPTLQMKLEP

SEQ ID NO: 48719 - protein, 369 aa, Arabidopsis thaliana
  peptide (1)..(369): Ceres Seq. ID no. 13592015
MDKETEQTLNYLPLGQSDPFGNGNEGTIGDFLGRYCNNPQEISPLTLQSFSLNSQISENFPISGGIRFPPYPGQFGSDREFGSQPTTQESNKSSLLDPDSVSDRVHTTKSNSRKRKSIPSGNGKESPASSSLTASNSKVSGENGGSKGGKRSKQDVAGSSKNGVEKCDSKGDNKDDAKPPEAPKDYIHVRARRGQATDSHSLAERARREKISERMTLLQDLVPGCNRITGKAVMLDEIINYVQSLQRQVEFLSMKLATVNPRMEFNANASLSTEMIQPGESLTQSLYAMACSEQRLPSAYYSLGKNMPRFSDTQFPSNDGFVHTETPGFWENNDLQSIVQMGFGDILQQQSNNNNNNCSEPTLQMKLEP

SEQ ID NO: 48720 - DNA, 1186 bp, Arabidopsis thaliana
  misc_feature (1)..(1186): Ceres Seq. ID no. 15168776
  misc_feature (1)..(1186): Ortholog of  Ceres SEQ ID NO 14314312 as cited in SEQ ID NO 57283
gggctcacggtttagtacatgcacacaaagcaaaaacgctggtttgtctttttttttaaaaagaacttcgtttctcttcaattccgttaccgtcactgtcaccgttcacctccgtttatctcatcctcaccgttcatcttcttcgatctaactcgccgtcgttcaccttataatggacaccgtcaacgattccttttcgccgggatcttcccgaccttcgccggcgacgctttctcgtgaagattgctggagcgaggaagcgaccttcacgctcatccaagcctggggtaatcgctacgtcgacctcagccgaggtaatctccgtcagaaacactggcaagaggtggctaacgccgttaacgaccgtcactacaacaccggtcgaaacgtttccgccgccaaatcgcagccgtatcgcaccgacgttcagtgtaaaaaccggatcgatactctgaagaagaagtacaaagtcgagaaggctagggtttcggaatccaatcccggtgcctacatcagcccttggcctttcttctccgctctcgatgaccttctccgggaaagctttccgacgtctagtaatcctgattcaactgataacatcccgcaccagaggctaacacttccgatgtccattaatccagttccggtcgctccacgatcggcgatccccagacgtccggcgacatcgccggcgattatacctcacgccggtgacgatttactcggatttcgcgggaatctcaacgcattcgcggcagccgcagcggcggcggcgtgtccggcgtctgaagatgactcggaaggttcaaggtctagatcgagcggtcgtagcgggagtaacaagaagcgggagaggaaaattgagaagaagcaaggctacaaggaagttgccgacgcaattgagaggcttggacagatatacgagagagtcgaggagaagaagaggaaggaaatggttgaattggagaagcagagaatgagattcgctaaggaattggaatgccataggatgcaactgttcacggagatgcaggtacgccttcataagctccggcgtacctctggctccaaaggaccgacttcctccgcctccgccggtgagacctgaatcctttctctcgccgtatttcgtaatctgttcagaattctatgtctttctccattgtttagctgtgtaacagtgact

SEQ ID NO: 48721 - protein, 311 aa, Arabidopsis thaliana
  peptide (1)..(311): Ceres Seq. ID no. 15168777
MDTVNDSFSPGSSRPSPATLSREDCWSEEATFTLIQAWGNRYVDLSRGNLRQKHWQEVANAVNDRHYNTGRNVSAAKSQPYRTDVQCKNRIDTLKKKYKVEKARVSESNPGAYISPWPFFSALDDLLRESFPTSSNPDSTDNIPHQRLTLPMSINPVPVAPRSAIPRRPATSPAIIPHAGDDLLGFRGNLNAFAAAAAAAACPASEDDSEGSRSRSSGRSGSNKKRERKIEKKQGYKEVADAIERLGQIYERVEEKKRKEMVELEKQRMRFAKELECHRMQLFTEMQVRLHKLRRTSGSKGPTSSASAGET

SEQ ID NO: 48722 - protein, 160 aa, Arabidopsis thaliana
  peptide (1)..(160): Ceres Seq. ID no. 15168778
MSINPVPVAPRSAIPRRPATSPAIIPHAGDDLLGFRGNLNAFAAAAAAAACPASEDDSEGSRSRSSGRSGSNKKRERKIEKKQGYKEVADAIERLGQIYERVEEKKRKEMVELEKQRMRFAKELECHRMQLFTEMQVRLHKLRRTSGSKGPTSSASAGET

SEQ ID NO: 48723 - DNA, 2185 bp, Arabidopsis thaliana; identical to SEQ ID NO: 30616
  misc_feature (1)..(2185): Ceres Seq. ID no. 13591907
  misc_feature (1)..(2185): Ortholog of  Ceres SEQ ID NO 15171235 as cited in SEQ ID NO 52469
  misc_feature (1)..(2185): Ortholog of  Ceres SEQ ID NO 15172705 as cited in SEQ ID NO 56069
  misc_feature (1)..(2185): Ortholog of  Ceres SEQ ID NO 12635657 as cited in SEQ ID NO 0
  misc_feature (1)..(2185): Ortholog of  Ceres SEQ ID NO 12635879 as cited in SEQ ID NO 0
  misc_feature (1)..(2185): Ortholog of  Ceres SEQ ID NO 13599649 as cited in SEQ ID NO 0
  misc_feature (1)..(2185): Ortholog of  Ceres SEQ ID NO 14309205 as cited in SEQ ID NO 0
  misc_feature (1)..(2185): Ortholog of  Ceres SEQ ID NO 15177492 as cited in SEQ ID NO 0

SEQ ID NO: 48724 - protein, 446 aa, Arabidopsis thaliana; identical to SEQ ID NO: 30617
  peptide (1)..(446): Ceres Seq. ID no. 13591908

SEQ ID NO: 48725 - protein, 338 aa, Arabidopsis thaliana; identical to SEQ ID NO: 30618
  peptide (1)..(338): Ceres Seq. ID no. 13591909

SEQ ID NO: 48726 - protein, 253 aa, Arabidopsis thaliana; identical to SEQ ID NO: 30619
  peptide (1)..(253): Ceres Seq. ID no. 13591910

SEQ ID NO: 48727 - DNA, 1704 bp, Arabidopsis thaliana
  misc_feature (1)..(1704): Ceres Seq. ID no. 15175797
  misc_feature (1)..(1704): Ortholog of  Ceres SEQ ID NO 15171382 as cited in SEQ ID NO 51642
  misc_feature (1)..(1704): Ortholog of  Ceres SEQ ID NO 15168545 as cited in SEQ ID NO 57829
  misc_feature (1)..(1704): Ortholog of  Ceres SEQ ID NO 15168468 as cited in SEQ ID NO 58115
  misc_feature (1)..(1704): Ortholog of  Ceres SEQ ID NO 15179784 as cited in SEQ ID NO 64755
  misc_feature (1)..(1704): Ortholog of  Ceres SEQ ID NO 13596440 as cited in SEQ ID NO 68769
  misc_feature (1)..(1704): Ortholog of  Ceres SEQ ID NO 15180012 as cited in SEQ ID NO 0
aaaacaaaactcgcaagtttaacaacgcgtcttctacctcctcctcatcggactatttatctatagtcttcgttagatcaattcctctgttttactcctaagtttcgagatccacatttctttttaacctcatctcatctcttagtcgagatcttcactttctgatgacaatagggtcgtttttctcttctctcttattctggcgcaattctcaggtaacctcaatcgactattctctgttctactccttttttctttatcattttaaaaatcctaacattgaaaataaagtagttaaatagagtcaacgaaaacattgttaatgaaacagtggtgtgcttagcataacgaatcagacagacaaaaagtgtctggatccgtagagcaaagtgttgtcgtgtctttgacaaagttctttgtttgcctaaaccaatttgttcatccgatagaatgaattgcattccgttgttactatcatccaaaccggagatgtcaagccctaaccctcaagtagtatttcttagagagccatgaattgtttgtttagatccaattagaagaaggtttagttgactgtgatgattgtttgtgtttttggtggcaggaccaggaggcgcagagagggaggatgcaggagatagatcttagtgttcacactataaagtcccatggaggaagagtcgcttctaaacacaagcacgattggatcatactcgtcatcttgattgccatcgagataggcttgaacctcatctctcctttctaccgctacgtgggaaaagacatgatgactgacctcaagtaccctttcaaggacaacaccgtacctatctggtctgtccctgtgtacgctgtgcttgttcccatcatagtgttcgtctgcttctacctgaagaggacatgtgtgtacgatctgcaccacagcatcctcgggctgctcttcgccgtcttgataactggtgtcatcactgactccatcaaggtagccaccggacgccctcgtcctaacttctactggcgctgcttccccgacggcaaagagctgtatgatgcgttgggaggtgtggtatgccacggcaaggcagctgaggtcaaggaaggccacaagagcttcccgagcggacacacttcctggtcctttgcggggcttacattcctttccctttacctctctggcaaaatcgaggcctttaacaatgaaggacatgtggctaaactctgcctcgtgatcttccctctgcttgccgcttgtcttgtggggatatctcgtgtggatgactactggcaccactggcaagatgtcttcgcaggagctctcattggcacccttgtagccgccttctgctaccgtcagttctaccccaacccttaccacgaagaaggatggggtccctacgcctatttcaaggcagctcaagaacgaggagtccctgtgacctcctcccaaaacggagatgccttgagggctatgtctctgcagatggattcaacatctctcgaaaacatggaatctggcacttccaccggtcccagatgatcctcctctcttattatttgattcattatttggtttttcattttgatttggccgtcgtcgtgagattgtgaatggtgtagctacatactgtatgtgtattcaaaactctacttgtaccattacatttttgtaaatccactcttcatgaaattgacgtttttctggtg

SEQ ID NO: 48728 - protein, 302 aa, Arabidopsis thaliana
  peptide (1)..(302): Ceres Seq. ID no. 15175798
MQEIDLSVHTIKSHGGRVASKHKHDWIILVILIAIEIGLNLISPFYRYVGKDMMTDLKYPFKDNTVPIWSVPVYAVLVPIIVFVCFYLKRTCVYDLHHSILGLLFAVLITGVITDSIKVATGRPRPNFYWRCFPDGKELYDALGGVVCHGKAAEVKEGHKSFPSGHTSWSFAGLTFLSLYLSGKIEAFNNEGHVAKLCLVIFPLLAACLVGISRVDDYWHHWQDVFAGALIGTLVAAFCYRQFYPNPYHEEGWGPYAYFKAAQERGVPVTSSQNGDALRAMSLQMDSTSLENMESGTSTGPR

SEQ ID NO: 48729 - protein, 250 aa, Arabidopsis thaliana
  peptide (1)..(250): Ceres Seq. ID no. 15175799
MMTDLKYPFKDNTVPIWSVPVYAVLVPIIVFVCFYLKRTCVYDLHHSILGLLFAVLITGVITDSIKVATGRPRPNFYWRCFPDGKELYDALGGVVCHGKAAEVKEGHKSFPSGHTSWSFAGLTFLSLYLSGKIEAFNNEGHVAKLCLVIFPLLAACLVGISRVDDYWHHWQDVFAGALIGTLVAAFCYRQFYPNPYHEEGWGPYAYFKAAQERGVPVTSSQNGDALRAMSLQMDSTSLENMESGTSTGPR

SEQ ID NO: 48730 - protein, 249 aa, Arabidopsis thaliana
  peptide (1)..(249): Ceres Seq. ID no. 15175800
MTDLKYPFKDNTVPIWSVPVYAVLVPIIVFVCFYLKRTCVYDLHHSILGLLFAVLITGVITDSIKVATGRPRPNFYWRCFPDGKELYDALGGVVCHGKAAEVKEGHKSFPSGHTSWSFAGLTFLSLYLSGKIEAFNNEGHVAKLCLVIFPLLAACLVGISRVDDYWHHWQDVFAGALIGTLVAAFCYRQFYPNPYHEEGWGPYAYFKAAQERGVPVTSSQNGDALRAMSLQMDSTSLENMESGTSTGPR

SEQ ID NO: 48731 - DNA, 1300 bp, Arabidopsis thaliana
  misc_feature (1)..(1300): Ceres Seq. ID no. 14310232
  misc_feature (1)..(1300): Ortholog of  Ceres SEQ ID NO 14303427 as cited in SEQ ID NO 54799
gatacttgtgtcttgttgtacttgttaaacttgaatcccgtgttcgcgactttgcgatagattctctcaaatccaattccaatggcggatccatcttctcaaaaccctaacctcgccactccccctcctccttcttctccttcaccaacccatcaaattcaatctggaacctcggaattatcgccaccgtctcgaccgccttgctctaccttgtcctttctcaagactgctaaccgaccaaaactccgtgtgacatctgaattcgacagcgatagtctccttttcttaaacaaagtgtcttgtaagctcttcgataaccttgccaagcttaaactctcgtttcagaacaattcccagcgcgagatttcacagcctcaggtctcttttacttccaaacacgtttctgttctctatgatgtcgaagagaagaatactttcattaagagcactctcgatgttcacccgcgtcttcagctccgagctcttcataatgttaaggcacaacaaggagaagttgctatggaggcaaatctgactgaacctggctactctctggagctttcatcacctgtgcctattggttacccaagagcaactcttaaattcccacttggcgaaatttcgttacaagaaaaagatgaggaggaggaggagaagcagaaaagaactttatctgttaatgggatcctcaaacgtcaagttatgaatggtgtttgtaccgctctatacacagatgaagagttgaggctgagatatgcttataaggatgatgcattgtctttcatcccaagtatttcccttccttccaatgctgcatcatttgcattcaaacggcggtttagcccttcagataagttgagctattggtacaactttgattcaaacatgtggagtgctgtgtacaaacgcacatatggtaaagactacaaattaaaagctggctatgattctgatgtacgccttggctgggcatctctctgggttggtgatgaagctggaaaagtgaaaacgacaccaatgaagatgaaagtccagttcatgcttcaagttccacaagatgacatcaaatcatcagtcttgatgttccgagtcaagaaaagatgggacatttgatgaaatctttgaataaatcatctcttagtttcacgttctttaatctctctataaaacccataaaagttgtttgtttctccttatatatcaaatcttttgcaaagtagatacaaaagcttagagtgaataattgcaattgtatttctgtagcttttttttaaatgatctttttcacacgtgtgagact

SEQ ID NO: 48732 - protein, 343 aa, Arabidopsis thaliana; identical to SEQ ID NO: 46843
  peptide (1)..(343): Ceres Seq. ID no. 14310233

SEQ ID NO: 48733 - protein, 197 aa, Arabidopsis thaliana; identical to SEQ ID NO: 46844
  peptide (1)..(197): Ceres Seq. ID no. 14310234

SEQ ID NO: 48734 - DNA, 2745 bp, Arabidopsis thaliana; identical to SEQ ID NO: 45606
  misc_feature (1)..(2745): Ceres Seq. ID no. 13591675
  misc_feature (1)..(2745): Ortholog of  Ceres SEQ ID NO 13598668 as cited in SEQ ID NO 60784
  misc_feature (1)..(2745): Ortholog of  Ceres SEQ ID NO 13659835 as cited in SEQ ID NO 60791

SEQ ID NO: 48735 - protein, 98 aa, Arabidopsis thaliana; identical to SEQ ID NO: 45607
  peptide (1)..(98): Ceres Seq. ID no. 13591676

SEQ ID NO: 48736 - protein, 55 aa, Arabidopsis thaliana; identical to SEQ ID NO: 45608
  peptide (1)..(55): Ceres Seq. ID no. 13591677

SEQ ID NO: 48737 - DNA, 2232 bp, Arabidopsis thaliana
  misc_feature (1)..(2232): Ceres Seq. ID no. 13646807
  misc_feature (1)..(2232): Ortholog of  Ceres SEQ ID NO 13595870 as cited in SEQ ID NO 62101
  misc_feature (1)..(2232): Ortholog of  Ceres SEQ ID NO 13590241 as cited in SEQ ID NO 63878
  misc_feature (1)..(2232): Ortholog of  Ceres SEQ ID NO 13657939 as cited in SEQ ID NO 66349
agagagagagagagagctcactagtccccccccccccgtctttctcttcttctgccaaattccacagatggctgcttcatcggcttgtcttctcggaaatggattatctgtctacacaaccaaacagaggttccaaaagcttgggcttgataggacatctaaagttacagttgtgaaggcttctttggatgagaagaaacatgaagggagaagaggtttctttaaactcttactaggaaacgctgctgctggagttggtttgcttgcaagtggaaacgctaatgcagacgaacaaggacaaggggtttcttcgtctagaatgtcttattctaggttcctagagtatttagacaagggaagggttgagaaagtagatttgtatgagaatgggactatagctattgtggaggccgtttctcctgagttgggtaaccggattcagcgtgtacgtgtgcagctacctggattgagtcaggagcttctccagaagttgagggctaagaatattgatttcgcagcacataatgctcaggaggaccaaggttctccaatactcaacttgattgggaatcttgcattccctgttattttgattggcggtttgttccttctctcgagaagatcctctggtggaatgggtggccctggtggtcctggcttcccactccaaattggtcagtcgaaagcaaagtttcagatggaaccaaacactggtgtaacttttgatgatgttgctggagtcgatgaagccaagcaagatttcatggaagtggtggagtttctgaagaagcctgagaggttcactgcggttggtgcccggatcccaaaaggtgttcttcttgttggtcctcctggtaccgggaaaaccctgttggcaaaagccattgctggtgaagctggtgtgcccttcttttccatctcgggttctgagtttgttgagatgtttgtcggtgttggtgcatcaagggtccgcgatcttttcaaaaaagccaaagaaaatgctccatgcattgttttcgtggatgaaatagatgctgttggtaggcaaagaggaactggaattggtggaggtaatgatgaaagagaacagacccttaatcagctcctgactgagatggatggttttgagggtaacactggtgttatcgtagttgctgcaaccaacagagcagacattcttgactccgctttgctaagaccagggcgttttgaccggcaggtatctgttgacgttccagacgttaagggaagaacagatatactcaaggttcactcggggaataagaaatttgaaagcggtgtttcacttgaagtaatagccatgagaacacctggatttagcggagctgatcttgcaaacctcttgaacgaggctgccatattggccggccgccgtggaaagactgcaatatcatcaaaagagattgatgactcaattgacagaattgtagctggcatggaaggaacagtcatgacagatgggaagagcaaaagcttggttgcttaccatgaagttggccatgccatatgtggaacattgactccagggcatgatgctgttcaaaaggtcacgttgataccacgaggccaggctagaggtctgacttggttcattccctcagatgacccaactctaatctccaaacagcaactctttgcaagaattgttggtggactcggtggtagagctgccgaagaagtcatctttggtgagtctgaggtgactactggtgcagttagtgacttgcaacagatcaccggtttggctaagcagatggtgacaacatttgggatgtctgaaatcggaccatggtcgctaatggattcatcggagcaaagcgatgtcattatgaggatgatggcaagaaactcaatgtctgagaagcttgcaaatgatattgatacagcggtgaagacattatcagacaaagcgtacgagatagctttgagccagattagaaacaatcgtgaagccatggacaagattgttgaaatacttcttgagaaagagactatgtcaggcgatgaattccgagcaatcctatctgaattcacagaaatcccacctgaaaaccgtgttgcttcttcaacatccacatcaacaccaacaccagcgtctgtctgagtaagagacctttgaatctctgtgtatattatcttgagatacttccccatactgtgtaacagcacatcttaatttccctagttggagtatatatgtatacgaattcg

SEQ ID NO: 48738 - protein, 707 aa, Arabidopsis thaliana
  peptide (1)..(707): Ceres Seq. ID no. 13646808
ERERELTSPPPPVFLFFCQIPQMAASSACLLGNGLSVYTTKQRFQKLGLDRTSKVTVVKASLDEKKHEGRRGFFKLLLGNAAAGVGLLASGNANADEQGQGVSSSRMSYSRFLEYLDKGRVEKVDLYENGTIAIVEAVSPELGNRIQRVRVQLPGLSQELLQKLRAKNIDFAAHNAQEDQGSPILNLIGNLAFPVILIGGLFLLSRRSSGGMGGPGGPGFPLQIGQSKAKFQMEPNTGVTFDDVAGVDEAKQDFMEVVEFLKKPERFTAVGARIPKGVLLVGPPGTGKTLLAKAIAGEAGVPFFSISGSEFVEMFVGVGASRVRDLFKKAKENAPCIVFVDEIDAVGRQRGTGIGGGNDEREQTLNQLLTEMDGFEGNTGVIVVAATNRADILDSALLRPGRFDRQVSVDVPDVKGRTDILKVHSGNKKFESGVSLEVIAMRTPGFSGADLANLLNEAAILAGRRGKTAISSKEIDDSIDRIVAGMEGTVMTDGKSKSLVAYHEVGHAICGTLTPGHDAVQKVTLIPRGQARGLTWFIPSDDPTLISKQQLFARIVGGLGGRAAEEVIFGESEVTTGAVSDLQQITGLAKQMVTTFGMSEIGPWSLMDSSEQSDVIMRMMARNSMSEKLANDIDTAVKTLSDKAYEIALSQIRNNREAMDKIVEILLEKETMSGDEFRAILSEFTEIPPENRVASSTSTSTPTPASV

SEQ ID NO: 48739 - protein, 685 aa, Arabidopsis thaliana; identical to SEQ ID NO: 45832
  peptide (1)..(685): Ceres Seq. ID no. 13646809

SEQ ID NO: 48740 - protein, 601 aa, Arabidopsis thaliana; identical to SEQ ID NO: 45833
  peptide (1)..(601): Ceres Seq. ID no. 13646810

SEQ ID NO: 48741 - DNA, 2687 bp, Arabidopsis thaliana
  misc_feature (1)..(2687): Ceres Seq. ID no. 14310214
  misc_feature (1)..(2687): Ortholog of  Ceres SEQ ID NO 13596194 as cited in SEQ ID NO 68484
agcttctctgattcgtctttctcctctgtctctgactcttcgcgaaaaccctaattagctttgtggtcttgttgttttcgccatggaagacgacggcaagagcagccccaagttaccgatccctggaaagagaaatatactaatcaccagtgctttgccttacgtcaacaacgttcctcatctcggaaacatcatcggatgtgttttgagcgctgatgtgtatgctagatactgtcgtctccgtggctataatgcgatttacatatgtggaaccgatgaatatgggactgcaactgagaccaaagctttggaggagaattgcacccacaaggaaatctgtgacaagtaccatgccattcataaagaagtttatgactggtttggtataagttttgacaagtttgggcgaacttcaactccagaacagactgaggtgtgccaagcaattttcaacaagttgtgggaaaacaagtggctttcagagaacaccatgcagcagctttactgcgatacatgcaagaagttcttagcggaccggcttgttgagggttcttgtccgttcgaaggatgtaattatgattctgctcgtggagatcagtgcgaaaaatgtggaaagctcctgaatcctactgaacttaaagatccgaagtgcaaggtctgtcaaaacacaccccgaattcgcgacacagaccacctgtttattgagcttccgttactgaaagataggttggaagcgtatattaaaaagacctctgttactggatcttggagtcaaaatgctattcaaacgacaaatgcatggcttagggatgggcttagacagagatgcattacgagggatcttaagtggggagtgcctgtcccacatgagaaatacaaggacaaagtcttctatgtttggtttgatgctcctattggatacgtctcaataacgtcttgctatacatctgaatgggagaagtggtggaagaatcctgagaatgtggagctttatcagtttatggggaaagacaatgtgccatttcacactgtgatgtttccctctacccagcttggaactgaggaaaattggacactcatgaagacaatcagtgtgactgaatatttaaactatgaagacggaaagttctccaagagtaaaggtgttggagtgtttggtaatgatgtaaaagatacaaatatacctgtcgaagtgtggagatactacttgctgaccaacaggcctgaggtgtctgacacatcgttttcatggactgatttgcaagcaaaactgaatggcgagttgctgagcaacctaggcaactttgttaatcgagttctgagttttatagcaaagcctgataatgcaggttacgggtctgtcattcctgatgctcatgatgctgaatctcattctttaacaaaatcactggcggaaaaggttgaaaagtttgtggcagagtatgttgaagccatggaaaaggttaagctcaagcagggactgaaaactgctatgctgatttcaagcgaagggaactattacttgcaggcaagccaattttggaaactttacaaggaagataaacctttgtgtgcagttgttataagaactgctgctggtttagtacaccttcttgctcaattgttagaccctttcatgccatccttttcttctgaggtatttaaacagttaaatttgcctccacaattttctctctccgacgagaggggagaggtattactagcaagtagaccatgggatattctgcctcctagccacaggataggcacccctcaacctttgttcaaggagttggaaaacgacgaagtggcacggtacagagaaaagtttgctggaagtcagtgtgatagacgtgctagggatgaagcagcaaatttggcggatcaacttaataaaacaaaactttcagatgccaagaaacaaaaggcatcatcaaaaggcggaggaaaacccaaacctcaaccagctgctgatcgtgaaataactatggcaagacttgatatccgagttggtaaaattgtgaaggctgagaaacatcccaaggcagatgcattgtatgtagaagaaattgatgttgggggtggtgaaattcgcactgttgtcagtggactggtcaaatatatacctcttgaggaaatgcagaatcgtatggtttgtgttctttgcaacttgaaaccggcgaaaatgagggatattgtgtcacaagcaatggttcttgcagcttccagtagtgatggaagcaaggtggagttagttgagccccctaaaactgctaatattggagagcgagttacatttcccgggtttgaaggcgagccagacgatgtcttaaacccaaagaagaaagtatgggagacgcttttggttgatctaaacacaaaagagaatctagttgcttgctacaaagatgtgcccttcactacatctgcaggtgtatgcaaagtttcatccatcagcaatggcacgatccggtaaaagcttacttgagccataagcaaactaatattctccatttctatctttctctgtaagagaaacgaaattcggagattttcatttgaaaatttgattctaattacaaacatgttcttgtaaacttaaagcttggtacaattgtggttattgattgatgttgtgagaaacattcagcttttttaaattgggcccagacgcaaagcaaccacac

SEQ ID NO: 48742 - protein, 797 aa, Arabidopsis thaliana
  peptide (1)..(797): Ceres Seq. ID no. 14310215
MEDDGKSSPKLPIPGKRNILITSALPYVNNVPHLGNIIGCVLSADVYARYCRLRGYNAIYICGTDEYGTATETKALEENCTHKEICDKYHAIHKEVYDWFGISFDKFGRTSTPEQTEVCQAIFNKLWENKWLSENTMQQLYCDTCKKFLADRLVEGSCPFEGCNYDSARGDQCEKCGKLLNPTELKDPKCKVCQNTPRIRDTDHLFIELPLLKDRLEAYIKKTSVTGSWSQNAIQTTNAWLRDGLRQRCITRDLKWGVPVPHEKYKDKVFYVWFDAPIGYVSITSCYTSEWEKWWKNPENVELYQFMGKDNVPFHTVMFPSTQLGTEENWTLMKTISVTEYLNYEDGKFSKSKGVGVFGNDVKDTNIPVEVWRYYLLTNRPEVSDTSFSWTDLQAKLNGELLSNLGNFVNRVLSFIAKPDNAGYGSVIPDAHDAESHSLTKSLAEKVEKFVAEYVEAMEKVKLKQGLKTAMLISSEGNYYLQASQFWKLYKEDKPLCAVVIRTAAGLVHLLAQLLDPFMPSFSSEVFKQLNLPPQFSLSDERGEVLLASRPWDILPPSHRIGTPQPLFKELENDEVARYREKFAGSQCDRRARDEAANLADQLNKTKLSDAKKQKASSKGGGKPKPQPAADREITMARLDIRVGKIVKAEKHPKADALYVEEIDVGGGEIRTVVSGLVKYIPLEEMQNRMVCVLCNLKPAKMRDIVSQAMVLAASSSDGSKVELVEPPKTANIGERVTFPGFEGEPDDVLNPKKKVWETLLVDLNTKENLVACYKDVPFTTSAGVCKVSSISNGTIR

SEQ ID NO: 48743 - protein, 661 aa, Arabidopsis thaliana
  peptide (1)..(661): Ceres Seq. ID no. 14310216
MQQLYCDTCKKFLADRLVEGSCPFEGCNYDSARGDQCEKCGKLLNPTELKDPKCKVCQNTPRIRDTDHLFIELPLLKDRLEAYIKKTSVTGSWSQNAIQTTNAWLRDGLRQRCITRDLKWGVPVPHEKYKDKVFYVWFDAPIGYVSITSCYTSEWEKWWKNPENVELYQFMGKDNVPFHTVMFPSTQLGTEENWTLMKTISVTEYLNYEDGKFSKSKGVGVFGNDVKDTNIPVEVWRYYLLTNRPEVSDTSFSWTDLQAKLNGELLSNLGNFVNRVLSFIAKPDNAGYGSVIPDAHDAESHSLTKSLAEKVEKFVAEYVEAMEKVKLKQGLKTAMLISSEGNYYLQASQFWKLYKEDKPLCAVVIRTAAGLVHLLAQLLDPFMPSFSSEVFKQLNLPPQFSLSDERGEVLLASRPWDILPPSHRIGTPQPLFKELENDEVARYREKFAGSQCDRRARDEAANLADQLNKTKLSDAKKQKASSKGGGKPKPQPAADREITMARLDIRVGKIVKAEKHPKADALYVEEIDVGGGEIRTVVSGLVKYIPLEEMQNRMVCVLCNLKPAKMRDIVSQAMVLAASSSDGSKVELVEPPKTANIGERVTFPGFEGEPDDVLNPKKKVWETLLVDLNTKENLVACYKDVPFTTSAGVCKVSSISNGTIR

SEQ ID NO: 48744 - protein, 491 aa, Arabidopsis thaliana
  peptide (1)..(491): Ceres Seq. ID no. 14310217
MGKDNVPFHTVMFPSTQLGTEENWTLMKTISVTEYLNYEDGKFSKSKGVGVFGNDVKDTNIPVEVWRYYLLTNRPEVSDTSFSWTDLQAKLNGELLSNLGNFVNRVLSFIAKPDNAGYGSVIPDAHDAESHSLTKSLAEKVEKFVAEYVEAMEKVKLKQGLKTAMLISSEGNYYLQASQFWKLYKEDKPLCAVVIRTAAGLVHLLAQLLDPFMPSFSSEVFKQLNLPPQFSLSDERGEVLLASRPWDILPPSHRIGTPQPLFKELENDEVARYREKFAGSQCDRRARDEAANLADQLNKTKLSDAKKQKASSKGGGKPKPQPAADREITMARLDIRVGKIVKAEKHPKADALYVEEIDVGGGEIRTVVSGLVKYIPLEEMQNRMVCVLCNLKPAKMRDIVSQAMVLAASSSDGSKVELVEPPKTANIGERVTFPGFEGEPDDVLNPKKKVWETLLVDLNTKENLVACYKDVPFTTSAGVCKVSSISNGTIR

SEQ ID NO: 48745 - DNA, 1515 bp, Arabidopsis thaliana
  misc_feature (1)..(1515): Ceres Seq. ID no. 13578963
  misc_feature (1)..(1515): Ortholog of  Ceres SEQ ID NO 13594209 as cited in SEQ ID NO 59089
  misc_feature (1)..(1515): Ortholog of  Ceres SEQ ID NO 13502874 as cited in SEQ ID NO 66298
  misc_feature (1)..(1515): Ortholog of  Ceres SEQ ID NO 12614124 as cited in SEQ ID NO 68392
gaaaacaggaaaatggaagacctctggttcatcttcttctccttcctcacagctactttaatcttcttcatcaccaagaagttcctgtggagtctaaattctaaattacctccaagccctacgcctctccctatcatcggccatcttcacctcatcaagaagtatcctttaccacaagctctacgtcatctctcttcaaactacggcccggttctgttcctcaaatttggatgccgtaacgttttgactctctcttctccagattccatcgaagaatgcttcaccaatcacgacgtaaccctcgcgaatcgtcccaagaccatcacctccgatcacttcagctacggctataaaaactttggatttgctccttacggtgacctctggcgaactctccgtcgtctctccactctcgaggtcttctcctccgctagcctgcagaagaactcttccatccgaaacgaggaagtctccaacctctgtttgattatcttcagattatcccgtgactctcggatagtggatctcaagtatcaattcactcttctcacggctcatatcatgcttagattagtatctgggaagcgtggggtcaaaaagagcgatcccgaatcagagaagaggttcttggatgattttaaattgaggtttttctcgagcatgtcgatgaatgtctgcgactattttccagtgttgaggtggattgggtacaaaggtttggagaagagagtgattgatatgcagagaatgagagatgagtatcttcagcgactcattgatgatattcgaatgaagaacattgattcctctggttccgtagtagagaaattcttgaagcttcaagaatcagaacctgaattttacgcagatgatgttatcaaaggaatcatagtgctaatgttcaatggcggaacggatacatcacctgtggcaatggaatgggcagtgtcacttttactaaaccatccagataagcttgagaagctcagagaagaaatcaaatctaatgttaaacacaaagggcttatacaagactcggatctctcgagcttaccttatcttcgatgtgtcatctatgagacgcttaggctataccctgcagctccactcttgcttcctcactgctcatccaagagattcaacttaggcaactacgagattccagaaaacataatgttattggtgaatgcttgggctgttcatagggacggtgagctttgggaagaagccaatgttttcaagccggagagatttgaagggtttgttggcgatagagatggttttaggtttctgccatttggagttgggaggcgggcgtgtcctgcagctggacttggaatgagggtagtgtcgcttgctgttggagcattggttcagtgttttgagtgggagaaggtagaagcaggagatatagacatgaggcccgtgtttggtgtggcaatggctaaggctgagccgcttgtcgcattgccgaagccatggtctgaaatggttcctatcttgtctcagctctag

SEQ ID NO: 48746 - protein, 504 aa, Arabidopsis thaliana
  peptide (1)..(504): Ceres Seq. ID no. 13578964
ENRKMEDLWFIFFSFLTATLIFFITKKFLWSLNSKLPPSPTPLPIIGHLHLIKKYPLPQALRHLSSNYGPVLFLKFGCRNVLTLSSPDSIEECFTNHDVTLANRPKTITSDHFSYGYKNFGFAPYGDLWRTLRRLSTLEVFSSASLQKNSSIRNEEVSNLCLIIFRLSRDSRIVDLKYQFTLLTAHIMLRLVSGKRGVKKSDPESEKRFLDDFKLRFFSSMSMNVCDYFPVLRWIGYKGLEKRVIDMQRMRDEYLQRLIDDIRMKNIDSSGSVVEKFLKLQESEPEFYADDVIKGIIVLMFNGGTDTSPVAMEWAVSLLLNHPDKLEKLREEIKSNVKHKGLIQDSDLSSLPYLRCVIYETLRLYPAAPLLLPHCSSKRFNLGNYEIPENIMLLVNAWAVHRDGELWEEANVFKPERFEGFVGDRDGFRFLPFGVGRRACPAAGLGMRVVSLAVGALVQCFEWEKVEAGDIDMRPVFGVAMAKAEPLVALPKPWSEMVPILSQL

SEQ ID NO: 48747 - protein, 500 aa, Arabidopsis thaliana
  peptide (1)..(500): Ceres Seq. ID no. 13578965
MEDLWFIFFSFLTATLIFFITKKFLWSLNSKLPPSPTPLPIIGHLHLIKKYPLPQALRHLSSNYGPVLFLKFGCRNVLTLSSPDSIEECFTNHDVTLANRPKTITSDHFSYGYKNFGFAPYGDLWRTLRRLSTLEVFSSASLQKNSSIRNEEVSNLCLIIFRLSRDSRIVDLKYQFTLLTAHIMLRLVSGKRGVKKSDPESEKRFLDDFKLRFFSSMSMNVCDYFPVLRWIGYKGLEKRVIDMQRMRDEYLQRLIDDIRMKNIDSSGSVVEKFLKLQESEPEFYADDVIKGIIVLMFNGGTDTSPVAMEWAVSLLLNHPDKLEKLREEIKSNVKHKGLIQDSDLSSLPYLRCVIYETLRLYPAAPLLLPHCSSKRFNLGNYEIPENIMLLVNAWAVHRDGELWEEANVFKPERFEGFVGDRDGFRFLPFGVGRRACPAAGLGMRVVSLAVGALVQCFEWEKVEAGDIDMRPVFGVAMAKAEPLVALPKPWSEMVPILSQL

SEQ ID NO: 48748 - protein, 317 aa, Arabidopsis thaliana
  peptide (1)..(317): Ceres Seq. ID no. 13578966
MLRLVSGKRGVKKSDPESEKRFLDDFKLRFFSSMSMNVCDYFPVLRWIGYKGLEKRVIDMQRMRDEYLQRLIDDIRMKNIDSSGSVVEKFLKLQESEPEFYADDVIKGIIVLMFNGGTDTSPVAMEWAVSLLLNHPDKLEKLREEIKSNVKHKGLIQDSDLSSLPYLRCVIYETLRLYPAAPLLLPHCSSKRFNLGNYEIPENIMLLVNAWAVHRDGELWEEANVFKPERFEGFVGDRDGFRFLPFGVGRRACPAAGLGMRVVSLAVGALVQCFEWEKVEAGDIDMRPVFGVAMAKAEPLVALPKPWSEMVPILSQL

SEQ ID NO: 48749 - DNA, 2611 bp, Arabidopsis thaliana; identical to SEQ ID NO: 44956
  misc_feature (1)..(2611): Ceres Seq. ID no. 13591498
  misc_feature (1)..(2611): Ortholog of  Ceres SEQ ID NO 15176095 as cited in SEQ ID NO 59699

SEQ ID NO: 48750 - protein, 798 aa, Arabidopsis thaliana; identical to SEQ ID NO: 44957
  peptide (1)..(798): Ceres Seq. ID no. 13591499

SEQ ID NO: 48751 - protein, 757 aa, Arabidopsis thaliana; identical to SEQ ID NO: 44958
  peptide (1)..(757): Ceres Seq. ID no. 13591500

SEQ ID NO: 48752 - protein, 722 aa, Arabidopsis thaliana; identical to SEQ ID NO: 44959
  peptide (1)..(722): Ceres Seq. ID no. 13591501

SEQ ID NO: 48753 - DNA, 1815 bp, Arabidopsis thaliana
  misc_feature (1)..(1815): Ceres Seq. ID no. 12600973
  misc_feature (1)..(1815): Ortholog of  Ceres SEQ ID NO 14308698 as cited in SEQ ID NO 58663
gaataatctctctgcttccctcctctagctcttgtccctttctgtctgaacctggcaagaagaaccttagcctatctttcttctttctctctctctgtgttctctgttctgtttcaactttactccctcagtttctgtacaatttccctatctagaagagagataaaaccgagaaggttttggagatagaatcttttgttcttcttttgtccctgcttgctcgatttttgttacgtgtgaagcaataaaaaaacggatatagctaaatcttccatccattcagaggcttctaaatctgatctgacatggaacaagtgtttgctgattggaattttgaagataattttcacatgtccactaataaaagatcaatcagaccagaagatgaattagtggagctattgtggagagatggtcaagtggttttacaaagccaagctcgtagagaaccgtcagtccaagtccaaacccacaaacaagaaaccctaagaaaacccaacaatatttttcttgacaaccaagaaacagtacaaaagcctaactacgctgctctagatgatcaagaaaccgtctcctggatacaataccctccggatgacgtcatcgaccctttcgaatccgagttctcctctcatttcttctcttcgatcgatcacctcggaggtcctgagaagccacgaacgatcgaagagacagttaagcatgaggctcaagccatggctcctcctaagtttagatcctcggttataacagtcggaccgagtcattgcggcagcaaccagtcaacaaatattcatcaggccactacacttccggtttctatgagtgatagaagcaagaacgtcgaagaaagacttgacacttcgtcaggtggctcctccggttgcagctatggaaggaacaacaaagaaaccgttagtggaacaagtgtaaccattgaccgtaaaagaaaacatgttatggatgctgatcaagaatctgtgtctcaatcagatataggtttgacctcaaccgatgatcaaaccatgggtaacaaatcgagccaacggtcaggatctactcgaagaagccgtgcagctgaagttcataatctctcagaaaggaggaggagagatcggatcaatgaaagaatgaaagctcttcaagaactcatacctcactgcagcagaataaagcttcgatattggatgaagcaattgattacttaaaatcacttcaaatgcaactccaagtgatgtggatgggaagtggaatggcggcggcggcagcagcagcagcaagtccgatgatgtttcccggggtacaatcatctccatacattaatcagatggctatgcaaagtcagatgcaattgtctcaattcccggttatgaaccggtccgctccgcagaaccatcccggtttagtatgtctaaacccggtacagttgcagctccaagcacagaaccaaatcttatcggagcagctcgctaggtacatgggcgggattccccagatgccgccggcgggaaatcagaccgtgcaacaacaaccagcggacatgttgggatttggatctccggcgggaccgcaaagtcaactgtcggcaccggcgaccaccgacagtcttcatatgggtaaaataggctgacttggcatatagttttcctccgaaattattcttcttacagttggtgattgttatttatttttggtcgcctaagcaagcataaaagctaagtcaaatgtattatagagatctaataagttagtctcatacttataacttatttttaaacagttgaattatagtatcaatcaagtgttgggacccgt

SEQ ID NO: 48754 - protein, 300 aa, Arabidopsis thaliana
  peptide (1)..(300): Ceres Seq. ID no. 12600974
MEQVFADWNFEDNFHMSTNKRSIRPEDELVELLWRDGQVVLQSQARREPSVQVQTHKQETLRKPNNIFLDNQETVQKPNYAALDDQETVSWIQYPPDDVIDPFESEFSSHFFSSIDHLGGPEKPRTIEETVKHEAQAMAPPKFRSSVITVGPSHCGSNQSTNIHQATTLPVSMSDRSKNVEERLDTSSGGSSGCSYGRNNKETVSGTSVTIDRKRKHVMDADQESVSQSDIGLTSTDDQTMGNKSSQRSGSTRRSRAAEVHNLSERRRRDRINERMKALQELIPHCSRIKLRYWMKQLIT

SEQ ID NO: 48755 - protein, 285 aa, Arabidopsis thaliana
  peptide (1)..(285): Ceres Seq. ID no. 12600975
MSTNKRSIRPEDELVELLWRDGQVVLQSQARREPSVQVQTHKQETLRKPNNIFLDNQETVQKPNYAALDDQETVSWIQYPPDDVIDPFESEFSSHFFSSIDHLGGPEKPRTIEETVKHEAQAMAPPKFRSSVITVGPSHCGSNQSTNIHQATTLPVSMSDRSKNVEERLDTSSGGSSGCSYGRNNKETVSGTSVTIDRKRKHVMDADQESVSQSDIGLTSTDDQTMGNKSSQRSGSTRRSRAAEVHNLSERRRRDRINERMKALQELIPHCSRIKLRYWMKQLIT

SEQ ID NO: 48756 - protein, 163 aa, Arabidopsis thaliana
  peptide (1)..(163): Ceres Seq. ID no. 12600976
MAPPKFRSSVITVGPSHCGSNQSTNIHQATTLPVSMSDRSKNVEERLDTSSGGSSGCSYGRNNKETVSGTSVTIDRKRKHVMDADQESVSQSDIGLTSTDDQTMGNKSSQRSGSTRRSRAAEVHNLSERRRRDRINERMKALQELIPHCSRIKLRYWMKQLIT

SEQ ID NO: 48757 - DNA, 1779 bp, Arabidopsis thaliana
  misc_feature (1)..(1779): Ceres Seq. ID no. 14310275
  misc_feature (1)..(1779): Ortholog of  Ceres SEQ ID NO 13585324 as cited in SEQ ID NO 64329
  misc_feature (1)..(1779): Ortholog of  Ceres SEQ ID NO 14301676 as cited in SEQ ID NO 67423
gaagacgtttctctctgcttcaccaccagagagatacatccaaaaattcatatctttccttcatttttattggcgttttaagaaaacaaagcttccccaattagggttttgtattagaagaatgggattgtggaatggaaaaggcaccggaggatttatcctctaccttctcgtggctttctccgtcgccgtcttctctgtttcttacgtcggagacacaacaaaccctattcatcatcatctctcttctctctctgccaccgaaaaaatttggccggatttgaagtttagctggaaacttgtgttggctacagtgatagcgtttctaggatcagcttgtgggactgttggtggtgttggaggtggtgggatttttgttcctatgctcactcttatactcgggttcgatacaaaatccgcagctgcaatatcaaaatgtatgataatgggagcatcagcatcatcagtttggtacaatgtacgagttcgtcatccgacaaaagaagtaccaatcttagattatgatcttgctcttctctttcaaccaatgcttcttctcggtatcactgttggtgtttctctcagtgttgtgttcccttattggctcattactgtcctcatcatcattcttttcgtcggtacttcttcgagatctttttttaaaggcattgagatgtggaaggaagagacattgttaaagaacgaaatggcgcagcaacgagctaatatggttaattcccggggagaacttttaatcgatacagagtatgagccgctttaccctagagaagaaaaatcagagctggaaataatacgctccaacctcaaatggaaagggcttctaattctagtaactgtgtggttgactttcttgctcattcaaattgtcaagaacgaaataaaggtctgcagcacaatatattggatactattcatcgtacagttcccagttgctttagcggtgtttgggtttgaagcaagcaaattgtatacagcgaacaaaaagaggttaaacagtggcaacactgaatgtatctgtgaagctacgatcgagtggactcctctgagtctaatcttctgtggtctctgtggtctcattggaggtatcgtaggtggtctccttggatccggtggtggatttgttctcgggcctttgcttcttgagattggagtcatcccacaggttgctagcgcaacagctacctttgtgatgatgttttcttcgtccttatccgtagtcgagttctatctcctcaagagattcccaataccatacgcaatgtacttgatttcggtatcgattcttgccggtttttggggacaatcctttataagaaagctcgtggcgatcctgagaagagcttccataatcgttttcgttctctcaggagtcatttgtgcaagtgctctcacaatgggagtgattgggatagagaagagcataaagatgatacataaccatgaattcatgggattcttaggattctgcagcagtcaatgaatcaaccatctatctgaacaaaaatttcaagtgttttgttttcatttactggacaatttcggttgtccaacaccattattgtgagaagttataaaattagattgttttacttgcagtccaagtcatttgtgctctgttcttggtcaatacatagttgaccatcttcagaaatagagtttgtctaaattgttgtcattgtgttttgcttgtattcaaacgttgtattattatttgcgagacgatagataaaataaaaatggaagtctttttctattcac

SEQ ID NO: 48758 - protein, 499 aa, Arabidopsis thaliana
  peptide (1)..(499): Ceres Seq. ID no. 14310276
KTFLSASPPERYIQKFISFLHFYWRFKKTKLPQLGFCIRRMGLWNGKGTGGFILYLLVAFSVAVFSVSYVGDTTNPIHHHLSSLSATEKIWPDLKFSWKLVLATVIAFLGSACGTVGGVGGGGIFVPMLTLILGFDTKSAAAISKCMIMGASASSVWYNVRVRHPTKEVPILDYDLALLFQPMLLLGITVGVSLSVVFPYWLITVLIIILFVGTSSRSFFKGIEMWKEETLLKNEMAQQRANMVNSRGELLIDTEYEPLYPREEKSELEIIRSNLKWKGLLILVTVWLTFLLIQIVKNEIKVCSTIYWILFIVQFPVALAVFGFEASKLYTANKKRLNSGNTECICEATIEWTPLSLIFCGLCGLIGGIVGGLLGSGGGFVLGPLLLEIGVIPQVASATATFVMMFSSSLSVVEFYLLKRFPIPYAMYLISVSILAGFWGQSFIRKLVAILRRASIIVFVLSGVICASALTMGVIGIEKSIKMIHNHEFMGFLGFCSSQ

SEQ ID NO: 48759 - protein, 459 aa, Arabidopsis thaliana
  peptide (1)..(459): Ceres Seq. ID no. 14310277
MGLWNGKGTGGFILYLLVAFSVAVFSVSYVGDTTNPIHHHLSSLSATEKIWPDLKFSWKLVLATVIAFLGSACGTVGGVGGGGIFVPMLTLILGFDTKSAAAISKCMIMGASASSVWYNVRVRHPTKEVPILDYDLALLFQPMLLLGITVGVSLSVVFPYWLITVLIIILFVGTSSRSFFKGIEMWKEETLLKNEMAQQRANMVNSRGELLIDTEYEPLYPREEKSELEIIRSNLKWKGLLILVTVWLTFLLIQIVKNEIKVCSTIYWILFIVQFPVALAVFGFEASKLYTANKKRLNSGNTECICEATIEWTPLSLIFCGLCGLIGGIVGGLLGSGGGFVLGPLLLEIGVIPQVASATATFVMMFSSSLSVVEFYLLKRFPIPYAMYLISVSILAGFWGQSFIRKLVAILRRASIIVFVLSGVICASALTMGVIGIEKSIKMIHNHEFMGFLGFCSSQ

SEQ ID NO: 48760 - protein, 372 aa, Arabidopsis thaliana
  peptide (1)..(372): Ceres Seq. ID no. 14310278
MLTLILGFDTKSAAAISKCMIMGASASSVWYNVRVRHPTKEVPILDYDLALLFQPMLLLGITVGVSLSVVFPYWLITVLIIILFVGTSSRSFFKGIEMWKEETLLKNEMAQQRANMVNSRGELLIDTEYEPLYPREEKSELEIIRSNLKWKGLLILVTVWLTFLLIQIVKNEIKVCSTIYWILFIVQFPVALAVFGFEASKLYTANKKRLNSGNTECICEATIEWTPLSLIFCGLCGLIGGIVGGLLGSGGGFVLGPLLLEIGVIPQVASATATFVMMFSSSLSVVEFYLLKRFPIPYAMYLISVSILAGFWGQSFIRKLVAILRRASIIVFVLSGVICASALTMGVIGIEKSIKMIHNHEFMGFLGFCSSQ

SEQ ID NO: 48761 - DNA, 2358 bp, Arabidopsis thaliana
  misc_feature (1)..(2358): Ceres Seq. ID no. 15175612
  misc_feature (1)..(2358): Ortholog of  Ceres SEQ ID NO 13590780 as cited in SEQ ID NO 68149
  misc_feature (1)..(2358): Ortholog of  Ceres SEQ ID NO 13599756 as cited in SEQ ID NO 0
gagtcacactcagataacataaacctttgacaagagattttgatgctccttcgtcttacggctcgctctattcgtcgtttcacaacttcttcttcgtccttaccatttctctcatcgtcttcgtattgtactgtttcaacaatggcagctaatcatccaaaggatgtagcgtatctctccgccgtcatccccaaacgtatcaggcttttcgagcagatccaagcgaatcaactcgagaatcttaagtctcttccacacgatccgatcaaggttacgttaccagatggaaatgtgaaagaaggaaagaaatgggagacaactccgatggatatcgctgctcagatttctaagggtttggctaattctgcattgatttctgctgttgatgatgttctctgggatatgaataggccattggaaggtgattgtaagcttgagcttttcaaatttgatagtgataaaggtcgtgacactctttggcattctagtgcgcacattcttggtcaggctctcgagcaggagtatgggtgtcagctgtgcattggaccatgcacaacgagaggagagggtttctactatgatggattttatggtgaattgggcctgagtgacaatcacttttctagcatcgaagcaggtgctgcaaaagctgctaaggaagcacaaccatttgaaaggattgaagtgacgaaggatcaggcactcgagatgttttctgagaataattttaaggttgaactcatcaatggtttgcctgcagacatgaccattactgtctacagatgtggccctttggtggatttgtgtcgtggaccgcacataccaaatacttcctttgtgaaagcgttcaagtgtttgagggcctcatcagcttactggaagggtgacaaagaccgtgagagcttacagagagtttatgggatatcttatcctgatcagaagcagctgaagaaatatctccaatttctagaagaagccaaaaagtatgaccacagactattgggccaaaagcaggaactcttctttagtcatcaactcagccctgggagttatttcttccttccactcggcactcgtgtatataacaggttgatggacttcattaagaaccaatactggcacaggggttacacagaggttattacaccaaatatgtacaacatggatttgtggcaaacatccggacatgctgacaattacaaggataatatgtttacgtttaatattgagaagcaagagttcgggctcaaacctatgaattgtcctggtcactgcttgatattccagcatagggttcgctcatatagagagttacctatgagactggccgactttggagtgttacaccgcaatgaggcaagtggagcacttagtggattgactcgtgtccgacggttccagcaggatgatgcacacatattctgtacaacagaacaggttaagggagaagtgcagggtgtgttggagttcattgactatgtgtacaaagttttcgggtttacctatgagctaaaactttcaacgaggccagagaagtaccttggagatttggaaacatgggataaagctgaagcggatctcaaagaagctatagaagcttttggaaagccattagtgttgaacgaaggagatggtgcattttatggtccaaagatagacatcacagtttctgatgcaatgaataggaaattccagtgtgctactttacagcttgattttcaacttccgattcgcttcaacttggaatatgcagctgaggatgaagcgaaaaagagtagacctgtaatgatacatagagccgtgttgggatctgtggaacgtatgtttgccatattgttggagcattacaaaggaaaatggcccttctggattagtccgcgacaggccatagtttgtcctatatcagagaaatctcagcaatatgcagaaaaggtacaaaagcaaattaaagatgctgggttctatgttgatgctgacttaacagacagaaagatagataaaaaggtgcgagaagctcagcttgctcagtacaactacattctggtcgtgggtgaaacagaagctgctacaggacaggtgagtgttcgtgtgagagacaatgcagcccactccgtgaagagcattgaggatttactggaagaattcaaggccaagactgccgaatttgtatgagatccgactcatgaaattcaagttctgatatgatgtgtttttttttttgttgcaaattagggtcgacccagatttaagtgtttatctctttcattaaaccatatttggcctcaactatattaaagtttcgattacattctgcgaaaactctatgtttggtccacttctagattcatattatggaag

SEQ ID NO: 48762 - protein, 709 aa, Arabidopsis thaliana
  peptide (1)..(709): Ceres Seq. ID no. 15175613
MLLRLTARSIRRFTTSSSSLPFLSSSSYCTVSTMAANHPKDVAYLSAVIPKRIRLFEQIQANQLENLKSLPHDPIKVTLPDGNVKEGKKWETTPMDIAAQISKGLANSALISAVDDVLWDMNRPLEGDCKLELFKFDSDKGRDTLWHSSAHILGQALEQEYGCQLCIGPCTTRGEGFYYDGFYGELGLSDNHFSSIEAGAAKAAKEAQPFERIEVTKDQALEMFSENNFKVELINGLPADMTITVYRCGPLVDLCRGPHIPNTSFVKAFKCLRASSAYWKGDKDRESLQRVYGISYPDQKQLKKYLQFLEEAKKYDHRLLGQKQELFFSHQLSPGSYFFLPLGTRVYNRLMDFIKNQYWHRGYTEVITPNMYNMDLWQTSGHADNYKDNMFTFNIEKQEFGLKPMNCPGHCLIFQHRVRSYRELPMRLADFGVLHRNEASGALSGLTRVRRFQQDDAHIFCTTEQVKGEVQGVLEFIDYVYKVFGFTYELKLSTRPEKYLGDLETWDKAEADLKEAIEAFGKPLVLNEGDGAFYGPKIDITVSDAMNRKFQCATLQLDFQLPIRFNLEYAAEDEAKKSRPVMIHRAVLGSVERMFAILLEHYKGKWPFWISPRQAIVCPISEKSQQYAEKVQKQIKDAGFYVDADLTDRKIDKKVREAQLAQYNYILVVGETEAATGQVSVRVRDNAAHSVKSIEDLLEEFKAKTAEFV

SEQ ID NO: 48763 - protein, 676 aa, Arabidopsis thaliana
  peptide (1)..(676): Ceres Seq. ID no. 15175614
MAANHPKDVAYLSAVIPKRIRLFEQIQANQLENLKSLPHDPIKVTLPDGNVKEGKKWETTPMDIAAQISKGLANSALISAVDDVLWDMNRPLEGDCKLELFKFDSDKGRDTLWHSSAHILGQALEQEYGCQLCIGPCTTRGEGFYYDGFYGELGLSDNHFSSIEAGAAKAAKEAQPFERIEVTKDQALEMFSENNFKVELINGLPADMTITVYRCGPLVDLCRGPHIPNTSFVKAFKCLRASSAYWKGDKDRESLQRVYGISYPDQKQLKKYLQFLEEAKKYDHRLLGQKQELFFSHQLSPGSYFFLPLGTRVYNRLMDFIKNQYWHRGYTEVITPNMYNMDLWQTSGHADNYKDNMFTFNIEKQEFGLKPMNCPGHCLIFQHRVRSYRELPMRLADFGVLHRNEASGALSGLTRVRRFQQDDAHIFCTTEQVKGEVQGVLEFIDYVYKVFGFTYELKLSTRPEKYLGDLETWDKAEADLKEAIEAFGKPLVLNEGDGAFYGPKIDITVSDAMNRKFQCATLQLDFQLPIRFNLEYAAEDEAKKSRPVMIHRAVLGSVERMFAILLEHYKGKWPFWISPRQAIVCPISEKSQQYAEKVQKQIKDAGFYVDADLTDRKIDKKVREAQLAQYNYILVVGETEAATGQVSVRVRDNAAHSVKSIEDLLEEFKAKTAEFV

SEQ ID NO: 48764 - protein, 615 aa, Arabidopsis thaliana
  peptide (1)..(615): Ceres Seq. ID no. 15175615
MDIAAQISKGLANSALISAVDDVLWDMNRPLEGDCKLELFKFDSDKGRDTLWHSSAHILGQALEQEYGCQLCIGPCTTRGEGFYYDGFYGELGLSDNHFSSIEAGAAKAAKEAQPFERIEVTKDQALEMFSENNFKVELINGLPADMTITVYRCGPLVDLCRGPHIPNTSFVKAFKCLRASSAYWKGDKDRESLQRVYGISYPDQKQLKKYLQFLEEAKKYDHRLLGQKQELFFSHQLSPGSYFFLPLGTRVYNRLMDFIKNQYWHRGYTEVITPNMYNMDLWQTSGHADNYKDNMFTFNIEKQEFGLKPMNCPGHCLIFQHRVRSYRELPMRLADFGVLHRNEASGALSGLTRVRRFQQDDAHIFCTTEQVKGEVQGVLEFIDYVYKVFGFTYELKLSTRPEKYLGDLETWDKAEADLKEAIEAFGKPLVLNEGDGAFYGPKIDITVSDAMNRKFQCATLQLDFQLPIRFNLEYAAEDEAKKSRPVMIHRAVLGSVERMFAILLEHYKGKWPFWISPRQAIVCPISEKSQQYAEKVQKQIKDAGFYVDADLTDRKIDKKVREAQLAQYNYILVVGETEAATGQVSVRVRDNAAHSVKSIEDLLEEFKAKTAEFV

SEQ ID NO: 48765 - DNA, 2144 bp, Arabidopsis thaliana
  misc_feature (1)..(2144): Ceres Seq. ID no. 12600977
  misc_feature (1)..(2144): Ortholog of  Ceres SEQ ID NO 13599322 as cited in SEQ ID NO 0
atgccaacgaagcaatagctatgaaaagctaaaccctttccttcttcttcttcttcttcttcttcttcgattgtttagattacttgggtttgacccaagtttgcttctttctatgattcatcaatctagatcttgctatctgggtccagaaacgattcacgcgcttcattcatgatataaagttactaccttttttttattttaccttctgggtcatggttttgtctgcttttcgtcttttgcttttgtctggatgattcataatctctcgagatctattatgttcacaagagttgttcttatgcgtggtgagatgatcttaggagtgtttcactatctttcttcaattcgggtttttagtttctgagatctgtttttgaagaatctgatctgagtttgaggaagtttgactaaatagatcgaagaagatgtttaagcagatacttgggaagcttcctaagaaaacttctgctaagttttgggataatggtgaatcccaaactctagataacaacaacaatcaaggaggaggtgatgaagttttaagccagagaacgtcatcaaatggagatactagtttggattgtgtttcttcttttgatgtattgccaaggttgagagatgtttccatctctgagaagcaagaactgtttcttaagaagcttagactatgttgtctagtgtttgattttgtagctgagcctcaacagaacttcaaggagaaagagatcaaaaggcaaacacttcttgaagttgtggattatgttatctcttcagggaatggcaagttccctgaatcagttattcaagaagctaccaagatgatttcggcgaatctctttagtaatcctcatcgacaatggaagaacaaaactcctgaggcattggatttggaagaagaagaaggatctttgaatccttcttggcctcacttgcagattgtttatgagttccttttgagaatcgttgcatctcccaacacagaccccaagatatccaagaaatacatcgatcatacattcgttctcaagctattggatttgtttgattctgaagatccgagggaaagagagtatctgaaaacgatacttcaccgcatctacgggaggtttatggttcatcgcccgttcatcaggaaaactatgaacaacatcttgtatgattttatattcgagacagggaaacactcgggaatcgccgagtttcttgaagttttaggatccatcatcaatggattcgctttaccactcaaggaagaacacaagctctttcttactcgtgtcttgattcctctgcacaagctgaaatgcttaccaaattaccatcaacagctttcttactgcgttatacagtttgttgagaaagattgtaagctcgcggataccgttattagagggatgttgaagtactggcctgttactaatagcgctaaagaaatcatgttcttgaatgaattggaggagatactagaagcaactcaattaacagagtttgaacggtgtatggttccgctctctcgccaaattgctcagtgcttgagcagttctcactttcaggtagcggaacgggctttatacttatggaacaacgatcatgtcactaatttagtgagacagaacagtagaatcattttacctatagtgtttcccgctttggagaaaaacggtagcagccattggaatcaggctgtgaagaacttgacagagaatgttctcaaggttttgtccgatacaaatcctgatttattcgaagaatgtttgcacaagttccaagaagatcagcaaaaagcagaagatactaaaaagaagaatggagaaacctggagacagctagaggagattgttgcttcaatggcgaagtaagagttttttctgcactttacgtgattcaacaagaaatcggtttattgttttgttttgtttcctttacgcctgaaaggtatatacatttactttgctttgcttgcttcatttaagtatctggtttcgactttaagactagtttaattcagttaaacagtgtgagattttacctttttcagttcttgatttgtctgtatacttggttcatgtaaacatcttgttatgaaaacacgaattttctattgtctgaagtcacttagtttatcagtgaaagagattgct

SEQ ID NO: 48766 - protein, 477 aa, Arabidopsis thaliana
  peptide (1)..(477): Ceres Seq. ID no. 12600978
MFKQILGKLPKKTSAKFWDNGESQTLDNNNNQGGGDEVLSQRTSSNGDTSLDCVSSFDVLPRLRDVSISEKQELFLKKLRLCCLVFDFVAEPQQNFKEKEIKRQTLLEVVDYVISSGNGKFPESVIQEATKMISANLFSNPHRQWKNKTPEALDLEEEEGSLNPSWPHLQIVYEFLLRIVASPNTDPKISKKYIDHTFVLKLLDLFDSEDPREREYLKTILHRIYGRFMVHRPFIRKTMNNILYDFIFETGKHSGIAEFLEVLGSIINGFALPLKEEHKLFLTRVLIPLHKLKCLPNYHQQLSYCVIQFVEKDCKLADTVIRGMLKYWPVTNSAKEIMFLNELEEILEATQLTEFERCMVPLSRQIAQCLSSSHFQVAERALYLWNNDHVTNLVRQNSRIILPIVFPALEKNGSSHWNQAVKNLTENVLKVLSDTNPDLFEECLHKFQEDQQKAEDTKKKNGETWRQLEEIVASMAK

SEQ ID NO: 48767 - protein, 346 aa, Arabidopsis thaliana
  peptide (1)..(346): Ceres Seq. ID no. 12600979
MISANLFSNPHRQWKNKTPEALDLEEEEGSLNPSWPHLQIVYEFLLRIVASPNTDPKISKKYIDHTFVLKLLDLFDSEDPREREYLKTILHRIYGRFMVHRPFIRKTMNNILYDFIFETGKHSGIAEFLEVLGSIINGFALPLKEEHKLFLTRVLIPLHKLKCLPNYHQQLSYCVIQFVEKDCKLADTVIRGMLKYWPVTNSAKEIMFLNELEEILEATQLTEFERCMVPLSRQIAQCLSSSHFQVAERALYLWNNDHVTNLVRQNSRIILPIVFPALEKNGSSHWNQAVKNLTENVLKVLSDTNPDLFEECLHKFQEDQQKAEDTKKKNGETWRQLEEIVASMAK

SEQ ID NO: 48768 - protein, 249 aa, Arabidopsis thaliana
  peptide (1)..(249): Ceres Seq. ID no. 12600980
MVHRPFIRKTMNNILYDFIFETGKHSGIAEFLEVLGSIINGFALPLKEEHKLFLTRVLIPLHKLKCLPNYHQQLSYCVIQFVEKDCKLADTVIRGMLKYWPVTNSAKEIMFLNELEEILEATQLTEFERCMVPLSRQIAQCLSSSHFQVAERALYLWNNDHVTNLVRQNSRIILPIVFPALEKNGSSHWNQAVKNLTENVLKVLSDTNPDLFEECLHKFQEDQQKAEDTKKKNGETWRQLEEIVASMAK

SEQ ID NO: 48769 - DNA, 2034 bp, Arabidopsis thaliana; identical to SEQ ID NO: 44355
  misc_feature (1)..(2034): Ceres Seq. ID no. 13509639
  misc_feature (1)..(2034): Ortholog of  Ceres SEQ ID NO 12626078 as cited in SEQ ID NO 69113

SEQ ID NO: 48770 - protein, 634 aa, Arabidopsis thaliana; identical to SEQ ID NO: 44356
  peptide (1)..(634): Ceres Seq. ID no. 13509640

SEQ ID NO: 48771 - protein, 600 aa, Arabidopsis thaliana; identical to SEQ ID NO: 44357
  peptide (1)..(600): Ceres Seq. ID no. 13509641

SEQ ID NO: 48772 - protein, 587 aa, Arabidopsis thaliana; identical to SEQ ID NO: 44358
  peptide (1)..(587): Ceres Seq. ID no. 13509642

SEQ ID NO: 48773 - DNA, 2107 bp, Arabidopsis thaliana
  misc_feature (1)..(2107): Ceres Seq. ID no. 13591874
  misc_feature (1)..(2107): Ortholog of  Ceres SEQ ID NO 13656138 as cited in SEQ ID NO 65492
  misc_feature (1)..(2107): Ortholog of  Ceres SEQ ID NO 14301542 as cited in SEQ ID NO 66246
gagggtttccgctttccacacacacagctgcaacactatcttctcagaaatggtaaccgaagctttcgaattcgtcgccgttcctttcaattccgatggctggggacctccagacgcttccgacgtttcctcctccgcctctcccaccagcgtcgccgccgctaatcttctcccgaacgttcctttcgcttccttctcccgttccgataagctcggccgtgtagctgattggactcgcaatctctctaatccatccgctcgtcctaacaccggatccaaatcagatccgtctgcagttttcgatttctccgctttcgcaatcgacgaaggcttcggtctcgcttcctccggtggtaatcccgacgaagacgcagctttccgtctcgtcgacggtaaacctccgccgcgtcctaaattcggacctaaatggcgtttcaatcctcaccacaatcggaatcagcttcctcaacggcgagatgaagaagttgaagctaagaagcgtgatgctgagaaggaacgagctcgtcgtgatcgtctctacaataacaaccgtaacaacatccatcaccaacgccgtgaagctgccgctttcaaatcatccgttgatattcagccggagtggaacatgcttgagcagatccctttctcaacattctcgaagctctcgtacacagttcaagaaccagaagatcttcttctctgtggtggccttgagtactacaaccgccttttcgatcgcataacgccgaaaaacgaacgcagactcgagcgtttcaagaacaggaacttcttcaaagtcactactagtgatgatcctgtgattaggcgtttagctaaggaagacaaagctactgttttcgctactgatgctatattagctgctcttatgtgtgctcctagatctgtttactcttgggatattgttattcaacgtgttggtaacaaactgttctttgacaagagagatggatcacagcttgatttgttgtctgtgcatgagacatctcaagagccattgcctgagtctaaagatgatatcaattctgctcattctctaggtgtggaagctgcttacatcaatcagaacttttcgcagcaggttttggttagagatggaaagaaggaaacttttgatgaagccaatccatttgctaatgaaggtgaagagattgcttctgttgcttataggtatagaaggtggaagcttgatgataatatgcatcttgttgcgaggtgtgagttacagagtgttgctgatctcaacaaccaaaggtcgtttcttactttgaatgctcttaacgagtttgatcctaagtactctggtgttgattggagacagaagcttgaaactcagagaggtgcggttttagctacagaattgaagaacaatggaaataagttggctaaatggactgcacaagctttattggctaatgctgatatgatgaagattggttttgtctctagggttcatcctcgtgatcatttcaaccatgttatattatctgttttggggtataagccgaaggatttcgctggacagattaatctcaacacttctaacatgtgggggattgtgaaatccatagttgatctgtgtatgaaactaagcgaagggaagtatgttcttgtgaaggatccatcgaagcctcaagtgaggatttatgaggttccacctgatgctttcgagaatgattacgttgaggaaccgttgcctgaagatgaacaggttcagccaactgaggaaaacacagagggagcagaagcaagtgtagctgcaactaaagaaaccgaggagaagaaagctgatgatgctcaagcttgatggttataaagtcaggtccaaagtctacacctttcgtttctgggttcttttgagagttgaagcttcaatcaaacaacaacaatggaggttccttttttaattatcttgtcctttttcaaatttttgtggtactgctgtaattttaagtcagaaatgagattgtagaacactatcttcgtgacatcttttggaaaatcattacggattgtttacagaacagaaatctttttactatgactcttatagccaccaaattttcttgaatcattttgcattagtttt

SEQ ID NO: 48774 - protein, 607 aa, Arabidopsis thaliana
  peptide (1)..(607): Ceres Seq. ID no. 13591875
RVSAFHTHSCNTIFSEMVTEAFEFVAVPFNSDGWGPPDASDVSSSASPTSVAAANLLPNVPFASFSRSDKLGRVADWTRNLSNPSARPNTGSKSDPSAVFDFSAFAIDEGFGLASSGGNPDEDAAFRLVDGKPPPRPKFGPKWRFNPHHNRNQLPQRRDEEVEAKKRDAEKERARRDRLYNNNRNNIHHQRREAAAFKSSVDIQPEWNMLEQIPFSTFSKLSYTVQEPEDLLLCGGLEYYNRLFDRITPKNERRLERFKNRNFFKVTTSDDPVIRRLAKEDKATVFATDAILAALMCAPRSVYSWDIVIQRVGNKLFFDKRDGSQLDLLSVHETSQEPLPESKDDINSAHSLGVEAAYINQNFSQQVLVRDGKKETFDEANPFANEGEEIASVAYRYRRWKLDDNMHLVARCELQSVADLNNQRSFLTLNALNEFDPKYSGVDWRQKLETQRGAVLATELKNNGNKLAKWTAQALLANADMMKIGFVSRVHPRDHFNHVILSVLGYKPKDFAGQINLNTSNMWGIVKSIVDLCMKLSEGKYVLVKDPSKPQVRIYEVPPDAFENDYVEEPLPEDEQVQPTEENTEGAEASVAATKETEEKKADDAQA

SEQ ID NO: 48775 - protein, 591 aa, Arabidopsis thaliana
  peptide (1)..(591): Ceres Seq. ID no. 13591876
MVTEAFEFVAVPFNSDGWGPPDASDVSSSASPTSVAAANLLPNVPFASFSRSDKLGRVADWTRNLSNPSARPNTGSKSDPSAVFDFSAFAIDEGFGLASSGGNPDEDAAFRLVDGKPPPRPKFGPKWRFNPHHNRNQLPQRRDEEVEAKKRDAEKERARRDRLYNNNRNNIHHQRREAAAFKSSVDIQPEWNMLEQIPFSTFSKLSYTVQEPEDLLLCGGLEYYNRLFDRITPKNERRLERFKNRNFFKVTTSDDPVIRRLAKEDKATVFATDAILAALMCAPRSVYSWDIVIQRVGNKLFFDKRDGSQLDLLSVHETSQEPLPESKDDINSAHSLGVEAAYINQNFSQQVLVRDGKKETFDEANPFANEGEEIASVAYRYRRWKLDDNMHLVARCELQSVADLNNQRSFLTLNALNEFDPKYSGVDWRQKLETQRGAVLATELKNNGNKLAKWTAQALLANADMMKIGFVSRVHPRDHFNHVILSVLGYKPKDFAGQINLNTSNMWGIVKSIVDLCMKLSEGKYVLVKDPSKPQVRIYEVPPDAFENDYVEEPLPEDEQVQPTEENTEGAEASVAATKETEEKKADDAQA

SEQ ID NO: 48776 - protein, 399 aa, Arabidopsis thaliana
  peptide (1)..(399): Ceres Seq. ID no. 13591877
MLEQIPFSTFSKLSYTVQEPEDLLLCGGLEYYNRLFDRITPKNERRLERFKNRNFFKVTTSDDPVIRRLAKEDKATVFATDAILAALMCAPRSVYSWDIVIQRVGNKLFFDKRDGSQLDLLSVHETSQEPLPESKDDINSAHSLGVEAAYINQNFSQQVLVRDGKKETFDEANPFANEGEEIASVAYRYRRWKLDDNMHLVARCELQSVADLNNQRSFLTLNALNEFDPKYSGVDWRQKLETQRGAVLATELKNNGNKLAKWTAQALLANADMMKIGFVSRVHPRDHFNHVILSVLGYKPKDFAGQINLNTSNMWGIVKSIVDLCMKLSEGKYVLVKDPSKPQVRIYEVPPDAFENDYVEEPLPEDEQVQPTEENTEGAEASVAATKETEEKKADDAQA

SEQ ID NO: 48777 - DNA, 2038 bp, Arabidopsis thaliana
  misc_feature (1)..(2038): Ceres Seq. ID no. 12575176
  misc_feature (1)..(2038): Ortholog of  Ceres SEQ ID NO 14307964 as cited in SEQ ID NO 66191
  misc_feature (1)..(2038): Ortholog of  Ceres SEQ ID NO 15170167 as cited in SEQ ID NO 66224
  misc_feature (1)..(2038): Ortholog of  Ceres SEQ ID NO 13502874 as cited in SEQ ID NO 66298
  misc_feature (1)..(2038): Ortholog of  Ceres SEQ ID NO 12614124 as cited in SEQ ID NO 68392
aaatggaccaaatttgtggctactactctcctcaattataaaaatgaaatatttatatatcttccctgaaccaggaagatattttgtttgtcttctacaaatattatatatatgtaatttctttggataattttctaccgcttaagaagcacagatggacataatctcagggcaagctctgttactcctcttttgctttatcttatcatgttttcttatcttcaccaccacaagatctggacgaatctcccgcggggccaccgcgctgcctccaggacctccacggttaccgatcatcggaaatattcacctcgtcggaaaacatccacatcgctcattcgccgagctctcaaaaacttatggaccagtcatgagtcttaagcttggaagtttaaatacagtggttatagcttcaccagaagctgcgagagaggttttacgaacacatgaccagattttgtctgcccgtagtcccactaacgcggtacggtccatcaatcaccaagacgcttcccttgtctggcttccttcgtcgtccgctcgttggaggctgttgagaaggctgtcggtgactcagctcttgtcaccacagcgtatcgaagccacgaaagccttgaggatgaacaaggtgaaggaacttgtgagcttcataagtgaaagcagcgatagggaagaatctgttgatatttctcgtgtagccttcatcacaactcttaatatcatatcgaacattctgttttccgtcgatctcggtagctacaacgcgaaagcttctattaatggggttcaagacacggtgattagtgttatggatgctgccgggactccagacgctgctaattactttccatttctgaggtttcttgatctgcaaggtaatgtgaagacttttaaggtttgcacggagaggctggtaagggttttccgtgggttcattgatgctaagattgcggaaaaatcatcgcagaataaccctaaagatgtttcaaaaaacgatttcgttgacaaccttctcgattacaaaggagatgaatcagaactctccattagcgatattgaacaccttctcttggatatgtttacagcaggcacggatacaagctctagtaccctggagtgggcaatgacagagttacttaaaaaccctaaaacgatggcgaaagctcaggccgagatcgattgtgtgataggtcaaaacggtatcgttgaagagtcagatatctccaaactgccgtatttacaagcagtcgtgaaggaaactttccggttacatacgcctgttccgcttcttatcccgcgaaaagccgaatccgatgcggagattcttggtttcatggtgcttaaagatactcaggttctagtgaacgtctgggccataggacgagacccgagcgtgtgggataatccgtcccagtttgagccagagaggtttttggggaaagatatggacgtgagaggtagagattatgagcttacaccattcggagccggacgtagaatttgcccgggaatgcctttggctatgaaaacagtgtctcttatgcttgcttctcttctttattcctttgactggaagcttccgaagggtgtcctttcggaggatttggacatggacgagacctttggtctaactttgcataagaccaacccgttacatgccgtacccgtcaagaaacgcgccaatattaattagtcgtggttttataattaaaaataaacagagaaataatctccaaagctttgtttattaccaaaaactatctgttttcggttctagagtttgtttgtttctctctcttgaggtggctagagcttgaagaagtcaaaagtatccatattgatgcctagcttcggtcctcggtttaggctaggaaggaaacgaagaagtttctgcaaaccgatgcagatcatcaatggaataatgaaatgttaattttatcatttactcatataggtttccgcctcattatcatttacttgatgtttctcctaaatcttgtcatttaattgactaaggaaataacgaagaaatctcgtg

SEQ ID NO: 48778 - protein, 512 aa, Arabidopsis thaliana
  peptide (1)..(512): Ceres Seq. ID no. 12575177
MDIISGQALLLLFCFILSCFLIFTTTRSGRISRGATALPPGPPRLPIIGNIHLVGKHPHRSFAELSKTYGPVMSLKLGSLNTVVIASPEAAREVLRTHDQILSARSPTNAVRSINHQDASLVWLPSSSARWRLLRRLSVTQLLSPQRIEATKALRMNKVKELVSFISESSDREESVDISRVAFITTLNIISNILFSVDLGSYNAKASINGVQDTVISVMDAAGTPDAANYFPFLRFLDLQGNVKTFKVCTERLVRVFRGFIDAKIAEKSSQNNPKDVSKNDFVDNLLDYKGDESELSISDIEHLLLDMFTAGTDTSSSTLEWAMTELLKNPKTMAKAQAEIDCVIGQNGIVEESDISKLPYLQAVVKETFRLHTPVPLLIPRKAESDAEILGFMVLKDTQVLVNVWAIGRDPSVWDNPSQFEPERFLGKDMDVRGRDYELTPFGAGRRICPGMPLAMKTVSLMLASLLYSFDWKLPKGVLSEDLDMDETFGLTLHKTNPLHAVPVKKRANIN

SEQ ID NO: 48779 - protein, 440 aa, Arabidopsis thaliana
  peptide (1)..(440): Ceres Seq. ID no. 12575178
MSLKLGSLNTVVIASPEAAREVLRTHDQILSARSPTNAVRSINHQDASLVWLPSSSARWRLLRRLSVTQLLSPQRIEATKALRMNKVKELVSFISESSDREESVDISRVAFITTLNIISNILFSVDLGSYNAKASINGVQDTVISVMDAAGTPDAANYFPFLRFLDLQGNVKTFKVCTERLVRVFRGFIDAKIAEKSSQNNPKDVSKNDFVDNLLDYKGDESELSISDIEHLLLDMFTAGTDTSSSTLEWAMTELLKNPKTMAKAQAEIDCVIGQNGIVEESDISKLPYLQAVVKETFRLHTPVPLLIPRKAESDAEILGFMVLKDTQVLVNVWAIGRDPSVWDNPSQFEPERFLGKDMDVRGRDYELTPFGAGRRICPGMPLAMKTVSLMLASLLYSFDWKLPKGVLSEDLDMDETFGLTLHKTNPLHAVPVKKRANIN

SEQ ID NO: 48780 - protein, 357 aa, Arabidopsis thaliana
  peptide (1)..(357): Ceres Seq. ID no. 12575179
MNKVKELVSFISESSDREESVDISRVAFITTLNIISNILFSVDLGSYNAKASINGVQDTVISVMDAAGTPDAANYFPFLRFLDLQGNVKTFKVCTERLVRVFRGFIDAKIAEKSSQNNPKDVSKNDFVDNLLDYKGDESELSISDIEHLLLDMFTAGTDTSSSTLEWAMTELLKNPKTMAKAQAEIDCVIGQNGIVEESDISKLPYLQAVVKETFRLHTPVPLLIPRKAESDAEILGFMVLKDTQVLVNVWAIGRDPSVWDNPSQFEPERFLGKDMDVRGRDYELTPFGAGRRICPGMPLAMKTVSLMLASLLYSFDWKLPKGVLSEDLDMDETFGLTLHKTNPLHAVPVKKRANIN

SEQ ID NO: 48781 - DNA, 2662 bp, Arabidopsis thaliana; identical to SEQ ID NO: 46613
  misc_feature (1)..(2662): Ceres Seq. ID no. 12600678
  misc_feature (1)..(2662): Ortholog of  Ceres SEQ ID NO 14307827 as cited in SEQ ID NO 54367

SEQ ID NO: 48782 - protein, 725 aa, Arabidopsis thaliana; identical to SEQ ID NO: 46614
  peptide (1)..(725): Ceres Seq. ID no. 12600679

SEQ ID NO: 48783 - protein, 573 aa, Arabidopsis thaliana; identical to SEQ ID NO: 46615
  peptide (1)..(573): Ceres Seq. ID no. 12600680

SEQ ID NO: 48784 - protein, 531 aa, Arabidopsis thaliana; identical to SEQ ID NO: 46616
  peptide (1)..(531): Ceres Seq. ID no. 12600681

SEQ ID NO: 48785 - DNA, 2500 bp, Arabidopsis thaliana; identical to SEQ ID NO: 44754
  misc_feature (1)..(2500): Ceres Seq. ID no. 13503824
  misc_feature (1)..(2500): Ortholog of  Ceres SEQ ID NO 13597044 as cited in SEQ ID NO 63531

SEQ ID NO: 48786 - protein, 772 aa, Arabidopsis thaliana; identical to SEQ ID NO: 44755
  peptide (1)..(772): Ceres Seq. ID no. 13503825

SEQ ID NO: 48787 - protein, 539 aa, Arabidopsis thaliana; identical to SEQ ID NO: 44756
  peptide (1)..(539): Ceres Seq. ID no. 13503826

SEQ ID NO: 48788 - protein, 442 aa, Arabidopsis thaliana; identical to SEQ ID NO: 44757
  peptide (1)..(442): Ceres Seq. ID no. 13503827

SEQ ID NO: 48789 - DNA, 2769 bp, Arabidopsis thaliana
  misc_feature (1)..(2769): Ceres Seq. ID no. 14310267
  misc_feature (1)..(2769): Ortholog of  Ceres SEQ ID NO 14307253 as cited in SEQ ID NO 54783
  misc_feature (1)..(2769): Ortholog of  Ceres SEQ ID NO 15225226 as cited in SEQ ID NO 58693
  misc_feature (1)..(2769): Ortholog of  Ceres SEQ ID NO 13654989 as cited in SEQ ID NO 63117
  misc_feature (1)..(2769): Ortholog of  Ceres SEQ ID NO 14303173 as cited in SEQ ID NO 66550
  misc_feature (1)..(2769): Ortholog of  Ceres SEQ ID NO 13584744 as cited in SEQ ID NO 69137
gaaaataatttctcgaaagagaaaaaaagagagagagagagagagatggagcttctacagtactaaaagctgagtgaatccgaagaaatctccgccaacggaatattttttttctgggagctgaaaatcgttggtgacgatggcggattctctttctagggtttacggaactctgtttagtggtgttaatatatctctcttctcggatccaccgttgaaaaccccctgaagagtgtttttttttccgggtgtaaggtcttttacgtttcgttttttcttgagatttcgtcttccgctgtgagtttctgttctcgcggcgagtttttgtgtagatctgagggttttcaaggcaagagaaagtgtcggtgatgtcgattttctcactcgcgagctcttctgattcacaaagagatgacctaataatggcgttgaaggcggtggttattgtatattgtgtggtttctctcgtcagtgttcaattagctgatgctcaacatgaaggactgccagtttcaccaacgttatcaccttcaacttcaccagttatcactgatctgcccctaccagctgaatttccgcggtttcacagaaagtatttcgcaccacaacaagcagaagcacctcagcattctcccccttatagtcgtttggtcgcttctgatcatccccctaccagctcacatttctccaaaccttccatgaaaaggaatgctcagtctcctggagccggcttggctgatattgctccagcacaatctagcaatggtgttcttcctgatgccttaactcagccacctttgtcgccctccatttcaaattgttgcaaatcagatatggtgcttaaacgaagaagtattggttgccactgcgtgtatcctataaaactggacatccttctcttgaatgtttcagaaactcctagttggaacatgttcttgaacgaatttgctacccagcttggtctcctacctcaccaaatcgagctgattaacttctatgtgctaagcttatcaaggatgaacatatcgatggatatcacccctcattctggaattagtttctcagctagtcaggcatccgcaataaactcttcccttatcagccacaagattcaatttagccctactttggtgggagattacaaacttctaaaccttacttggtttgaggcccctgcaccttcgcaagcacctctagtggcttcttcacctcataaagcaccatcacaaggatcctcagcaactacgtcagtaagatctccagggaaaaagaggcatcccaatcttattcttatcttttctatagccgctggtgtgcttatacttgccataatcactgtacttgttatttgttcccgcgcactccgagaagagaaagctccagatcctcacaaagaagctgtaaaaccaaggaacctggacgctggttcatttgggggatctcttcctcacccagcaagtacacggtttctgtcatatgaagaactcaaagaggcaactagcaattttgaatctgctagcattctaggagaaggtgggtttggcaaggtttacagaggcatcttagccgatggtactgctgtagcgattaagaagctcacaagtggtgggccacaaggtgataaagaattccaggtggagattgatatgcttagccgtcttcatcatcgtaatcttgtgaaacttgtgggttactatagtagtcgagattcttctcagcacctactttgttatgagcttgttccaaatggcagcctcgaggcttggctccatgggcctctcgggttgaactgtcctcttgattgggacaccagaatgaagattgcacttgatgctgcaagaggacttgcataccttcatgaagactcgcaaccctccgttatacacagagattttaaagcctctaatatactccttgaaaacaacttcaacgccaaagttgcagattttggcctagccaaacaagctcctgaaggcaggggtaatcacttatctactcgtgttatgggcacatttggatatgttgcgcctgaatatgcaatgacgggacacctactcgtcaagagtgatgtttatagttacggtgtggtccttctcgaattgttaactggtagaaaacctgtggatatgtcacaaccttcaggccaagaaaatctcgtcacttggacaaggccagttttaagagacaaagaccggttagaagaactagtcgattcaagacttgaaggaaaatacccgaaagaagatttcataagagtatgcacaatcgctgcagcttgtgttgcacctgaagctagccagagaccaacgatgggcgaagtggttcagtcacttaaaatggttcaacgggtggttgagtatcaagacccggttttaaacacttcaaataaagctcgtcctaaccggagacaatcatcagctacgttcgagtcagaagtaacctcttctatgttctcttctggtccttattctggtctaagcgcttttgatcatgaaaatattacacgaacaactgttttctcagaagatcttcacgaaggccgatgatagaagccagggttttcttctttttatttgtttttctcccacttacggtgagaaaatttccaccagagaagcttttgagtttgggacattattacagctctttggattttggattctcctttattggaggatagaattttgtatatatttttgcgttaattaattaatatttgccacaaccatcagatatacaaatagaatttgaatatactttttccaatat

SEQ ID NO: 48790 - protein, 725 aa, Arabidopsis thaliana
  peptide (1)..(725): Ceres Seq. ID no. 14310268
MSIFSLASSSDSQRDDLIMALKAVVIVYCVVSLVSVQLADAQHEGLPVSPTLSPSTSPVITDLPLPAEFPRFHRKYFAPQQAEAPQHSPPYSRLVASDHPPTSSHFSKPSMKRNAQSPGAGLADIAPAQSSNGVLPDALTQPPLSPSISNCCKSDMVLKRRSIGCHCVYPIKLDILLLNVSETPSWNMFLNEFATQLGLLPHQIELINFYVLSLSRMNISMDITPHSGISFSASQASAINSSLISHKIQFSPTLVGDYKLLNLTWFEAPAPSQAPLVASSPHKAPSQGSSATTSVRSPGKKRHPNLILIFSIAAGVLILAIITVLVICSRALREEKAPDPHKEAVKPRNLDAGSFGGSLPHPASTRFLSYEELKEATSNFESASILGEGGFGKVYRGILADGTAVAIKKLTSGGPQGDKEFQVEIDMLSRLHHRNLVKLVGYYSSRDSSQHLLCYELVPNGSLEAWLHGPLGLNCPLDWDTRMKIALDAARGLAYLHEDSQPSVIHRDFKASNILLENNFNAKVADFGLAKQAPEGRGNHLSTRVMGTFGYVAPEYAMTGHLLVKSDVYSYGVVLLELLTGRKPVDMSQPSGQENLVTWTRPVLRDKDRLEELVDSRLEGKYPKEDFIRVCTIAAACVAPEASQRPTMGEVVQSLKMVQRVVEYQDPVLNTSNKARPNRRQSSATFESEVTSSMFSSGPYSGLSAFDHENITRTTVFSEDLHEGR

SEQ ID NO: 48791 - protein, 707 aa, Arabidopsis thaliana
  peptide (1)..(707): Ceres Seq. ID no. 14310269
MALKAVVIVYCVVSLVSVQLADAQHEGLPVSPTLSPSTSPVITDLPLPAEFPRFHRKYFAPQQAEAPQHSPPYSRLVASDHPPTSSHFSKPSMKRNAQSPGAGLADIAPAQSSNGVLPDALTQPPLSPSISNCCKSDMVLKRRSIGCHCVYPIKLDILLLNVSETPSWNMFLNEFATQLGLLPHQIELINFYVLSLSRMNISMDITPHSGISFSASQASAINSSLISHKIQFSPTLVGDYKLLNLTWFEAPAPSQAPLVASSPHKAPSQGSSATTSVRSPGKKRHPNLILIFSIAAGVLILAIITVLVICSRALREEKAPDPHKEAVKPRNLDAGSFGGSLPHPASTRFLSYEELKEATSNFESASILGEGGFGKVYRGILADGTAVAIKKLTSGGPQGDKEFQVEIDMLSRLHHRNLVKLVGYYSSRDSSQHLLCYELVPNGSLEAWLHGPLGLNCPLDWDTRMKIALDAARGLAYLHEDSQPSVIHRDFKASNILLENNFNAKVADFGLAKQAPEGRGNHLSTRVMGTFGYVAPEYAMTGHLLVKSDVYSYGVVLLELLTGRKPVDMSQPSGQENLVTWTRPVLRDKDRLEELVDSRLEGKYPKEDFIRVCTIAAACVAPEASQRPTMGEVVQSLKMVQRVVEYQDPVLNTSNKARPNRRQSSATFESEVTSSMFSSGPYSGLSAFDHENITRTTVFSEDLHEGR

SEQ ID NO: 48792 - protein, 615 aa, Arabidopsis thaliana
  peptide (1)..(615): Ceres Seq. ID no. 14310270
MKRNAQSPGAGLADIAPAQSSNGVLPDALTQPPLSPSISNCCKSDMVLKRRSIGCHCVYPIKLDILLLNVSETPSWNMFLNEFATQLGLLPHQIELINFYVLSLSRMNISMDITPHSGISFSASQASAINSSLISHKIQFSPTLVGDYKLLNLTWFEAPAPSQAPLVASSPHKAPSQGSSATTSVRSPGKKRHPNLILIFSIAAGVLILAIITVLVICSRALREEKAPDPHKEAVKPRNLDAGSFGGSLPHPASTRFLSYEELKEATSNFESASILGEGGFGKVYRGILADGTAVAIKKLTSGGPQGDKEFQVEIDMLSRLHHRNLVKLVGYYSSRDSSQHLLCYELVPNGSLEAWLHGPLGLNCPLDWDTRMKIALDAARGLAYLHEDSQPSVIHRDFKASNILLENNFNAKVADFGLAKQAPEGRGNHLSTRVMGTFGYVAPEYAMTGHLLVKSDVYSYGVVLLELLTGRKPVDMSQPSGQENLVTWTRPVLRDKDRLEELVDSRLEGKYPKEDFIRVCTIAAACVAPEASQRPTMGEVVQSLKMVQRVVEYQDPVLNTSNKARPNRRQSSATFESEVTSSMFSSGPYSGLSAFDHENITRTTVFSEDLHEGR

SEQ ID NO: 48793 - DNA, 1560 bp, Arabidopsis thaliana
  misc_feature (1)..(1560): Ceres Seq. ID no. 13578975
  misc_feature (1)..(1560): Ortholog of  Ceres SEQ ID NO 15180188 as cited in SEQ ID NO 0
aacaaaacttctccggccatggatcctggcgacccaacttcaataatcttttcaaagatcagaactttcgaacttgagaacgcttccagagtcattgactattttctcttgcaagacatggaacaaagagatttgattcgaattgcttttggtcctgactctctcatacagactttctgtcagaaagctaaagtcgatttaggtttttcctcgaacggtttctcgagacccatcaatatccatggccagtcattgtcctcgtcttctcccagaaatgggttcttagagttctcgagaaaccctagtaaccctttgtcttcttcgttaactttgaacacactcagagataataagcctaacttcaattctagtccttttcgtgaaagttcatcactttttgcctcttcttccggcgatgagcagcagcaacaacaattcagtaacaactttctgttcacaaacgacgaggacccatttgccaattctcacaagaggagtttctctgctaacgatgcttgttttgagtcagaggaaccatggtttggaggaggaaatggttgtcatcaatttccacaaggcggtttagttgatggttttggttcctctggtgtctttggatcgccgagtgagatggattacatgcttgaggggatgatgaggatgaagttagctcagcaaaagagcatggttgctgctcagtttatggcggcttgtggctctccaatgttgcatagacacggatcaggacattttggagaagaatgtggtaactattttagtcaaggaaggcatgaaagagaggattcagtctctaaacagatttacttgacatttccatctgaaagctccttcactgatgaagacgtctcaacctatttcagagattttggacttgtggatgatgtgaggattccatatcagcagcaaaggatgtatgggtttgtaacttttgctaaggctgaaactgtgagaaccatattagctcgtggaaaccctcatttcatatgtgactcacgtgtgctcgttaaaccatacaaggagaaaggaaaaatccttcaaaagaggcagcagcaacaactacacgagttgttggagagagggaactattcaccttcttcaagtccgtctggaaaggactcgagggaactatatgaatgtcgcttaggaccaaggatgttttcaaagaagacacaggagatgttgcgaagaaaaaccgagcaagctgatttacaacatgccatagaacgtagtccttctattggttctccctctcatttcccacctcgattcaatcatagtcttctctttcaatcaggaaacaacaacgaagaaatcatggaaggcgacagtgatagaagtgagaaagatcttcaacaagtagcaaccagcaacgaagaacgtggttacaataacggtttctacaaagggcaagagacgagtctggagaatactctccctgatagcttgtttggttctccaaaaaaatctggcgaaacctaccaaaccgagtctgataccgagcataataataaggaagcctcatcaaatcagttagcgtag

SEQ ID NO: 48794 - protein, 519 aa, Arabidopsis thaliana
  peptide (1)..(519): Ceres Seq. ID no. 13578976
NKTSPAMDPGDPTSIIFSKIRTFELENASRVIDYFLLQDMEQRDLIRIAFGPDSLIQTFCQKAKVDLGFSSNGFSRPINIHGQSLSSSSPRNGFLEFSRNPSNPLSSSLTLNTLRDNKPNFNSSPFRESSSLFASSSGDEQQQQQFSNNFLFTNDEDPFANSHKRSFSANDACFESEEPWFGGGNGCHQFPQGGLVDGFGSSGVFGSPSEMDYMLEGMMRMKLAQQKSMVAAQFMAACGSPMLHRHGSGHFGEECGNYFSQGRHEREDSVSKQIYLTFPSESSFTDEDVSTYFRDFGLVDDVRIPYQQQRMYGFVTFAKAETVRTILARGNPHFICDSRVLVKPYKEKGKILQKRQQQQLHELLERGNYSPSSSPSGKDSRELYECRLGPRMFSKKTQEMLRRKTEQADLQHAIERSPSIGSPSHFPPRFNHSLLFQSGNNNEEIMEGDSDRSEKDLQQVATSNEERGYNNGFYKGQETSLENTLPDSLFGSPKKSGETYQTESDTEHNNKEASSNQLA

SEQ ID NO: 48795 - protein, 513 aa, Arabidopsis thaliana
  peptide (1)..(513): Ceres Seq. ID no. 13578977
MDPGDPTSIIFSKIRTFELENASRVIDYFLLQDMEQRDLIRIAFGPDSLIQTFCQKAKVDLGFSSNGFSRPINIHGQSLSSSSPRNGFLEFSRNPSNPLSSSLTLNTLRDNKPNFNSSPFRESSSLFASSSGDEQQQQQFSNNFLFTNDEDPFANSHKRSFSANDACFESEEPWFGGGNGCHQFPQGGLVDGFGSSGVFGSPSEMDYMLEGMMRMKLAQQKSMVAAQFMAACGSPMLHRHGSGHFGEECGNYFSQGRHEREDSVSKQIYLTFPSESSFTDEDVSTYFRDFGLVDDVRIPYQQQRMYGFVTFAKAETVRTILARGNPHFICDSRVLVKPYKEKGKILQKRQQQQLHELLERGNYSPSSSPSGKDSRELYECRLGPRMFSKKTQEMLRRKTEQADLQHAIERSPSIGSPSHFPPRFNHSLLFQSGNNNEEIMEGDSDRSEKDLQQVATSNEERGYNNGFYKGQETSLENTLPDSLFGSPKKSGETYQTESDTEHNNKEASSNQLA

SEQ ID NO: 48796 - protein, 480 aa, Arabidopsis thaliana
  peptide (1)..(480): Ceres Seq. ID no. 13578978
MEQRDLIRIAFGPDSLIQTFCQKAKVDLGFSSNGFSRPINIHGQSLSSSSPRNGFLEFSRNPSNPLSSSLTLNTLRDNKPNFNSSPFRESSSLFASSSGDEQQQQQFSNNFLFTNDEDPFANSHKRSFSANDACFESEEPWFGGGNGCHQFPQGGLVDGFGSSGVFGSPSEMDYMLEGMMRMKLAQQKSMVAAQFMAACGSPMLHRHGSGHFGEECGNYFSQGRHEREDSVSKQIYLTFPSESSFTDEDVSTYFRDFGLVDDVRIPYQQQRMYGFVTFAKAETVRTILARGNPHFICDSRVLVKPYKEKGKILQKRQQQQLHELLERGNYSPSSSPSGKDSRELYECRLGPRMFSKKTQEMLRRKTEQADLQHAIERSPSIGSPSHFPPRFNHSLLFQSGNNNEEIMEGDSDRSEKDLQQVATSNEERGYNNGFYKGQETSLENTLPDSLFGSPKKSGETYQTESDTEHNNKEASSNQLA

SEQ ID NO: 48797 - DNA, 1818 bp, Arabidopsis thaliana
  misc_feature (1)..(1818): Ceres Seq. ID no. 15168825
  misc_feature (1)..(1818): Ortholog of  Ceres SEQ ID NO 15175785 as cited in SEQ ID NO 56970
  misc_feature (1)..(1818): Ortholog of  Ceres SEQ ID NO 15178157 as cited in SEQ ID NO 57481
  misc_feature (1)..(1818): Ortholog of  Ceres SEQ ID NO 13597407 as cited in SEQ ID NO 64106
  misc_feature (1)..(1818): Ortholog of  Ceres SEQ ID NO 14303309 as cited in SEQ ID NO 67739
gtctcactccgatccgatcatggctttcgctgtctcggttcagtcacatttcgcaatcagagcgttaaaacgagaccacttcaagaacccttctcctcgtactttctgctcgtgttttaaatcgaggcctgactcgtcttaccttagtttaaaggaacgtacttgcttcgtttccaaaccgggtttagtcactactagatacagacatatattccaggtcggagctgagacgggaggagagttcgccgacagtggagaagtagctgattcgcttgcttctgatgcaccagagtcattttcttggtcttctgtgatactcccgtttatcttcccggctttgggaggattattgtttgggtatgacattggggctacctccggtgctacgctctcacttcagtcacctgcgcttagcggaactacatggtttaacttctcacctgttcagctaggacttgtggttagcggatccttgtatggagcccttcttggctcaatttctgtctatggcgttgctgatttccttggaagaaggcgggaacttattatagctgctgttctctatctcctcgggtctctgatcactggctgtgcccctgatcttaatattctcttagttggaaggcttctctatggctttggtattggtttggcaatgcatggggctcccctctatattgctgagacatgcccatctcaaatccgtggaactttgatatctctgaaagaactcttcatcgtattgggaattttgttgggtttttctgttggaagcttccagattgatgtagttggagggtggcgttacatgtatggatttggtacgcctgttgctttgctgatgggactaggcatgtggagtctccctgcatctcctcgctggttgctgcttagagctgtccaaggtaaaggacaattacaagaatacaaagagaaggccatgcttgccctcagcaaattacgtggcagacctccaggtgataaaatctcaagaagttggtagatgatgcctatttatctgtgaaaacggcctatgaagatgagaaatctgggggaaacttcctggaagtattccaagggcctaatttgaaagctttgacaattggtggaggtttagtcctcttccaacagataactggacagcctagtgttctttattatgcgggttcgattcttcagactgctggattctctgctgctgctgatgcaactcgagtctctgttattattggtgttttcaagttactgatgacatgggtagctgttgcgaaagttgatgatctcggcagacgacctttactgattggaggtgtcagcggcattgcgttgtccttgtttctactgtcagcatactacaagtttctcggaggctttccccttgtcgctgttggtgcactgcttctctatgttggttgttaccagatctcatttggacccatcagctggctaatggtgtcagagattttcccgctccgcacaagagggagagggatcagtcttgcagttcttacaaactttggctccaatgctattgtgacatttgcattttcacctttaaaggaatttcttggagccgagaatcttttccttctctttgggggcatagcactggtatcactgctgtttgtaatactagtagttccagagaccaagggtctcagcttggaagaaattgaatcaaaaatcttgaagtgaaacgttgaagaacatatttgttatagttgattctggtgaaatacatgtatgaggatgtgactattctctttgtaacataatatgtttcgtaatcaatgggaaaaccaaacctttttcatgatt

SEQ ID NO: 48798 - protein, 333 aa, Arabidopsis thaliana
  peptide (1)..(333): Ceres Seq. ID no. 15168826
SHSDPIMAFAVSVQSHFAIRALKRDHFKNPSPRTFCSCFKSRPDSSYLSLKERTCFVSKPGLVTTRYRHIFQVGAETGGEFADSGEVADSLASDAPESFSWSSVILPFIFPALGGLLFGYDIGATSGATLSLQSPALSGTTWFNFSPVQLGLVVSGSLYGALLGSISVYGVADFLGRRRELIIAAVLYLLGSLITGCAPDLNILLVGRLLYGFGIGLAMHGAPLYIAETCPSQIRGTLISLKELFIVLGILLGFSVGSFQIDVVGGWRYMYGFGTPVALLMGLGMWSLPASPRWLLLRAVQGKGQLQEYKEKAMLALSKLRGRPPGDKISRSW

SEQ ID NO: 48799 - protein, 327 aa, Arabidopsis thaliana
  peptide (1)..(327): Ceres Seq. ID no. 15168827
MAFAVSVQSHFAIRALKRDHFKNPSPRTFCSCFKSRPDSSYLSLKERTCFVSKPGLVTTRYRHIFQVGAETGGEFADSGEVADSLASDAPESFSWSSVILPFIFPALGGLLFGYDIGATSGATLSLQSPALSGTTWFNFSPVQLGLVVSGSLYGALLGSISVYGVADFLGRRRELIIAAVLYLLGSLITGCAPDLNILLVGRLLYGFGIGLAMHGAPLYIAETCPSQIRGTLISLKELFIVLGILLGFSVGSFQIDVVGGWRYMYGFGTPVALLMGLGMWSLPASPRWLLLRAVQGKGQLQEYKEKAMLALSKLRGRPPGDKISRSW

SEQ ID NO: 48800 - DNA, 1947 bp, Arabidopsis thaliana
  misc_feature (1)..(1947): Ceres Seq. ID no. 15175628
  misc_feature (1)..(1947): Ortholog of  Ceres SEQ ID NO 15175923 as cited in SEQ ID NO 54037
  misc_feature (1)..(1947): Ortholog of  Ceres SEQ ID NO 14303366 as cited in SEQ ID NO 54418
  misc_feature (1)..(1947): Ortholog of  Ceres SEQ ID NO 13657610 as cited in SEQ ID NO 66165
  misc_feature (1)..(1947): Ortholog of  Ceres SEQ ID NO 13598312 as cited in SEQ ID NO 68448
  misc_feature (1)..(1947): Ortholog of  Ceres SEQ ID NO 13596100 as cited in SEQ ID NO 68573
tctcgctaaacagatgcttcaggtaaaatatcttattattcggtttggtttaatccggtttggtcttttagactgttatgagtcgtcgtgattcgtggaagaataaaatctaggacttttcttattcgacttttaaaatttgaaagggctaatgacagctcatgattttagaaattatttaggggaattcaatagaactaccagctagaatttgcctttcaaaatttaattatttgcgtcttggtgtcacttaataaagcatttagtacacttaccagctagattttttgattaattgacttagctttcatgtcattaatacgtgctataatatttctatgacttatttgatcaaaatgtagtcactggattggtttttagttgccgacttaatatggatgcaactttattctatatgagttgtatgaaagcataaaggccaaatttacgtgtaaaagtcacgtgtctatgaaaattctgacagtgacaggctttgtagtttttaggttggtggtagttgtgaaaatggaaaaatcataatgttgtgttaaatgatcaatgttttattcattaaaggttgattacctttttttctttctcaaacataaccatctagcaaaagtattcatttattaccaaaaaatagttcatgcattaggaatttaggattgatgcataattacaaatttacattcacttttacaaacatatttaaattgtagatctaagaagcgaacgtggaaacacgtgcttgcaagtttctcgaatctctaatgtggttggcaaattgaaccaaaggtcataaatgtgctacaacataatgttgggctacttgcatagattttacttacacttgagacatatgcacacacataggtctgcatttatagatttgtgtttaatgtccaccgtataacggttgtctagtcccaaccattgttagaattttcttagattcgaaagtgttttttattttattttattttaaatattgtatacagatttttctgagagtactaataagtttgtgacaataatgcaggtgcaaccaaactcatacgcactagtggtgagcacagagaacataaccctaaactggtacttaggcaacgaccgatcaatgcttctatctaattgtatcttccgtatgggcggagccgcggtacttctctcgaaccgctcctctgatcgcagccgttcaaaatatcagctcatccataccgtccgtacccacaaaggagctgatgacaacgcattcggctgcgtttaccaacgagaagacaacaacgcagaagaaaccggcaagatcggagtctcactctctaaaaaccttatggcaatagccggagaagctctcaagacaaacatcacaactctcggaccactagtcctaccaatgtccgaacaacttctctttttcgcgactcttgtggcccgaaaagtcttcaaagtcaagaaaataaagccttacattcctgacttcaagctagctttcgagcatttctgtatccacgctggaggtagagccgtgcttgacgagattgagaagaacttggatttatccgaatggcacatggagccatcgaggatgacgttgaaccggtttggtaacacttcgagtagctcactttggtatgagcttgcgtatagtgaagctaaaggaaggattaagagaggagataggacttggcagattgcttttggatcgggttttaagtgtaacagtgcggtttggaaagctttgagaacgattgatccaatggacgagaagactaatccatggattgatgagattgatgacttccctattcaagttcctaggatcactcccattacatcgtcgtagtgtttttaaattcttttggagaactaatttgttatggtttattaaatgtaataacttatgtgatgtgatatttttttattatcttaatatatatgattgcc

SEQ ID NO: 48801 - protein, 269 aa, Arabidopsis thaliana
  peptide (1)..(269): Ceres Seq. ID no. 15175629
MQVQPNSYALVVSTENITLNWYLGNDRSMLLSNCIFRMGGAAVLLSNRSSDRSRSKYQLIHTVRTHKGADDNAFGCVYQREDNNAEETGKIGVSLSKNLMAIAGEALKTNITTLGPLVLPMSEQLLFFATLVARKVFKVKKIKPYIPDFKLAFEHFCIHAGGRAVLDEIEKNLDLSEWHMEPSRMTLNRFGNTSSSSLWYELAYSEAKGRIKRGDRTWQIAFGSGFKCNSAVWKALRTIDPMDEKTNPWIDEIDDFPIQVPRITPITSS

SEQ ID NO: 48802 - protein, 241 aa, Arabidopsis thaliana
  peptide (1)..(241): Ceres Seq. ID no. 15175630
MLLSNCIFRMGGAAVLLSNRSSDRSRSKYQLIHTVRTHKGADDNAFGCVYQREDNNAEETGKIGVSLSKNLMAIAGEALKTNITTLGPLVLPMSEQLLFFATLVARKVFKVKKIKPYIPDFKLAFEHFCIHAGGRAVLDEIEKNLDLSEWHMEPSRMTLNRFGNTSSSSLWYELAYSEAKGRIKRGDRTWQIAFGSGFKCNSAVWKALRTIDPMDEKTNPWIDEIDDFPIQVPRITPITSS

SEQ ID NO: 48803 - protein, 232 aa, Arabidopsis thaliana
  peptide (1)..(232): Ceres Seq. ID no. 15175631
MGGAAVLLSNRSSDRSRSKYQLIHTVRTHKGADDNAFGCVYQREDNNAEETGKIGVSLSKNLMAIAGEALKTNITTLGPLVLPMSEQLLFFATLVARKVFKVKKIKPYIPDFKLAFEHFCIHAGGRAVLDEIEKNLDLSEWHMEPSRMTLNRFGNTSSSSLWYELAYSEAKGRIKRGDRTWQIAFGSGFKCNSAVWKALRTIDPMDEKTNPWIDEIDDFPIQVPRITPITSS

SEQ ID NO: 48804 - DNA, 675 bp, Arabidopsis thaliana
  misc_feature (1)..(675): Ceres Seq. ID no. 13592185
  misc_feature (1)..(675): Ortholog of  Ceres SEQ ID NO 14313088 as cited in SEQ ID NO 58870
  misc_feature (1)..(675): Ortholog of  Ceres SEQ ID NO 14314571 as cited in SEQ ID NO 59360
atgaataattataatatgaacccatctctcttccaaaattacacttggaacaacatcatcaacagcagcaacaacaacaacaagaatgatgatcatcatcatcaacataataatgatccaatcggtatggccatggaccagtacacacagctccatatcttcaatcctttctcttcttctcatttccctcctctctcttcttccctcacaaccaccactcttctctccggagatcaagaagacgacgaagacgaagaagaacctctagaggaactcggtgctatgaaggaaatgatgtacaagatcgcagccatgcaatcggttgacatcgacccagcaaccgtcaagaaacccaaacgccgtaacgtgaggatctccgacgaccctcagagtgtggcggctagacatcgccgtgagagaatcagtgagaggatcagaattcttcagagactcgtgccaggtggcactaaaatggatacggcttcaatgctcgatgaagctatacgctatgtcaagttcttgaaacggcagatccggctactcaataataataccggatatactcctccgccgccgcaagatcaagcttctcaggcggtgacgacgtcatgggtttcaccgccaccaccgccaagtttcggccgtgggggaagaggagtaggagaattaatctag

SEQ ID NO: 48805 - protein, 224 aa, Arabidopsis thaliana
  peptide (1)..(224): Ceres Seq. ID no. 13592186
MNNYNMNPSLFQNYTWNNIINSSNNNNKNDDHHHQHNNDPIGMAMDQYTQLHIFNPFSSSHFPPLSSSLTTTTLLSGDQEDDEDEEEPLEELGAMKEMMYKIAAMQSVDIDPATVKKPKRRNVRISDDPQSVAARHRRERISERIRILQRLVPGGTKMDTASMLDEAIRYVKFLKRQIRLLNNNTGYTPPPPQDQASQAVTTSWVSPPPPPSFGRGGRGVGELI

SEQ ID NO: 48806 - protein, 219 aa, Arabidopsis thaliana
  peptide (1)..(219): Ceres Seq. ID no. 13592187
MNPSLFQNYTWNNIINSSNNNNKNDDHHHQHNNDPIGMAMDQYTQLHIFNPFSSSHFPPLSSSLTTTTLLSGDQEDDEDEEEPLEELGAMKEMMYKIAAMQSVDIDPATVKKPKRRNVRISDDPQSVAARHRRERISERIRILQRLVPGGTKMDTASMLDEAIRYVKFLKRQIRLLNNNTGYTPPPPQDQASQAVTTSWVSPPPPPSFGRGGRGVGELI

SEQ ID NO: 48807 - protein, 182 aa, Arabidopsis thaliana
  peptide (1)..(182): Ceres Seq. ID no. 13592188
MAMDQYTQLHIFNPFSSSHFPPLSSSLTTTTLLSGDQEDDEDEEEPLEELGAMKEMMYKIAAMQSVDIDPATVKKPKRRNVRISDDPQSVAARHRRERISERIRILQRLVPGGTKMDTASMLDEAIRYVKFLKRQIRLLNNNTGYTPPPPQDQASQAVTTSWVSPPPPPSFGRGGRGVGELI

SEQ ID NO: 48808 - DNA, 2317 bp, Arabidopsis thaliana
  misc_feature (1)..(2317): Ceres Seq. ID no. 13591984
  misc_feature (1)..(2317): Ortholog of  Ceres SEQ ID NO 13656177 as cited in SEQ ID NO 64997
gacgaaccggcacggattttactccttacttttctccactccagtctctctcttttctgcgnttcctcttctctctgtggcgtagagttatagagaggaatttaggtcttcttctttggtttttcctttgctcttcattctcatactctctcgacagtgaaatcaggaatttggtatggctgctactgcttctgcaattcgttacgctcctgaggatccgaatctccctaagccatggaaaggtcttgtggatagtagaactgggtacctctacttttggaatccagaaaccaatgttactcagtacgagagaccggcttcttccgctcctcccaagcttgctgctattcccgtaagctcttcggttcagactaatcagcaatcttcttctggatttaactctggcaaggaagatgataagtatggtaggggcagtgatgggcctaagtctgactctggatcaaggtttaatgaggctggaagaactggacctatatcttctaatgatgctgctagtggactagggaatgcttcatctggtggctcatctgccagagggcctccttcttcagccgcaggaaatgaattgtccccagaggcctattgccgcaaacatgaaattactgtcagtggaggccaagtaccaccacctctaatgtcttttgaagccactggtcttcccaatgagcttctgcgggagtgtcccaattttatgccatatgcgctctcttttgtcccaggtgcgatatttgctcttggaggagctaatgtcgtacgctgtgccacttctttggggttcttgcaaattatttggagtgccctttttggtggaccaaattttttgaggtgtcctcctgctgcaggtttcaacagctatcttgtgttgcctgcaaacgggaggatggtatacagtgcaggattctcagctccatctccaattcaagctcagtcatggccaattgcgatgcaaaacagagacatagtagccattgctaaaacaggctcgggaaaaactttgggttacttgattcctggtttcatgcatctccaacggatccacaatgattcacgaatgggcccaacgatcttggtcttgtcccctactagggagttggccacacaaatccaagttgaagctctgaaatttggcaagtcatctaaaatttcgtgtgcgtgtttgtatggtggagcacccaagggtcctcagctgaaggaaatagaaagaggtgtagatattgttgttgcaactcccgggcgactgaatgatatccttgaaatgaagagaatcagtctgcatcaagtatcttaccttgtgctggacgaggcagatagaatgctggacatggggttcgaacctcagatcagaaaaattgtgaatgaggttcccactaagcgtcaaaccctcatgtacactgcaacatggccaaaggaggtgaggaaaatcgcagctgatcttcttgttaaccctgcccaggtcaatattggtaatgttgatgagcttgtggcgaacaagtccattactcagactattgaagtcttagcaccgatggagaaacatagtaggttagagcagatattgcgctctcaggaaccgggttccaagattataattttctgttcaaccaaaaggatgtgtgatcaactggcaaggaacctgacccgtacgtttggagctgctgctatacatggagacaagtcgcaggctgagagagacgacgtactgaatcaatttagaagtggtaggactcctgttcttgttgcaactgatgtagctgctcgtggacttgacgttaaggacataagggtggtggtcaactatgattttccaaatggagtagaggattatgtccatagaattggaagaactggaagagctggagcaaccggtctagcttacaccttctttggagaccaagatgcaaaacatgcttcagatctgatcaagatcttggaaggagcaaaccagaaagttcctccacaggtccgcgaaatggctacacgtggtggtggtggaatgaacaaatttcgtcgctggggtacaccttccagtggtggtggtggcggccgtggtggctatggtgattctggttatggtggtcgtggtgagtctggctatggtagtcgtggtgattctggttatggtggtcgtggtgattctggtggtagaggaagctgggctccttcacgtgacagcagtggcagctcaggatggggaagagagagaagccgtagtcctgagagattcagaggaggtccaccgtccacttcatctccgcctcgcagctttcatgaggcgatgatgatgaaaaatagataa

SEQ ID NO: 48809 - protein, 713 aa, Arabidopsis thaliana
  peptide (1)..(713): Ceres Seq. ID no. 13591985
MAATASAIRYAPEDPNLPKPWKGLVDSRTGYLYFWNPETNVTQYERPASSAPPKLAAIPVSSSVQTNQQSSSGFNSGKEDDKYGRGSDGPKSDSGSRFNEAGRTGPISSNDAASGLGNASSGGSSARGPPSSAAGNELSPEAYCRKHEITVSGGQVPPPLMSFEATGLPNELLRECPNFMPYALSFVPGAIFALGGANVVRCATSLGFLQIIWSALFGGPNFLRCPPAAGFNSYLVLPANGRMVYSAGFSAPSPIQAQSWPIAMQNRDIVAIAKTGSGKTLGYLIPGFMHLQRIHNDSRMGPTILVLSPTRELATQIQVEALKFGKSSKISCACLYGGAPKGPQLKEIERGVDIVVATPGRLNDILEMKRISLHQVSYLVLDEADRMLDMGFEPQIRKIVNEVPTKRQTLMYTATWPKEVRKIAADLLVNPAQVNIGNVDELVANKSITQTIEVLAPMEKHSRLEQILRSQEPGSKIIIFCSTKRMCDQLARNLTRTFGAAAIHGDKSQAERDDVLNQFRSGRTPVLVATDVAARGLDVKDIRVVVNYDFPNGVEDYVHRIGRTGRAGATGLAYTFFGDQDAKHASDLIKILEGANQKVPPQVREMATRGGGGMNKFRRWGTPSSGGGGGRGGYGDSGYGGRGESGYGSRGDSGYGGRGDSGGRGSWAPSRDSSGSSGWGRERSRSPERFRGGPPSTSSPPRSFHEAMMMKNR

SEQ ID NO: 48810 - protein, 553 aa, Arabidopsis thaliana
  peptide (1)..(553): Ceres Seq. ID no. 13591986
MSFEATGLPNELLRECPNFMPYALSFVPGAIFALGGANVVRCATSLGFLQIIWSALFGGPNFLRCPPAAGFNSYLVLPANGRMVYSAGFSAPSPIQAQSWPIAMQNRDIVAIAKTGSGKTLGYLIPGFMHLQRIHNDSRMGPTILVLSPTRELATQIQVEALKFGKSSKISCACLYGGAPKGPQLKEIERGVDIVVATPGRLNDILEMKRISLHQVSYLVLDEADRMLDMGFEPQIRKIVNEVPTKRQTLMYTATWPKEVRKIAADLLVNPAQVNIGNVDELVANKSITQTIEVLAPMEKHSRLEQILRSQEPGSKIIIFCSTKRMCDQLARNLTRTFGAAAIHGDKSQAERDDVLNQFRSGRTPVLVATDVAARGLDVKDIRVVVNYDFPNGVEDYVHRIGRTGRAGATGLAYTFFGDQDAKHASDLIKILEGANQKVPPQVREMATRGGGGMNKFRRWGTPSSGGGGGRGGYGDSGYGGRGESGYGSRGDSGYGGRGDSGGRGSWAPSRDSSGSSGWGRERSRSPERFRGGPPSTSSPPRSFHEAMMMKNR

SEQ ID NO: 48811 - protein, 534 aa, Arabidopsis thaliana
  peptide (1)..(534): Ceres Seq. ID no. 13591987
MPYALSFVPGAIFALGGANVVRCATSLGFLQIIWSALFGGPNFLRCPPAAGFNSYLVLPANGRMVYSAGFSAPSPIQAQSWPIAMQNRDIVAIAKTGSGKTLGYLIPGFMHLQRIHNDSRMGPTILVLSPTRELATQIQVEALKFGKSSKISCACLYGGAPKGPQLKEIERGVDIVVATPGRLNDILEMKRISLHQVSYLVLDEADRMLDMGFEPQIRKIVNEVPTKRQTLMYTATWPKEVRKIAADLLVNPAQVNIGNVDELVANKSITQTIEVLAPMEKHSRLEQILRSQEPGSKIIIFCSTKRMCDQLARNLTRTFGAAAIHGDKSQAERDDVLNQFRSGRTPVLVATDVAARGLDVKDIRVVVNYDFPNGVEDYVHRIGRTGRAGATGLAYTFFGDQDAKHASDLIKILEGANQKVPPQVREMATRGGGGMNKFRRWGTPSSGGGGGRGGYGDSGYGGRGESGYGSRGDSGYGGRGDSGGRGSWAPSRDSSGSSGWGRERSRSPERFRGGPPSTSSPPRSFHEAMMMKNR

SEQ ID NO: 48812 - DNA, 2925 bp, Arabidopsis thaliana
  misc_feature (1)..(2925): Ceres Seq. ID no. 13578886
  misc_feature (1)..(2925): Ortholog of  Ceres SEQ ID NO 15177561 as cited in SEQ ID NO 53065
  misc_feature (1)..(2925): Ortholog of  Ceres SEQ ID NO 13595521 as cited in SEQ ID NO 59840
gaaaagtgcaagtgacacatcttttacaacttctctcactgatgatacctttcttcctcttcctctgcctttgcttctctctctgagtcactacactctctcaccaacccatccttctctctgtcattctctaaaaaaagaggtccactataaatgagccttgagctgtggatgcttctttgtctggttttttagaatataataaaaaacaaaatgggtctctagatttcagatttctgggatctgggtgttagattaatctctttctcttccattattagtagagaaagctcactcctttcactcaaagtttctacctttttgttttcctgaaaatgggttgtgtttgaaatctcacactttgagatttgggtgtttattttgggatccttcttaccacatttagaaatttcagctagggttttcgatttctctacttctcagaggagattttagaggcaaaagatggctccaaggttggatttttcagattggtgggcgaaagacacgaggaaaggaacaccagttgtggtgaaaatggagaatcctaattactctgtagttgaaatcgacggtccagattcggcttttagaccagtggagaagagcagaggcaagaacgctaagcaagtcacttgggttttgcttctcaaagctcatagagctgttggatgtctcacttggctcgccactgtcttttggtctctccttggtgccatcaagaaacggcttagtttcactcacccacttggctctgagaaattaggcagagacagatggcttttcactgccattaagctcttcttagctgtttccttagtgattctcggctttgagattgttgcttattttagaggatggcattactttcaaagccctagtcttcacatccccactagcacacttgagatccagagcctgtttcatcttgtgtatgttggttggttaacccttagagctgattatattgctcctcccatcaaagctctctccaagttttgtattgtgctgttccttatacagtcagtagatcgtttggtactttgcttgggttgtttttggatcaagtataagaaaattaagccgagatttgatgaggaacctttccgtaatgatgatgctgagggatctggatctgagtatccaatggttcttgttcagattccaatgtgcaatgagagagaggtgtatgaacaatctatatctgccgtgtgtcaacttgactggccgaaagatcgaatactggttcaggttctcgatgattcgaatgatgaaagcatccaacagttaattaaagctgaggttgccaaatggagccaaaagggagtcaacataatctacaggcatcgcttggttagaactggatataaagctggtaacctcaaatcagcaatgagctgtgattacgttgaagcatacgagtatgtcgcaatctttgatgccgatttccagcctactccggatttccttaaactaacagttccacatttcaaggataacccagagttaggtctagttcaagctagatggacatttgtgaacaaagacgagaacttgttgacccgtcttcagaacatcaatctgtgttttcactttgaggtggagcagcaagtgaacggcgtgttcttgaacttctttggtttcaatggaacagctggagtatggagaatcaaagcccttgaggaatctggtggttggcttgaaaggactactgtggaggatatggacatagcagtccgcgctcatcttcatggatggaagttcatatatcttaatgacgtcaaggtcctttgcgaagttcctgagtcctacgaggcatataagaagcagcaacaccgttggcattcgggacctatgcagcttttccgcttgtgtcttggttcaatcttgacctctaagatagcgatatggaagaaggcgaatctgatacttctcttctttcttcttaggaaactcatacttcctttctactccttcactttgttctgcataatccttccactcaccatgtttgttccagaagctgagctccctgtttgggtcatctgctacataccagttttcatgtctttcctcaaccttcttccatctccaaaatcttttcctttcatcgttccttatctcttattcgagaacacaatgtctgtcaccaagttcaatgcgatggtgtccggattattccaattgggtagctcttacgagtggattgtcacaaagaaagctggaagatcatcagagtcagatcttttatctatcaccgagaaagagacaccaaccaagaaaagtcaattgcttaggggagtttccgacagcgaacttttggagctgagccaacttgaagaacagaaacaagcggtttcaaagaaacctgtcaagaaaaccaacaagatataccacaaagagctcgcattggcctttcttttgctcactgcagcgcttaggagtctcttggcagcacaaggagtgcatttctacttcctgttattccaaggtgttacctttcttcttgtgggtctcgatctcataggcgagcagatgagctgagaagaacaaaagaagattcataactcgggtcaataaatcagtgagtttgaatttccacttcctctatgttcagtggtatcctctgtaatgagattgttggaaccatagtggtaggcattaattgattttccgtttcgtttgtttgtttgttatgttggtttgattcctccattgttagggatagagtgtgagccagagattcatacatgtatacaatatctgtaaagttggaacatgttgttggcagttaaaagagcttctgtcttgaactaatttcaaggatcatgtcaaatcactgcagagaatttatgtaatttaaagtccaacctttgtggaaagagattgtaactgtaaataactaacaagaaccagttttctgac

SEQ ID NO: 48813 - protein, 692 aa, Arabidopsis thaliana; identical to SEQ ID NO: 42432
  peptide (1)..(692): Ceres Seq. ID no. 13578887

SEQ ID NO: 48814 - protein, 668 aa, Arabidopsis thaliana; identical to SEQ ID NO: 42433
  peptide (1)..(668): Ceres Seq. ID no. 13578888

SEQ ID NO: 48815 - protein, 465 aa, Arabidopsis thaliana; identical to SEQ ID NO: 42434
  peptide (1)..(465): Ceres Seq. ID no. 13578889

SEQ ID NO: 48816 - DNA, 2611 bp, Arabidopsis thaliana; identical to SEQ ID NO: 44956
  misc_feature (1)..(2611): Ceres Seq. ID no. 13591498
  misc_feature (1)..(2611): Ortholog of  Ceres SEQ ID NO 15176095 as cited in SEQ ID NO 59699

SEQ ID NO: 48817 - protein, 798 aa, Arabidopsis thaliana; identical to SEQ ID NO: 44957
  peptide (1)..(798): Ceres Seq. ID no. 13591499

SEQ ID NO: 48818 - protein, 757 aa, Arabidopsis thaliana; identical to SEQ ID NO: 44958
  peptide (1)..(757): Ceres Seq. ID no. 13591500

SEQ ID NO: 48819 - protein, 722 aa, Arabidopsis thaliana; identical to SEQ ID NO: 44959
  peptide (1)..(722): Ceres Seq. ID no. 13591501

SEQ ID NO: 48820 - DNA, 1755 bp, Arabidopsis thaliana
  misc_feature (1)..(1755): Ceres Seq. ID no. 12575509
  misc_feature (1)..(1755): Ortholog of  Ceres SEQ ID NO 13593834 as cited in SEQ ID NO 53551
atgacgaagaggaagaaggaagtaatagatgtcgattgctccgagaagaaagattttgtgattgattggtcttccgctatggataaggaagacgaagttcccgagctcgagattgttaataccaccaaacctactcctccgccaccgccaacgtttttctccgacgatcaaaccgattctccgaaactcctaaccgatcgtgacctcgacgagcagctagagcgtaaaaaagcgatcctgacattaggtccgggcttacccgacaagggtgagaaaattcgactcaaaatcgctgatctcgaagaggagaagcagcgtagagttttagaaggctcgaaaatggaggtggacagaagttctaaggtcgtgtcttcgactagctcaggttcagatgttttaccgcaaggaaatgcagtttcaaaagatacctctagagggaatgcagactcaaaagacacctctagacaagggaatgcagattcaaaagaagtctcacggtcaacattttctgcggttttcagtaaaccaaaaacggattctcagtcaaagaaagcctttggtaaagaactagaagatctgggatgtgaaaggaggaaacacaaggctggtagaaagcctgtaacaaggctgagcaacgggtggcggttgttgccagatgtagggaaagctgagcacagtgcaaagcagtttgattctggacttaaagaatcaaaagggaataagaaatccaaggaaccttatggaaagaaaaggcccatggaatcttcgacttattctctgattgatgatgatgatgatgatgatgatgatgatgacaacgacaccagtggccatgaaactcctagggagtggtcttgggaaaaatctccatcacaaagttcaaggcgccgtaagaaatcagaggacacagtgataaatgtggatgaagaagaagctcagccttcaacagtggcggagcaagcggctgaactgcctgaaggcttacaggaagatatatgctacccaacaagggatgatcctcactttgttcaagtttgtcttaaagatcttgaatgccttgcacctcgagaatatctgacatcgccggttatgaatttctacatgaggttcttgcagcagcagatatcatcatcgaatcaaatctctgctgattgtcacttctttaatacctatttctacaagaagctcagtgacgctgttacgtacaaggggaatgacaaggatgccttctttgtgaggttcaggcggtggtggaagggtattgatctatttcgtaaggcttatattttcataccaatacatgaagatctccactggagccttgtgatagtttgcatccctgataagaaagatgaatcggggttgactatacttcaccttgattctctaggacttcactcgagaaaatcaattgttgaaaatgtaaaaaggtttctaaaagacgaatggaattatttgaatcaagatgactattccttggatctgcctatctcagaaaaagtatggaaaaacctccctcgtaggatcagcgaagctgttgttcaggttccgcagcagaaaaacgattttgattgtggtccgtttgtgctcttcttcattaaacggttcattgaagaggcgcctcaaaggctgaaaaggaaagacctgggaatgttcgacaagaagtggtttagacccgatgaagcctctgctctgagaatcaaaatccgaaacacgctcatcgagctattccgtgtcagtgaccagacagagtaa

SEQ ID NO: 48821 - protein, 584 aa, Arabidopsis thaliana
  peptide (1)..(584): Ceres Seq. ID no. 12575510
MTKRKKEVIDVDCSEKKDFVIDWSSAMDKEDEVPELEIVNTTKPTPPPPPTFFSDDQTDSPKLLTDRDLDEQLERKKAILTLGPGLPDKGEKIRLKIADLEEEKQRRVLEGSKMEVDRSSKVVSSTSSGSDVLPQGNAVSKDTSRGNADSKDTSRQGNADSKEVSRSTFSAVFSKPKTDSQSKKAFGKELEDLGCERRKHKAGRKPVTRLSNGWRLLPDVGKAEHSAKQFDSGLKESKGNKKSKEPYGKKRPMESSTYSLIDDDDDDDDDDDNDTSGHETPREWSWEKSPSQSSRRRKKSEDTVINVDEEEAQPSTVAEQAAELPEGLQEDICYPTRDDPHFVQVCLKDLECLAPREYLTSPVMNFYMRFLQQQISSSNQISADCHFFNTYFYKKLSDAVTYKGNDKDAFFVRFRRWWKGIDLFRKAYIFIPIHEDLHWSLVIVCIPDKKDESGLTILHLDSLGLHSRKSIVENVKRFLKDEWNYLNQDDYSLDLPISEKVWKNLPRRISEAVVQVPQQKNDFDCGPFVLFFIKRFIEEAPQRLKRKDLGMFDKKWFRPDEASALRIKIRNTLIELFRVSDQTE

SEQ ID NO: 48822 - protein, 558 aa, Arabidopsis thaliana
  peptide (1)..(558): Ceres Seq. ID no. 12575511
MDKEDEVPELEIVNTTKPTPPPPPTFFSDDQTDSPKLLTDRDLDEQLERKKAILTLGPGLPDKGEKIRLKIADLEEEKQRRVLEGSKMEVDRSSKVVSSTSSGSDVLPQGNAVSKDTSRGNADSKDTSRQGNADSKEVSRSTFSAVFSKPKTDSQSKKAFGKELEDLGCERRKHKAGRKPVTRLSNGWRLLPDVGKAEHSAKQFDSGLKESKGNKKSKEPYGKKRPMESSTYSLIDDDDDDDDDDDNDTSGHETPREWSWEKSPSQSSRRRKKSEDTVINVDEEEAQPSTVAEQAAELPEGLQEDICYPTRDDPHFVQVCLKDLECLAPREYLTSPVMNFYMRFLQQQISSSNQISADCHFFNTYFYKKLSDAVTYKGNDKDAFFVRFRRWWKGIDLFRKAYIFIPIHEDLHWSLVIVCIPDKKDESGLTILHLDSLGLHSRKSIVENVKRFLKDEWNYLNQDDYSLDLPISEKVWKNLPRRISEAVVQVPQQKNDFDCGPFVLFFIKRFIEEAPQRLKRKDLGMFDKKWFRPDEASALRIKIRNTLIELFRVSDQTE

SEQ ID NO: 48823 - protein, 471 aa, Arabidopsis thaliana
  peptide (1)..(471): Ceres Seq. ID no. 12575512
MEVDRSSKVVSSTSSGSDVLPQGNAVSKDTSRGNADSKDTSRQGNADSKEVSRSTFSAVFSKPKTDSQSKKAFGKELEDLGCERRKHKAGRKPVTRLSNGWRLLPDVGKAEHSAKQFDSGLKESKGNKKSKEPYGKKRPMESSTYSLIDDDDDDDDDDDNDTSGHETPREWSWEKSPSQSSRRRKKSEDTVINVDEEEAQPSTVAEQAAELPEGLQEDICYPTRDDPHFVQVCLKDLECLAPREYLTSPVMNFYMRFLQQQISSSNQISADCHFFNTYFYKKLSDAVTYKGNDKDAFFVRFRRWWKGIDLFRKAYIFIPIHEDLHWSLVIVCIPDKKDESGLTILHLDSLGLHSRKSIVENVKRFLKDEWNYLNQDDYSLDLPISEKVWKNLPRRISEAVVQVPQQKNDFDCGPFVLFFIKRFIEEAPQRLKRKDLGMFDKKWFRPDEASALRIKIRNTLIELFRVSDQTE

SEQ ID NO: 48824 - DNA, 1768 bp, Arabidopsis thaliana; identical to SEQ ID NO: 45403
  misc_feature (1)..(1768): Ceres Seq. ID no. 12639286
  misc_feature (1)..(1768): Ortholog of  Ceres SEQ ID NO 13639419 as cited in SEQ ID NO 54220
  misc_feature (1)..(1768): Ortholog of  Ceres SEQ ID NO 13593967 as cited in SEQ ID NO 56966

SEQ ID NO: 48825 - protein, 583 aa, Arabidopsis thaliana; identical to SEQ ID NO: 45404
  peptide (1)..(583): Ceres Seq. ID no. 12639287

SEQ ID NO: 48826 - protein, 465 aa, Arabidopsis thaliana; identical to SEQ ID NO: 45405
  peptide (1)..(465): Ceres Seq. ID no. 12639288

SEQ ID NO: 48827 - protein, 434 aa, Arabidopsis thaliana; identical to SEQ ID NO: 45406
  peptide (1)..(434): Ceres Seq. ID no. 12639289

SEQ ID NO: 48828 - DNA, 3207 bp, Arabidopsis thaliana
  misc_feature (1)..(3207): Ceres Seq. ID no. 12601419
  misc_feature (1)..(3207): Ortholog of  Ceres SEQ ID NO 13600310 as cited in SEQ ID NO 5086
atggatgatgttcagatcgatgatacttttccggtggatctaaatggggttacgtcactttgttcaccggagattcctagtttcgatttcgttagtgatgaaacagagaaattagagatcggagatacttccattgatgactgtgacgatgcattgggcgactccatggattcgggattttattcatttcgcctaattctgggtgaagatggatttaatctgatgttaacgaggagagttaggtttctaattcaatatgagacaattatgttcataaatgctggaggagatgattcaaaggtattagattctgaattgaatatctccagagatgactatttcgaaggaggagatgtgttgagaacagaagagtctatagttgaagctggagactttccgttcatttatcagtcagcacgtgttgggaacttttgttaccagttaaacaatcttcttccgggagagtacttgatcgatttccatttcgcggagattattaacaccaatggacctaaagggataagggttttcaacgtctatgttcaagatgagaaggcaactgagtttgatatattctcggttgttggcgcaaataggccactcctgttggttgacttaagggtcatggtgatggatgatggattgattagggtaaggtttgaaggaataaatggaagtccagtggtttgtgggatttgtcttaggaaagcgccacaggtttcagttccaaggacatcacaagattttattaagtgtgagaattgtgctaccgaaatcgagatttctcctactcggaagagacttatgcgagccaaagctcatgacaagtatgagaagaaaatagcagagctttctgaacgatatgaacataagacaaatgagtgccacgaagcatggatgtcactgacctctgccaatgagcaactagagaaagtgatgatggaactcaacaataagatatatcaggcacgctctctagaccaaactgtgataacacaagctgattgtttgaagagtatcactagaaagtatgagaatgacaagagacattgggccacagcaattgattctctacaggagaaaatagagataatgaaaagggaacaatctcagctatcacaggaagcacatgaatgcgttgaagggatccccgaactgtataaaatggttggtggagttcaggcactcgtttcacagtgtgaagatctaaagcagaagtacagtgaagagcaagcaaaacgaaaggagctgtacaaccatatacaggagacgaaaggcaatattagggtcttttgtcgctgccgccctttgaatacggaggagacatcaaccaagtctgccacaattgttgactttgatggagcaaaagatggagagcttggtgttattacaggaaataattccaagaaaagtttcaagtttgacagagtttatacaccgaaagatggtcaagttgatgtcttcgccgatgcttctccgatggttgtttcagtcctagacggctacaatgtttgtatttttgcctacggacaaacaggaacaggaaagacgtttacaatggaaggtactccgcagaacaggggtgtcaattatagaaccgtcgagcaattgtttgaagttgctagagaaaggagagagaccatttcatataacatatcggttagtgtccttgaggtctacaatgaacaaataagagacttgttggcaacatcaccagggtcaaagaagttggagataaaacaatcctctgatggctctcatcacgttcctggattagtagaagcaaatgtggaaaatataaatgaagtctggaatgtgcttcaagctgggagcaacgcaagatcagttggatcaaataatgtgaacgagcatagcagccgctctcactgcatgctctctataatggtgaaagcaaagaacctgatgaatggtgattgcacaaaaagcaagctttggcttgtagatttagctggaagtgagagattggcaaagacggatgtgcaaggtgagcgtctgaaggaagcacaaaacatcaacaggtcactctcagctctgggggatgtgatttatgctttggcaacaaagagtagtcatattccatacagtccatctgagcatgatgtgagtgaaactctaagttcacttaactttgcaactcgtgtaagaggggttgaattgggtcctgcaaggaagcaagttgataccggtgagatccagaagttgaaagcaatggtggagaaagcaagacaagaaagccgatctaaagatgaatccataaagaaaatggaggagaacattcagaatctggaaggtaagaacaaaggaagagacaactcatacagaagtctccaggaaaaaaacaaagaccttcaaaaccaacttgattcagtccacaaccaatcagaaaaacaatatgcacagcttcaagagagactaaagagcagagatgagatttgtagcaatcttcaacaaaaggtcaaggagctagagtgcaagctacgggagagacaccaatcagattctgcagctaacaaccagaaggttaaggatcttgagaataatttgaaagaatctgaaggaagctcccttgtgtggcaacagaaggttaaggattacgagaataagttgaaagagtctgaaggaaactctcttgtgtggcaacagaagattaaagagttggagataaaacacaaagacgagcagagccaagaagcagtgttactacgacaaaagatcaaagaacttgagatgaggctaaaggagcaagagaagcatatacaggaaatggcaacaactagagaattccctgaagttgcaaacgctacgcctaatgaagtgaaaacttgcttcaaagaagataactttggcaatgagaatatggaatccaacaccaacatcctgagaacatcaaaccgtctcaagactaaaagacacgattcattaaatctcaatgagatgactagaaagaagagggcctcgagaagcggcgaaacagagaacaatggtgatgatcctcaaatgaaggagaaacggatcagaaaatcagacccaccaaaagttttctccagagtagtcagaccaactagaacagcttctggttcatcaagccaagtccctgtggctcagaagagagttattaaaagagaacaacaagaagttccggtcgtgaaagagagagactccaagaagaagatttggtcaagataa

SEQ ID NO: 48829 - protein, 1068 aa, Arabidopsis thaliana
  peptide (1)..(1068): Ceres Seq. ID no. 12601420
MDDVQIDDTFPVDLNGVTSLCSPEIPSFDFVSDETEKLEIGDTSIDDCDDALGDSMDSGFYSFRLILGEDGFNLMLTRRVRFLIQYETIMFINAGGDDSKVLDSELNISRDDYFEGGDVLRTEESIVEAGDFPFIYQSARVGNFCYQLNNLLPGEYLIDFHFAEIINTNGPKGIRVFNVYVQDEKATEFDIFSVVGANRPLLLVDLRVMVMDDGLIRVRFEGINGSPVVCGICLRKAPQVSVPRTSQDFIKCENCATEIEISPTRKRLMRAKAHDKYEKKIAELSERYEHKTNECHEAWMSLTSANEQLEKVMMELNNKIYQARSLDQTVITQADCLKSITRKYENDKRHWATAIDSLQEKIEIMKREQSQLSQEAHECVEGIPELYKMVGGVQALVSQCEDLKQKYSEEQAKRKELYNHIQETKGNIRVFCRCRPLNTEETSTKSATIVDFDGAKDGELGVITGNNSKKSFKFDRVYTPKDGQVDVFADASPMVVSVLDGYNVCIFAYGQTGTGKTFTMEGTPQNRGVNYRTVEQLFEVARERRETISYNISVSVLEVYNEQIRDLLATSPGSKKLEIKQSSDGSHHVPGLVEANVENINEVWNVLQAGSNARSVGSNNVNEHSSRSHCMLSIMVKAKNLMNGDCTKSKLWLVDLAGSERLAKTDVQGERLKEAQNINRSLSALGDVIYALATKSSHIPYSPSEHDVSETLSSLNFATRVRGVELGPARKQVDTGEIQKLKAMVEKARQESRSKDESIKKMEENIQNLEGKNKGRDNSYRSLQEKNKDLQNQLDSVHNQSEKQYAQLQERLKSRDEICSNLQQKVKELECKLRERHQSDSAANNQKVKDLENNLKESEGSSLVWQQKVKDYENKLKESEGNSLVWQQKIKELEIKHKDEQSQEAVLLRQKIKELEMRLKEQEKHIQEMATTREFPEVANATPNEVKTCFKEDNFGNENMESNTNILRTSNRLKTKRHDSLNLNEMTRKKRASRSGETENNGDDPQMKEKRIRKSDPPKVFSRVVRPTRTASGSSSQVPVAQKRVIKREQQEVPVVKERDSKKKIWSR

SEQ ID NO: 48830 - protein, 1013 aa, Arabidopsis thaliana
  peptide (1)..(1013): Ceres Seq. ID no. 12601421
MDSGFYSFRLILGEDGFNLMLTRRVRFLIQYETIMFINAGGDDSKVLDSELNISRDDYFEGGDVLRTEESIVEAGDFPFIYQSARVGNFCYQLNNLLPGEYLIDFHFAEIINTNGPKGIRVFNVYVQDEKATEFDIFSVVGANRPLLLVDLRVMVMDDGLIRVRFEGINGSPVVCGICLRKAPQVSVPRTSQDFIKCENCATEIEISPTRKRLMRAKAHDKYEKKIAELSERYEHKTNECHEAWMSLTSANEQLEKVMMELNNKIYQARSLDQTVITQADCLKSITRKYENDKRHWATAIDSLQEKIEIMKREQSQLSQEAHECVEGIPELYKMVGGVQALVSQCEDLKQKYSEEQAKRKELYNHIQETKGNIRVFCRCRPLNTEETSTKSATIVDFDGAKDGELGVITGNNSKKSFKFDRVYTPKDGQVDVFADASPMVVSVLDGYNVCIFAYGQTGTGKTFTMEGTPQNRGVNYRTVEQLFEVARERRETISYNISVSVLEVYNEQIRDLLATSPGSKKLEIKQSSDGSHHVPGLVEANVENINEVWNVLQAGSNARSVGSNNVNEHSSRSHCMLSIMVKAKNLMNGDCTKSKLWLVDLAGSERLAKTDVQGERLKEAQNINRSLSALGDVIYALATKSSHIPYSPSEHDVSETLSSLNFATRVRGVELGPARKQVDTGEIQKLKAMVEKARQESRSKDESIKKMEENIQNLEGKNKGRDNSYRSLQEKNKDLQNQLDSVHNQSEKQYAQLQERLKSRDEICSNLQQKVKELECKLRERHQSDSAANNQKVKDLENNLKESEGSSLVWQQKVKDYENKLKESEGNSLVWQQKIKELEIKHKDEQSQEAVLLRQKIKELEMRLKEQEKHIQEMATTREFPEVANATPNEVKTCFKEDNFGNENMESNTNILRTSNRLKTKRHDSLNLNEMTRKKRASRSGETENNGDDPQMKEKRIRKSDPPKVFSRVVRPTRTASGSSSQVPVAQKRVIKREQQEVPVVKERDSKKKIWSR

SEQ ID NO: 48831 - protein, 994 aa, Arabidopsis thaliana
  peptide (1)..(994): Ceres Seq. ID no. 12601422
MLTRRVRFLIQYETIMFINAGGDDSKVLDSELNISRDDYFEGGDVLRTEESIVEAGDFPFIYQSARVGNFCYQLNNLLPGEYLIDFHFAEIINTNGPKGIRVFNVYVQDEKATEFDIFSVVGANRPLLLVDLRVMVMDDGLIRVRFEGINGSPVVCGICLRKAPQVSVPRTSQDFIKCENCATEIEISPTRKRLMRAKAHDKYEKKIAELSERYEHKTNECHEAWMSLTSANEQLEKVMMELNNKIYQARSLDQTVITQADCLKSITRKYENDKRHWATAIDSLQEKIEIMKREQSQLSQEAHECVEGIPELYKMVGGVQALVSQCEDLKQKYSEEQAKRKELYNHIQETKGNIRVFCRCRPLNTEETSTKSATIVDFDGAKDGELGVITGNNSKKSFKFDRVYTPKDGQVDVFADASPMVVSVLDGYNVCIFAYGQTGTGKTFTMEGTPQNRGVNYRTVEQLFEVARERRETISYNISVSVLEVYNEQIRDLLATSPGSKKLEIKQSSDGSHHVPGLVEANVENINEVWNVLQAGSNARSVGSNNVNEHSSRSHCMLSIMVKAKNLMNGDCTKSKLWLVDLAGSERLAKTDVQGERLKEAQNINRSLSALGDVIYALATKSSHIPYSPSEHDVSETLSSLNFATRVRGVELGPARKQVDTGEIQKLKAMVEKARQESRSKDESIKKMEENIQNLEGKNKGRDNSYRSLQEKNKDLQNQLDSVHNQSEKQYAQLQERLKSRDEICSNLQQKVKELECKLRERHQSDSAANNQKVKDLENNLKESEGSSLVWQQKVKDYENKLKESEGNSLVWQQKIKELEIKHKDEQSQEAVLLRQKIKELEMRLKEQEKHIQEMATTREFPEVANATPNEVKTCFKEDNFGNENMESNTNILRTSNRLKTKRHDSLNLNEMTRKKRASRSGETENNGDDPQMKEKRIRKSDPPKVFSRVVRPTRTASGSSSQVPVAQKRVIKREQQEVPVVKERDSKKKIWSR

SEQ ID NO: 48832 - DNA, 1530 bp, Arabidopsis thaliana
  misc_feature (1)..(1530): Ceres Seq. ID no. 15175971
  misc_feature (1)..(1530): Ortholog of  Ceres SEQ ID NO 14302123 as cited in SEQ ID NO 0
  misc_feature (1)..(1530): Ortholog of  Ceres SEQ ID NO 15179452 as cited in SEQ ID NO 0
ggtagaagagctactacttcatcaaccacaaccactatctcctcaaaatctctctctaccgatcgatggaagcagcagtgccacgtctcgtctattgcggaccggagccaattcgattctccgtctcctcccgccgctccttcgtctccgggattcctcaccgtaataaacgctctcgccagattctagccgtcgctactgatcctaaacctacacagactagtccacccaagtccaccaccgtaaacggatcttcttctccatcgtctgcgtcaaaagtagtcaacaacaatgtttccactagaattaacgatgtatcaaaagagattaaaagagtacgagctcaaatggaagaagatgaacagttatctgtgttgatgagagggcttcgtggccagaatttgaaggattcggtttttgctgatgataatattcagctaaggcttgttgagactggtgaaagcagtgagttcttacctttggtatatgatccggagaccatttctgcctattggggagagagagagagagagagagagctcactagtccccccccccccccccccgacgccgctcatttttagggtttcagatataggcagattctcacatttgcaaacatgacgactcagatcagcaagaagagaaagtttgtagcggacggtgtgttctacgctgaattgaatgaggttcttacaagagagctagcagaggatggttactctggtgttgaggttagggttactcctatgaggactgagattatcatcagagctacacgtactcagaatgttctcggtgagaaggggaggagaattagggaattgacttcccttgttcagaagagattcaagtttccagttgacagtgttgagctttatgccgagaaggttaacaaaagaggtctctgtgccatcgctcaggctgagtctttacgttacaagcttcttggtggtctcgctgttcgtagggcttgctatggtgtgttgaggtttgttatggagagtggagctaagggatgcgaggttatcgtgagtggaaagcttcgtgctgccagagccaagtctatgaagttcaaagatggctacatggtgtcatctggtcaaccaactaaggaatacatagactctgcagtgagacatgttttgcttagacaaggtgtgttgggaatcaaggtgaaggttatgcttgattgggaccctaagggcatatcaggaccaaagacaccattgcctgatgttgtgatcattcattctcctaaagaagaagaggccatctacgcacctgctcaggttgctgccccggctgctctcgtagcagatgcaccactcacagccgtagattaccctgcgatgatcccagtcgcctaaaagaatcctttgtactagtcgatgtgattttgttttcaactgttcttgctcttttgacagattatagcttctcgtatcttcgaatcagacacgtttcctctgttcttattcgaaaattatctcaagtttccattgttgaaaaagccctttttagtttcat

SEQ ID NO: 48833 - protein, 249 aa, Arabidopsis thaliana
  peptide (1)..(249): Ceres Seq. ID no. 15175972
MTTQISKKRKFVADGVFYAELNEVLTRELAEDGYSGVEVRVTPMRTEIIIRATRTQNVLGEKGRRIRELTSLVQKRFKFPVDSVELYAEKVNKRGLCAIAQAESLRYKLLGGLAVRRACYGVLRFVMESGAKGCEVIVSGKLRAARAKSMKFKDGYMVSSGQPTKEYIDSAVRHVLLRQGVLGIKVKVMLDWDPKGISGPKTPLPDVVIIHSPKEEEAIYAPAQVAAPAALVADAPLTAVDYPAMIPVA

SEQ ID NO: 48834 - protein, 206 aa, Arabidopsis thaliana
  peptide (1)..(206): Ceres Seq. ID no. 15175973
MRTEIIIRATRTQNVLGEKGRRIRELTSLVQKRFKFPVDSVELYAEKVNKRGLCAIAQAESLRYKLLGGLAVRRACYGVLRFVMESGAKGCEVIVSGKLRAARAKSMKFKDGYMVSSGQPTKEYIDSAVRHVLLRQGVLGIKVKVMLDWDPKGISGPKTPLPDVVIIHSPKEEEAIYAPAQVAAPAALVADAPLTAVDYPAMIPVA

SEQ ID NO: 48835 - protein, 172 aa, Arabidopsis thaliana
  peptide (1)..(172): Ceres Seq. ID no. 15175974
MEAAVPRLVYCGPEPIRFSVSSRRSFVSGIPHRNKRSRQILAVATDPKPTQTSPPKSTTVNGSSSPSSASKVVNNNVSTRINDVSKEIKRVRAQMEEDEQLSVLMRGLRGQNLKDSVFADDNIQLRLVETGESSEFLPLVYDPETISAYWGERERERELTSPPPPPPDAAHF

SEQ ID NO: 48836 - DNA, 1635 bp, Arabidopsis thaliana
  misc_feature (1)..(1635): Ceres Seq. ID no. 15168814
  misc_feature (1)..(1635): Ortholog of  Ceres SEQ ID NO 14314319 as cited in SEQ ID NO 57500
gaaaaatgccaatgtttcagccttctaagaacggtgggtttgatgggcatatcttagatctacactcggcggttaaagacggtgttcttggcggcggagatgggaaatttctggtggttgttaccgatgagaagaagaaattggatttgaaggagatgatttctgagctggaattacctgaaataccctctgttttcatctgtcctatctctctagagccgatgcaagatccagtgaccttgtgtactggtcaaacctacgagaggtccaacattctcaaatggttcaatatagggcattgtacttgcccaacgacgatgcaagagctttgggatgatttggtcactcctaacaagactcttcaccaattgatctacacttggttttcacagaagtatgttttgatgaagaaacgatctgaagatgtgcaaggacgtgctattgagattctgggtacgttgagaaaggctaaagggaaagcaaaggttcatgctttaagcgagctaaagcaagttgtgatggctcacgctattgctaagaagactgttgttgatgaaggtggagtcttagtgatctcttctcttttaagtccttttacttctcacgctgttggatctgaggctatagctattcttgttaatcttgagcttgactctgattccaaagctggattgatgcaaccagctagggtctcgttgatggttgatatgttgaatgatggttcgattgaaactaagatcaattgtgctagattgattggaaggttggtggaggagaaaggttttagagcagagcttgtttctagtcatagtttgcttgttggattaatgagattggttaaagataggagacgaagaaacggcgtttcgcctgcgttaacgctgctcaaatcggtttctgttcataaacaagttaggaacttgttggttaggattggtgcagttcctcaattggttgatgttttgccatgtttggatgtggagtgtttagagtcagctcttttcgtgttggattcgttatgtttagaaagcgaaggcagaattgctttgaaagattcggttaacacgattccgcataccgttaggttactgatgaaggtatcagagaaatgcacaaactatgcgatatcgattctttggtcagtttgcaaattagcttctgaagaatgttcatctcttgctgttgaagttggtttggctgcaaagcttttgcttgtgatacaaagtggatgtgatccagctttgaagcaacgttcagctgagctattgaagttatgtagtctacattattcagactcaatgtttatctccaaatgtaaactcacaagaactatccaataaaagactgatcaagttttcacctttcgggtcaaaatcacacaacggatctgccccatcttgttgatgtatatagaaatgaagaagctcaaggagtatgagagtaagaaacgagtttcgatgtgttgaattctattttgcaatgttatttgaataataatagttaagtagaagtaaactgtataaatctttttgttgtggttggttcattattcagtagaagaatagattgaagaaaggaatcatttttttggcctcttgtaagttactagctgtttgtgagtcataataattggag

SEQ ID NO: 48837 - protein, 445 aa, Arabidopsis thaliana
  peptide (1)..(445): Ceres Seq. ID no. 15168815
KMPMFQPSKNGGFDGHILDLHSAVKDGVLGGGDGKFLVVVTDEKKKLDLKEMISELELPEIPSVFICPISLEPMQDPVTLCTGQTYERSNILKWFNIGHCTCPTTMQELWDDLVTPNKTLHQLIYTWFSQKYVLMKKRSEDVQGRAIEILGTLRKAKGKAKVHALSELKQVVMAHAIAKKTVVDEGGVLVISSLLSPFTSHAVGSEAIAILVNLELDSDSKAGLMQPARVSLMVDMLNDGSIETKINCARLIGRLVEEKGFRAELVSSHSLLVGLMRLVKDRRRRNGVSPALTLLKSVSVHKQVRNLLVRIGAVPQLVDVLPCLDVECLESALFVLDSLCLESEGRIALKDSVNTIPHTVRLLMKVSEKCTNYAISILWSVCKLASEECSSLAVEVGLAAKLLLVIQSGCDPALKQRSAELLKLCSLHYSDSMFISKCKLTRTIQ

SEQ ID NO: 48838 - protein, 444 aa, Arabidopsis thaliana
  peptide (1)..(444): Ceres Seq. ID no. 15168816
MPMFQPSKNGGFDGHILDLHSAVKDGVLGGGDGKFLVVVTDEKKKLDLKEMISELELPEIPSVFICPISLEPMQDPVTLCTGQTYERSNILKWFNIGHCTCPTTMQELWDDLVTPNKTLHQLIYTWFSQKYVLMKKRSEDVQGRAIEILGTLRKAKGKAKVHALSELKQVVMAHAIAKKTVVDEGGVLVISSLLSPFTSHAVGSEAIAILVNLELDSDSKAGLMQPARVSLMVDMLNDGSIETKINCARLIGRLVEEKGFRAELVSSHSLLVGLMRLVKDRRRRNGVSPALTLLKSVSVHKQVRNLLVRIGAVPQLVDVLPCLDVECLESALFVLDSLCLESEGRIALKDSVNTIPHTVRLLMKVSEKCTNYAISILWSVCKLASEECSSLAVEVGLAAKLLLVIQSGCDPALKQRSAELLKLCSLHYSDSMFISKCKLTRTIQ

SEQ ID NO: 48839 - protein, 442 aa, Arabidopsis thaliana
  peptide (1)..(442): Ceres Seq. ID no. 15168817
MFQPSKNGGFDGHILDLHSAVKDGVLGGGDGKFLVVVTDEKKKLDLKEMISELELPEIPSVFICPISLEPMQDPVTLCTGQTYERSNILKWFNIGHCTCPTTMQELWDDLVTPNKTLHQLIYTWFSQKYVLMKKRSEDVQGRAIEILGTLRKAKGKAKVHALSELKQVVMAHAIAKKTVVDEGGVLVISSLLSPFTSHAVGSEAIAILVNLELDSDSKAGLMQPARVSLMVDMLNDGSIETKINCARLIGRLVEEKGFRAELVSSHSLLVGLMRLVKDRRRRNGVSPALTLLKSVSVHKQVRNLLVRIGAVPQLVDVLPCLDVECLESALFVLDSLCLESEGRIALKDSVNTIPHTVRLLMKVSEKCTNYAISILWSVCKLASEECSSLAVEVGLAAKLLLVIQSGCDPALKQRSAELLKLCSLHYSDSMFISKCKLTRTIQ

SEQ ID NO: 48840 - DNA, 1917 bp, Arabidopsis thaliana
  misc_feature (1)..(1917): Ceres Seq. ID no. 12575011
  misc_feature (1)..(1917): Ortholog of  Ceres SEQ ID NO 13593834 as cited in SEQ ID NO 53551
agaccgaaacctaaataatattgagtaagtttattcgaagaagagatgaagagacaaagagcaatcgagttagatcgagtgaagaagacaatgttgaacatagattgggacgatgctttgggcgatgaggaagttcccgagctcgagatcatcgctactgacaaaattccgccgcgtgaacctactctttccggctatgaacccgccgtctctgtgcgatccctcagggataacgaactcgacgatcatctgaagcgtcagagatcacttcttactcgtctcggtgataagttggcagacaagggcgagaaaatccgaaacagaatcggagagctcgagtacgagaagcagcgaaggatgttccaacaacggaccaaaatgcaggatgcagacaacggatgtcagattctcgagaaaccaaaaagctcagatgtgtttatgcgagcgagtacagcctcaaaagacacctctggacaagggacttcgggatcgaaagacgtgtctcggtcaacatttgctgctcattttagtgacaatctcaaaatgggacctcaaccagtgaaactagttaatgacaaactacaagatttgggacgtggaagctggataagcaaagctaatagagactcaataatagagaaaaataatgtgtggcggtcgctgccaagattaagcaagtgtaaggtcagtttaaagaacttttattctgagtctaaggatcctaaaggggatcgaagacccaatgaagcttatggtaagggaaagccaaatgaatcttccccttatttacttgtcgacgatgatgatggcgatgacgacaaagtcattggttatgaaactcccaggcattggagtttaaaagcatcgccactacagagttcaagctgcaggaagaaatcagatgataaagtgattaatttggatgaagatgaacctctgtctccaatggtagtagaggaagcatgtgaacttcctgaagggttaccagaagatatttactacccatcaagtgatcaaagtgatgggcgagaccttgttcaagtatctcttaaagatctgaaatgcctttcacctggggaatatcttacatcgccagttataaatttctacatcaggtacgtgcaacatcacgtgttttcagctgataagactgctgctaattgtcatttcttcaatacgtttttctacaagaagctcacagaagctgtttcatacaagggtaatgacagggatgcatattttgtgaagttcaggcggtggtggaagggttttgatctattctgtaaatcatatatatttataccaatacatgaagatcttcactggagcttagtcataatttgcatcccagacaaggaggacgaatcgggattgactataattcacttggattcattgggacttcacccaagaaatttgattttcaataatgtcaaaagatttctgagagaggaatggaactatctaaatcaagatgctccattggatttaccaatttcagcaaaagtatggagagaccttcccaatatgatcaacgaagctgaagtgcaggttccacaacagaagaacgatttcgactgtggtctgtttctgctcttcttcataagacgtttcatcgaagaggctcctcaaaggctgacattgcaggatttgaaaatgattcacaagaagtggtttaaaccggaagaagcttccgctttgaggatcaaaatctggaacatactcgttgatctattccgcaagggtaaccaaacagattaaagctgtatagaacagtgtcaagtttggtcactctaattaaggaatgaaatgaaagatacgtttttgttaacaatcattttgttcaagtcctgtaataaactaaggagcatgacataatcagaacaaatcaacaaggtaataataacgtatccgaat

SEQ ID NO: 48841 - protein, 571 aa, Arabidopsis thaliana
  peptide (1)..(571): Ceres Seq. ID no. 12575012
MKRQRAIELDRVKKTMLNIDWDDALGDEEVPELEIIATDKIPPREPTLSGYEPAVSVRSLRDNELDDHLKRQRSLLTRLGDKLADKGEKIRNRIGELEYEKQRRMFQQRTKMQDADNGCQILEKPKSSDVFMRASTASKDTSGQGTSGSKDVSRSTFAAHFSDNLKMGPQPVKLVNDKLQDLGRGSWISKANRDSIIEKNNVWRSLPRLSKCKVSLKNFYSESKDPKGDRRPNEAYGKGKPNESSPYLLVDDDDGDDDKVIGYETPRHWSLKASPLQSSSCRKKSDDKVINLDEDEPLSPMVVEEACELPEGLPEDIYYPSSDQSDGRDLVQVSLKDLKCLSPGEYLTSPVINFYIRYVQHHVFSADKTAANCHFFNTFFYKKLTEAVSYKGNDRDAYFVKFRRWWKGFDLFCKSYIFIPIHEDLHWSLVIICIPDKEDESGLTIIHLDSLGLHPRNLIFNNVKRFLREEWNYLNQDAPLDLPISAKVWRDLPNMINEAEVQVPQQKNDFDCGLFLLFFIRRFIEEAPQRLTLQDLKMIHKKWFKPEEASALRIKIWNILVDLFRKGNQTD

SEQ ID NO: 48842 - protein, 556 aa, Arabidopsis thaliana
  peptide (1)..(556): Ceres Seq. ID no. 12575013
MLNIDWDDALGDEEVPELEIIATDKIPPREPTLSGYEPAVSVRSLRDNELDDHLKRQRSLLTRLGDKLADKGEKIRNRIGELEYEKQRRMFQQRTKMQDADNGCQILEKPKSSDVFMRASTASKDTSGQGTSGSKDVSRSTFAAHFSDNLKMGPQPVKLVNDKLQDLGRGSWISKANRDSIIEKNNVWRSLPRLSKCKVSLKNFYSESKDPKGDRRPNEAYGKGKPNESSPYLLVDDDDGDDDKVIGYETPRHWSLKASPLQSSSCRKKSDDKVINLDEDEPLSPMVVEEACELPEGLPEDIYYPSSDQSDGRDLVQVSLKDLKCLSPGEYLTSPVINFYIRYVQHHVFSADKTAANCHFFNTFFYKKLTEAVSYKGNDRDAYFVKFRRWWKGFDLFCKSYIFIPIHEDLHWSLVIICIPDKEDESGLTIIHLDSLGLHPRNLIFNNVKRFLREEWNYLNQDAPLDLPISAKVWRDLPNMINEAEVQVPQQKNDFDCGLFLLFFIRRFIEEAPQRLTLQDLKMIHKKWFKPEEASALRIKIWNILVDLFRKGNQTD

SEQ ID NO: 48843 - protein, 467 aa, Arabidopsis thaliana
  peptide (1)..(467): Ceres Seq. ID no. 12575014
MFQQRTKMQDADNGCQILEKPKSSDVFMRASTASKDTSGQGTSGSKDVSRSTFAAHFSDNLKMGPQPVKLVNDKLQDLGRGSWISKANRDSIIEKNNVWRSLPRLSKCKVSLKNFYSESKDPKGDRRPNEAYGKGKPNESSPYLLVDDDDGDDDKVIGYETPRHWSLKASPLQSSSCRKKSDDKVINLDEDEPLSPMVVEEACELPEGLPEDIYYPSSDQSDGRDLVQVSLKDLKCLSPGEYLTSPVINFYIRYVQHHVFSADKTAANCHFFNTFFYKKLTEAVSYKGNDRDAYFVKFRRWWKGFDLFCKSYIFIPIHEDLHWSLVIICIPDKEDESGLTIIHLDSLGLHPRNLIFNNVKRFLREEWNYLNQDAPLDLPISAKVWRDLPNMINEAEVQVPQQKNDFDCGLFLLFFIRRFIEEAPQRLTLQDLKMIHKKWFKPEEASALRIKIWNILVDLFRKGNQTD

SEQ ID NO: 48844 - DNA, 1125 bp, Arabidopsis thaliana
  misc_feature (1)..(1125): Ceres Seq. ID no. 14310326
  misc_feature (1)..(1125): Ortholog of  Ceres SEQ ID NO 14306675 as cited in SEQ ID NO 52939
  misc_feature (1)..(1125): Ortholog of  Ceres SEQ ID NO 12608114 as cited in SEQ ID NO 57218
aaaaatcctcttaaaatctcataaagcccttcttatcttcttctcttctcctcaacttgaatacacagaaacaaaactgcttttgtctctcaagtcatttgtcttataaaaaggttctgttcttgaacaagggaaagaaacaaaaggctgataactcctgttttgtagattcctctgatattcagattcttacttctcaggaaaaccctaaagaaaatttctgtttttttttgagaaatatgaagatacaatgtgatgtgtgtgagaaagctccggccacgcttatatgttgtgctgatgaagctgctctctgcgctaaatgtgacgttgaggttcatgctgctaataaactcgctagcaaacaccaacgcctttttcttgactctctctcaactaaattccctccctgcgacatctgccttgagaaggcagctttcatattctgtgtaaaggatagggctctgctctgcagagattgcgatgaggcgacccatgcgccaaatactcgctctgctaatcaccagaggttcttagccactggaatccgagttgctcttagttccactagttgcaatcaagaagtggaaaagaatcactttgacccatctaatcagcagagtctctctaaaccgccaactcagcaacccgctgctccatctcctttgtgggctaccgatgaattcttcagctactctgatcttgactgcagtaataaggagaaagagcaactcgatctcggggagctggattggcttgcagagatgggtctgtttggtgaccagcctgatcaagaggctctaccggtagccgaagttcccgagctttccttttcacatttggctcatgctcattcctacaacagacctatgaagtccaatgtacccaacaagaagcagaggcttgagtaccggtatgatgatgaagaagagcacttcctagtccccgacctaggctaaactatggatgaatctactaagctttataatatatagcacttgattcgcatagtcttcggctcttcgccttgctttctccatgatctgatatgtgtatcactgtaagtagcaggctaaaacttggaaaaaccttatcattttattagcaagtgatgccttaaattgcaac

SEQ ID NO: 48845 - protein, 238 aa, Arabidopsis thaliana
  peptide (1)..(238): Ceres Seq. ID no. 14310327
MKIQCDVCEKAPATLICCADEAALCAKCDVEVHAANKLASKHQRLFLDSLSTKFPPCDICLEKAAFIFCVKDRALLCRDCDEATHAPNTRSANHQRFLATGIRVALSSTSCNQEVEKNHFDPSNQQSLSKPPTQQPAAPSPLWATDEFFSYSDLDCSNKEKEQLDLGELDWLAEMGLFGDQPDQEALPVAEVPELSFSHLAHAHSYNRPMKSNVPNKKQRLEYRYDDEEEHFLVPDLG

SEQ ID NO: 48846 - DNA, 1196 bp, Arabidopsis thaliana
  misc_feature (1)..(1196): Ceres Seq. ID no. 15175620
  misc_feature (1)..(1196): Ortholog of  Ceres SEQ ID NO 15178310 as cited in SEQ ID NO 1089
  misc_feature (1)..(1196): Ortholog of  Ceres SEQ ID NO 14303173 as cited in SEQ ID NO 66550
gtttacacactcttgaaatggaggaagaagctgaaacaacagtctacaacgggagagaagaaacgcagtcctggtagaacaagcgcaggaagtagagttcgtagcagcacaagcagatcaagcacagaaaacggagaaccaaagctagtgatgttcaataacaagatcactctagctgaaacaattgaagcaacacgacagttcgatgaagaaaacgttcttagcagaacccgatatggattgctatttaaagccaattacaatgacggaatggttctctctatccgccgcttacccaatggatcactcttaaatgagaacttgttcaaaaaggaagccgaagttcttggtaaagtcaagcaccgaaacatcacagtccttagaggttactacgcaggtccaccagatttaaggcttttggtatatgactacatgcccaatgggaacttatctaccctgctccaagaagcttcccaccaagatggccatgtcctaaactggccaatgcgccacctcatagctctcgggatcgcgcgcggactcggattcctccatcaatccaacatggttcatggtgatatcaagccacagaatgtactcttcgacgctgactttgaagcccatatatctgatttcgggcttgaccgtctcacaattcgatccccatcaagatcagccgtcacagcaaacaccattgggacactaggatatgtctctccagaagccacattgtccggggaaatcacaagagaatctgacatctacagcttcggcattgtcctactcgaaatcctaactggaaaaagaccagtaatgttcacacaagacgaggatatagtgaaatgggtaaagaaacagcttcagagaggtcaagttacagagctactagaaccaggactactcgaacttgacccggaatcatcagaatgggaagagttcttattaggaatcaaagtcggacttctttgtactgcaacagatcctctagaccgtccaacaatgtccgatgttgttttcatgcttgaaggctgtcgtgttggtcctgacgttccttcctccgccgacccaacctctcagccttcaccggcctaaccgtttttcttatttttagtcttcctgatttaaattgttagtcaaaaacaaaaaacaaaaaacaagaagcaattattaaaaatttcagcagtatttattggtct

SEQ ID NO: 48847 - protein, 363 aa, Arabidopsis thaliana
  peptide (1)..(363): Ceres Seq. ID no. 15175621
VYTLLKWRKKLKQQSTTGEKKRSPGRTSAGSRVRSSTSRSSTENGEPKLVMFNNKITLAETIEATRQFDEENVLSRTRYGLLFKANYNDGMVLSIRRLPNGSLLNENLFKKEAEVLGKVKHRNITVLRGYYAGPPDLRLLVYDYMPNGNLSTLLQEASHQDGHVLNWPMRHLIALGIARGLGFLHQSNMVHGDIKPQNVLFDADFEAHISDFGLDRLTIRSPSRSAVTANTIGTLGYVSPEATLSGEITRESDIYSFGIVLLEILTGKRPVMFTQDEDIVKWVKKQLQRGQVTELLEPGLLELDPESSEWEEFLLGIKVGLLCTATDPLDRPTMSDVVFMLEGCRVGPDVPSSADPTSQPSPA

SEQ ID NO: 48848 - protein, 313 aa, Arabidopsis thaliana
  peptide (1)..(313): Ceres Seq. ID no. 15175622
MFNNKITLAETIEATRQFDEENVLSRTRYGLLFKANYNDGMVLSIRRLPNGSLLNENLFKKEAEVLGKVKHRNITVLRGYYAGPPDLRLLVYDYMPNGNLSTLLQEASHQDGHVLNWPMRHLIALGIARGLGFLHQSNMVHGDIKPQNVLFDADFEAHISDFGLDRLTIRSPSRSAVTANTIGTLGYVSPEATLSGEITRESDIYSFGIVLLEILTGKRPVMFTQDEDIVKWVKKQLQRGQVTELLEPGLLELDPESSEWEEFLLGIKVGLLCTATDPLDRPTMSDVVFMLEGCRVGPDVPSSADPTSQPSPA

SEQ ID NO: 48849 - protein, 273 aa, Arabidopsis thaliana
  peptide (1)..(273): Ceres Seq. ID no. 15175623
MVLSIRRLPNGSLLNENLFKKEAEVLGKVKHRNITVLRGYYAGPPDLRLLVYDYMPNGNLSTLLQEASHQDGHVLNWPMRHLIALGIARGLGFLHQSNMVHGDIKPQNVLFDADFEAHISDFGLDRLTIRSPSRSAVTANTIGTLGYVSPEATLSGEITRESDIYSFGIVLLEILTGKRPVMFTQDEDIVKWVKKQLQRGQVTELLEPGLLELDPESSEWEEFLLGIKVGLLCTATDPLDRPTMSDVVFMLEGCRVGPDVPSSADPTSQPSPA

SEQ ID NO: 48850 - DNA, 2367 bp, Arabidopsis thaliana; identical to SEQ ID NO: 45792
  misc_feature (1)..(2367): Ceres Seq. ID no. 13600852
  misc_feature (1)..(2367): Ortholog of  Ceres SEQ ID NO 12465083 as cited in SEQ ID NO 68239

SEQ ID NO: 48851 - protein, 682 aa, Arabidopsis thaliana; identical to SEQ ID NO: 45793
  peptide (1)..(682): Ceres Seq. ID no. 13600853

SEQ ID NO: 48852 - protein, 666 aa, Arabidopsis thaliana; identical to SEQ ID NO: 45794
  peptide (1)..(666): Ceres Seq. ID no. 13600854

SEQ ID NO: 48853 - protein, 649 aa, Arabidopsis thaliana; identical to SEQ ID NO: 45795
  peptide (1)..(649): Ceres Seq. ID no. 13600855

SEQ ID NO: 48854 - DNA, 1368 bp, Arabidopsis thaliana
  misc_feature (1)..(1368): Ceres Seq. ID no. 15168818
  misc_feature (1)..(1368): Ortholog of  Ceres SEQ ID NO 12364737 as cited in SEQ ID NO 51089
  misc_feature (1)..(1368): Ortholog of  Ceres SEQ ID NO 14311515 as cited in SEQ ID NO 51680
  misc_feature (1)..(1368): Ortholog of  Ceres SEQ ID NO 14315035 as cited in SEQ ID NO 56880
  misc_feature (1)..(1368): Ortholog of  Ceres SEQ ID NO 15176751 as cited in SEQ ID NO 59719
  misc_feature (1)..(1368): Ortholog of  Ceres SEQ ID NO 14314092 as cited in SEQ ID NO 62788
  misc_feature (1)..(1368): Ortholog of  Ceres SEQ ID NO 13655302 as cited in SEQ ID NO 63307
  misc_feature (1)..(1368): Ortholog of  Ceres SEQ ID NO 13597380 as cited in SEQ ID NO 64054
  misc_feature (1)..(1368): Ortholog of  Ceres SEQ ID NO 12625474 as cited in SEQ ID NO 64169
  misc_feature (1)..(1368): Ortholog of  Ceres SEQ ID NO 13597502 as cited in SEQ ID NO 64681
  misc_feature (1)..(1368): Ortholog of  Ceres SEQ ID NO 15180805 as cited in SEQ ID NO 0
gacaaacaacttcataatggctttccacttccggcgactttgcttcttctcagctcttcttgccgtggttctccaactccttcatggcgtctctggccaactagttgtggttgaggaacctatttctgctcctccgcctccgctggtcgacctaaacaccggtgatggcattgtgccggcgctgtttgtcttcggtgactctctaatagacaatgggaataacaataacattccttcctttgccaaagccaattattttccttatggcattgatttcaatggcggtccgaccggtcgattctgcaatggcttaacgatggtcgatgggattgctcaactattggggctgccactgattccggcctactcggaagctaccggagatcaagtacttcgtggtgtcaactatgcttccgcagccgcggggattcttcctgacaccggaggaaactttgtgggacgcatacctttcgaccagcagattcataacttcgagacaacactagatcaggtggcgagcaagtccggtggtgcagtggccattgcggattcggtgactcgaagcttgttcttcatcggaatgggaagcaacgactatctcaacaattacttgatgcccaatttccctacccgtaaccaatacaactcccaacagttcggtgatctcttggttcaacattacaccgatcagctcaccagactatataatcttggtggtcggaaatttgtagtggccggacttggaagaatggggtgcattcccagcattctagctcaaggaaacgacggtaaatgctcggaagaagtgaaccaacttgttcttcctttcaacacaaacgttaaaacaatgatctctaatctcaaccagaatctcccggatgctaaatttatttacctcgacatcgctcatatgttcgaagacatcgttgctaaccaagcagcttatggtcttactactatggacaaaggatgttgtggaataggaaaaaacagaggacagatcacttgtcttccctttgaaacgccttgtcctaacagagatcagtatgtgttttgggatgctttccatcctacagagaaagttaatctcataatggcaaagaaagcgtttgctggtgaccgcactgtcgcgtacccgatcaacattcagcaattggctagtctcaattaacgattaagaagactatcaacaagacataaaaacttggtgttgtctttgtagtttcttttttgtaaggttttgagtcaaatctgttttccttttaagacgttttgaaaacgtctactgtgtcacacttaacggtccaaatcaatgtactcatcgttgcttcctttgttttcataaatatcatcaattataaaattacg

SEQ ID NO: 48855 - protein, 389 aa, Arabidopsis thaliana
  peptide (1)..(389): Ceres Seq. ID no. 15168819
TNNFIMAFHFRRLCFFSALLAVVLQLLHGVSGQLVVVEEPISAPPPPLVDLNTGDGIVPALFVFGDSLIDNGNNNNIPSFAKANYFPYGIDFNGGPTGRFCNGLTMVDGIAQLLGLPLIPAYSEATGDQVLRGVNYASAAAGILPDTGGNFVGRIPFDQQIHNFETTLDQVASKSGGAVAIADSVTRSLFFIGMGSNDYLNNYLMPNFPTRNQYNSQQFGDLLVQHYTDQLTRLYNLGGRKFVVAGLGRMGCIPSILAQGNDGKCSEEVNQLVLPFNTNVKTMISNLNQNLPDAKFIYLDIAHMFEDIVANQAAYGLTTMDKGCCGIGKNRGQITCLPFETPCPNRDQYVFWDAFHPTEKVNLIMAKKAFAGDRTVAYPINIQQLASLN

SEQ ID NO: 48856 - protein, 384 aa, Arabidopsis thaliana
  peptide (1)..(384): Ceres Seq. ID no. 15168820
MAFHFRRLCFFSALLAVVLQLLHGVSGQLVVVEEPISAPPPPLVDLNTGDGIVPALFVFGDSLIDNGNNNNIPSFAKANYFPYGIDFNGGPTGRFCNGLTMVDGIAQLLGLPLIPAYSEATGDQVLRGVNYASAAAGILPDTGGNFVGRIPFDQQIHNFETTLDQVASKSGGAVAIADSVTRSLFFIGMGSNDYLNNYLMPNFPTRNQYNSQQFGDLLVQHYTDQLTRLYNLGGRKFVVAGLGRMGCIPSILAQGNDGKCSEEVNQLVLPFNTNVKTMISNLNQNLPDAKFIYLDIAHMFEDIVANQAAYGLTTMDKGCCGIGKNRGQITCLPFETPCPNRDQYVFWDAFHPTEKVNLIMAKKAFAGDRTVAYPINIQQLASLN

SEQ ID NO: 48857 - protein, 284 aa, Arabidopsis thaliana
  peptide (1)..(284): Ceres Seq. ID no. 15168821
MVDGIAQLLGLPLIPAYSEATGDQVLRGVNYASAAAGILPDTGGNFVGRIPFDQQIHNFETTLDQVASKSGGAVAIADSVTRSLFFIGMGSNDYLNNYLMPNFPTRNQYNSQQFGDLLVQHYTDQLTRLYNLGGRKFVVAGLGRMGCIPSILAQGNDGKCSEEVNQLVLPFNTNVKTMISNLNQNLPDAKFIYLDIAHMFEDIVANQAAYGLTTMDKGCCGIGKNRGQITCLPFETPCPNRDQYVFWDAFHPTEKVNLIMAKKAFAGDRTVAYPINIQQLASLN

SEQ ID NO: 48858 - DNA, 1670 bp, Arabidopsis thaliana
  misc_feature (1)..(1670): Ceres Seq. ID no. 14313190
  misc_feature (1)..(1670): Ortholog of  Ceres SEQ ID NO 13654166 as cited in SEQ ID NO 68381
  misc_feature (1)..(1670): Ortholog of  Ceres SEQ ID NO 13599720 as cited in SEQ ID NO 0
atacgtgactcatcgtctttttcactcccacacgttctgctccagcgatactgtgagagaatctctgtgtggttctgaattcttaggctggaattgaattctgaaatggcggaggagtacaaggaagcgttgttggagaagcagaactatcacgacggatgtcccggctgtaaggtggagcagatgaagcagctccggcgaggatatccttacctcgagctttccttcgtttggattatcgtcctctccacttctctaccaatttcctcactctatcccttcctctactatatgattgaggattttggtgtcgcaaagacggagaaagatattgggttttatgctggttttgttggttgctcttttatgcttggaagagcactgacttctgtgttctggggaattgtggctgatcgttatggaagaaaacccattatactcttgggaactatctcaattgcaattttcaacgctctttttggcttgagctcaaatttttggatagcaattggcacaaggtttcttcttgggagtttcaactgtttgcttggaacaatgaaggcctatgcatcagaaatatttcgtgatgaatatcaagctaccgcaatgtcagctgttagtactgcttggggcattggactgatcattggccctgctcttggtggttttttagctcagccggcagacaaatatccaaatgtgttctcccaagaatctctttttggcagattccggtatgcattgccttgctttacgatttcagcttttgccttgcttgtgacagtactatgctgcttcatcccggagacactgcacaatcataagctggacagcttatcacatgatgattcatacgatatacttgaagctgcatctcatgaatcatctccttctaccgggaaggcaggaaaaaacgaaagaaaggcttctcagtctctcttgaagaattggccgctgatgtcatctatcattgtgtattgtgttctgtgtcttcatgatactgcatactcggagatatttgcactatgggctaacagtccaaggaagtatggaggtctgagctactcaacgaatgaagtcggtacagttcttgctatctcaggtctcggcctattctcttttcaggtatttgtttatcctttggctgagaaactgctaggacctgttctggtcacccgatatgctggggcactgatgatacctatacaaatgagttatccatttatagcaggcttgtcaggtctcagtctaagcttgatgttaaattgtgcatcaatcctcataaatgtcttaagtgtgtctgccataaccggcctgttgatccttcaaaatagagcagtggatcagagccaaagaggggcggctaatggaatagctatgactgcgatgtctctatttaagacagttggaccagctggtgctggcatcttattttcttggagtgagaggcgactaaacgctgcatttctaccaggatcgcatatggtattcttcgtcttgaatgtgatagtagtggtcggagtagctctgacattcaagccatttctaacgacgggtcgaagatgaaattcatttgaattggtaagatagggaatgtatggacaagttgattcttttcatttcagatacgaaagaaaccggtaataaaatttcactaaccttaggatttc

SEQ ID NO: 48859 - protein, 486 aa, Arabidopsis thaliana
  peptide (1)..(486): Ceres Seq. ID no. 14313191
MAEEYKEALLEKQNYHDGCPGCKVEQMKQLRRGYPYLELSFVWIIVLSTSLPISSLYPFLYYMIEDFGVAKTEKDIGFYAGFVGCSFMLGRALTSVFWGIVADRYGRKPIILLGTISIAIFNALFGLSSNFWIAIGTRFLLGSFNCLLGTMKAYASEIFRDEYQATAMSAVSTAWGIGLIIGPALGGFLAQPADKYPNVFSQESLFGRFRYALPCFTISAFALLVTVLCCFIPETLHNHKLDSLSHDDSYDILEAASHESSPSTGKAGKNERKASQSLLKNWPLMSSIIVYCVLCLHDTAYSEIFALWANSPRKYGGLSYSTNEVGTVLAISGLGLFSFQVFVYPLAEKLLGPVLVTRYAGALMIPIQMSYPFIAGLSGLSLSLMLNCASILINVLSVSAITGLLILQNRAVDQSQRGAANGIAMTAMSLFKTVGPAGAGILFSWSERRLNAAFLPGSHMVFFVLNVIVVVGVALTFKPFLTTGRR

SEQ ID NO: 48860 - protein, 460 aa, Arabidopsis thaliana
  peptide (1)..(460): Ceres Seq. ID no. 14313192
MKQLRRGYPYLELSFVWIIVLSTSLPISSLYPFLYYMIEDFGVAKTEKDIGFYAGFVGCSFMLGRALTSVFWGIVADRYGRKPIILLGTISIAIFNALFGLSSNFWIAIGTRFLLGSFNCLLGTMKAYASEIFRDEYQATAMSAVSTAWGIGLIIGPALGGFLAQPADKYPNVFSQESLFGRFRYALPCFTISAFALLVTVLCCFIPETLHNHKLDSLSHDDSYDILEAASHESSPSTGKAGKNERKASQSLLKNWPLMSSIIVYCVLCLHDTAYSEIFALWANSPRKYGGLSYSTNEVGTVLAISGLGLFSFQVFVYPLAEKLLGPVLVTRYAGALMIPIQMSYPFIAGLSGLSLSLMLNCASILINVLSVSAITGLLILQNRAVDQSQRGAANGIAMTAMSLFKTVGPAGAGILFSWSERRLNAAFLPGSHMVFFVLNVIVVVGVALTFKPFLTTGRR

SEQ ID NO: 48861 - protein, 424 aa, Arabidopsis thaliana
  peptide (1)..(424): Ceres Seq. ID no. 14313193
MIEDFGVAKTEKDIGFYAGFVGCSFMLGRALTSVFWGIVADRYGRKPIILLGTISIAIFNALFGLSSNFWIAIGTRFLLGSFNCLLGTMKAYASEIFRDEYQATAMSAVSTAWGIGLIIGPALGGFLAQPADKYPNVFSQESLFGRFRYALPCFTISAFALLVTVLCCFIPETLHNHKLDSLSHDDSYDILEAASHESSPSTGKAGKNERKASQSLLKNWPLMSSIIVYCVLCLHDTAYSEIFALWANSPRKYGGLSYSTNEVGTVLAISGLGLFSFQVFVYPLAEKLLGPVLVTRYAGALMIPIQMSYPFIAGLSGLSLSLMLNCASILINVLSVSAITGLLILQNRAVDQSQRGAANGIAMTAMSLFKTVGPAGAGILFSWSERRLNAAFLPGSHMVFFVLNVIVVVGVALTFKPFLTTGRR

SEQ ID NO: 48862 - DNA, 2271 bp, Arabidopsis thaliana
  misc_feature (1)..(2271): Ceres Seq. ID no. 12601691
  misc_feature (1)..(2271): Ortholog of  Ceres SEQ ID NO 15226175 as cited in SEQ ID NO 0
aaagtggttagagaggcttcagttgttggatgcttttgctttttttccttcttcttcgtcttctttcttcgtctctcttctttttttcagtttcggcgtgctgaagaagacgatagagtaatcaatcacagtgagagagatttgagggcaaatctgtcctttttttttcttaaacaactcatgcttgatttctgctacggcggaggaggaggaggaagaggtttacttttgcttatcaccgggaaatttccggcggtgattcaccgtcgatgataatgggttttattaaaagtgtagatctttgatgaaagcaggagactttttgatttctattttgattttgatttggggtttaggtttaagtttttagagaatcagatgaaggcgttacggagaagctatacttcaacgtcttctgggaattcatcttcttcgtcttcgttaccttcttcttcttcttcttcgttaccatcttcttcttcttcttcacctccttcttctaattctaattcttattcgaattctaattcttcttcgtcttcgtcgtcgtggatccatctacggtcggttctctttgtggctaatctttcgtctccgtcttcagttacttcttccgatcgccggcggaaatcaccgtggtctcgccggaaaagaaaatgggcattgacgccacatcaatggaggagtttatttacaccggagggaaaactccgtgatggtggagttggattcctgaagaaagttagaagcagaggtgttgatccaagtattcgtgcagaagtgtggctgttcttactcggagtttatgatttgaatagtactagtgaagaaagagaagcagtgaaaactcaaaaaaggaaggagtatgagaaactacagagacgatgtcagatgcttctcaagtgcggtaatggaagtaccgataatcttgaggagcttccatctgatgaggcaaacagtcaatgtgttcggttcgtggatgattataagattacaggaccaatgacaagtcaagatgttgtttctgctttgaacactgattcttctgatacagactcttgtgaagataatgaagatgttttactactctcatcttttgcacacagcgatgaaaaaaagccggaggaggataatagtaataacaattctgaagagaatagttctcttcttgtagctgctgcttctgaggtccaagtagaagttgcggtacacgaagatttctctacgtggcaacgtatcatccggcttgatgctttacgagcggattctgaatgggcaaattattctccatattcaacagcaatcacagaaagcaaagctcgcaggttagccgaatctgtcgggttaaaagactatgatcacttagaaagctgcaggctataccacgcagcacggttagttgcaattcttgaagcttatgctatgtatgatcctgagataggctactgtcaaggaatgagtgatctgttatctccaatcctcgctgtgatctcagaggatcacgaggctttctggtgctttgttggtttcatgaagaaagctcggcacaatttcaggcttgacgaagcagggattcaaagacagctaagcattgtatcaaagatcataaaaaataaagactctcagctttataaacacttggagaatcttcaagcagaagattgtagtttcgtttacaggatggtgcttgttatgtttaggagggagttgagttttgaacagacgctgtgtctctgggaagtgatgtgggctgatcaagctgccattagagctggagttgggaagtcgccatggagcagaatccggcaacaagcaccgccaacggatgatttgttgctctatgcaatcgcggcgttagtactacgtaggaaactgatcatacagaaatacagtagtatggatgagattgtggaagagtgtaatagcatggctggtcagcttaatgtctggaagcttcttgatgatgcccatcatcttgtcgtgacgcttcacgacaagattgaaactctttctcaatcacagagtatttgatgaagaagtcgatcaaagccagaaatgaagtgtttccactacacaaaagcccttgcactcgtctggctgcgttttctcaaggtttaaagtttgttgcggtttggttcttaccgttttcactcctctctttctttcttctttctttttgtttactcatcacacagagaaaacacaatactactatccttatcgcttttattgtagtactaatgaaaaagacaaggcaatattcttgttaaa

SEQ ID NO: 48863 - protein, 550 aa, Arabidopsis thaliana
  peptide (1)..(550): Ceres Seq. ID no. 12601692
MKALRRSYTSTSSGNSSSSSSLPSSSSSSLPSSSSSSPPSSNSNSYSNSNSSSSSSSWIHLRSVLFVANLSSPSSVTSSDRRRKSPWSRRKRKWALTPHQWRSLFTPEGKLRDGGVGFLKKVRSRGVDPSIRAEVWLFLLGVYDLNSTSEEREAVKTQKRKEYEKLQRRCQMLLKCGNGSTDNLEELPSDEANSQCVRFVDDYKITGPMTSQDVVSALNTDSSDTDSCEDNEDVLLLSSFAHSDEKKPEEDNSNNNSEENSSLLVAAASEVQVEVAVHEDFSTWQRIIRLDALRADSEWANYSPYSTAITESKARRLAESVGLKDYDHLESCRLYHAARLVAILEAYAMYDPEIGYCQGMSDLLSPILAVISEDHEAFWCFVGFMKKARHNFRLDEAGIQRQLSIVSKIIKNKDSQLYKHLENLQAEDCSFVYRMVLVMFRRELSFEQTLCLWEVMWADQAAIRAGVGKSPWSRIRQQAPPTDDLLLYAIAALVLRRKLIIQKYSSMDEIVEECNSMAGQLNVWKLLDDAHHLVVTLHDKIETLSQSQSI

SEQ ID NO: 48864 - protein, 379 aa, Arabidopsis thaliana
  peptide (1)..(379): Ceres Seq. ID no. 12601693
MLLKCGNGSTDNLEELPSDEANSQCVRFVDDYKITGPMTSQDVVSALNTDSSDTDSCEDNEDVLLLSSFAHSDEKKPEEDNSNNNSEENSSLLVAAASEVQVEVAVHEDFSTWQRIIRLDALRADSEWANYSPYSTAITESKARRLAESVGLKDYDHLESCRLYHAARLVAILEAYAMYDPEIGYCQGMSDLLSPILAVISEDHEAFWCFVGFMKKARHNFRLDEAGIQRQLSIVSKIIKNKDSQLYKHLENLQAEDCSFVYRMVLVMFRRELSFEQTLCLWEVMWADQAAIRAGVGKSPWSRIRQQAPPTDDLLLYAIAALVLRRKLIIQKYSSMDEIVEECNSMAGQLNVWKLLDDAHHLVVTLHDKIETLSQSQSI

SEQ ID NO: 48865 - protein, 342 aa, Arabidopsis thaliana
  peptide (1)..(342): Ceres Seq. ID no. 12601694
MTSQDVVSALNTDSSDTDSCEDNEDVLLLSSFAHSDEKKPEEDNSNNNSEENSSLLVAAASEVQVEVAVHEDFSTWQRIIRLDALRADSEWANYSPYSTAITESKARRLAESVGLKDYDHLESCRLYHAARLVAILEAYAMYDPEIGYCQGMSDLLSPILAVISEDHEAFWCFVGFMKKARHNFRLDEAGIQRQLSIVSKIIKNKDSQLYKHLENLQAEDCSFVYRMVLVMFRRELSFEQTLCLWEVMWADQAAIRAGVGKSPWSRIRQQAPPTDDLLLYAIAALVLRRKLIIQKYSSMDEIVEECNSMAGQLNVWKLLDDAHHLVVTLHDKIETLSQSQSI

SEQ ID NO: 48866 - DNA, 2144 bp, Arabidopsis thaliana; identical to SEQ ID NO: 48765
  misc_feature (1)..(2144): Ceres Seq. ID no. 12600977
  misc_feature (1)..(2144): Ortholog of  Ceres SEQ ID NO 13599322 as cited in SEQ ID NO 0

SEQ ID NO: 48867 - protein, 477 aa, Arabidopsis thaliana; identical to SEQ ID NO: 48766
  peptide (1)..(477): Ceres Seq. ID no. 12600978

SEQ ID NO: 48868 - protein, 346 aa, Arabidopsis thaliana; identical to SEQ ID NO: 48767
  peptide (1)..(346): Ceres Seq. ID no. 12600979

SEQ ID NO: 48869 - protein, 249 aa, Arabidopsis thaliana; identical to SEQ ID NO: 48768
  peptide (1)..(249): Ceres Seq. ID no. 12600980

SEQ ID NO: 48870 - DNA, 1174 bp, Arabidopsis thaliana; identical to SEQ ID NO: 35211
  misc_feature (1)..(1174): Ceres Seq. ID no. 13591839
  misc_feature (1)..(1174): Ortholog of  Ceres SEQ ID NO 15175666 as cited in SEQ ID NO 54985
  misc_feature (1)..(1174): Ortholog of  Ceres SEQ ID NO 14310460 as cited in SEQ ID NO 55105
  misc_feature (1)..(1174): Ortholog of  Ceres SEQ ID NO 13597740 as cited in SEQ ID NO 64482
  misc_feature (1)..(1174): Ortholog of  Ceres SEQ ID NO 15179888 as cited in SEQ ID NO 66879
  misc_feature (1)..(1174): Ortholog of  Ceres SEQ ID NO 13596056 as cited in SEQ ID NO 68307
  misc_feature (1)..(1174): Ortholog of  Ceres SEQ ID NO 12388689 as cited in SEQ ID NO 0

SEQ ID NO: 48871 - protein, 287 aa, Arabidopsis thaliana; identical to SEQ ID NO: 35212
  peptide (1)..(287): Ceres Seq. ID no. 13591840

SEQ ID NO: 48872 - protein, 254 aa, Arabidopsis thaliana; identical to SEQ ID NO: 35213
  peptide (1)..(254): Ceres Seq. ID no. 13591841

SEQ ID NO: 48873 - DNA, 2690 bp, Arabidopsis thaliana
  misc_feature (1)..(2690): Ceres Seq. ID no. 15168828
  misc_feature (1)..(2690): Ortholog of  Ceres SEQ ID NO 13655298 as cited in SEQ ID NO 68914
gaaaaatccttagatcattttttttttgttatctttgtttcgtttttctggtagaagagagaagaaggagagacgaattggcagctaagcgattctctctctttctctctttctcttctcgtgtaatcttttggtgttcttgaaaccactttttttttgttaattcctctgtttccttggaattgttttctgcttttttaagaagaaaaaaacgatgaatgtggtgcggagattaacgagtattgcctctggacgtaatttcgtttcttctgataacgtaggagaaactgagacgccgagatcaaagcctaaccagaatcgtgaagaaacagagtctacggaaactacgtcgtacgagaaagattctgtctcttcctcagagaactctgatcatttaccaaaggaaatccgtgaggtgggacttggagatgacaaggatatggactgtggaatcatcaagggaaatggaacagaatctggacggattattaccaccaaaaagaagggtttgaatgatcaaaaagacaagacaatctcttacagagctgaacatgtaattggcactggctcattcggtgttgtctttcaggctaagtgcttagagacggaagaaaaagtagcaataaagaaagtgttacaggacaagagatacaaaaacagagaacttcagatcatgcgaatgcttgatcatcctaatgtcgttgagctcaagcattctttcttttccacgactgagaaagacgagctttatcttaaccttgttcttgagtatgtacccgagactatttaccgcgcttccagatcttacaccaagatgaatcagcatatgcctttgatttatattcagctctacacctatcagatttgccgtgctatgaattatctgcatcaagtggttggagtgtgtcaccgtgacattaagccgcagaatctgttggtcaataatgttacgcatgaagtaaagatatgcgattttgggagcgccaaaatgctgattccaggagaaccaaatatatcttacatatgctcaaggtattacagagctcctgaactcatatttggagcaaccgaatacacaagtgcgatcgatatgtggtctgtaggttgtgtcatggctgagctttttcttggacatcctctattccctggagaaaccagtgttgatcaattggtggagatcattaagattttagggacaccagcaagagaagagataaagaacatgaatcctcgttacaatgattttaagttccctcagatcaaagctcagccgtggcacaagattttccggagacaggtatctccagaagcaatggatcttgcctctagattgctccagtattcaccaaacctgagatgcacagcgcttgaagcatgtgcacacccattcttcgatgatctgagagacccgagagcatccttgcctaatggaagagcacttcctccattgtttgatttcacagctcaagaacttgctggggcatctgttgaactgcgtcatcgcttaatacctgagcatgcaaggaaatgaccatttgggttaatggctgcttctctacgcagatgttgatatataaatctttttttattttgagagtttcttgtgaacaagtatagcattgtgctggttatgaaccctcactgacctctgcaaccacatcgactagcagtttgaaagtgtataattgtaagtttgtaactttgtagctttcattgttgcagacagaaatgcagaattttccgagttttccttctattgcaaatgttaccaatagtctccgcaagaacactttccatctctaaagtgatgaaagcagttagaatctcttaagatgatatgccgaagatatactcttgatatatacttcattgcactgtggcaatccccacagacgcgaaggttcttgatgatccggattggagctccagatggtacaacaagtagaccaaacgcaacagctaatttctcactatggtaagccaaacctagctccttcccttccttatctaagtcatggagagcaaaactcatatccgcgaaataaccagcctctttgatcaaaagcatcatttcatcaaccttggaatatatctcaaccattctcggatgtcttctatcttcagacataaagctatgaactttacctttctcttcaacccaactgcaaccaggttctttgcttatattacgagatttcatcaatctacgaacatttgcagcttcgtcttgtcttcccgctgcagaatacatgtttgataactgaacataaggaacagcattgtttggttccaattccataagagttttcgctgctctttccccgttttctatattcccatgcttcctacttgcagccaaaatcgctttccatacagtagcatctggttcaacctccatttgatgcagcaattgctctacttttacgaaatcaccagatctaccaaagagatcaatcatacaggcatagtgttccggtcctggtgtgattccataaactgttctcatcgaatcaaagtagcgttgagcatcttctaagagacctgcatgactgcaagcaaatagtaacccgataaaggtaatgtaatctggtgttatgccactgcctatcatcaaatcgtatgactgtagtgagtccttggctctaccgttttttgcgtaacccacaataagacaagtccatgttattaag

SEQ ID NO: 48874 - protein, 438 aa, Arabidopsis thaliana
  peptide (1)..(438): Ceres Seq. ID no. 15168829
MNVVRRLTSIASGRNFVSSDNVGETETPRSKPNQNREETESTETTSYEKDSVSSSENSDHLPKEIREVGLGDDKDMDCGIIKGNGTESGRIITTKKKGLNDQKDKTISYRAEHVIGTGSFGVVFQAKCLETEEKVAIKKVLQDKRYKNRELQIMRMLDHPNVVELKHSFFSTTEKDELYLNLVLEYVPETIYRASRSYTKMNQHMPLIYIQLYTYQICRAMNYLHQVVGVCHRDIKPQNLLVNNVTHEVKICDFGSAKMLIPGEPNISYICSRYYRAPELIFGATEYTSAIDMWSVGCVMAELFLGHPLFPGETSVDQLVEIIKILGTPAREEIKNMNPRYNDFKFPQIKAQPWHKIFRRQVSPEAMDLASRLLQYSPNLRCTALEACAHPFFDDLRDPRASLPNGRALPPLFDFTAQELAGASVELRHRLIPEHARK

SEQ ID NO: 48875 - protein, 363 aa, Arabidopsis thaliana; identical to SEQ ID NO: 47675
  peptide (1)..(363): Ceres Seq. ID no. 15168830

SEQ ID NO: 48876 - protein, 285 aa, Arabidopsis thaliana; identical to SEQ ID NO: 47676
  peptide (1)..(285): Ceres Seq. ID no. 15168831

SEQ ID NO: 48877 - DNA, 1206 bp, Arabidopsis thaliana
  misc_feature (1)..(1206): Ceres Seq. ID no. 12601102
  misc_feature (1)..(1206): Ortholog of  Ceres SEQ ID NO 14311330 as cited in SEQ ID NO 54204
gaaaagtctgcttcttcttcgccgtctctgtgcggcctcttcctcttcctcttctaaacaatgacggaggaagaggtagctatggaagtggaagctctagaagcagtttacagcgaagactgcgttatactggattcgtatcctcctcatcttcacctccatatcaagccccgtaccgccnaaatctcttctcagcagtatgtgngaagccgttgttagattccaagcaggttctaagtatccagatgaaccacctcggattagtctgattgaatccnagggtcttgacgagcaaaggcaaaagcttttgattggcatagtgcaagagaaagcttctcaactatcatcttctttaatgcttgtagaactttgtgaggaagcagtggagaggctcacaattatgaatcacccggagggagattgtccactgtgtttgtatccgttattccctgaggatggcgggagtaaacaaatgccatttatgaagctgatgtcttgttttcattgtttccactgtgagtgcatcattaggtggtggaattggcttcatgcacaggaagaggctgattcgaaatctggtgacactttacatatgcgtagaggatcaactgctcgagaaggtaattctggatcagcagataaaagcttgggaaactgtccagtgtgccgcaaaatttttcactcgagtgacattgaacatgttcttgacttagttggtgctcaatcatctctacaggactctagtttaataccaggcaaggaccaagacccgctgctccagtcagattcagagaacataagaagagagcggtttgagtctattctaaagacgcaggaagaaaagggtggtttggttcaaccgaagaaaaacatatcggtggtgcccggtatgtatcttcctccaccagctcatgcatcaacgtcacgaaacgaagaagaagaagctggtgaaagccaagaacaaggagaagaggaacccaaagaagctgaatcagagacaaactctagcagctccaccaacaggagaggtcgagggagatggagaggcagaggcagaagcagaggccggggacctactgtcaatgaaaggaagccgaattcgcaagatccaagaaaaccgacgagacaatgggtgcagagagccagagaaggagacaaataatttatgctaatcttgtgtgatacatcaaactcaaactcaaacac

SEQ ID NO: 48878 - protein, 320 aa, Arabidopsis thaliana
  peptide (1)..(320): Ceres Seq. ID no. 12601103
  misc_feature (2)..(2): Xaa is any aa, unknown or other
  misc_feature (27)..(27): Xaa is any aa, unknown or other
MXEAVVRFQAGSKYPDEPPRISLIESXGLDEQRQKLLIGIVQEKASQLSSSLMLVELCEEAVERLTIMNHPEGDCPLCLYPLFPEDGGSKQMPFMKLMSCFHCFHCECIIRWWNWLHAQEEADSKSGDTLHMRRGSTAREGNSGSADKSLGNCPVCRKIFHSSDIEHVLDLVGAQSSLQDSSLIPGKDQDPLLQSDSENIRRERFESILKTQEEKGGLVQPKKNISVVPGMYLPPPAHASTSRNEEEEAGESQEQGEEEPKEAESETNSSSSTNRRGRGRWRGRGRSRGRGPTVNERKPNSQDPRKPTRQWVQRAREGDK

SEQ ID NO: 48879 - protein, 268 aa, Arabidopsis thaliana
  peptide (1)..(268): Ceres Seq. ID no. 12601104
MLVELCEEAVERLTIMNHPEGDCPLCLYPLFPEDGGSKQMPFMKLMSCFHCFHCECIIRWWNWLHAQEEADSKSGDTLHMRRGSTAREGNSGSADKSLGNCPVCRKIFHSSDIEHVLDLVGAQSSLQDSSLIPGKDQDPLLQSDSENIRRERFESILKTQEEKGGLVQPKKNISVVPGMYLPPPAHASTSRNEEEEAGESQEQGEEEPKEAESETNSSSSTNRRGRGRWRGRGRSRGRGPTVNERKPNSQDPRKPTRQWVQRAREGDK

SEQ ID NO: 48880 - protein, 253 aa, Arabidopsis thaliana
  peptide (1)..(253): Ceres Seq. ID no. 12601105
MNHPEGDCPLCLYPLFPEDGGSKQMPFMKLMSCFHCFHCECIIRWWNWLHAQEEADSKSGDTLHMRRGSTAREGNSGSADKSLGNCPVCRKIFHSSDIEHVLDLVGAQSSLQDSSLIPGKDQDPLLQSDSENIRRERFESILKTQEEKGGLVQPKKNISVVPGMYLPPPAHASTSRNEEEEAGESQEQGEEEPKEAESETNSSSSTNRRGRGRWRGRGRSRGRGPTVNERKPNSQDPRKPTRQWVQRAREGDK

SEQ ID NO: 48881 - DNA, 2307 bp, Arabidopsis thaliana; identical to SEQ ID NO: 46178
  misc_feature (1)..(2307): Ceres Seq. ID no. 12600696
  misc_feature (1)..(2307): Ortholog of  Ceres SEQ ID NO 15176563 as cited in SEQ ID NO 58992

SEQ ID NO: 48882 - protein, 677 aa, Arabidopsis thaliana; identical to SEQ ID NO: 46179
  peptide (1)..(677): Ceres Seq. ID no. 12600697

SEQ ID NO: 48883 - protein, 611 aa, Arabidopsis thaliana; identical to SEQ ID NO: 46180
  peptide (1)..(611): Ceres Seq. ID no. 12600698

SEQ ID NO: 48884 - protein, 496 aa, Arabidopsis thaliana; identical to SEQ ID NO: 46181
  peptide (1)..(496): Ceres Seq. ID no. 12600699

SEQ ID NO: 48885 - DNA, 1242 bp, Arabidopsis thaliana
  misc_feature (1)..(1242): Ceres Seq. ID no. 14315831
  misc_feature (1)..(1242): Ortholog of  Ceres SEQ ID NO 13597931 as cited in SEQ ID NO 64485
agacttccactttcgaaacctctcaccgaagctacaatgagtatcatcgcaggctcctacgagagattcatttggggtttcaagcttaaacccacgaagcacgacgccgaatctcaaaccctaactctctcccctctcttctcctacccttcccacatctccccaatcaccaccgtcgcttgttccggtcccgccgctgcttccggcggctccgacgatacaatccacctctacgatcttccctcggcctcttccctcggctctctacttgaccacaatcacacagcttcaatcactgctctctccttctacacaccttcttcactctccttccctcgtaatctaatctccgccgccgcagatggctccgttgctatattcgatactgatccttttgttttgcttaagtcgtttcgtcctcataagaaagcggttaatgatttggcgattcatccttcagggaagcttgctttagctgtttatcgtgatgagttctttgcgatgttgaatttagttagaggaaagaggagtttttgttgtaggttaggtcatgaagctagtcttgtgaaatttgatcctagtggtgaaaggttttacatggttgtgagtaataaagttggagttcatcagtctgaagatgctaagcttcttcttgagctcgagaatccgagccgcaaacgtatactctgcgctactcccggagagagtggaactctgtttacaggtggtgaggatcgagctataacagcttgggatacaaatagtgggaagcttgcttattccatagaagatgctcacccagctcgaatcaaaggtattgttgtgcttaccaggaatgaaagtgacggctccttggaagatccatacttgattggttctgcatcatctgatgggatcatacgtgtttgggacgtgcgaatggcggctaaagaaaatataaaaccattggccgagacaaatactaaatcaaggcttacatgtcttgccggctcagctcttaaatctatgagacggccacagattggaaagcaggaatctcagaaggtagacgaagagcatgagaactcagaataagagctgatttttgagtgtttattgaaaaatttgtgagctgacattaattttgatgcaagttttggtagaatccagtagattcttgtcgaattataactataaacattgtcttaaaccatcgattttgtgaaagaaacaaacaaacaaaaaaatcattctactattatc

SEQ ID NO: 48886 - protein, 357 aa, Arabidopsis thaliana
  peptide (1)..(357): Ceres Seq. ID no. 14315832
RLPLSKPLTEATMSIIAGSYERFIWGFKLKPTKHDAESQTLTLSPLFSYPSHISPITTVACSGPAAASGGSDDTIHLYDLPSASSLGSLLDHNHTASITALSFYTPSSLSFPRNLISAAADGSVAIFDTDPFVLLKSFRPHKKAVNDLAIHPSGKLALAVYRDEFFAMLNLVRGKRSFCCRLGHEASLVKFDPSGERFYMVVSNKVGVHQSEDAKLLLELENPSRKRILCATPGESGTLFTGGEDRAITAWDTNSGKLAYSIEDAHPARIKGIVVLTRNESDGSLEDPYLIGSASSDGIIRVWDVRMAAKENIKPLAETNTKSRLTCLAGSALKSMRRPQIGKQESQKVDEEHENSE

SEQ ID NO: 48887 - protein, 345 aa, Arabidopsis thaliana
  peptide (1)..(345): Ceres Seq. ID no. 14315833
MSIIAGSYERFIWGFKLKPTKHDAESQTLTLSPLFSYPSHISPITTVACSGPAAASGGSDDTIHLYDLPSASSLGSLLDHNHTASITALSFYTPSSLSFPRNLISAAADGSVAIFDTDPFVLLKSFRPHKKAVNDLAIHPSGKLALAVYRDEFFAMLNLVRGKRSFCCRLGHEASLVKFDPSGERFYMVVSNKVGVHQSEDAKLLLELENPSRKRILCATPGESGTLFTGGEDRAITAWDTNSGKLAYSIEDAHPARIKGIVVLTRNESDGSLEDPYLIGSASSDGIIRVWDVRMAAKENIKPLAETNTKSRLTCLAGSALKSMRRPQIGKQESQKVDEEHENSE

SEQ ID NO: 48888 - protein, 190 aa, Arabidopsis thaliana
  peptide (1)..(190): Ceres Seq. ID no. 14315834
MLNLVRGKRSFCCRLGHEASLVKFDPSGERFYMVVSNKVGVHQSEDAKLLLELENPSRKRILCATPGESGTLFTGGEDRAITAWDTNSGKLAYSIEDAHPARIKGIVVLTRNESDGSLEDPYLIGSASSDGIIRVWDVRMAAKENIKPLAETNTKSRLTCLAGSALKSMRRPQIGKQESQKVDEEHENSE

SEQ ID NO: 48889 - DNA, 1728 bp, Arabidopsis thaliana
  misc_feature (1)..(1728): Ceres Seq. ID no. 15168822
  misc_feature (1)..(1728): Ortholog of  Ceres SEQ ID NO 15171430 as cited in SEQ ID NO 51500
  misc_feature (1)..(1728): Ortholog of  Ceres SEQ ID NO 15176106 as cited in SEQ ID NO 60324
  misc_feature (1)..(1728): Ortholog of  Ceres SEQ ID NO 13654989 as cited in SEQ ID NO 63117
  misc_feature (1)..(1728): Ortholog of  Ceres SEQ ID NO 13655640 as cited in SEQ ID NO 63844
  misc_feature (1)..(1728): Ortholog of  Ceres SEQ ID NO 13584744 as cited in SEQ ID NO 69137
gacccctcgtgcctctctttaacaccaaacccaaaactcccttctctttcttccttcctctccgatctccgttcacatctctctctcatctttatcttcttctttttttgccttgtgggttgaaagtttctatattttctctttctcttctgtttacataatccattttcagctcaagcagctgaagaataacgatcaagaaccaaaaaagaagaaaacgaatctgttcttagctttgatgggttcttgcttcagttctcgagtcaaagcagacatcttccacaatggtaagagcagcgatctttatggtctaagtctctcaagtcggaaatcgtcttcgactgtagcggcggctcagaagacggaaggggagatattgagttcgacccctgtcaaaagcttcacctttaacgaactcaaactcgccacaagaaacttcagaccagatagtgtgatcggagaaggtggctttggttgtgtctttaaaggctggttagatgagtccactctcactccgactaaacctggaaccggtttggtcatcgccgttaaaaagcttaaccaagaaggttttcaaggtcaccgtgaatggctgacagagatcaattacttggggcaactgagtcacccaaatctagttaaactgatcggttattgcttagaagatgaacaccgtcttctagtctacgagtttatgcaaaaaggaagtcttgagaatcatctattcagaagaggtgcatattttaagccactcccatggtttctacgggtcaatgttgcgcttgatgcagcaaaggggcttgcttttcttcacagcgatcccgtcaaagtgatataccgagacattaaagcctcgaacatcttacttgatgcggactacaacgcaaaactttctgactttggactagctagagacggtccaatgggtgatttgagttatgttagtacaagggtcatgggtacttatgggtacgccgcgcctgagtacatgtcatcaggtcacttgaatgcaagaagcgatgtgtacagtttcggagttttgcttctagagattttatctggtaagcgagcgttggatcataacagaccggctaaagaagaaaaccttgtggattgggctcgaccgtacctcacaagcaaacgtaaggttctcctaatcgtggacaatcggctagacacacagtacctacctgaagaagccgtgagaatggcaagcgtggcggtgcagtgtctctcatttgaacccaagtcgcgcccgaccatggaccaagtggtccgtgccttacaacaacttcaggacaacttgggaaaaccgagtcagaccaatccggttaaggataccaagaaacttggttttaaaactggtactactaagtcatccgaaaaacggtttacacaaaaaccttttggcaggcaccttgtgtaggtcaagttggtaactgaattccaggatggacatttttccggcggtttacttgaaactgccgatatccgttttcgacggattgaatgcggttctggacaaaccgtgcaggtcaagactaataaaggatacattaaattttccggttacatgtcccatacccaaccttagagaacatgtgtagcctttagcttaggcttccttgtgtgctgttatattgagtatatatgaggtaatttttgcctcttgtgttgtaacacttgtatttttgttcctttaacatttgatgtagagatttttcctcc

SEQ ID NO: 48890 - protein, 395 aa, Arabidopsis thaliana
  peptide (1)..(395): Ceres Seq. ID no. 15168823
MGSCFSSRVKADIFHNGKSSDLYGLSLSSRKSSSTVAAAQKTEGEILSSTPVKSFTFNELKLATRNFRPDSVIGEGGFGCVFKGWLDESTLTPTKPGTGLVIAVKKLNQEGFQGHREWLTEINYLGQLSHPNLVKLIGYCLEDEHRLLVYEFMQKGSLENHLFRRGAYFKPLPWFLRVNVALDAAKGLAFLHSDPVKVIYRDIKASNILLDADYNAKLSDFGLARDGPMGDLSYVSTRVMGTYGYAAPEYMSSGHLNARSDVYSFGVLLLEILSGKRALDHNRPAKEENLVDWARPYLTSKRKVLLIVDNRLDTQYLPEEAVRMASVAVQCLSFEPKSRPTMDQVVRALQQLQDNLGKPSQTNPVKDTKKLGFKTGTTKSSEKRFTQKPFGRHLV

SEQ ID NO: 48891 - protein, 243 aa, Arabidopsis thaliana
  peptide (1)..(243): Ceres Seq. ID no. 15168824
MQKGSLENHLFRRGAYFKPLPWFLRVNVALDAAKGLAFLHSDPVKVIYRDIKASNILLDADYNAKLSDFGLARDGPMGDLSYVSTRVMGTYGYAAPEYMSSGHLNARSDVYSFGVLLLEILSGKRALDHNRPAKEENLVDWARPYLTSKRKVLLIVDNRLDTQYLPEEAVRMASVAVQCLSFEPKSRPTMDQVVRALQQLQDNLGKPSQTNPVKDTKKLGFKTGTTKSSEKRFTQKPFGRHLV

SEQ ID NO: 48892 - DNA, 2015 bp, Arabidopsis thaliana; identical to SEQ ID NO: 42148
  misc_feature (1)..(2015): Ceres Seq. ID no. 12601323
  misc_feature (1)..(2015): Ortholog of  Ceres SEQ ID NO 14302935 as cited in SEQ ID NO 20442

SEQ ID NO: 48893 - protein, 550 aa, Arabidopsis thaliana; identical to SEQ ID NO: 42149
  peptide (1)..(550): Ceres Seq. ID no. 12601324

SEQ ID NO: 48894 - protein, 444 aa, Arabidopsis thaliana; identical to SEQ ID NO: 42150
  peptide (1)..(444): Ceres Seq. ID no. 12601325

SEQ ID NO: 48895 - protein, 408 aa, Arabidopsis thaliana; identical to SEQ ID NO: 42151
  peptide (1)..(408): Ceres Seq. ID no. 12601326

SEQ ID NO: 48896 - DNA, 1913 bp, Arabidopsis thaliana; identical to SEQ ID NO: 42826
  misc_feature (1)..(1913): Ceres Seq. ID no. 13592068
  misc_feature (1)..(1913): Ortholog of  Ceres SEQ ID NO 13594037 as cited in SEQ ID NO 55666
  misc_feature (1)..(1913): Ortholog of  Ceres SEQ ID NO 13657707 as cited in SEQ ID NO 66407

SEQ ID NO: 48897 - protein, 577 aa, Arabidopsis thaliana; identical to SEQ ID NO: 42827
  peptide (1)..(577): Ceres Seq. ID no. 13592069

SEQ ID NO: 48898 - protein, 551 aa, Arabidopsis thaliana; identical to SEQ ID NO: 42828
  peptide (1)..(551): Ceres Seq. ID no. 13592070

SEQ ID NO: 48899 - protein, 406 aa, Arabidopsis thaliana; identical to SEQ ID NO: 42829
  peptide (1)..(406): Ceres Seq. ID no. 13592071

SEQ ID NO: 48900 - DNA, 1919 bp, Arabidopsis thaliana
  misc_feature (1)..(1919): Ceres Seq. ID no. 14313178
  misc_feature (1)..(1919): Ortholog of  Ceres SEQ ID NO 12581696 as cited in SEQ ID NO 55411
ggattggaaacatatctcaagcttcttcttcgtgttacgcactttcttcttcttcttctctctctctctttcttcttcgtcttcgatcacagaagacagaattcaatgtcgtcgacctacaagctcaatcatactgattcatttgcaaatggagatgcaaagagtttgttgccgaacccagagaatggtttcactcatttgacttcacttgctcaatcagagaaggctgttcaggagcttcttcttcaacagactcctatgcaggctactgacgaccatctcgttgagttctctgaggctttgagaactgttgcaaaggcactaaggggagctgctgaaggaaaggcgttggctcaagctgaggctgctgaatggaagcgtagatacgagttagagaggtctaagaacgtggagttgcagcataaagaactgtcaaatggagtgtgtgccgatgaatctaatggtcaaaggatggagcacttagcaaagtctccgcggctttatgctcaggaaatcagttctaatggcatggagactatttgctctcatgaagtgctccaagatggtggatttaacagttttaataacaaattgaagaggaaggcatcatttaaactttcatggggatgtaaggggatggctaatgatcaacacaaaaaagaaattgtttcgtttgagagagggaatatcagcacagcagagcgcagtagtaaacagatttcactgacatgggagtctgatccacaaactgtacttattatcactaagcctaattcaacttccgtgcgagttctctctgtggatatggtcagatggttgagaacgcaaaaaggactaaatatttatgtggaacctcgagtaaaggaagaactcttatcagagtcaagttccttcaacttcgtacaaacttgggaagatgacaaggaaatttcacttctacacacaaaggttgaccttcttataactcttggtggggatggcacagtgctatgggctgcatcgatgtttaaaggaccagtgcctccaattgttccattctccatgggatctcttggatttatgactccttttcacagcgaacaataccgagattgtcttgaagcgattttgaagggtcctatcagtataacactacgacacaggttgcagtgtcacatcatcagagataaagcaacacatgaatatgaaccagaagagactatgcttgttctgaatgaagtcaccattgaccgtggaatatcttcttacctcacaaaccttgaatgctactgtgacaactcattcgtcacatgtgtgcaaggcgatggacttatactgtctacaacatctggtagcaccgcgtattcacttgctgctggagggtcaatggtccatcctcaggttcctgggatcttattcacgcctatctgtccgcattctctatcattccgcccactaatattaccggaacacgtgacagtgagagtccaagtgccattcaacagcagaagctccgcttgggtctcctttgatgggaaagaccggaaacagcttgaagcaggggatgcactagtgtgtagcatggcaccatggcccgtctcaaccgcttgtcaagttgaatccactaacgacttcttacgcagcatccacgatggtcttcactggaacctaagaaagactcaatctgctgatggaccttagaaacaaattcctccagcttttttctctttcattcttaaccaataaccatatatagtctcgacgtctatctatctatctatatgcatatagataaatgtgaaatggaaagtgatgggttctgtgagagaatgtggtctgtatccattgttgtgtagagaatgtaataatgtagctgctatgacccataattctgttgatgtgataatcactcaaagttaatgaataaaagatatttctgc

SEQ ID NO: 48901 - protein, 559 aa, Arabidopsis thaliana
  peptide (1)..(559): Ceres Seq. ID no. 14313179
GLETYLKLLLRVTHFLLLLLSLSFFFVFDHRRQNSMSSTYKLNHTDSFANGDAKSLLPNPENGFTHLTSLAQSEKAVQELLLQQTPMQATDDHLVEFSEALRTVAKALRGAAEGKALAQAEAAEWKRRYELERSKNVELQHKELSNGVCADESNGQRMEHLAKSPRLYAQEISSNGMETICSHEVLQDGGFNSFNNKLKRKASFKLSWGCKGMANDQHKKEIVSFERGNISTAERSSKQISLTWESDPQTVLIITKPNSTSVRVLSVDMVRWLRTQKGLNIYVEPRVKEELLSESSSFNFVQTWEDDKEISLLHTKVDLLITLGGDGTVLWAASMFKGPVPPIVPFSMGSLGFMTPFHSEQYRDCLEAILKGPISITLRHRLQCHIIRDKATHEYEPEETMLVLNEVTIDRGISSYLTNLECYCDNSFVTCVQGDGLILSTTSGSTAYSLAAGGSMVHPQVPGILFTPICPHSLSFRPLILPEHVTVRVQVPFNSRSSAWVSFDGKDRKQLEAGDALVCSMAPWPVSTACQVESTNDFLRSIHDGLHWNLRKTQSADGP

SEQ ID NO: 48902 - protein, 524 aa, Arabidopsis thaliana
  peptide (1)..(524): Ceres Seq. ID no. 14313180
MSSTYKLNHTDSFANGDAKSLLPNPENGFTHLTSLAQSEKAVQELLLQQTPMQATDDHLVEFSEALRTVAKALRGAAEGKALAQAEAAEWKRRYELERSKNVELQHKELSNGVCADESNGQRMEHLAKSPRLYAQEISSNGMETICSHEVLQDGGFNSFNNKLKRKASFKLSWGCKGMANDQHKKEIVSFERGNISTAERSSKQISLTWESDPQTVLIITKPNSTSVRVLSVDMVRWLRTQKGLNIYVEPRVKEELLSESSSFNFVQTWEDDKEISLLHTKVDLLITLGGDGTVLWAASMFKGPVPPIVPFSMGSLGFMTPFHSEQYRDCLEAILKGPISITLRHRLQCHIIRDKATHEYEPEETMLVLNEVTIDRGISSYLTNLECYCDNSFVTCVQGDGLILSTTSGSTAYSLAAGGSMVHPQVPGILFTPICPHSLSFRPLILPEHVTVRVQVPFNSRSSAWVSFDGKDRKQLEAGDALVCSMAPWPVSTACQVESTNDFLRSIHDGLHWNLRKTQSADGP

SEQ ID NO: 48903 - protein, 473 aa, Arabidopsis thaliana
  peptide (1)..(473): Ceres Seq. ID no. 14313181
MQATDDHLVEFSEALRTVAKALRGAAEGKALAQAEAAEWKRRYELERSKNVELQHKELSNGVCADESNGQRMEHLAKSPRLYAQEISSNGMETICSHEVLQDGGFNSFNNKLKRKASFKLSWGCKGMANDQHKKEIVSFERGNISTAERSSKQISLTWESDPQTVLIITKPNSTSVRVLSVDMVRWLRTQKGLNIYVEPRVKEELLSESSSFNFVQTWEDDKEISLLHTKVDLLITLGGDGTVLWAASMFKGPVPPIVPFSMGSLGFMTPFHSEQYRDCLEAILKGPISITLRHRLQCHIIRDKATHEYEPEETMLVLNEVTIDRGISSYLTNLECYCDNSFVTCVQGDGLILSTTSGSTAYSLAAGGSMVHPQVPGILFTPICPHSLSFRPLILPEHVTVRVQVPFNSRSSAWVSFDGKDRKQLEAGDALVCSMAPWPVSTACQVESTNDFLRSIHDGLHWNLRKTQSADGP

SEQ ID NO: 48904 - DNA, 1524 bp, Arabidopsis thaliana
  misc_feature (1)..(1524): Ceres Seq. ID no. 14316557
  misc_feature (1)..(1524): Ortholog of  Ceres SEQ ID NO 13594345 as cited in SEQ ID NO 58043
  misc_feature (1)..(1524): Ortholog of  Ceres SEQ ID NO 14308594 as cited in SEQ ID NO 60384
  misc_feature (1)..(1524): Ortholog of  Ceres SEQ ID NO 12614112 as cited in SEQ ID NO 60891
  misc_feature (1)..(1524): Ortholog of  Ceres SEQ ID NO 13597574 as cited in SEQ ID NO 64677
  misc_feature (1)..(1524): Ortholog of  Ceres SEQ ID NO 14302832 as cited in SEQ ID NO 64926
  misc_feature (1)..(1524): Ortholog of  Ceres SEQ ID NO 13662880 as cited in SEQ ID NO 65422
  misc_feature (1)..(1524): Ortholog of  Ceres SEQ ID NO 14316013 as cited in SEQ ID NO 67181
  misc_feature (1)..(1524): Ortholog of  Ceres SEQ ID NO 13591190 as cited in SEQ ID NO 68044
  misc_feature (1)..(1524): Ortholog of  Ceres SEQ ID NO 13596089 as cited in SEQ ID NO 68373
gatccattacaaggccacattaacccaatgatccaactcgctaaacgcttatccaaaaagggcatcaccagcacactcatcatcgcctccaaagaccaccgtgaaccttacacctccgacgactactccatcaccgtccacaccatccacgacggtttctttccacatgaacaccctcacgccaagttcgtagatcttgaccgtttccacaactctacttctcgaagcctgaccgatttcatctctagtgcgaagttgtcggacaatcctccaaaagctctgatctatgatccatttatgccctttgcattggacatagccaaggacttggatctatacgtagtggcatatttcactcaaccatggttggctagtcttgtttactaccatatcaacgaaggcacctacgatgttcccgttgatagacacgagaacccaacacttgcatcgtttcctggtttcccattgttaagccaagatgatctgccttcgttcgcctgcgaaaaagggtcgtaccctcttctacacgagtttgtggttaggcaattctctaatttattgcaagctgattgcattctctgcaacacttttgatcaacttgaaccaaaggtagtgaaatggatgaatgatcaatggccggtgaagaacattggaccggtggttccatcgaagttcttggataaccggttgccagaagacaaagattacgaactcgagaactccaagacagagccagacgagtctgttttgaagtggttgggaaacaggccggcgaagtcggtggtttacgtggcgtttgggacattggtggctttgagcgaaaaacagatgaaggaaattgcaatggcgattagccaaaccggatatcacttcttgtggtctgttagagaatccgagagaagcaaactaccctctggttttatcgaagaggcagaggagaaagactctggacttgtggctaagtgggttcctcagctagaggttttagcacatgaatcaatcgggtgtttcgtgtcacactgtggatggaactcgacattggaggcactatgcttaggggttccaatggtgggcgtgcctcagtggactgatcagcccacaaatgctaagtttatagaggatgtgtggaagattggggttagagtgaggaccgatggagaagggctttcgagtaaagaagagattgcgagatgcattgttgaggtcatggaaggagagagagggaaagagataaggaagaatgttgagaagcttaaggtgttggctcgcgaagctatctctgaaggaggtagttccgacaagaagattgatgagtttgttgctcttttgacttaacaatttgaaactgagatgtcatcagtttgttagttgattacctaataacggcttctttgtcatctaaatttgaattatcctgttggttccattggttgtcccctgcgaacaaatccatatatgaactctgtattaaaaaacggagatgtttgaatttgaagcataacaagaataaagagctttcttgat

SEQ ID NO: 48905 - protein, 444 aa, Arabidopsis thaliana
  peptide (1)..(444): Ceres Seq. ID no. 14316558
DPLQGHINPMIQLAKRLSKKGITSTLIIASKDHREPYTSDDYSITVHTIHDGFFPHEHPHAKFVDLDRFHNSTSRSLTDFISSAKLSDNPPKALIYDPFMPFALDIAKDLDLYVVAYFTQPWLASLVYYHINEGTYDVPVDRHENPTLASFPGFPLLSQDDLPSFACEKGSYPLLHEFVVRQFSNLLQADCILCNTFDQLEPKVVKWMNDQWPVKNIGPVVPSKFLDNRLPEDKDYELENSKTEPDESVLKWLGNRPAKSVVYVAFGTLVALSEKQMKEIAMAISQTGYHFLWSVRESERSKLPSGFIEEAEEKDSGLVAKWVPQLEVLAHESIGCFVSHCGWNSTLEALCLGVPMVGVPQWTDQPTNAKFIEDVWKIGVRVRTDGEGLSSKEEIARCIVEVMEGERGKEIRKNVEKLKVLAREAISEGGSSDKKIDEFVALLT

SEQ ID NO: 48906 - protein, 435 aa, Arabidopsis thaliana; identical to SEQ ID NO: 48097
  peptide (1)..(435): Ceres Seq. ID no. 14316559

SEQ ID NO: 48907 - protein, 345 aa, Arabidopsis thaliana
  peptide (1)..(345): Ceres Seq. ID no. 14316560
MPFALDIAKDLDLYVVAYFTQPWLASLVYYHINEGTYDVPVDRHENPTLASFPGFPLLSQDDLPSFACEKGSYPLLHEFVVRQFSNLLQADCILCNTFDQLEPKVVKWMNDQWPVKNIGPVVPSKFLDNRLPEDKDYELENSKTEPDESVLKWLGNRPAKSVVYVAFGTLVALSEKQMKEIAMAISQTGYHFLWSVRESERSKLPSGFIEEAEEKDSGLVAKWVPQLEVLAHESIGCFVSHCGWNSTLEALCLGVPMVGVPQWTDQPTNAKFIEDVWKIGVRVRTDGEGLSSKEEIARCIVEVMEGERGKEIRKNVEKLKVLAREAISEGGSSDKKIDEFVALLT

SEQ ID NO: 48908 - DNA, 922 bp, Arabidopsis thaliana
  misc_feature (1)..(922): Ceres Seq. ID no. 13579117
  misc_feature (1)..(922): Ortholog of  Ceres SEQ ID NO 14308225 as cited in SEQ ID NO 59062
  misc_feature (1)..(922): Ortholog of  Ceres SEQ ID NO 15176615 as cited in SEQ ID NO 0
aaaatatcacattctttcttcttctcattttctctaaagattgttgtttgtgtgtgaggctaaggatcaaagatggttttgtgggtatttggatatggttctttgatctggaacccaggttttgattttgatgaaaaactcattggttatatcaaggactataaacgtgtcttcgatctagcgtgtattgatcatagaggtactcctgaacatcctgctaggacttgtacgctggagcaatccaccggagctatttgctggggtgctgcttattgtgttcgtggaggaccagagaaagagaaactagcaatggagtacttggaacgaagagagtgtgaatacgactcaaaaacacttgttgagttttacactgaaaatgacacttccacgccaatcgttaccggagttattgtcttcacgtcaacaccagacaaagtgtcgaacaaatactacttaggtccagctccattggaagaaatggcgaggcaaatcgctacggcttcgggaccttgtgggaacaaccgagagtatcttttcaagctagagaaagcaatgttcgacattgagcatgaggaagagtatgtgattgagttagcgaatgaggttaggaagcaactcgatttaccggaggaagtgaaggcattgttgaagcctattgtttctcatgtatccgtcaagtctcaagctcatgtttccactcgtcaacgggtctttgcatcatgaagacagcaaaagttatggagctaacttaaaaaagcattgtggtgacgaggctaatgttaactctttatctttcagcttaatatttgatcacatcttgaccttgagatgttttgttttgctctgcatttattgagaattcataacattgtatgatatgagatgcaatttatgagaataataaccgatctttagctctgcc

SEQ ID NO: 48909 - protein, 216 aa, Arabidopsis thaliana
  peptide (1)..(216): Ceres Seq. ID no. 13579118
MVLWVFGYGSLIWNPGFDFDEKLIGYIKDYKRVFDLACIDHRGTPEHPARTCTLEQSTGAICWGAAYCVRGGPEKEKLAMEYLERRECEYDSKTLVEFYTENDTSTPIVTGVIVFTSTPDKVSNKYYLGPAPLEEMARQIATASGPCGNNREYLFKLEKAMFDIEHEEEYVIELANEVRKQLDLPEEVKALLKPIVSHVSVKSQAHVSTRQRVFAS

SEQ ID NO: 48910 - protein, 137 aa, Arabidopsis thaliana
  peptide (1)..(137): Ceres Seq. ID no. 13579119
MEYLERRECEYDSKTLVEFYTENDTSTPIVTGVIVFTSTPDKVSNKYYLGPAPLEEMARQIATASGPCGNNREYLFKLEKAMFDIEHEEEYVIELANEVRKQLDLPEEVKALLKPIVSHVSVKSQAHVSTRQRVFAS

SEQ ID NO: 48911 - DNA, 1245 bp, Arabidopsis thaliana; identical to SEQ ID NO: 36382
  misc_feature (1)..(1245): Ceres Seq. ID no. 12600816
  misc_feature (1)..(1245): Ortholog of  Ceres SEQ ID NO 12608620 as cited in SEQ ID NO 60192
  misc_feature (1)..(1245): Ortholog of  Ceres SEQ ID NO 13662898 as cited in SEQ ID NO 66199
  misc_feature (1)..(1245): Ortholog of  Ceres SEQ ID NO 14313358 as cited in SEQ ID NO 67347
  misc_feature (1)..(1245): Ortholog of  Ceres SEQ ID NO 13654314 as cited in SEQ ID NO 67914

SEQ ID NO: 48912 - protein, 285 aa, Arabidopsis thaliana; identical to SEQ ID NO: 36383
  peptide (1)..(285): Ceres Seq. ID no. 12600817

SEQ ID NO: 48913 - protein, 228 aa, Arabidopsis thaliana; identical to SEQ ID NO: 36384
  peptide (1)..(228): Ceres Seq. ID no. 12600818

SEQ ID NO: 48914 - protein, 185 aa, Arabidopsis thaliana; identical to SEQ ID NO: 36385
  peptide (1)..(185): Ceres Seq. ID no. 12600819

SEQ ID NO: 48915 - DNA, 2202 bp, Arabidopsis thaliana
  misc_feature (1)..(2202): Ceres Seq. ID no. 12574853
  misc_feature (1)..(2202): Ortholog of  Ceres SEQ ID NO 14314144 as cited in SEQ ID NO 54403
  misc_feature (1)..(2202): Ortholog of  Ceres SEQ ID NO 15169663 as cited in SEQ ID NO 64659
  misc_feature (1)..(2202): Ortholog of  Ceres SEQ ID NO 13656177 as cited in SEQ ID NO 64997
  misc_feature (1)..(2202): Ortholog of  Ceres SEQ ID NO 15225015 as cited in SEQ ID NO 0
agaacactctcgaattcgaagaaaatacgtagcaaaacccttatttttgaatttcagacgaattccgatttcttaatcaaaaatccgataagagctttggatttggcggcgaataagaaaacatggcgaatttggatatggagcaacattcatccgaaaacgaagagattaagaagaagaagcataagaaaagagcgagagacgaagctaagaaactaaagcagccagcaatggaagaagaacccgatcatgaagatggtgatgccaaagagaacaatgcgttaattgacgaagaaccgaagaagaagaagaagaagaaaaataagaagcgtggagatactgatgatggagaggacgaagcggtagcagaagaagagccgaagaagaagaagaagaaaaataaaaagctacagcagcgtggagatactaatgacgaagaggacgaagtgatagcagaagaagaagagccgaagaagaagaagaagaaacagaggaaggacacggaagcgaagtctgaagaagaagaagtagaagataaggaagaagaaaaaaaattggaagaaactagcataatgactaataaaacgtttgagtcattgtcattatctgataacacttataaatctatcaaggagatgggttttgcacgcatgactcagatacaagctaaagcaattccaccattgatgatgggagaagatgtacttggagctgccaggaccggttctggtaaaaccttagcttttcttattcctgctgttgagcttctttaccgtgttaagtttactcctcgcaatggaactggtgttcttgttatttgcccaacaagagagcttgctattcagtcttatggagtggcaaaagaacttcttaagtatcattcacagactgtgggaaaagttattggcggtgagaaaagaaagacagaagctgagattcttgcgaaaggtgttaatttattagtagctacccctggaagacttctcgaccaccttgaaaatactaatggttttattttcaagaacttaaagtttcttgtaatggatgaggctgataggatattggaacagaactttgaagaagacctcaagaagattttgaaccttctaccaaagactagacagacgtcactattttcagccacacagagcgcaaaggttgaggatcttgctcgggtgtcacttacctcacctgtttatattgatgtggatgaaggacgaaaagaggttacaaatgaaggcttggagcaaggttattgcgttgtgccaagtgcgatgcggttactttttttacttaccttcttgaagagattccaagggaaaaagaaaattatggtgtttttctctacatgcaagtcgacaaagttccacgccgagctctttcgatatatcaaattcgattgccttgaaatccgtggagggatagaccagaacaaaagaactccaacatttttgcaattcataaaggcggaaaccggtattttgttgtgtactaatgtcgctgcccgaggtcttgattttcctcatgtggactggattgtgcagtatgatcctcctgataacccaacggattatattcatcgagttggtagaacagctcgtggtgaaggagcaaaaggaaaggctctgcttgtcctaactccacaggagttgaagtttatacagtatctcaaggcggcgaaaattcctgttgaggaacatgaatttgaagaaaagaaattgctcgatgtgaaaccttttgtggagaatttgatatctgaaaactatgcattgaaggagtcagcaaaagaagcatacaagacatacatttcaggatatgattctcactctatgaaagatgtctttaatgttcaccaactcaatctcacggaggttgcgacttcgtttggtttctcagatcctcccaaagttgctctgaagatagatcgaggagggtacagaagtaagagagaaccggttaataagtttaagagaggtcgtggtggtggtagacccggcggtaaaagcaagttcgagaggtactaaaaatacagttgcacaaacaacgtcatacttagtagtatggcacatgccttttaacgaatgttgtatcttatttttggattcatttacgattgtgttgtcttaagctgtttccagagatatcagacgagataccagttttgtccccgttacttagaaatattgatcattttgttttgcg

SEQ ID NO: 48916 - protein, 633 aa, Arabidopsis thaliana
  peptide (1)..(633): Ceres Seq. ID no. 12574854
MANLDMEQHSSENEEIKKKKHKKRARDEAKKLKQPAMEEEPDHEDGDAKENNALIDEEPKKKKKKKNKKRGDTDDGEDEAVAEEEPKKKKKKNKKLQQRGDTNDEEDEVIAEEEEPKKKKKKQRKDTEAKSEEEEVEDKEEEKKLEETSIMTNKTFESLSLSDNTYKSIKEMGFARMTQIQAKAIPPLMMGEDVLGAARTGSGKTLAFLIPAVELLYRVKFTPRNGTGVLVICPTRELAIQSYGVAKELLKYHSQTVGKVIGGEKRKTEAEILAKGVNLLVATPGRLLDHLENTNGFIFKNLKFLVMDEADRILEQNFEEDLKKILNLLPKTRQTSLFSATQSAKVEDLARVSLTSPVYIDVDEGRKEVTNEGLEQGYCVVPSAMRLLFLLTFLKRFQGKKKIMVFFSTCKSTKFHAELFRYIKFDCLEIRGGIDQNKRTPTFLQFIKAETGILLCTNVAARGLDFPHVDWIVQYDPPDNPTDYIHRVGRTARGEGAKGKALLVLTPQELKFIQYLKAAKIPVEEHEFEEKKLLDVKPFVENLISENYALKESAKEAYKTYISGYDSHSMKDVFNVHQLNLTEVATSFGFSDPPKVALKIDRGGYRSKREPVNKFKRGRGGGRPGGKSKFERY

SEQ ID NO: 48917 - protein, 628 aa, Arabidopsis thaliana
  peptide (1)..(628): Ceres Seq. ID no. 12574855
MEQHSSENEEIKKKKHKKRARDEAKKLKQPAMEEEPDHEDGDAKENNALIDEEPKKKKKKKNKKRGDTDDGEDEAVAEEEPKKKKKKNKKLQQRGDTNDEEDEVIAEEEEPKKKKKKQRKDTEAKSEEEEVEDKEEEKKLEETSIMTNKTFESLSLSDNTYKSIKEMGFARMTQIQAKAIPPLMMGEDVLGAARTGSGKTLAFLIPAVELLYRVKFTPRNGTGVLVICPTRELAIQSYGVAKELLKYHSQTVGKVIGGEKRKTEAEILAKGVNLLVATPGRLLDHLENTNGFIFKNLKFLVMDEADRILEQNFEEDLKKILNLLPKTRQTSLFSATQSAKVEDLARVSLTSPVYIDVDEGRKEVTNEGLEQGYCVVPSAMRLLFLLTFLKRFQGKKKIMVFFSTCKSTKFHAELFRYIKFDCLEIRGGIDQNKRTPTFLQFIKAETGILLCTNVAARGLDFPHVDWIVQYDPPDNPTDYIHRVGRTARGEGAKGKALLVLTPQELKFIQYLKAAKIPVEEHEFEEKKLLDVKPFVENLISENYALKESAKEAYKTYISGYDSHSMKDVFNVHQLNLTEVATSFGFSDPPKVALKIDRGGYRSKREPVNKFKRGRGGGRPGGKSKFERY

SEQ ID NO: 48918 - protein, 597 aa, Arabidopsis thaliana
  peptide (1)..(597): Ceres Seq. ID no. 12574856
MEEEPDHEDGDAKENNALIDEEPKKKKKKKNKKRGDTDDGEDEAVAEEEPKKKKKKNKKLQQRGDTNDEEDEVIAEEEEPKKKKKKQRKDTEAKSEEEEVEDKEEEKKLEETSIMTNKTFESLSLSDNTYKSIKEMGFARMTQIQAKAIPPLMMGEDVLGAARTGSGKTLAFLIPAVELLYRVKFTPRNGTGVLVICPTRELAIQSYGVAKELLKYHSQTVGKVIGGEKRKTEAEILAKGVNLLVATPGRLLDHLENTNGFIFKNLKFLVMDEADRILEQNFEEDLKKILNLLPKTRQTSLFSATQSAKVEDLARVSLTSPVYIDVDEGRKEVTNEGLEQGYCVVPSAMRLLFLLTFLKRFQGKKKIMVFFSTCKSTKFHAELFRYIKFDCLEIRGGIDQNKRTPTFLQFIKAETGILLCTNVAARGLDFPHVDWIVQYDPPDNPTDYIHRVGRTARGEGAKGKALLVLTPQELKFIQYLKAAKIPVEEHEFEEKKLLDVKPFVENLISENYALKESAKEAYKTYISGYDSHSMKDVFNVHQLNLTEVATSFGFSDPPKVALKIDRGGYRSKREPVNKFKRGRGGGRPGGKSKFERY

SEQ ID NO: 48919 - DNA, 1679 bp, Arabidopsis thaliana
  misc_feature (1)..(1679): Ceres Seq. ID no. 15168844
  misc_feature (1)..(1679): Ortholog of  Ceres SEQ ID NO 13599324 as cited in SEQ ID NO 0
ggttaagcttttaagaatctctactcacattttctctgtaaaaatgggaactaggttccaatcattcttgctcgtgttcttgctttcatgtttaatcctcatatcaactgcctcgtgtgagcgaaatggtgatggaacgattagaattggattgaagaagaggaaactagaccggagcaacaggctagcttctcagctttttttgaaaaaccgagggtctcattggtctcccaaacactattttcgcctgaacgatgaaaatgcggatatggttccgctgaaaaactatttggatgctcaatactatggtgacattaccattggtactcctcctcagaagttcactgtgatctttgatactggtagctccaatctctggataccatctactaaatgttacctatcggttgcttgttatttccactccaagtacaaggctagccagtcatcgtcatatagaaagaacggaaaacccgcgtctatccgctatgggacgggtgctatttctggttactttagcaatgatgatgttaaagttggtgatattgttgtgaaagagcaggaattcatagaggctactagtgagcctggtataacattcttgctagcaaagtttgatggtatcctcggtttgggtttcaaagagatttctgtaggaaactcaactccggtttggtataacatggtagaaaaaggtttagttaaggaaccgattttttcgttctggcttaaccgtaacccgaaagatccagaaggcggtgagattgttttcggtggagtcgacccgaagcacttcaaaggagagcatacttttgttcctgtgacacataaaggttactggcagtttgacatgggtgatctccaaattgctggcgaaccaaccggatattgtgctaaaggttgttctgctattgctgattccggaacttctctgctcaccggtccatcgactgtcatcacgatgatcaatcacgcgataggagcacaaggaattgtaagccgtgaatgcaaggccgtggtggatcaatacggaaaaaccatgttgaattctcttctagctcagaaagtatgctcacaaattggagtctgcgcttatgatggtacacagagtgtgagtatggggatccagtcagttgtagacgatggaacatcgggtcttttaaaccaagcgatgtgcagtgcttgcgaaatggcagccgtgtggatggagagcgaattgactcagaatcaaacacaagaacgcatactcgcttatgctgctgagctatgtgaccatataccaacccaaaaccaacaatcagcagtggactgtgggagggtttcgtcgatgcctatagtcacattctcaattggtggcagaagctttgatctaactcctcaagactatatattcaagatcggggaaggagttgagtctcagtgcaccagcggtttcacggcaatggatattgctccgcctcgtggacctctctggatcttgggtgatatcttcatgggaccataccacacagtgttcgattatgggaaaggaagagttggattcgccaaagctgcttaaacaatatctcttctttaataccctcgttttttatatgatgtttgtgaatgtgtttgtaataacttaaaacatattgctatcctagaatggtatcatcttaatacagatttttatttggttt

SEQ ID NO: 48920 - protein, 518 aa, Arabidopsis thaliana
  peptide (1)..(518): Ceres Seq. ID no. 15168845
VKLLRISTHIFSVKMGTRFQSFLLVFLLSCLILISTASCERNGDGTIRIGLKKRKLDRSNRLASQLFLKNRGSHWSPKHYFRLNDENADMVPLKNYLDAQYYGDITIGTPPQKFTVIFDTGSSNLWIPSTKCYLSVACYFHSKYKASQSSSYRKNGKPASIRYGTGAISGYFSNDDVKVGDIVVKEQEFIEATSEPGITFLLAKFDGILGLGFKEISVGNSTPVWYNMVEKGLVKEPIFSFWLNRNPKDPEGGEIVFGGVDPKHFKGEHTFVPVTHKGYWQFDMGDLQIAGEPTGYCAKGCSAIADSGTSLLTGPSTVITMINHAIGAQGIVSRECKAVVDQYGKTMLNSLLAQKVCSQIGVCAYDGTQSVSMGIQSVVDDGTSGLLNQAMCSACEMAAVWMESELTQNQTQERILAYAAELCDHIPTQNQQSAVDCGRVSSMPIVTFSIGGRSFDLTPQDYIFKIGEGVESQCTSGFTAMDIAPPRGPLWILGDIFMGPYHTVFDYGKGRVGFAKAA

SEQ ID NO: 48921 - protein, 504 aa, Arabidopsis thaliana
  peptide (1)..(504): Ceres Seq. ID no. 15168846
MGTRFQSFLLVFLLSCLILISTASCERNGDGTIRIGLKKRKLDRSNRLASQLFLKNRGSHWSPKHYFRLNDENADMVPLKNYLDAQYYGDITIGTPPQKFTVIFDTGSSNLWIPSTKCYLSVACYFHSKYKASQSSSYRKNGKPASIRYGTGAISGYFSNDDVKVGDIVVKEQEFIEATSEPGITFLLAKFDGILGLGFKEISVGNSTPVWYNMVEKGLVKEPIFSFWLNRNPKDPEGGEIVFGGVDPKHFKGEHTFVPVTHKGYWQFDMGDLQIAGEPTGYCAKGCSAIADSGTSLLTGPSTVITMINHAIGAQGIVSRECKAVVDQYGKTMLNSLLAQKVCSQIGVCAYDGTQSVSMGIQSVVDDGTSGLLNQAMCSACEMAAVWMESELTQNQTQERILAYAAELCDHIPTQNQQSAVDCGRVSSMPIVTFSIGGRSFDLTPQDYIFKIGEGVESQCTSGFTAMDIAPPRGPLWILGDIFMGPYHTVFDYGKGRVGFAKAA

SEQ ID NO: 48922 - protein, 429 aa, Arabidopsis thaliana
  peptide (1)..(429): Ceres Seq. ID no. 15168847
MVPLKNYLDAQYYGDITIGTPPQKFTVIFDTGSSNLWIPSTKCYLSVACYFHSKYKASQSSSYRKNGKPASIRYGTGAISGYFSNDDVKVGDIVVKEQEFIEATSEPGITFLLAKFDGILGLGFKEISVGNSTPVWYNMVEKGLVKEPIFSFWLNRNPKDPEGGEIVFGGVDPKHFKGEHTFVPVTHKGYWQFDMGDLQIAGEPTGYCAKGCSAIADSGTSLLTGPSTVITMINHAIGAQGIVSRECKAVVDQYGKTMLNSLLAQKVCSQIGVCAYDGTQSVSMGIQSVVDDGTSGLLNQAMCSACEMAAVWMESELTQNQTQERILAYAAELCDHIPTQNQQSAVDCGRVSSMPIVTFSIGGRSFDLTPQDYIFKIGEGVESQCTSGFTAMDIAPPRGPLWILGDIFMGPYHTVFDYGKGRVGFAKAA

SEQ ID NO: 48923 - DNA, 2011 bp, Arabidopsis thaliana
  misc_feature (1)..(2011): Ceres Seq. ID no. 12601061
  misc_feature (1)..(2011): Ortholog of  Ceres SEQ ID NO 12638003 as cited in SEQ ID NO 1026
attcgctattttatcaccaatcttcttgaatcctctcatccaatcgtctgattctcatctttctccgttacttgtggatcttacgcaatgtatagagtttttgcgagccgagcactgagagctaagtctctctgtgacaaatcatccacctcgcttgcttctttgactctctccagattgaatcattccataccttttgctaccgtagatgccgaggagctctctggtgctcatcctgctgaagtacagagctttgtgcagggaaagtggataggatcgtcaaatcataacacgcttctagatcctctaaatggagaaccgtttatcaaagttgcggaagtggatgaatcaggaactcagccatttgtggacagcttatcccagtgcccgaaacatggtctccataaccctttcaaatctccagagagataccttttatatggagatatctcgacaaaggcagctcatatgctcgccttacctaaggttgctgatttcttcgcgaggttaattcaaagggttgctccaaagagttaccagcaagctgctggagaagtctttgtcacacggaagtttttagaaaacttttgtggtgatcaggtgcggttcctggcacggtcttttgcaatccctgggaatcatcttgggcagcaaagtcatggttaccgttggccttatggtcctgtaacgattgttacaccatttaattttccacttgagattccactacttcagttgatgggggcattatacatgggtaacaaacctcttcttaaagtggacagcaaggtaagcattgttatggagcaaatgatgcgattgctccactattgtggtttacccgctgaagatgtggactttataaattctgatgggaagacaatgaacaagatattgttagaggcgaacccacggatgaccctcttcacgggtagttctagagtagctgaaaagttggcacttgaccttaagggtcgaatcagattggaagatgctggatttgattggaaagtcttaggaccagatgttcaggaggttgattatgttgcatggcaatgtgatcaagatgcatacgcgtgcagtggacagaagtgttctgcacagtctatgctttttgttcatgagaactggtcaaaaacccctcttgtttccaaattaaaagaactagcggaaagacgcaaactggaagacttaaccattggtcctgtccttacatttacaactgaggcaatgttggagcacatggagaatctgcttcagattcctggctcaaagctactctttggtggcaaggaattgaagaatcattcgattccttcaatctacggagctttggagccaactgcagtttatgttcccattgaagaaatcttgaaggataataaaacctacgaactcgtcaccaaagaaatctttggaccatttcagattgtaacggaatacaaaaaggatcaacttcctctagtgttggaagcattggagaggatgcacgctcatctaactgcagctgttgtttcaaacgatcccatctttcttcaggaagtaatagggaactcagtgaatgggactacatatgctggactaagaggaagaacaactggagctcctcagaatcactggtttggacctgcgggggacccgagaggggccgggatagggacaccagaggctataaagctggtttggtcatgccacagagaagtcatctacgattatggtccggttccacaaggttgggaacttcctccatctacttagaagtggtgtgtccactaataattaataaactaagatcttagtgtgctgttgcatcaaataaatatgagttttgtagttttatctctacgagtagtttccgtgtgagggaataagagcttgaaacatgaagttttcaacgacgttgacttagtcaaggggtagagggattaagacagagagagaactattgtaaaactcagtccaccagaaattttcttcagctcaaagccagacaataatacaaatgtttttg

SEQ ID NO: 48924 - protein, 556 aa, Arabidopsis thaliana
  peptide (1)..(556): Ceres Seq. ID no. 12601062
MYRVFASRALRAKSLCDKSSTSLASLTLSRLNHSIPFATVDAEELSGAHPAEVQSFVQGKWIGSSNHNTLLDPLNGEPFIKVAEVDESGTQPFVDSLSQCPKHGLHNPFKSPERYLLYGDISTKAAHMLALPKVADFFARLIQRVAPKSYQQAAGEVFVTRKFLENFCGDQVRFLARSFAIPGNHLGQQSHGYRWPYGPVTIVTPFNFPLEIPLLQLMGALYMGNKPLLKVDSKVSIVMEQMMRLLHYCGLPAEDVDFINSDGKTMNKILLEANPRMTLFTGSSRVAEKLALDLKGRIRLEDAGFDWKVLGPDVQEVDYVAWQCDQDAYACSGQKCSAQSMLFVHENWSKTPLVSKLKELAERRKLEDLTIGPVLTFTTEAMLEHMENLLQIPGSKLLFGGKELKNHSIPSIYGALEPTAVYVPIEEILKDNKTYELVTKEIFGPFQIVTEYKKDQLPLVLEALERMHAHLTAAVVSNDPIFLQEVIGNSVNGTTYAGLRGRTTGAPQNHWFGPAGDPRGAGIGTPEAIKLVWSCHREVIYDYGPVPQGWELPPST

SEQ ID NO: 48925 - protein, 429 aa, Arabidopsis thaliana
  peptide (1)..(429): Ceres Seq. ID no. 12601063
MLALPKVADFFARLIQRVAPKSYQQAAGEVFVTRKFLENFCGDQVRFLARSFAIPGNHLGQQSHGYRWPYGPVTIVTPFNFPLEIPLLQLMGALYMGNKPLLKVDSKVSIVMEQMMRLLHYCGLPAEDVDFINSDGKTMNKILLEANPRMTLFTGSSRVAEKLALDLKGRIRLEDAGFDWKVLGPDVQEVDYVAWQCDQDAYACSGQKCSAQSMLFVHENWSKTPLVSKLKELAERRKLEDLTIGPVLTFTTEAMLEHMENLLQIPGSKLLFGGKELKNHSIPSIYGALEPTAVYVPIEEILKDNKTYELVTKEIFGPFQIVTEYKKDQLPLVLEALERMHAHLTAAVVSNDPIFLQEVIGNSVNGTTYAGLRGRTTGAPQNHWFGPAGDPRGAGIGTPEAIKLVWSCHREVIYDYGPVPQGWELPPST

SEQ ID NO: 48926 - protein, 339 aa, Arabidopsis thaliana
  peptide (1)..(339): Ceres Seq. ID no. 12601064
MGALYMGNKPLLKVDSKVSIVMEQMMRLLHYCGLPAEDVDFINSDGKTMNKILLEANPRMTLFTGSSRVAEKLALDLKGRIRLEDAGFDWKVLGPDVQEVDYVAWQCDQDAYACSGQKCSAQSMLFVHENWSKTPLVSKLKELAERRKLEDLTIGPVLTFTTEAMLEHMENLLQIPGSKLLFGGKELKNHSIPSIYGALEPTAVYVPIEEILKDNKTYELVTKEIFGPFQIVTEYKKDQLPLVLEALERMHAHLTAAVVSNDPIFLQEVIGNSVNGTTYAGLRGRTTGAPQNHWFGPAGDPRGAGIGTPEAIKLVWSCHREVIYDYGPVPQGWELPPST

SEQ ID NO: 48927 - DNA, 2543 bp, Arabidopsis thaliana
  misc_feature (1)..(2543): Ceres Seq. ID no. 13579120
  misc_feature (1)..(2543): Ortholog of  Ceres SEQ ID NO 15176095 as cited in SEQ ID NO 59699
ataaatagcccatcaaacccctacaacggattagggctataacattccaccaaacacaaaagatacaagtttaagaccatgaagaagcttacttctctcttccctctcctctttctcattcccctcttagcctcatgtgctgaagaaaaacaggtgtatattgtctattttggagaacataaaggtgataaagcctttcatgaaattgaagaacatcatcattcttatcttcaatcggttaaagaatccgaagaagacgctagagcatcgctcttgtatagctacaaacatagcatcaatggcttcgcggctgagctaacccctgaccaagcctctaaactagaaaaattagcagaggttgtttcagtattcaagagccatccaagaaaatatgaagcacatacgacacggtcatgggaatttgtaggattggaggaggaagaaaccgacagtgatgttccacgtcgaaaaaatgatgccgatgatcggtttcgtgtgggaagaaattttttgaagaaggcaaagcatggtgatggaatcatcgtcggtgttctcgacagtggtgtgtggccagaatcaaagagtttcaatgacaaaggaatgggaccagttccaaaatcatggaaaggaatctgccaaaccggagttgcctttaactcttctcactgtaaccggaaaattattggagcgaggtattacgtgaaagggtacgaaagatattacggagcgttcaacgctacagcaaacaaagacttcttgtctccaagagatcccgacggacatgggtcccacacagcttctactgccgttggccgtcgagttctcggtgcatccgcacttggcggtttcgccaagggctcggcatcgggcggtgcaccgttagctcgtctagctatttacaaagcttgttgggccaagcccaatgcggaaaaagttgaaggaaatatctgtctagaagaggacatgcttgccgcgatcgatgacgccatcgctgatggcgttcacgtcatcagcatttccatcggaacgaccgagccttttccatttacacaagatggaatcgcgatgggggcgttgcatgcggttaagaggaatattgtggttgctgctagcgctgggaattcagggccaaagccgggaactttgtcgaatctggcaccgtggattataactgtcggagctagtactcttgatcgggctttcgttggcggtcttgttcttggcaatggctatacaatcaagacggattcgataacggcatttaaaatggacaaatttgcccctcttgtttacgcttctaacgtggttgttcccggcattgcattgaacgagacatcgcaatgtttaccaaattcactaaaaccggagcttgtgagtggtaaagtggtcttgtgtttaagaggagccggttcaagaatcggtaaaggcatggaggtaaaacgagctggaggagccggtatgattctcggaaatatcgcagctaacggcaatgaagttccttcagactctcattttgttccgactgccggggttaccccaaccgtggtcgataaaattctggagtacatcaaaaccgataaaaacccgaaggcttttatcaaaccggggaaaacggtttacaaataccaagcagctccttccatgaccgggttttctagccgcggcccaaacgttgtagaccccaacattctaaagccggatataaccgccccaggactgtacatactggctgcatggagcggagcagattcaccgagcaaaatgtcagtagatcaaagagttgcaggttataacatctactcaggaacttcaatgtcttgtcctcatgtcgctggtgcaattgctcttctcaaagccattcatcccaaatggagtagcgctgctataagatcagctcttatgaccactgcttggatgactaacgacaagaagaaaccgatccaagacactactggtttaccagcaaacccatttgcacttgggtcaggacatttcagaccaacaaaagctgcagatcccggtttagtctatgatgcatcataccgagcttaccttctctatggctgctcggttaacatcaccaatattgacccgacattcaaatgtcctagtaaaattccgcccggttataatcacaattacccgtcaatcgcggtcccgaatctcaagaagacggtgaccgttaaaagaacagttacaaatgttggaactggtaactcaacaagcacatacttattcagcgttaaaccgccatcgggtatttcggttaaggctataccgaatatattgtcctttaaccggattggtcagaagcagcggtttaaaatcgttattaaaccactgaagaaccaggtgatgaatgcgactgaaaagggtcaataccaatttggatggtttagttggacagataaagtccatgttgtgaggagtccaattgctgtttccttagcttgattgttgtttgcttatttgggatggttttattagtcggtttggatgttatagaggtcaaagtgaaagaaatagaaaatatttttctgatc

SEQ ID NO: 48928 - protein, 791 aa, Arabidopsis thaliana
  peptide (1)..(791): Ceres Seq. ID no. 13579121
MKKLTSLFPLLFLIPLLASCAEEKQVYIVYFGEHKGDKAFHEIEEHHHSYLQSVKESEEDARASLLYSYKHSINGFAAELTPDQASKLEKLAEVVSVFKSHPRKYEAHTTRSWEFVGLEEEETDSDVPRRKNDADDRFRVGRNFLKKAKHGDGIIVGVLDSGVWPESKSFNDKGMGPVPKSWKGICQTGVAFNSSHCNRKIIGARYYVKGYERYYGAFNATANKDFLSPRDPDGHGSHTASTAVGRRVLGASALGGFAKGSASGGAPLARLAIYKACWAKPNAEKVEGNICLEEDMLAAIDDAIADGVHVISISIGTTEPFPFTQDGIAMGALHAVKRNIVVAASAGNSGPKPGTLSNLAPWIITVGASTLDRAFVGGLVLGNGYTIKTDSITAFKMDKFAPLVYASNVVVPGIALNETSQCLPNSLKPELVSGKVVLCLRGAGSRIGKGMEVKRAGGAGMILGNIAANGNEVPSDSHFVPTAGVTPTVVDKILEYIKTDKNPKAFIKPGKTVYKYQAAPSMTGFSSRGPNVVDPNILKPDITAPGLYILAAWSGADSPSKMSVDQRVAGYNIYSGTSMSCPHVAGAIALLKAIHPKWSSAAIRSALMTTAWMTNDKKKPIQDTTGLPANPFALGSGHFRPTKAADPGLVYDASYRAYLLYGCSVNITNIDPTFKCPSKIPPGYNHNYPSIAVPNLKKTVTVKRTVTNVGTGNSTSTYLFSVKPPSGISVKAIPNILSFNRIGQKQRFKIVIKPLKNQVMNATEKGQYQFGWFSWTDKVHVVRSPIAVSLA

SEQ ID NO: 48929 - protein, 617 aa, Arabidopsis thaliana
  peptide (1)..(617): Ceres Seq. ID no. 13579122
MGPVPKSWKGICQTGVAFNSSHCNRKIIGARYYVKGYERYYGAFNATANKDFLSPRDPDGHGSHTASTAVGRRVLGASALGGFAKGSASGGAPLARLAIYKACWAKPNAEKVEGNICLEEDMLAAIDDAIADGVHVISISIGTTEPFPFTQDGIAMGALHAVKRNIVVAASAGNSGPKPGTLSNLAPWIITVGASTLDRAFVGGLVLGNGYTIKTDSITAFKMDKFAPLVYASNVVVPGIALNETSQCLPNSLKPELVSGKVVLCLRGAGSRIGKGMEVKRAGGAGMILGNIAANGNEVPSDSHFVPTAGVTPTVVDKILEYIKTDKNPKAFIKPGKTVYKYQAAPSMTGFSSRGPNVVDPNILKPDITAPGLYILAAWSGADSPSKMSVDQRVAGYNIYSGTSMSCPHVAGAIALLKAIHPKWSSAAIRSALMTTAWMTNDKKKPIQDTTGLPANPFALGSGHFRPTKAADPGLVYDASYRAYLLYGCSVNITNIDPTFKCPSKIPPGYNHNYPSIAVPNLKKTVTVKRTVTNVGTGNSTSTYLFSVKPPSGISVKAIPNILSFNRIGQKQRFKIVIKPLKNQVMNATEKGQYQFGWFSWTDKVHVVRSPIAVSLA

SEQ ID NO: 48930 - protein, 496 aa, Arabidopsis thaliana
  peptide (1)..(496): Ceres Seq. ID no. 13579123
MLAAIDDAIADGVHVISISIGTTEPFPFTQDGIAMGALHAVKRNIVVAASAGNSGPKPGTLSNLAPWIITVGASTLDRAFVGGLVLGNGYTIKTDSITAFKMDKFAPLVYASNVVVPGIALNETSQCLPNSLKPELVSGKVVLCLRGAGSRIGKGMEVKRAGGAGMILGNIAANGNEVPSDSHFVPTAGVTPTVVDKILEYIKTDKNPKAFIKPGKTVYKYQAAPSMTGFSSRGPNVVDPNILKPDITAPGLYILAAWSGADSPSKMSVDQRVAGYNIYSGTSMSCPHVAGAIALLKAIHPKWSSAAIRSALMTTAWMTNDKKKPIQDTTGLPANPFALGSGHFRPTKAADPGLVYDASYRAYLLYGCSVNITNIDPTFKCPSKIPPGYNHNYPSIAVPNLKKTVTVKRTVTNVGTGNSTSTYLFSVKPPSGISVKAIPNILSFNRIGQKQRFKIVIKPLKNQVMNATEKGQYQFGWFSWTDKVHVVRSPIAVSLA

SEQ ID NO: 48931 - DNA, 2113 bp, Arabidopsis thaliana
  misc_feature (1)..(2113): Ceres Seq. ID no. 14310113
  misc_feature (1)..(2113): Ortholog of  Ceres SEQ ID NO 15176563 as cited in SEQ ID NO 58992
gacgacggttctccgagagagagattttttaaaaatcaaattgcaacagaagagagataaaaggaagaaccctaatcgatttcgcgctctgattcgttctactttttccactgattaatctcaaaaaatggcgagtgagagttcgcaatcttcctcgccgtcgtcatctcaacctccgtcatctgtaccttctccgtcgccgggtaacaacgtcggcgatacgtttataggaagtttcatcagtctaatttctaagtacgagatccgttacgaaggcattctctaccatctcaacgttcaggactcgacgctaggtctaaaaaacgtaagatcatgtggaacggaggggaggaagaaagatgggccgcaaattccgccatgtgataaagtttacgattacattctttttcgtggaagtgacatcaaggatctccaagttaacccatctccatctgctcaatcaagacaagagattcaaagtgaacaagacgtcaatcagtcccctcactctaggccagctatgactatgagctctccgatttctggctatgatagcggttatggtttggggagaggatcacaatggatcaatacacctgctttgagtagtaaaccggttcctgtcacacaacattcatcagtccctttaagcttccagcctccttcagctaatgctggaagtttgacagaatcaccagtgagcttaattgattcaactcaaagtaatgctggttcctcgatgcccatgccttcttttgtgcaaggtaacaaatttgcttccagtggtgtccctcttggtatgatgcagaagccagtttcatcctcctcgaccatacccaatggtccgcagattatagattatttttcttcaccaatcatggggttagtggatgattcatcacaggttgttactcgttcacctgacgtctcttccaatcaatcatactcttccaacccttctcctcttggtcaaacacaactccatactccacctggccttgcttcagtatcctctaacctttctccaccttctgaagcgcagctttctgctccaaatattcagaaaatttaccccagtgcaccccaggctattggtaaagttgtctatgaccctcagtctaatcatcctcaccgatctaaacctcatgagttacctgctgtggcttctaattcagctcctgtgattcctggtccattgtcaaaatcgcctgagtcatttttcggtatggatccgtcactgcaatctaggcagcagatggtatataggggtcaagagatgtttgctgcaactaacccggcatcagcgaatgtgccatcacaaagttttgctcccagaaatcatgcaccattgctgcctcttccagtttcagctcatcagtctcggatccctagttctagcattgagtacactgaagaatttgattttgaagcaatgaatgagaagttcaagaagagtgaactatggggttatcttggaagaaataaccagaggaatcaaaatgattatggggaagaaactgcgattgagccaaacgcagaagggaagcctgcatataacaaggatgacttttttgacacaatctcgtgcaatcaacttgaccgtgtggcaagaagcggacaacagcacaaccagtttcccgaacacatgagacaagttcctgaggcatttggtaataattttcaaaggccacctccactacaaccaggtcagggtgcatatctcgctgcacaaaccaattacagaggcggataccataataacaacaacaacaactactactcaaactcgggttatggttactactctggtgggagaggccgaggcagaaacacacatttctgacctgctgagtttctatcttccaaggctttattggtcactcgcgtacacacatttctactcttagcccttctttaaagttttaaattcagctttttgggtaaaaacagttgtatggttaccacatcgcgagatgtgtaggcatatcatattggcaagttcatgttcctttttttaatctgatgaactttagcctcaggagagaatgtttgttcatgtagagaaaacaaaaagtactacgaacctttttggtaaacgcaaatcattaagtac

SEQ ID NO: 48932 - protein, 571 aa, Arabidopsis thaliana
  peptide (1)..(571): Ceres Seq. ID no. 14310114
MASESSQSSSPSSSQPPSSVPSPSPGNNVGDTFIGSFISLISKYEIRYEGILYHLNVQDSTLGLKNVRSCGTEGRKKDGPQIPPCDKVYDYILFRGSDIKDLQVNPSPSAQSRQEIQSEQDVNQSPHSRPAMTMSSPISGYDSGYGLGRGSQWINTPALSSKPVPVTQHSSVPLSFQPPSANAGSLTESPVSLIDSTQSNAGSSMPMPSFVQGNKFASSGVPLGMMQKPVSSSSTIPNGPQIIDYFSSPIMGLVDDSSQVVTRSPDVSSNQSYSSNPSPLGQTQLHTPPGLASVSSNLSPPSEAQLSAPNIQKIYPSAPQAIGKVVYDPQSNHPHRSKPHELPAVASNSAPVIPGPLSKSPESFFGMDPSLQSRQQMVYRGQEMFAATNPASANVPSQSFAPRNHAPLLPLPVSAHQSRIPSSSIEYTEEFDFEAMNEKFKKSELWGYLGRNNQRNQNDYGEETAIEPNAEGKPAYNKDDFFDTISCNQLDRVARSGQQHNQFPEHMRQVPEAFGNNFQRPPPLQPGQGAYLAAQTNYRGGYHNNNNNNYYSNSGYGYYSGGRGRGRNTHF

SEQ ID NO: 48933 - protein, 440 aa, Arabidopsis thaliana
  peptide (1)..(440): Ceres Seq. ID no. 14310115
MTMSSPISGYDSGYGLGRGSQWINTPALSSKPVPVTQHSSVPLSFQPPSANAGSLTESPVSLIDSTQSNAGSSMPMPSFVQGNKFASSGVPLGMMQKPVSSSSTIPNGPQIIDYFSSPIMGLVDDSSQVVTRSPDVSSNQSYSSNPSPLGQTQLHTPPGLASVSSNLSPPSEAQLSAPNIQKIYPSAPQAIGKVVYDPQSNHPHRSKPHELPAVASNSAPVIPGPLSKSPESFFGMDPSLQSRQQMVYRGQEMFAATNPASANVPSQSFAPRNHAPLLPLPVSAHQSRIPSSSIEYTEEFDFEAMNEKFKKSELWGYLGRNNQRNQNDYGEETAIEPNAEGKPAYNKDDFFDTISCNQLDRVARSGQQHNQFPEHMRQVPEAFGNNFQRPPPLQPGQGAYLAAQTNYRGGYHNNNNNNYYSNSGYGYYSGGRGRGRNTHF

SEQ ID NO: 48934 - protein, 438 aa, Arabidopsis thaliana
  peptide (1)..(438): Ceres Seq. ID no. 14310116
MSSPISGYDSGYGLGRGSQWINTPALSSKPVPVTQHSSVPLSFQPPSANAGSLTESPVSLIDSTQSNAGSSMPMPSFVQGNKFASSGVPLGMMQKPVSSSSTIPNGPQIIDYFSSPIMGLVDDSSQVVTRSPDVSSNQSYSSNPSPLGQTQLHTPPGLASVSSNLSPPSEAQLSAPNIQKIYPSAPQAIGKVVYDPQSNHPHRSKPHELPAVASNSAPVIPGPLSKSPESFFGMDPSLQSRQQMVYRGQEMFAATNPASANVPSQSFAPRNHAPLLPLPVSAHQSRIPSSSIEYTEEFDFEAMNEKFKKSELWGYLGRNNQRNQNDYGEETAIEPNAEGKPAYNKDDFFDTISCNQLDRVARSGQQHNQFPEHMRQVPEAFGNNFQRPPPLQPGQGAYLAAQTNYRGGYHNNNNNNYYSNSGYGYYSGGRGRGRNTHF

SEQ ID NO: 48935 - DNA, 2414 bp, Arabidopsis thaliana; identical to SEQ ID NO: 38818
  misc_feature (1)..(2414): Ceres Seq. ID no. 12325652
  misc_feature (1)..(2414): Ortholog of  Ceres SEQ ID NO 14313151 as cited in SEQ ID NO 54664

SEQ ID NO: 48936 - protein, 762 aa, Arabidopsis thaliana; identical to SEQ ID NO: 38819
  peptide (1)..(762): Ceres Seq. ID no. 12325653

SEQ ID NO: 48937 - protein, 746 aa, Arabidopsis thaliana; identical to SEQ ID NO: 38820
  peptide (1)..(746): Ceres Seq. ID no. 12325654

SEQ ID NO: 48938 - protein, 727 aa, Arabidopsis thaliana; identical to SEQ ID NO: 38821
  peptide (1)..(727): Ceres Seq. ID no. 12325655

SEQ ID NO: 48939 - DNA, 2295 bp, Arabidopsis thaliana
  misc_feature (1)..(2295): Ceres Seq. ID no. 14316569
  misc_feature (1)..(2295): Ortholog of  Ceres SEQ ID NO 14308455 as cited in SEQ ID NO 55108
  misc_feature (1)..(2295): Ortholog of  Ceres SEQ ID NO 14316344 as cited in SEQ ID NO 60120
gactcagcgaatcttctcgtcgtcttcttcgtttctctctacctcactcatcgaagtgttagggtttcttcgatttggcagaatattatttcaactatctctgctgaactcgctttcctaacttctctctctgtcactctaactctttgtcggtaccaaattcttcttcactcgaagaactgtttaggtcaagtatgacttaattctgccaaatttctggtgtttattcaaagttcaaagtcaattgaacaaaactttttatcagataaactgaagcaatgtataccgagggagcctctgattttgtcattgaccagagcatgtattatcccacttattactcttcaggttatgattcatctgtgggtcttcagggtgggcaaaatgaaaatgctccctatatctgctatacaccaagttatggatatgcacagtctccctacaatccctacaatccttacataccaggagcttcaataggcgttgattcttcttttgttggattccaacaatattactcagaccctccgtatgaaagtgctgcatcttcgcctacttatgttccatatgttattcagcctgatatggtctcgaatagttcaacagactctttggtagcgaatggtggtcaatctgatggaagaggatccatgcagagaaatggttcagcaattgccggactcccaaaagatgctccaaagtctaccactactggccagtataaacagccaggaatccccaagaatgtttccacaacagcttctgcacattctctccagggaaaaactgcttacgcgaacacactcttgccttatgggaaatcagacattgctaatggggtctcatcaattgcttcatatagttataaaccttgttccaagatttatgatgccagaggtgataacaacacaactggaagtacatatacgagtgaacaaaatcgaggatcgagaacgagaagatcaagaaatcaactaattgtcaaagcatatacaaccaaagctggaaatgctgatgcggaaggaaatattgtgataaatcctgatcgatataataaagaagatttcagtattgaatacagcgatgccaggttttttgtgattaagtcgtatagtgaagatgatgttcacaagagcatcaaatatggtgtctggtcatctacattgaatgggaacaagaaattgcagagtgtatatgaagatgctcagagaatagccactgagaagtctcgtgaatgtcctattttcttattcttttctgtcaattccagtggtctgttctgtggcgtggctgagatgaccggtccagtttccttcgaccgagacatggatttttggcagcaagacaaatggagtggaagctttcctgtcaagtggcacattattaaagatgttcctaatagctatttcaggcacattattttacataataacgagaataagccagtgaccaacagccgagacacacaagagataatactgaaacaaggactcgaggtgctaaaactattcaaacatcatgcggaaaagacttcactattagatgattttatgtactacgaagaccgccagagactcatgcaggaagagagagctagacttccatttaggacctttcgcaggccatttcccgtgctcaatctagatttttctgacagaagcaagaaaagctccaaggatgtcggtaagaagccttcagtgacctctgcagaaacaaaggttgtgcaattaaaaaactcagatggggatgaaaagagcaatacacaggaagcaacagacgaaactactccttccactctgaagtttggctctctcgccattaaaccaactgctggtaccacctttaacccaacccaagccaagcctaaaccgaccccatctctcggctctgaccacaagtcagactcttctgaagaggttactgggtctctggctgatgacattgtcagtgtaggatcgttgcccataaaagtaaagggatctaaagaattatcctccaagatcgcagcggtgggtacaagtcctctctcaactcaagatcagttcagaagtaaaccagggttttgacattgtctttgtctaacttgtttatgcataatagaaagcatggtcgatatggttcgagaaagagaaagagattgagtatgtatagattggttggttttaccttttaaatggtctgattggtcgtttgagaatccttgtttatcgtctcagtttggacaaatgattgttgccagtggttgcgttttggtttgttgggtttgattaaacagttggttccgtcttttgatcg

SEQ ID NO: 48940 - protein, 595 aa, Arabidopsis thaliana
  peptide (1)..(595): Ceres Seq. ID no. 14316570
MYTEGASDFVIDQSMYYPTYYSSGYDSSVGLQGGQNENAPYICYTPSYGYAQSPYNPYNPYIPGASIGVDSSFVGFQQYYSDPPYESAASSPTYVPYVIQPDMVSNSSTDSLVANGGQSDGRGSMQRNGSAIAGLPKDAPKSTTTGQYKQPGIPKNVSTTASAHSLQGKTAYANTLLPYGKSDIANGVSSIASYSYKPCSKIYDARGDNNTTGSTYTSEQNRGSRTRRSRNQLIVKAYTTKAGNADAEGNIVINPDRYNKEDFSIEYSDARFFVIKSYSEDDVHKSIKYGVWSSTLNGNKKLQSVYEDAQRIATEKSRECPIFLFFSVNSSGLFCGVAEMTGPVSFDRDMDFWQQDKWSGSFPVKWHIIKDVPNSYFRHIILHNNENKPVTNSRDTQEIILKQGLEVLKLFKHHAEKTSLLDDFMYYEDRQRLMQEERARLPFRTFRRPFPVLNLDFSDRSKKSSKDVGKKPSVTSAETKVVQLKNSDGDEKSNTQEATDETTPSTLKFGSLAIKPTAGTTFNPTQAKPKPTPSLGSDHKSDSSEEVTGSLADDIVSVGSLPIKVKGSKELSSKIAAVGTSPLSTQDQFRSKPGF

SEQ ID NO: 48941 - protein, 581 aa, Arabidopsis thaliana
  peptide (1)..(581): Ceres Seq. ID no. 14316571
MYYPTYYSSGYDSSVGLQGGQNENAPYICYTPSYGYAQSPYNPYNPYIPGASIGVDSSFVGFQQYYSDPPYESAASSPTYVPYVIQPDMVSNSSTDSLVANGGQSDGRGSMQRNGSAIAGLPKDAPKSTTTGQYKQPGIPKNVSTTASAHSLQGKTAYANTLLPYGKSDIANGVSSIASYSYKPCSKIYDARGDNNTTGSTYTSEQNRGSRTRRSRNQLIVKAYTTKAGNADAEGNIVINPDRYNKEDFSIEYSDARFFVIKSYSEDDVHKSIKYGVWSSTLNGNKKLQSVYEDAQRIATEKSRECPIFLFFSVNSSGLFCGVAEMTGPVSFDRDMDFWQQDKWSGSFPVKWHIIKDVPNSYFRHIILHNNENKPVTNSRDTQEIILKQGLEVLKLFKHHAEKTSLLDDFMYYEDRQRLMQEERARLPFRTFRRPFPVLNLDFSDRSKKSSKDVGKKPSVTSAETKVVQLKNSDGDEKSNTQEATDETTPSTLKFGSLAIKPTAGTTFNPTQAKPKPTPSLGSDHKSDSSEEVTGSLADDIVSVGSLPIKVKGSKELSSKIAAVGTSPLSTQDQFRSKPGF

SEQ ID NO: 48942 - protein, 493 aa, Arabidopsis thaliana
  peptide (1)..(493): Ceres Seq. ID no. 14316572
MVSNSSTDSLVANGGQSDGRGSMQRNGSAIAGLPKDAPKSTTTGQYKQPGIPKNVSTTASAHSLQGKTAYANTLLPYGKSDIANGVSSIASYSYKPCSKIYDARGDNNTTGSTYTSEQNRGSRTRRSRNQLIVKAYTTKAGNADAEGNIVINPDRYNKEDFSIEYSDARFFVIKSYSEDDVHKSIKYGVWSSTLNGNKKLQSVYEDAQRIATEKSRECPIFLFFSVNSSGLFCGVAEMTGPVSFDRDMDFWQQDKWSGSFPVKWHIIKDVPNSYFRHIILHNNENKPVTNSRDTQEIILKQGLEVLKLFKHHAEKTSLLDDFMYYEDRQRLMQEERARLPFRTFRRPFPVLNLDFSDRSKKSSKDVGKKPSVTSAETKVVQLKNSDGDEKSNTQEATDETTPSTLKFGSLAIKPTAGTTFNPTQAKPKPTPSLGSDHKSDSSEEVTGSLADDIVSVGSLPIKVKGSKELSSKIAAVGTSPLSTQDQFRSKPGF

SEQ ID NO: 48943 - DNA, 1845 bp, Arabidopsis thaliana
  misc_feature (1)..(1845): Ceres Seq. ID no. 14310148
  misc_feature (1)..(1845): Ortholog of  Ceres SEQ ID NO 15178728 as cited in SEQ ID NO 67280
gatgttactcttgtctgaatcttcctcaaatctactcatgtagacctccctatctcgatctaaatttccgccaaactttttttaatcccaaagattctttaaacagaatcatcatcaatcatgaaagaaatcaagaagacgatgacgaagcagatgacggcgagacgtgacgacacgccgttacacacggcggttagagaaggcaaaacggaccttcttttggagatgatcggagaacacgacggcgtggagctgaaagagttgttggcggaacaaaaccagtccggtgaaactgctttatacgttgcggctgagtacggtcacaccgacatggttaagattctgatgaaactctccgactctgtcttagccggaaccaaagccaagaacggcttcgatgcctttcacatcgccgccaaaaacggaaatttacaggttcttgatgtgttaatacaggcaaatccagaactttcatttacatttgattcatccaaaacgacggcacttcataccgcggcttcacagggtcatggagagattgtttgtttcttgttggataaaggtgtggacttagctgctattgcgagaagcaatggtaaaaccgctttgcactctgcagctaggaacgggcacacggtgattgtgaaggagttgattgaaaagaaggctggtatggttacaagagtcgacaagaaaggtcaaaccgctcttcatatggcggttaaaggacaaaacactgagattgtggatgtgttgatggaagcagatggttcgttgatcaattccgcggataataaaggaaacactccattgcatatagcagtccgtaaaaacagagcagagattgttcagacagttttaaagtattgtgaagtcagtagagtggcggttaataaatcaggagaaacagctcttgatatcgctgagaaaaccggactacatgagatcgtaccgcttctgcaaaagatcggtatgcagaacgcaagatccatcaagccagctgaaaaagtggaaccatcaggctcttctaggaaactgaaagaaacagttagtgaaataggccatgaggtgcatactcagcttgaacaaaccgggagaacgagaagagagatccaaggaatcgctaaacgggtcaacaaaatgcacacggaaggactcaacaacgcgataaactccactaccctagtagccattctcatagcaaccgttgcttttgcagctatcttcaacgttccaggccagtacacggacgaccctaaagacgtacctccaggatattcactcggagaagcaagagcagctccaagacccgagttcttgatattcgtcgtgtttgattctttcgcgcttttcatctctttagcggtggttgtggttcagacatcagtggtggttatagagaggagagcaaagaagcaaatgatggctataatcaacaagctcatgtggatggcttgcattatgatctcagtagcgttcgtatcactgtcttttgttgtcgtgggagagaaagagaagcctttggcggttggagtaaccgccattggagctttgatcatggtttcaacactagggactatgtgttattgggtgattgctaaccggattgaaggatctaagtcatctccagcttccatgatgtcagatcctgagttagctgattccaaacataaccggaaactttatgcggtttgattagagtgaaacagaggatttagaaaatcattaaagaaaagagagattttgtatccagataataaaagagataactcttgtgtttatagtagattctgtatatgtaacaaaaggaaaatagtataaatcaatttataagacttttacatg

SEQ ID NO: 48944 - protein, 524 aa, Arabidopsis thaliana
  peptide (1)..(524): Ceres Seq. ID no. 14310149
MKEIKKTMTKQMTARRDDTPLHTAVREGKTDLLLEMIGEHDGVELKELLAEQNQSGETALYVAAEYGHTDMVKILMKLSDSVLAGTKAKNGFDAFHIAAKNGNLQVLDVLIQANPELSFTFDSSKTTALHTAASQGHGEIVCFLLDKGVDLAAIARSNGKTALHSAARNGHTVIVKELIEKKAGMVTRVDKKGQTALHMAVKGQNTEIVDVLMEADGSLINSADNKGNTPLHIAVRKNRAEIVQTVLKYCEVSRVAVNKSGETALDIAEKTGLHEIVPLLQKIGMQNARSIKPAEKVEPSGSSRKLKETVSEIGHEVHTQLEQTGRTRREIQGIAKRVNKMHTEGLNNAINSTTLVAILIATVAFAAIFNVPGQYTDDPKDVPPGYSLGEARAAPRPEFLIFVVFDSFALFISLAVVVVQTSVVVIERRAKKQMMAIINKLMWMACIMISVAFVSLSFVVVGEKEKPLAVGVTAIGALIMVSTLGTMCYWVIANRIEGSKSSPASMMSDPELADSKHNRKLYAV

SEQ ID NO: 48945 - protein, 517 aa, Arabidopsis thaliana
  peptide (1)..(517): Ceres Seq. ID no. 14310150
MTKQMTARRDDTPLHTAVREGKTDLLLEMIGEHDGVELKELLAEQNQSGETALYVAAEYGHTDMVKILMKLSDSVLAGTKAKNGFDAFHIAAKNGNLQVLDVLIQANPELSFTFDSSKTTALHTAASQGHGEIVCFLLDKGVDLAAIARSNGKTALHSAARNGHTVIVKELIEKKAGMVTRVDKKGQTALHMAVKGQNTEIVDVLMEADGSLINSADNKGNTPLHIAVRKNRAEIVQTVLKYCEVSRVAVNKSGETALDIAEKTGLHEIVPLLQKIGMQNARSIKPAEKVEPSGSSRKLKETVSEIGHEVHTQLEQTGRTRREIQGIAKRVNKMHTEGLNNAINSTTLVAILIATVAFAAIFNVPGQYTDDPKDVPPGYSLGEARAAPRPEFLIFVVFDSFALFISLAVVVVQTSVVVIERRAKKQMMAIINKLMWMACIMISVAFVSLSFVVVGEKEKPLAVGVTAIGALIMVSTLGTMCYWVIANRIEGSKSSPASMMSDPELADSKHNRKLYAV

SEQ ID NO: 48946 - protein, 513 aa, Arabidopsis thaliana
  peptide (1)..(513): Ceres Seq. ID no. 14310151
MTARRDDTPLHTAVREGKTDLLLEMIGEHDGVELKELLAEQNQSGETALYVAAEYGHTDMVKILMKLSDSVLAGTKAKNGFDAFHIAAKNGNLQVLDVLIQANPELSFTFDSSKTTALHTAASQGHGEIVCFLLDKGVDLAAIARSNGKTALHSAARNGHTVIVKELIEKKAGMVTRVDKKGQTALHMAVKGQNTEIVDVLMEADGSLINSADNKGNTPLHIAVRKNRAEIVQTVLKYCEVSRVAVNKSGETALDIAEKTGLHEIVPLLQKIGMQNARSIKPAEKVEPSGSSRKLKETVSEIGHEVHTQLEQTGRTRREIQGIAKRVNKMHTEGLNNAINSTTLVAILIATVAFAAIFNVPGQYTDDPKDVPPGYSLGEARAAPRPEFLIFVVFDSFALFISLAVVVVQTSVVVIERRAKKQMMAIINKLMWMACIMISVAFVSLSFVVVGEKEKPLAVGVTAIGALIMVSTLGTMCYWVIANRIEGSKSSPASMMSDPELADSKHNRKLYAV

SEQ ID NO: 48947 - DNA, 2080 bp, Arabidopsis thaliana
  misc_feature (1)..(2080): Ceres Seq. ID no. 12574877
  misc_feature (1)..(2080): Ortholog of  Ceres SEQ ID NO 15174591 as cited in SEQ ID NO 53383
  misc_feature (1)..(2080): Ortholog of  Ceres SEQ ID NO 14310784 as cited in SEQ ID NO 58503
atgagggggagatcagaaggagggaagaaaaagccggtgattgtgttactctgcgttgcatcagtagtgcttgtttttgtatatctcttctttggttcctctaaccataaagctattgagtatgggaggaaacttggtttgggtggtgatgatgatgatagtactaagaaagatgacacttctagctctttttatgtagaagatgtagtagggaatggtttcactcccagaagctttcctgtgtgtgatgatcgacactcggagcttattccttgcttagataggaatcttatataccaaatgagattgaagcttgatttgtctttgatggagcattatgaacgtcactgtcctcctcctgaaaggaggtttaattgcttgattcctcctcctccagggtataagattccaatcaagtggccgaaaagcagagacgaagtttggaaagtgaacattcctcatactcacttagcgcatgagaagtctgaccaaaactggatggttgttaaaggagagaaaatcaatttccctggtggaggcacacattttcattatggtgctgataagtatattgcatcaatggcaaatatgcttaattttccgaacaatgttttgaacaatgggggaaggctgaggacatttcttgatgttggctgtggtgttgctagctttggaggttatcttcttgcatcagaaattatgacgatgtctttggcacctaatgatgttcatcagaaccaaatccaatttgctcttgagagagggattcctgcatacctcggcgttctagggaccaagaggctcccatacccaagcagatcctttgaacttgctcactgttcacgttgtcgtatcgattggcttcaaagagatggtattcttcttctcgagctagacagggtgctaagacctggtggctattttgcatattcatctccagaagcatatgcacaagatgaagaggacctcagaatatggagagaaatgagtgctcttgtgggccgtatgtgttggacgatagctgcaaaaaggaatcaaactgtaatttggcaaaaacctttgacaaatgattgttatttgggaagagaacctggaacccagcctcctctttgcaattctgacagtgaccctgatgctgtgtatggtgtaaacatggaagcatgcattactcaatacagtgaccatgaccacaaaaccaagggaagtggattggctccatggccagctcgattaacctctcctcctcctcggctagctgactttggctattccactgacatttttgagaaggatacagaaacttggaggcagagagtagatacttattgggatctcttgagtcctaaaattcaatcagacactgtaaggaacataatggacatgaaagcaagcatgggttcctttgctgctgctctgaaagaaaaagatgtttgggttatgaatgttgttcctgaagacggaccaaacacgcttaaactaatatacgacagaggcctgatgggtgctgttcatagctggtgtgaagcgttctcgacttacccgaggacttacgatttactccatgcctgggacatcatatctgatatcaagaagagaggttgcagcgcagaagatttgctgttggagatggatcgtatacttcgtccaagcggtttcatactcataagggacaaacaatccgtagtcgaccttgtgaagaagtatctcaaggctttgcattgggaagcagttgaaaccaagacagcctcggaatcagaccaagactcggacaatgtgatactcattgtccagaagaaactgtggttgacaagtgaaagcctcagagatttggagtgattacgatgatgatgatgatgaggccaaaaactgcctccaacatgaaaaaacaaaacaacattcacaagagatttctttcttgggagaatctaatcgaaaacatacaacgaagaaaattcgttttatagcggcaatttaacgttcttttctcttaaatctttctttctttacatattcatataatgtttgtatggttcgttagagaggactaaagtttcttatcaatttaaactctttttgttgc

SEQ ID NO: 48948 - protein, 611 aa, Arabidopsis thaliana
  peptide (1)..(611): Ceres Seq. ID no. 12574878
MRGRSEGGKKKPVIVLLCVASVVLVFVYLFFGSSNHKAIEYGRKLGLGGDDDDSTKKDDTSSSFYVEDVVGNGFTPRSFPVCDDRHSELIPCLDRNLIYQMRLKLDLSLMEHYERHCPPPERRFNCLIPPPPGYKIPIKWPKSRDEVWKVNIPHTHLAHEKSDQNWMVVKGEKINFPGGGTHFHYGADKYIASMANMLNFPNNVLNNGGRLRTFLDVGCGVASFGGYLLASEIMTMSLAPNDVHQNQIQFALERGIPAYLGVLGTKRLPYPSRSFELAHCSRCRIDWLQRDGILLLELDRVLRPGGYFAYSSPEAYAQDEEDLRIWREMSALVGRMCWTIAAKRNQTVIWQKPLTNDCYLGREPGTQPPLCNSDSDPDAVYGVNMEACITQYSDHDHKTKGSGLAPWPARLTSPPPRLADFGYSTDIFEKDTETWRQRVDTYWDLLSPKIQSDTVRNIMDMKASMGSFAAALKEKDVWVMNVVPEDGPNTLKLIYDRGLMGAVHSWCEAFSTYPRTYDLLHAWDIISDIKKRGCSAEDLLLEMDRILRPSGFILIRDKQSVVDLVKKYLKALHWEAVETKTASESDQDSDNVILIVQKKLWLTSESLRDLE

SEQ ID NO: 48949 - protein, 511 aa, Arabidopsis thaliana
  peptide (1)..(511): Ceres Seq. ID no. 12574879
MRLKLDLSLMEHYERHCPPPERRFNCLIPPPPGYKIPIKWPKSRDEVWKVNIPHTHLAHEKSDQNWMVVKGEKINFPGGGTHFHYGADKYIASMANMLNFPNNVLNNGGRLRTFLDVGCGVASFGGYLLASEIMTMSLAPNDVHQNQIQFALERGIPAYLGVLGTKRLPYPSRSFELAHCSRCRIDWLQRDGILLLELDRVLRPGGYFAYSSPEAYAQDEEDLRIWREMSALVGRMCWTIAAKRNQTVIWQKPLTNDCYLGREPGTQPPLCNSDSDPDAVYGVNMEACITQYSDHDHKTKGSGLAPWPARLTSPPPRLADFGYSTDIFEKDTETWRQRVDTYWDLLSPKIQSDTVRNIMDMKASMGSFAAALKEKDVWVMNVVPEDGPNTLKLIYDRGLMGAVHSWCEAFSTYPRTYDLLHAWDIISDIKKRGCSAEDLLLEMDRILRPSGFILIRDKQSVVDLVKKYLKALHWEAVETKTASESDQDSDNVILIVQKKLWLTSESLRDLE

SEQ ID NO: 48950 - protein, 502 aa, Arabidopsis thaliana
  peptide (1)..(502): Ceres Seq. ID no. 12574880
MEHYERHCPPPERRFNCLIPPPPGYKIPIKWPKSRDEVWKVNIPHTHLAHEKSDQNWMVVKGEKINFPGGGTHFHYGADKYIASMANMLNFPNNVLNNGGRLRTFLDVGCGVASFGGYLLASEIMTMSLAPNDVHQNQIQFALERGIPAYLGVLGTKRLPYPSRSFELAHCSRCRIDWLQRDGILLLELDRVLRPGGYFAYSSPEAYAQDEEDLRIWREMSALVGRMCWTIAAKRNQTVIWQKPLTNDCYLGREPGTQPPLCNSDSDPDAVYGVNMEACITQYSDHDHKTKGSGLAPWPARLTSPPPRLADFGYSTDIFEKDTETWRQRVDTYWDLLSPKIQSDTVRNIMDMKASMGSFAAALKEKDVWVMNVVPEDGPNTLKLIYDRGLMGAVHSWCEAFSTYPRTYDLLHAWDIISDIKKRGCSAEDLLLEMDRILRPSGFILIRDKQSVVDLVKKYLKALHWEAVETKTASESDQDSDNVILIVQKKLWLTSESLRDLE

SEQ ID NO: 48951 - DNA, 2106 bp, Arabidopsis thaliana
  misc_feature (1)..(2106): Ceres Seq. ID no. 14310160
  misc_feature (1)..(2106): Ortholog of  Ceres SEQ ID NO 14303173 as cited in SEQ ID NO 66550
  misc_feature (1)..(2106): Ortholog of  Ceres SEQ ID NO 13584744 as cited in SEQ ID NO 69137
attgttaacctctcgtaactaaaatcttccatggtagtagtaacaaagaagaccatgaagattcaaattcatctcctttactcgttcttgttcctctgtttctctactctcactctatcttctgagcccagaaaccctgaagttgaggcgttgataagtataaggaacaatttgcatgatcctcatggagctttgaacaattgggacgagttttcagttgatccttgtagctgggctatgatcacttgctctcccgacaacctcgtcattggactaggagcgccgagccagtctctctcgggaggtttatctgagtctatcggaaatctcacaaatctccgacaagtgtcattgcaaaataacaacatctccggcaaaattccaccggagctcggttttctacccaaattacaaaccttggatctttccaacaaccgattctccggtgacatccctgtttccatcgaccagctaagcagccttcaatatctgagactcaacaacaactctttgtctgggcccttccctgcttctttgtcccaaattcctcacctctccttcttggacttgtcttacaacaatctcagtggccctgttcctaaattcccagcaaggactttcaacgttgctggtaatcctttgatttgtagaagcaacccacctgagatttgttctggatcaatcaatgcaagtccactttctgtttctttgagctcttcatcaggacgcaggtctaatagattggcaatagctcttagtgtaagccttggctctgttgttatactagtccttgctctcgggtccttttgttggtaccgaaagaaacaaagaaggctactgatccttaacttaaacgataaacaagaggaagggcttcaaggacttgggaatctaagaagcttcacattcagagaactccatgtttatacagatggtttcagttccacgaacattctcggcgctggtggattcggtaatgtgtacagaggcaagcttggagatgggacaatggtggcagtgaaacggttgaaggatattaatggaacctcaggggattcacagtttcgtatggagctagagatgattagcttagctgttcataagaatctgcttcggttaattggttattgcgcaacttctggtgaaaggcttcttgtttacccttacatgcctaatggaagcgtcgcctctaagcttaaatctaaaccggcattggactggaacatgaggaagaggatagcaattggtgcagcgagaggtttgttgtatctacatgagcaatgtgatcccaagatcattcatagagatgtaaaggcagctaatattctcttagacgagtgctttgaagctgttgttgttgactttggactcgcaaagctccttaaccatgcggattctcatgtcacaactgcggtccgtggtacggttggccacattgcacctgaatatctctccactggtcagtcttctgagaaaaccgatgtgtttgggttcggtatactattgctcgagctcataaccggactgagagctcttgagtttggtaaaaccgttagccagaaaggagctatgcttgaatgggtgaggaaattacatgaagagatgaaagtagaggaactattggatcgagaactcggaactaactacgataagattgaagttggagagatgttgcaagtggctttgctatgcacacaatatctgccagctcatcgtcctaaaatgtctgaagttgttttgatgcttgaaggcgatggattagccgagagatgggctgcttcgcataaccattcacatttctaccatgccaatatctctttcaagacaatctctactctgtctactacttctgtctcaaggcttgacgcacattgcaatgatccaacttatcaaatgtttggatcttcggctttcgatgatgacgatgatcatcagcctttagattcctttgccatggaactatccggtccaagataacacaatgaaagaaagatatcatttttacgatggatcaaacaatccaatgaaaaaagctctacacttttataatatagacatgtatatggtggtgaaaattgatgaaaaatatctctacagtttgagatc

SEQ ID NO: 48952 - protein, 648 aa, Arabidopsis thaliana
  peptide (1)..(648): Ceres Seq. ID no. 14310161
MVVVTKKTMKIQIHLLYSFLFLCFSTLTLSSEPRNPEVEALISIRNNLHDPHGALNNWDEFSVDPCSWAMITCSPDNLVIGLGAPSQSLSGGLSESIGNLTNLRQVSLQNNNISGKIPPELGFLPKLQTLDLSNNRFSGDIPVSIDQLSSLQYLRLNNNSLSGPFPASLSQIPHLSFLDLSYNNLSGPVPKFPARTFNVAGNPLICRSNPPEICSGSINASPLSVSLSSSSGRRSNRLAIALSVSLGSVVILVLALGSFCWYRKKQRRLLILNLNDKQEEGLQGLGNLRSFTFRELHVYTDGFSSTNILGAGGFGNVYRGKLGDGTMVAVKRLKDINGTSGDSQFRMELEMISLAVHKNLLRLIGYCATSGERLLVYPYMPNGSVASKLKSKPALDWNMRKRIAIGAARGLLYLHEQCDPKIIHRDVKAANILLDECFEAVVVDFGLAKLLNHADSHVTTAVRGTVGHIAPEYLSTGQSSEKTDVFGFGILLLELITGLRALEFGKTVSQKGAMLEWVRKLHEEMKVEELLDRELGTNYDKIEVGEMLQVALLCTQYLPAHRPKMSEVVLMLEGDGLAERWAASHNHSHFYHANISFKTISTLSTTSVSRLDAHCNDPTYQMFGSSAFDDDDDHQPLDSFAMELSGPR

SEQ ID NO: 48953 - protein, 640 aa, Arabidopsis thaliana
  peptide (1)..(640): Ceres Seq. ID no. 14310162
MKIQIHLLYSFLFLCFSTLTLSSEPRNPEVEALISIRNNLHDPHGALNNWDEFSVDPCSWAMITCSPDNLVIGLGAPSQSLSGGLSESIGNLTNLRQVSLQNNNISGKIPPELGFLPKLQTLDLSNNRFSGDIPVSIDQLSSLQYLRLNNNSLSGPFPASLSQIPHLSFLDLSYNNLSGPVPKFPARTFNVAGNPLICRSNPPEICSGSINASPLSVSLSSSSGRRSNRLAIALSVSLGSVVILVLALGSFCWYRKKQRRLLILNLNDKQEEGLQGLGNLRSFTFRELHVYTDGFSSTNILGAGGFGNVYRGKLGDGTMVAVKRLKDINGTSGDSQFRMELEMISLAVHKNLLRLIGYCATSGERLLVYPYMPNGSVASKLKSKPALDWNMRKRIAIGAARGLLYLHEQCDPKIIHRDVKAANILLDECFEAVVVDFGLAKLLNHADSHVTTAVRGTVGHIAPEYLSTGQSSEKTDVFGFGILLLELITGLRALEFGKTVSQKGAMLEWVRKLHEEMKVEELLDRELGTNYDKIEVGEMLQVALLCTQYLPAHRPKMSEVVLMLEGDGLAERWAASHNHSHFYHANISFKTISTLSTTSVSRLDAHCNDPTYQMFGSSAFDDDDDHQPLDSFAMELSGPR

SEQ ID NO: 48954 - protein, 579 aa, Arabidopsis thaliana
  peptide (1)..(579): Ceres Seq. ID no. 14310163
MITCSPDNLVIGLGAPSQSLSGGLSESIGNLTNLRQVSLQNNNISGKIPPELGFLPKLQTLDLSNNRFSGDIPVSIDQLSSLQYLRLNNNSLSGPFPASLSQIPHLSFLDLSYNNLSGPVPKFPARTFNVAGNPLICRSNPPEICSGSINASPLSVSLSSSSGRRSNRLAIALSVSLGSVVILVLALGSFCWYRKKQRRLLILNLNDKQEEGLQGLGNLRSFTFRELHVYTDGFSSTNILGAGGFGNVYRGKLGDGTMVAVKRLKDINGTSGDSQFRMELEMISLAVHKNLLRLIGYCATSGERLLVYPYMPNGSVASKLKSKPALDWNMRKRIAIGAARGLLYLHEQCDPKIIHRDVKAANILLDECFEAVVVDFGLAKLLNHADSHVTTAVRGTVGHIAPEYLSTGQSSEKTDVFGFGILLLELITGLRALEFGKTVSQKGAMLEWVRKLHEEMKVEELLDRELGTNYDKIEVGEMLQVALLCTQYLPAHRPKMSEVVLMLEGDGLAERWAASHNHSHFYHANISFKTISTLSTTSVSRLDAHCNDPTYQMFGSSAFDDDDDHQPLDSFAMELSGPR

SEQ ID NO: 48955 - DNA, 3241 bp, Arabidopsis thaliana
  misc_feature (1)..(3241): Ceres Seq. ID no. 13578506
  misc_feature (1)..(3241): Ortholog of  Ceres SEQ ID NO 13654989 as cited in SEQ ID NO 63117
  misc_feature (1)..(3241): Ortholog of  Ceres SEQ ID NO 13584744 as cited in SEQ ID NO 69137
gacctttaatcttcttcgtctctctatcttcctcgatctccgccgattccttcgtctttccctttcctctctgtaaacctttcttcttcttcttcttcaatgcctccctaaaaccctagactcagaattctcaaaggcgacacctttaacctcctccactctgtttttcttctccaacaaaaatgtcaaattcccatttgggtactctctgtttcatcatctctttactgggtttggccaatttctcactttctcaaaccggtctcgatgattcgactatgcaatctctcaaatcaagtctgaatcttacatcagacgtcgattggtctaaccctaacccttgtaaatggcaatctgttcaatgcgatggaagtaatcgtgttactaagattcagcttaaacaaaaagggattcgtggaactcttcctactaatcttcagagtctctctgaattggttattctcgagctttttctcaatcgtatctctggtcctattcctgatctctctggcttatctcgtttacagactctgaatctacacgacaatctttttacctctgtaccgaagaatctcttctctggtatgagttctcttcaagaaatgtatctcgagaacaatccgtttgatccttgggtaattccagacaccgttaaagaagctacgtctctgcagaatctaactctctccaattgcagcattattggaaagatcccagatttcttcggttctcagtcacttccgagcttgacgaatctgaaactatctcagaatggtttagaaggagagttaccgatgagttttgctggtacttcgattcagtctctgttcttgaatggtcagaagcttaatggatcgatctcggtattggggaacatgacttcgctcgttgaggtttctcttcaaggaaatcagttctcaggtccaattcctgatctctctggtttggtatctctacgtgtgtttaatgttagagagaatcagctcactggtgttgttccacagtctttggttagtttgagttcgcttactactgtgaatttaactaataattatcttcaaggaccgactccgttgtttggcaaatccgttggtgttgatatagtcaacaacatgaatagcttttgtactaatgtagctggtgaggcttgtgatcctcgtgtggatactttggtatctgtagctgaatcatttggatatccagtgaagcttgcggaaagttggaaaggaaacaatccttgtgttaactgggttgggattacttgttctggaggtaacattacggttgttaatatgaggaaacaggatctctcgggtacgatttctccgagtttagctaagcttacttcattggagactatcaatcttgctgataataaactctccgggcatatacctgatgagcttaccacattgtctaagcttaggttacttgatgtgtctaacaacgatttttatggaataccgccaaagtttcgggatactgtgactttggtgactgaagggaacgctaacatggggaagaatggacctaacaaaacgagtgatgctcctggagcttcaccaggaagtaaaccttcaggaggaagtgatggcagtgaaacttctaagaaatcaagcaatgtcaagattattgttcctgtggttggtggggttgttggtgcattgtgtttggttgggcttggtgtgtgtctttatgcgaagaaaaggaagcgacctgctagagttcaaagtccaagcagcaacatggttattcatccgcatcattcgggtgacaacgatgacattaaactcactgttgcagcttctagtcttaacagtggtggaggaagtgatagctacagtcacagcggaagtgcagcgagtgatattcacgttgttgaagctgggaacttggttatatcgatacaggtcttgaggaatgtgacgaataacttcagcgaagagaatattctcgggagaggtggtttcgggacagtttacaaaggcgaactccacgatggaacaaaaatagctgtgaagagaatggagtcttcggttgtgagtgataagggacttactgagtttaaatctgagatcactgttctgactaaaatgcgtcatcgtcatctcgttgcgcttctcggttactgccttgacgggaacgagaggcttcttgtctacgagtacatgccacaggggacactaagtcagcatttgttccactggaaagaggaagggcgaaaaccgttagactggactagacggctggcgattgcattggatgtagctcgaggtgtcgagtatctgcacacacttgcgcatcagagctttatccatagggatctaaagccatcaaacatccttcttggtgatgatatgcgcgctaaagtctctgactttgggttagtacgtttagcccctgatggcaaatactccattgagactcgagtagctgggactttcggataccttgccccagaatacgcagtgacgggaagagtgacgaccaaggtagacattttcagccttggggtcatacttatggagctaatcactggtcgtaaagccctagacgagacgcaacccgaagacagcgtccatctagtcacatggttccgtcgggtagcagccagcaaagacgaaaatgccttcaaaaacgcaatagacccaaacatcagcctcgacgacgataccgtagccagtattgaaaaagtctgggagcttgctggtcattgctgtgcccgtgagccttaccaaagacctgacatggctcacatcgttaacgtcctttcttcactcaccgtccaatggaaaccaactgagaccgaccctgatgacgtctatgggatagactacgatatgccgcttccgcaggtgcttaagaaatggcaagctttcgagggactaagccagaccgcggatgactcgggatcttcgtcttcggcttatggaagcaaagacaatacgcagacaagtatcccaactcgcccatctggatttgctgactcgttcacttctgtggatggacgttgaaaaaatcaagattgcgtaaaacgttttagtagaagaagaagatgaagcattgtgtgataaatctctctctcgctctccctttttttgcttttctctgaagcatatttacttatgacttcgtttttatctactgcaagcttttggttagtgtatttatctatctactttgtgtagtttttatgcaaagataacaatctttgagttcttaaaattttaatatttcgtct

SEQ ID NO: 48956 - protein, 943 aa, Arabidopsis thaliana
  peptide (1)..(943): Ceres Seq. ID no. 13578507
MSNSHLGTLCFIISLLGLANFSLSQTGLDDSTMQSLKSSLNLTSDVDWSNPNPCKWQSVQCDGSNRVTKIQLKQKGIRGTLPTNLQSLSELVILELFLNRISGPIPDLSGLSRLQTLNLHDNLFTSVPKNLFSGMSSLQEMYLENNPFDPWVIPDTVKEATSLQNLTLSNCSIIGKIPDFFGSQSLPSLTNLKLSQNGLEGELPMSFAGTSIQSLFLNGQKLNGSISVLGNMTSLVEVSLQGNQFSGPIPDLSGLVSLRVFNVRENQLTGVVPQSLVSLSSLTTVNLTNNYLQGPTPLFGKSVGVDIVNNMNSFCTNVAGEACDPRVDTLVSVAESFGYPVKLAESWKGNNPCVNWVGITCSGGNITVVNMRKQDLSGTISPSLAKLTSLETINLADNKLSGHIPDELTTLSKLRLLDVSNNDFYGIPPKFRDTVTLVTEGNANMGKNGPNKTSDAPGASPGSKPSGGSDGSETSKKSSNVKIIVPVVGGVVGALCLVGLGVCLYAKKRKRPARVQSPSSNMVIHPHHSGDNDDIKLTVAASSLNSGGGSDSYSHSGSAASDIHVVEAGNLVISIQVLRNVTNNFSEENILGRGGFGTVYKGELHDGTKIAVKRMESSVVSDKGLTEFKSEITVLTKMRHRHLVALLGYCLDGNERLLVYEYMPQGTLSQHLFHWKEEGRKPLDWTRRLAIALDVARGVEYLHTLAHQSFIHRDLKPSNILLGDDMRAKVSDFGLVRLAPDGKYSIETRVAGTFGYLAPEYAVTGRVTTKVDIFSLGVILMELITGRKALDETQPEDSVHLVTWFRRVAASKDENAFKNAIDPNISLDDDTVASIEKVWELAGHCCAREPYQRPDMAHIVNVLSSLTVQWKPTETDPDDVYGIDYDMPLPQVLKKWQAFEGLSQTADDSGSSSSAYGSKDNTQTSIPTRPSGFADSFTSVDGR

SEQ ID NO: 48957 - protein, 911 aa, Arabidopsis thaliana
  peptide (1)..(911): Ceres Seq. ID no. 13578508
MQSLKSSLNLTSDVDWSNPNPCKWQSVQCDGSNRVTKIQLKQKGIRGTLPTNLQSLSELVILELFLNRISGPIPDLSGLSRLQTLNLHDNLFTSVPKNLFSGMSSLQEMYLENNPFDPWVIPDTVKEATSLQNLTLSNCSIIGKIPDFFGSQSLPSLTNLKLSQNGLEGELPMSFAGTSIQSLFLNGQKLNGSISVLGNMTSLVEVSLQGNQFSGPIPDLSGLVSLRVFNVRENQLTGVVPQSLVSLSSLTTVNLTNNYLQGPTPLFGKSVGVDIVNNMNSFCTNVAGEACDPRVDTLVSVAESFGYPVKLAESWKGNNPCVNWVGITCSGGNITVVNMRKQDLSGTISPSLAKLTSLETINLADNKLSGHIPDELTTLSKLRLLDVSNNDFYGIPPKFRDTVTLVTEGNANMGKNGPNKTSDAPGASPGSKPSGGSDGSETSKKSSNVKIIVPVVGGVVGALCLVGLGVCLYAKKRKRPARVQSPSSNMVIHPHHSGDNDDIKLTVAASSLNSGGGSDSYSHSGSAASDIHVVEAGNLVISIQVLRNVTNNFSEENILGRGGFGTVYKGELHDGTKIAVKRMESSVVSDKGLTEFKSEITVLTKMRHRHLVALLGYCLDGNERLLVYEYMPQGTLSQHLFHWKEEGRKPLDWTRRLAIALDVARGVEYLHTLAHQSFIHRDLKPSNILLGDDMRAKVSDFGLVRLAPDGKYSIETRVAGTFGYLAPEYAVTGRVTTKVDIFSLGVILMELITGRKALDETQPEDSVHLVTWFRRVAASKDENAFKNAIDPNISLDDDTVASIEKVWELAGHCCAREPYQRPDMAHIVNVLSSLTVQWKPTETDPDDVYGIDYDMPLPQVLKKWQAFEGLSQTADDSGSSSSAYGSKDNTQTSIPTRPSGFADSFTSVDGR

SEQ ID NO: 48958 - protein, 809 aa, Arabidopsis thaliana
  peptide (1)..(809): Ceres Seq. ID no. 13578509
MSSLQEMYLENNPFDPWVIPDTVKEATSLQNLTLSNCSIIGKIPDFFGSQSLPSLTNLKLSQNGLEGELPMSFAGTSIQSLFLNGQKLNGSISVLGNMTSLVEVSLQGNQFSGPIPDLSGLVSLRVFNVRENQLTGVVPQSLVSLSSLTTVNLTNNYLQGPTPLFGKSVGVDIVNNMNSFCTNVAGEACDPRVDTLVSVAESFGYPVKLAESWKGNNPCVNWVGITCSGGNITVVNMRKQDLSGTISPSLAKLTSLETINLADNKLSGHIPDELTTLSKLRLLDVSNNDFYGIPPKFRDTVTLVTEGNANMGKNGPNKTSDAPGASPGSKPSGGSDGSETSKKSSNVKIIVPVVGGVVGALCLVGLGVCLYAKKRKRPARVQSPSSNMVIHPHHSGDNDDIKLTVAASSLNSGGGSDSYSHSGSAASDIHVVEAGNLVISIQVLRNVTNNFSEENILGRGGFGTVYKGELHDGTKIAVKRMESSVVSDKGLTEFKSEITVLTKMRHRHLVALLGYCLDGNERLLVYEYMPQGTLSQHLFHWKEEGRKPLDWTRRLAIALDVARGVEYLHTLAHQSFIHRDLKPSNILLGDDMRAKVSDFGLVRLAPDGKYSIETRVAGTFGYLAPEYAVTGRVTTKVDIFSLGVILMELITGRKALDETQPEDSVHLVTWFRRVAASKDENAFKNAIDPNISLDDDTVASIEKVWELAGHCCAREPYQRPDMAHIVNVLSSLTVQWKPTETDPDDVYGIDYDMPLPQVLKKWQAFEGLSQTADDSGSSSSAYGSKDNTQTSIPTRPSGFADSFTSVDGR

SEQ ID NO: 48959 - DNA, 2073 bp, Arabidopsis thaliana
  misc_feature (1)..(2073): Ceres Seq. ID no. 13591980
  misc_feature (1)..(2073): Ortholog of  Ceres SEQ ID NO 15170155 as cited in SEQ ID NO 64363
gaaaggaaaacgctaaaaggttgcgcgagtggagagtctgcccgccaagcaacccctagtattcagctttttgtgcactgatccaactcgactcggcctttttctctgagttgactcgaccgagaaaaggcgatagagctggggtttaattcggcgataacaatggacgaagattccgtccatggcgattctcacctcaagacatgtgtcgtcctcggcggacgagggttcattggtcgatcgcttgtctccagattgcttcgtctcggaaactggacagtccgagtcgcagattccggtcacactctccatcttgatgaatccgattcgctcctcgaggatgctctctcctccggccgcgcttcttatcactgcgtcgatgttcgtgataaacctcagatcgttaaagttaccgagggttcctatgttgtattttacatgggagctactgatttacgttcccatgattactttgactgctacaaggttatagttcaaggtacaagaaatgtgatttctgcctgtcgtgaatctggagtcagaaaacttatctacaacagtacagctgatgttgtttttgatggttcccaacctatacgtgatggtgatgaatccttgagacgtcctttgaagttccaatctatgttgacagacttcaaagctcaagcagaagcgttgatcaaattggctaacaaccgagatggtctcttaacttgtgcacttcgctctagcattgtatttggacctggtgacacagagtttgtaccttttttggtgaatctagccaagtccggatatgcaaagtttatactcgggagtggtgaaaatatctctgatttcacttactcggagaacgtttctcatgcacatatttgcgccgttaaagcattagattcacagatggagtttgtggctggaaaggaattttttatcacaaacctcaagccggtcagattttgggactttgtaagccatatagttgaaggtctgggatacccaagaccatccattaaacttcctgttcggctggttttgtatgttttctcacttcttaagtggacacatgaaaaggagggccttgggagtaattatgacacagcacatcagtatgctctgttagcttcatcaacgagaacttttaactgcaatgcagctaagaagcatcttggttacacacctgttgtgacacttgaagatggtattgcatcaacgcttcaatggttctctcgggatcttgagaagtctgatgacacaatcattcaatctactgcagatcagcttcttggttgtgggaaagttgcagacatcttgctgtggagaaatgagaagaaaaccttcgtttcttttcttgtcctaaacttgttttattactggttcttcttttctggaaacacatttacttcatctgcagcccaacttctgtttatatttgctgttgctctctatggagtctcttttgtgccgtcaaagattttcgggtttcaagtcaacaaaatacccccatggagatttgagatctccgaatccgctgtgagagatcttagtagtgatatcgtagttgtctggaatcaaggagttcgcagttttaaatccttaagcagtggaggagactggatcaagttcttcaagattgcaggatcactgtatctcctcaaactgattgtatcccgttcattggcagcatttcttttcacagttatgtcgttctcattcaccggtttcttcatctacgagcaatacgagcttgagctctaccacctagcccggatattcgtcgaatgcttaacatttattaaaaggatggtgatacctgtttctgatgcttcatctaaaccaatgttcatgtgaagcttccaaagtcctccactaaacgaacaccaacaatcccagagactaattgcagttattagatgtcttatgtacaaacattatgctatcaggatgtaatcttcactgagaggggatggatatatgattatttacgaatttgccataactactatcaaaatgcaccgttttgatccggtttccaaaaaaaaaagaaaaaaaaggaaagtatccttatatatcctt

SEQ ID NO: 48960 - protein, 561 aa, Arabidopsis thaliana
  peptide (1)..(561): Ceres Seq. ID no. 13591981
MDEDSVHGDSHLKTCVVLGGRGFIGRSLVSRLLRLGNWTVRVADSGHTLHLDESDSLLEDALSSGRASYHCVDVRDKPQIVKVTEGSYVVFYMGATDLRSHDYFDCYKVIVQGTRNVISACRESGVRKLIYNSTADVVFDGSQPIRDGDESLRRPLKFQSMLTDFKAQAEALIKLANNRDGLLTCALRSSIVFGPGDTEFVPFLVNLAKSGYAKFILGSGENISDFTYSENVSHAHICAVKALDSQMEFVAGKEFFITNLKPVRFWDFVSHIVEGLGYPRPSIKLPVRLVLYVFSLLKWTHEKEGLGSNYDTAHQYALLASSTRTFNCNAAKKHLGYTPVVTLEDGIASTLQWFSRDLEKSDDTIIQSTADQLLGCGKVADILLWRNEKKTFVSFLVLNLFYYWFFFSGNTFTSSAAQLLFIFAVALYGVSFVPSKIFGFQVNKIPPWRFEISESAVRDLSSDIVVVWNQGVRSFKSLSSGGDWIKFFKIAGSLYLLKLIVSRSLAAFLFTVMSFSFTGFFIYEQYELELYHLARIFVECLTFIKRMVIPVSDASSKPMFM

SEQ ID NO: 48961 - protein, 469 aa, Arabidopsis thaliana
  peptide (1)..(469): Ceres Seq. ID no. 13591982
MGATDLRSHDYFDCYKVIVQGTRNVISACRESGVRKLIYNSTADVVFDGSQPIRDGDESLRRPLKFQSMLTDFKAQAEALIKLANNRDGLLTCALRSSIVFGPGDTEFVPFLVNLAKSGYAKFILGSGENISDFTYSENVSHAHICAVKALDSQMEFVAGKEFFITNLKPVRFWDFVSHIVEGLGYPRPSIKLPVRLVLYVFSLLKWTHEKEGLGSNYDTAHQYALLASSTRTFNCNAAKKHLGYTPVVTLEDGIASTLQWFSRDLEKSDDTIIQSTADQLLGCGKVADILLWRNEKKTFVSFLVLNLFYYWFFFSGNTFTSSAAQLLFIFAVALYGVSFVPSKIFGFQVNKIPPWRFEISESAVRDLSSDIVVVWNQGVRSFKSLSSGGDWIKFFKIAGSLYLLKLIVSRSLAAFLFTVMSFSFTGFFIYEQYELELYHLARIFVECLTFIKRMVIPVSDASSKPMFM

SEQ ID NO: 48962 - protein, 401 aa, Arabidopsis thaliana
  peptide (1)..(401): Ceres Seq. ID no. 13591983
MLTDFKAQAEALIKLANNRDGLLTCALRSSIVFGPGDTEFVPFLVNLAKSGYAKFILGSGENISDFTYSENVSHAHICAVKALDSQMEFVAGKEFFITNLKPVRFWDFVSHIVEGLGYPRPSIKLPVRLVLYVFSLLKWTHEKEGLGSNYDTAHQYALLASSTRTFNCNAAKKHLGYTPVVTLEDGIASTLQWFSRDLEKSDDTIIQSTADQLLGCGKVADILLWRNEKKTFVSFLVLNLFYYWFFFSGNTFTSSAAQLLFIFAVALYGVSFVPSKIFGFQVNKIPPWRFEISESAVRDLSSDIVVVWNQGVRSFKSLSSGGDWIKFFKIAGSLYLLKLIVSRSLAAFLFTVMSFSFTGFFIYEQYELELYHLARIFVECLTFIKRMVIPVSDASSKPMFM

SEQ ID NO: 48963 - DNA, 1541 bp, Arabidopsis thaliana
  misc_feature (1)..(1541): Ceres Seq. ID no. 14310176
  misc_feature (1)..(1541): Ortholog of  Ceres SEQ ID NO 12460981 as cited in SEQ ID NO 65146
tgtttcttcaatatctctttctctccaacaaaatcaaaatcaagaaaacaaaaaagaaaaactctcaagaaacaatggatgcttcattgtctccattcgatcaccaaaaaactcaaaacacagagccaaagaaaagcttcattacctcactaatcactctccgttcaaacaacatcaaagaagacacatacttcgtctcagaactcaaacccacggagcaaaaatcacttcaagaactcaaagaaaagctctcagcttcatcctccaaagcttcttcaatgtggggagtctcactcctcggtggagacgacaaagctgacgtaatcctcctcaagttcctcagagcaagagatttcaaagtagcagactctttgagaatgcttgagaagtgtttggagtggagagaagagttcaaagcagagaaattgacagaagaagatctgggttttaaagatttggaaggtaaagttgcttacatgagaggctacgacaaagaaggacacccagtttgttacaatgcttatggtgtgtttaaagagaaagagatgtatgagagagtgtttggtgatgaagagaagcttaacaagtttctgagatggagagttcaggttttggagagaggtgttaaaatgcttcattttaaacctggtggtgttaattccattattcaagttacagatcttaaagatatgcctaagagagagcttagagttgcttctaatcagatcctctctctttttcaagataattaccctgaattggttgctactaagatattcataaacgtgccttggtacttcagtgtgatctactcaatgttcagcccattcctgactcagagaacaaagagcaagtttgtgatgtccaaagaaggcaatgcagcagaaacactctacaagttcattaggccagaagatattccggtgcaatacggtggtcttagccgtcctactgattcgcaaaacggaccgccaaaaccggcgtctgaattctccatcaagggtggtgagaaagttaacattcagattgaaggcattgagggtggagcaaccataacatgggatatagtagttggaggatgggatttagagtacagtgcagagtttgttccaaacgctgaagagagttacgcgatcgttgtcgagaaaccgaagaagatgaaagctacagatgaagctgtttgcaactctttcactacagtagaagctgggaagctcattctctctgttgacaatactctctctcgcaagaagaaagttgctgcttaccgttacactgtccggaaatctactacaaccgtctaatctataaccggtttttcagaagattggttgctttcttactactactttttgtgggtgtgttgaggggttttctttcttgggtttgagtactaggtttgttttgcttactcaacggttcatgttgaaccggaaatatcgataaatttgcgaggaaatcatatgtataaaaactatgatttgtatgacatttgatgtttggccttaatattttaactagagattgaagttttagtctgc

SEQ ID NO: 48964 - protein, 433 aa, Arabidopsis thaliana; identical to SEQ ID NO: 46931
  peptide (1)..(433): Ceres Seq. ID no. 14310177

SEQ ID NO: 48965 - protein, 409 aa, Arabidopsis thaliana; identical to SEQ ID NO: 46932
  peptide (1)..(409): Ceres Seq. ID no. 14310178

SEQ ID NO: 48966 - protein, 341 aa, Arabidopsis thaliana; identical to SEQ ID NO: 46933
  peptide (1)..(341): Ceres Seq. ID no. 14310179

SEQ ID NO: 48967 - DNA, 1605 bp, Arabidopsis thaliana
  misc_feature (1)..(1605): Ceres Seq. ID no. 12574290
  misc_feature (1)..(1605): Ortholog of  Ceres SEQ ID NO 14311989 as cited in SEQ ID NO 54997
attagcttctgtttcgcaagatcacgacttctatataataatatataagctcgccgtataattttcttgccgggaataatctccgatcatcgtcggaaatttccgaattgttgtaaaagaagtccaatttaggctttggatcctcagtttaatttatctgggacttttggttgctgaaatctctttcgggttttgtcctaatcctcattagtttgggtttcgtgagtctcgttttataagaacatgggacaaaagagattgttgttcttgctggcagtttttacttttcttgtttcatcttcatatggtagagttctcaagttgaagagcgatgatgatcgacctgtttacaaccatacgcttgccgtcacgcttgtggagtatgcctctgcggtctatgagtctgatttgacaaaactcttcacttggacgtgcgaaagatgcaatggtttgacaaaggatttcgaagtaatagaggtcatatttgacgttgaacactgcttacaggcgtatgttggggtggctaaggatttgaatgctatcattattgcatttcggggaactcaagaacacagcatacaaaattgggtctcagacttgttctggaaacagctcgatctgaattaccctgacatgccagatgcaatggtgcaccatggcttttacagtgcttatcacaatacaactttacggcctgcggttttggatgcaataacacgagtgaaaaaagtctacggggcgaacatcaacatcatagtgaccggtcattcaatgggaggagccatggcttccttttgtggtctagacctagttgtaaatgaaggtgaagaaaacgtacaggttatgacatttgggcaacctcgtgttgggaatgccgcttttgcatcttattacagtttgcttgtgcccaataccttccggatcacgcatgaccgtgatatggttcctcatctgcctccttactattaccatttccctcaaaaaacataccaccacttcccaacagaggtgtgggtgaaagatttcagtttttcgaattttgttctttttggtttggagaaagtttgtgacaacactggtgaagatcctacttgcagcagatcggtaaggggaaatagcatttctgaccatttaaggtactttggggtagagttgaagtgtgagagttggagacagtgcagcatagtgatgaatcaagatatggagcgttacagcaggaaagattcaaggggtaacttattcctctcgcggacagttcctcctaaggacgtagtcaaaacaagttctctatcgaaaaccggaatctctagtctgtaggtatatgttgatctcaagtcttgaacaagagaaagctcgctggaagaggaggtttgggggattcaatgtgtggaggaagaacaagggttctttgattctttgtgatggcaagagaaggtgaaaaaatgattctgtaaataaatcctacgttggtagcatgtaaaatctttttcaatttaaatgtgaatgaataatcacattgtacagtagcagattccgaattctttaaatttgtatccatcaatttcttctgtcaattattaatcaaagtacaaacatcattttact

SEQ ID NO: 48968 - protein, 357 aa, Arabidopsis thaliana
  peptide (1)..(357): Ceres Seq. ID no. 12574291
MGQKRLLFLLAVFTFLVSSSYGRVLKLKSDDDRPVYNHTLAVTLVEYASAVYESDLTKLFTWTCERCNGLTKDFEVIEVIFDVEHCLQAYVGVAKDLNAIIIAFRGTQEHSIQNWVSDLFWKQLDLNYPDMPDAMVHHGFYSAYHNTTLRPAVLDAITRVKKVYGANINIIVTGHSMGGAMASFCGLDLVVNEGEENVQVMTFGQPRVGNAAFASYYSLLVPNTFRITHDRDMVPHLPPYYYHFPQKTYHHFPTEVWVKDFSFSNFVLFGLEKVCDNTGEDPTCSRSVRGNSISDHLRYFGVELKCESWRQCSIVMNQDMERYSRKDSRGNLFLSRTVPPKDVVKTSSLSKTGISSL

SEQ ID NO: 48969 - protein, 227 aa, Arabidopsis thaliana
  peptide (1)..(227): Ceres Seq. ID no. 12574292
MPDAMVHHGFYSAYHNTTLRPAVLDAITRVKKVYGANINIIVTGHSMGGAMASFCGLDLVVNEGEENVQVMTFGQPRVGNAAFASYYSLLVPNTFRITHDRDMVPHLPPYYYHFPQKTYHHFPTEVWVKDFSFSNFVLFGLEKVCDNTGEDPTCSRSVRGNSISDHLRYFGVELKCESWRQCSIVMNQDMERYSRKDSRGNLFLSRTVPPKDVVKTSSLSKTGISSL

SEQ ID NO: 48970 - protein, 223 aa, Arabidopsis thaliana
  peptide (1)..(223): Ceres Seq. ID no. 12574293
MVHHGFYSAYHNTTLRPAVLDAITRVKKVYGANINIIVTGHSMGGAMASFCGLDLVVNEGEENVQVMTFGQPRVGNAAFASYYSLLVPNTFRITHDRDMVPHLPPYYYHFPQKTYHHFPTEVWVKDFSFSNFVLFGLEKVCDNTGEDPTCSRSVRGNSISDHLRYFGVELKCESWRQCSIVMNQDMERYSRKDSRGNLFLSRTVPPKDVVKTSSLSKTGISSL

SEQ ID NO: 48971 - DNA, 2016 bp, Arabidopsis thaliana; identical to SEQ ID NO: 39185
  misc_feature (1)..(2016): Ceres Seq. ID no. 13489529
  misc_feature (1)..(2016): Ortholog of  Ceres SEQ ID NO 14301836 as cited in SEQ ID NO 67386

SEQ ID NO: 48972 - protein, 245 aa, Arabidopsis thaliana; identical to SEQ ID NO: 39186
  peptide (1)..(245): Ceres Seq. ID no. 13489530

SEQ ID NO: 48973 - protein, 142 aa, Arabidopsis thaliana; identical to SEQ ID NO: 39187
  peptide (1)..(142): Ceres Seq. ID no. 13489531

SEQ ID NO: 48974 - DNA, 1437 bp, Arabidopsis thaliana
  misc_feature (1)..(1437): Ceres Seq. ID no. 13579035
  misc_feature (1)..(1437): Ortholog of  Ceres SEQ ID NO 15169244 as cited in SEQ ID NO 58988
gaacacaaaagaaactctcacattctcaagagtttctttcttctttcaatggctttactaactttcttgccggagaacgcagaggcgccacaaaaacacaagccaacgtctagcaaacgaaagaaacgcgataatcccaccgaccaaacgcagacacagaaacataaaccgcagaaaccgaagaaagcagtacctccgaagcagccatcttcatgggaccaaatcaagaacctattgacttgcaaacaaatcgaagggtcaagagtccatgatccttccaagaactctcaatctggtccgtccatgacaactaacttatctccttccaagcttggctcgtcgtgcagctccatttgcagctttagagacgtggctcacggcaacactcgtgtggttcatagagctgatcactcaccagacgtaggtaactcggctactcctaactcggagactcggcttctgactcggaaacctggtcaacacggttcttcttcgtctcggtctcttacatctggctcaacgagatctaacgccagtgggagttacacgtcatcgtcaacgacttcgtttagagccatgcagttccgtaaactctccggatgttacgaatgtcacatgatcgttgacccgagcaggtatccgatttcgcctagggtttgtgcttgttcccaatgtggagaagttttccccaagcttgaaagcttagagcttcatcaagcagttcgtcacgcagtttcggagttaggtccggaggattcgggtcgaaacatagtggagatcatattcaaatcaagctggcttaaaaaagacagtcccatctgtcagatcgaacggatattaaaagtccacaacactcaacgtacgatccaacggtttgaggattgccgagacgcagtgaaggcgcgtgcacttcaagcaaccagaaaagatgctcgttgtgccgccgacggcaacgagctcttacgttttcactgcaccactctcacttgttcactcggagctcgtggctcttcttctctctgctctaacctccctgtttgtggcgtctgcaccgtgattcgccacggtttccaaggaaaatctggtggcggaggagccaacgtcgcaaacgccggtgtgaggacgacggcgagcagcggaagagctgatgatttgctgaggtgtagcgatgatgcgaggagagtgatgcttgtgtgccgtgtgatcgctgggagagttaagcgagttgatttaccggcggcggatgcttcggctacagcggagaagaagtcaacggtggaggataactcggtggttggagtttcttcgagtggtggtacgtttgactcggtggcggtcaatgctggagtttattcgaatcttgaggagcttgtggtttataacccgagagctatattaccttgcttcgtggttatttacaaagttttagaatcttga

SEQ ID NO: 48975 - protein, 478 aa, Arabidopsis thaliana
  peptide (1)..(478): Ceres Seq. ID no. 13579036
EHKRNSHILKSFFLLSMALLTFLPENAEAPQKHKPTSSKRKKRDNPTDQTQTQKHKPQKPKKAVPPKQPSSWDQIKNLLTCKQIEGSRVHDPSKNSQSGPSMTTNLSPSKLGSSCSSICSFRDVAHGNTRVVHRADHSPDVGNSATPNSETRLLTRKPGQHGSSSSRSLTSGSTRSNASGSYTSSSTTSFRAMQFRKLSGCYECHMIVDPSRYPISPRVCACSQCGEVFPKLESLELHQAVRHAVSELGPEDSGRNIVEIIFKSSWLKKDSPICQIERILKVHNTQRTIQRFEDCRDAVKARALQATRKDARCAADGNELLRFHCTTLTCSLGARGSSSLCSNLPVCGVCTVIRHGFQGKSGGGGANVANAGVRTTASSGRADDLLRCSDDARRVMLVCRVIAGRVKRVDLPAADASATAEKKSTVEDNSVVGVSSSGGTFDSVAVNAGVYSNLEELVVYNPRAILPCFVVIYKVLES

SEQ ID NO: 48976 - protein, 462 aa, Arabidopsis thaliana
  peptide (1)..(462): Ceres Seq. ID no. 13579037
MALLTFLPENAEAPQKHKPTSSKRKKRDNPTDQTQTQKHKPQKPKKAVPPKQPSSWDQIKNLLTCKQIEGSRVHDPSKNSQSGPSMTTNLSPSKLGSSCSSICSFRDVAHGNTRVVHRADHSPDVGNSATPNSETRLLTRKPGQHGSSSSRSLTSGSTRSNASGSYTSSSTTSFRAMQFRKLSGCYECHMIVDPSRYPISPRVCACSQCGEVFPKLESLELHQAVRHAVSELGPEDSGRNIVEIIFKSSWLKKDSPICQIERILKVHNTQRTIQRFEDCRDAVKARALQATRKDARCAADGNELLRFHCTTLTCSLGARGSSSLCSNLPVCGVCTVIRHGFQGKSGGGGANVANAGVRTTASSGRADDLLRCSDDARRVMLVCRVIAGRVKRVDLPAADASATAEKKSTVEDNSVVGVSSSGGTFDSVAVNAGVYSNLEELVVYNPRAILPCFVVIYKVLES

SEQ ID NO: 48977 - protein, 377 aa, Arabidopsis thaliana
  peptide (1)..(377): Ceres Seq. ID no. 13579038
MTTNLSPSKLGSSCSSICSFRDVAHGNTRVVHRADHSPDVGNSATPNSETRLLTRKPGQHGSSSSRSLTSGSTRSNASGSYTSSSTTSFRAMQFRKLSGCYECHMIVDPSRYPISPRVCACSQCGEVFPKLESLELHQAVRHAVSELGPEDSGRNIVEIIFKSSWLKKDSPICQIERILKVHNTQRTIQRFEDCRDAVKARALQATRKDARCAADGNELLRFHCTTLTCSLGARGSSSLCSNLPVCGVCTVIRHGFQGKSGGGGANVANAGVRTTASSGRADDLLRCSDDARRVMLVCRVIAGRVKRVDLPAADASATAEKKSTVEDNSVVGVSSSGGTFDSVAVNAGVYSNLEELVVYNPRAILPCFVVIYKVLES

SEQ ID NO: 48978 - DNA, 2039 bp, Arabidopsis thaliana
  misc_feature (1)..(2039): Ceres Seq. ID no. 12575840
  misc_feature (1)..(2039): Ortholog of  Ceres SEQ ID NO 15177670 as cited in SEQ ID NO 53874
aaattgtctttattctttttatcccaaatgggtgattgacgccaacgactgttcaacatattttctgctgacgcttctttaatgaagtagcacgaagaagtaaacaggacgacttttggccaccggaaaatttctctgttataaaaacgaaagtctgtgtcctcttaaacatttttgggatcatcaatcggtttttggtcaaccatgaatatgaatcaagttgcagagtatgtggaaactgatccaactggtcgctatggacgttttgcagaaattcttggaaggggagcgatgaagacagtgtacaaagcaatcgacgagaagctgggaatagaagtagcatggagccaggtgaagcttaaggaggttctgcgttcctctgttgatctacagaggctttactccgaggttcatctcctcagcactctcaaccacaaatccatcattcgtttctacacttcctggatcgatgttcataaccacactctcaacttcatcaccgagttgttcacttcagggaccctccgacaatacaaaaataagtacttgcggatagatatccgagcaatcaagtcctgggctcggcaaatcttggaagggctagtttatctccacgagcacgaccctcctgttatccatagagaccttaagtgtgataatatctttgtgaatgggcatcttggacaagtcaaaattggtgatcttggtcttgcaagaatgctgcgggactgccactcggcccatagcatcattggcactcctgagttcatggcaccagaattatatgaggagaactataatgaactcattgacgtatattcctttggtatgtgctttttggagatgatcacctctgagttcccgtatagtgagtgcaaccatccggcacagatttacaagaaagttgttgggggaaagctaccaggagcattttacagagttggagacatcgaggcacagaggttcatcgggaaatgcctcgtgtctgcctcaaagagagtatcagcaaaagaactattgcaagatccatttcttgcctccgatgagtcctggatggtatacacgagcggtgctgggaatccaaagcccttcttgaacgagaatgaaatggacacactgaagttggaagatgatgagttaaggaccgagatgtccatcgctgggaagctgggcgctgaagataacaaaatcgatctggaagtacaaatcgcatatgataatggtctggccaataatgtattctttccctttgacatcatgaatgatacttccattgatgttgcaaaggagatggtaaaagaactcgaaattatagattgggagccagtcgagattgctaaaatgattgatggagcgatttcttctttggtgtctgattggaagtatgaggaagatgatgaaacccctcatgatcatcatcgtcatcgtaccgattcttttcactcttcttcctcgcacgcgtcatcttcccaagcttcactctcgaactatatggctcgaggccttcaagattgggtacaagatgatttacacgatgagacgtattctcagagttcttcccattcagggtcttactccaacctcaactacatagctgttgatgagtacagctcccaatctcctgttatgagcagaactcacaacatgacgaggttttgccccgaagaaagctctcatctacagtcaggacaagccaacgcgtatgcagcttccagttcaactaacagaagcttggcttcagacaaccgcacacttacaaggaaccgatcacttgtagacgtgcagagacagttactgcaccggtcgccaggggaagaggctagaaaaagaagattgttcaaaactgttggagacgtagaaacagttgggtttcagtcaccttatgcggtttcacggaagccaccaagctcaaggcgctagcttctccagtattttaattactgtaatatataagtatactgtaaaaaacaagtttgctggttcaaaaatgtaaaaagtacatgtgtttaataaagttgttcaaagggtgtgtttgtgtt

SEQ ID NO: 48979 - protein, 571 aa, Arabidopsis thaliana
  peptide (1)..(571): Ceres Seq. ID no. 12575841
MNMNQVAEYVETDPTGRYGRFAEILGRGAMKTVYKAIDEKLGIEVAWSQVKLKEVLRSSVDLQRLYSEVHLLSTLNHKSIIRFYTSWIDVHNHTLNFITELFTSGTLRQYKNKYLRIDIRAIKSWARQILEGLVYLHEHDPPVIHRDLKCDNIFVNGHLGQVKIGDLGLARMLRDCHSAHSIIGTPEFMAPELYEENYNELIDVYSFGMCFLEMITSEFPYSECNHPAQIYKKVVGGKLPGAFYRVGDIEAQRFIGKCLVSASKRVSAKELLQDPFLASDESWMVYTSGAGNPKPFLNENEMDTLKLEDDELRTEMSIAGKLGAEDNKIDLEVQIAYDNGLANNVFFPFDIMNDTSIDVAKEMVKELEIIDWEPVEIAKMIDGAISSLVSDWKYEEDDETPHDHHRHRTDSFHSSSSHASSSQASLSNYMARGLQDWVQDDLHDETYSQSSSHSGSYSNLNYIAVDEYSSQSPVMSRTHNMTRFCPEESSHLQSGQANAYAASSSTNRSLASDNRTLTRNRSLVDVQRQLLHRSPGEEARKRRLFKTVGDVETVGFQSPYAVSRKPPSSRR

SEQ ID NO: 48980 - protein, 569 aa, Arabidopsis thaliana
  peptide (1)..(569): Ceres Seq. ID no. 12575842
MNQVAEYVETDPTGRYGRFAEILGRGAMKTVYKAIDEKLGIEVAWSQVKLKEVLRSSVDLQRLYSEVHLLSTLNHKSIIRFYTSWIDVHNHTLNFITELFTSGTLRQYKNKYLRIDIRAIKSWARQILEGLVYLHEHDPPVIHRDLKCDNIFVNGHLGQVKIGDLGLARMLRDCHSAHSIIGTPEFMAPELYEENYNELIDVYSFGMCFLEMITSEFPYSECNHPAQIYKKVVGGKLPGAFYRVGDIEAQRFIGKCLVSASKRVSAKELLQDPFLASDESWMVYTSGAGNPKPFLNENEMDTLKLEDDELRTEMSIAGKLGAEDNKIDLEVQIAYDNGLANNVFFPFDIMNDTSIDVAKEMVKELEIIDWEPVEIAKMIDGAISSLVSDWKYEEDDETPHDHHRHRTDSFHSSSSHASSSQASLSNYMARGLQDWVQDDLHDETYSQSSSHSGSYSNLNYIAVDEYSSQSPVMSRTHNMTRFCPEESSHLQSGQANAYAASSSTNRSLASDNRTLTRNRSLVDVQRQLLHRSPGEEARKRRLFKTVGDVETVGFQSPYAVSRKPPSSRR

SEQ ID NO: 48981 - protein, 542 aa, Arabidopsis thaliana
  peptide (1)..(542): Ceres Seq. ID no. 12575843
MKTVYKAIDEKLGIEVAWSQVKLKEVLRSSVDLQRLYSEVHLLSTLNHKSIIRFYTSWIDVHNHTLNFITELFTSGTLRQYKNKYLRIDIRAIKSWARQILEGLVYLHEHDPPVIHRDLKCDNIFVNGHLGQVKIGDLGLARMLRDCHSAHSIIGTPEFMAPELYEENYNELIDVYSFGMCFLEMITSEFPYSECNHPAQIYKKVVGGKLPGAFYRVGDIEAQRFIGKCLVSASKRVSAKELLQDPFLASDESWMVYTSGAGNPKPFLNENEMDTLKLEDDELRTEMSIAGKLGAEDNKIDLEVQIAYDNGLANNVFFPFDIMNDTSIDVAKEMVKELEIIDWEPVEIAKMIDGAISSLVSDWKYEEDDETPHDHHRHRTDSFHSSSSHASSSQASLSNYMARGLQDWVQDDLHDETYSQSSSHSGSYSNLNYIAVDEYSSQSPVMSRTHNMTRFCPEESSHLQSGQANAYAASSSTNRSLASDNRTLTRNRSLVDVQRQLLHRSPGEEARKRRLFKTVGDVETVGFQSPYAVSRKPPSSRR

SEQ ID NO: 48982 - DNA, 1803 bp, Arabidopsis thaliana
  misc_feature (1)..(1803): Ceres Seq. ID no. 12601153
  misc_feature (1)..(1803): Ortholog of  Ceres SEQ ID NO 13599900 as cited in SEQ ID NO 531
  misc_feature (1)..(1803): Ortholog of  Ceres SEQ ID NO 13596509 as cited in SEQ ID NO 62004
  misc_feature (1)..(1803): Ortholog of  Ceres SEQ ID NO 13659971 as cited in SEQ ID NO 67565
  misc_feature (1)..(1803): Ortholog of  Ceres SEQ ID NO 13500385 as cited in SEQ ID NO 67583
atctcttatccgaatcctcccaatttgtctgtctctcttttgttttctctgctaacagatctctctaaatatctgttacttttgttcatatctttttacttttcaaactactaattttcctttcgcttcttctattaataacaacactctctctctcagacttcttttcttttttttctacggcgttgattcattcgcaatgacctcagtttctgtgtaccataattgacctagcagattctgtttttaatggtagattctgacccggtggaatttccgccggagaaccgccgtggacagctcttcggcaaatacgaggtcggaaaattggtgggatgcggcgccttcgcgaaagtgtaccacgggaggagcacagcgacgggtcagagcgttgcgatcaaagtggtgagcaagcaacggctgcagaaaggaggactcaatggcaacattcagagagagatcgctatcatgcaccgtctgcgccacccttctatcgtgcgcctgttcgaggtcctcgccaccaaatccaagatcttcttcgtcatggaattcgccaagggcggtgagctattcgccaaagtctccaagggcaggttctgcgaggatcttagccgtcgttatttccagcagctcatctccgccgtcggatattgccactcccgcggcatctttcaccgtgatctcaaaccggagaatctcctcctcgacgagaagctcgatttgaagatctctgatttcggactcagcgctcttaccgatcagatccgacccgacggcctcctccacacactctgtggtacgccggcgtacgtggcgcctgaggttttggcgaagaaagggtacgacggtgctaaaatcgacatatggtcatgtggaatcatactgttcgtcctcaacgccggttatctccctttcaacgaccataatctcatggttatgtaccggaaaatctacaagggagaatttcgcattcccaagtggacctcaccggatctccggcgactgctgactcggcttttagacacgaatccgcagacgaggatcactatcgaagagatcatccacgatccatggttcaaacagggctacgacgatcggatgtctaaattccatctagaggactccgatatgaaactcccggcggacgagaccgacagcgagatgggagcaaggaggatgaacgcattcgacatcatctcaggatctccagggttcaatctctccggtcttttcggagacgccagaaagtacgaccgagtggaacggttcgtgtcggcgtggacggcggagagggtggtggagaggctggaggagatcgtgtcggcggagaatctgacggtggcgaagaaggaaacatgggggatgaagatcgaggggcaaaaaggtaacttcgcaatggtggttgagataaaccagctaacggacgagctggttatgatagaggtgaggaagagacaaagagccgctgcatctggacgagatttatggacagatacactcaggcctttcttcgtcgagcttgtgcacgaatcagaccaaacggacccagaaccaactcaagtacatacgacgtcgtagtttaggtatctgtcaaataaattatccaaataataattaaaaaaaaatatcccgggttatatgtaattgcttttttttttacccggagaatatctctgacataattattcaggaaatttctcgacaaatcttaatttttagttggcaagtatgtatcttcttgttatgtaatcataattatattttatataaatgaaaaataaaatataaaaaaatgtattactt

SEQ ID NO: 48983 - protein, 442 aa, Arabidopsis thaliana
  peptide (1)..(442): Ceres Seq. ID no. 12601154
MVDSDPVEFPPENRRGQLFGKYEVGKLVGCGAFAKVYHGRSTATGQSVAIKVVSKQRLQKGGLNGNIQREIAIMHRLRHPSIVRLFEVLATKSKIFFVMEFAKGGELFAKVSKGRFCEDLSRRYFQQLISAVGYCHSRGIFHRDLKPENLLLDEKLDLKISDFGLSALTDQIRPDGLLHTLCGTPAYVAPEVLAKKGYDGAKIDIWSCGIILFVLNAGYLPFNDHNLMVMYRKIYKGEFRIPKWTSPDLRRLLTRLLDTNPQTRITIEEIIHDPWFKQGYDDRMSKFHLEDSDMKLPADETDSEMGARRMNAFDIISGSPGFNLSGLFGDARKYDRVERFVSAWTAERVVERLEEIVSAENLTVAKKETWGMKIEGQKGNFAMVVEINQLTDELVMIEVRKRQRAAASGRDLWTDTLRPFFVELVHESDQTDPEPTQVHTTS

SEQ ID NO: 48984 - protein, 369 aa, Arabidopsis thaliana
  peptide (1)..(369): Ceres Seq. ID no. 12601155
MHRLRHPSIVRLFEVLATKSKIFFVMEFAKGGELFAKVSKGRFCEDLSRRYFQQLISAVGYCHSRGIFHRDLKPENLLLDEKLDLKISDFGLSALTDQIRPDGLLHTLCGTPAYVAPEVLAKKGYDGAKIDIWSCGIILFVLNAGYLPFNDHNLMVMYRKIYKGEFRIPKWTSPDLRRLLTRLLDTNPQTRITIEEIIHDPWFKQGYDDRMSKFHLEDSDMKLPADETDSEMGARRMNAFDIISGSPGFNLSGLFGDARKYDRVERFVSAWTAERVVERLEEIVSAENLTVAKKETWGMKIEGQKGNFAMVVEINQLTDELVMIEVRKRQRAAASGRDLWTDTLRPFFVELVHESDQTDPEPTQVHTTS

SEQ ID NO: 48985 - protein, 344 aa, Arabidopsis thaliana
  peptide (1)..(344): Ceres Seq. ID no. 12601156
MEFAKGGELFAKVSKGRFCEDLSRRYFQQLISAVGYCHSRGIFHRDLKPENLLLDEKLDLKISDFGLSALTDQIRPDGLLHTLCGTPAYVAPEVLAKKGYDGAKIDIWSCGIILFVLNAGYLPFNDHNLMVMYRKIYKGEFRIPKWTSPDLRRLLTRLLDTNPQTRITIEEIIHDPWFKQGYDDRMSKFHLEDSDMKLPADETDSEMGARRMNAFDIISGSPGFNLSGLFGDARKYDRVERFVSAWTAERVVERLEEIVSAENLTVAKKETWGMKIEGQKGNFAMVVEINQLTDELVMIEVRKRQRAAASGRDLWTDTLRPFFVELVHESDQTDPEPTQVHTTS

SEQ ID NO: 48986 - DNA, 1945 bp, Arabidopsis thaliana
  misc_feature (1)..(1945): Ceres Seq. ID no. 12575102
  misc_feature (1)..(1945): Ortholog of  Ceres SEQ ID NO 13655640 as cited in SEQ ID NO 63844
  misc_feature (1)..(1945): Ortholog of  Ceres SEQ ID NO 13584744 as cited in SEQ ID NO 69137
gaaggaaacaatcgtttgacaacttcgaggattttcccgcttccatttgctataatcgtcaatttctttatttgtcttcttcttcttcttcttcatctcgattcaatttaatgccaaaaaaaacttatctttttaatgtatttataatgtttcaaatggtctgccctagaagaaagggcatacaaatgataactaacattgaagtctagagaattcttatactttttctacgatggagatttctttgatgaagtttctgtttttaggaatctgggtttattattactctgttcttgactctgtttctgccatggatagtcttttatctcccaagggtgttaactatgaagtggctgcgttaatgtcagtgaagaacaagatgaaagatgagaaagaggttttgtctggttgggatattaactctgttgatccttgtacttggaacatggttggttgttcttctgaaggttttgtggtttctctgttacttcagaataatcagttaactggtccgattccttctgagttaggccaactctctgagcttgaaacgcttgatttatcggggaatcggtttagtggtgaaatcccagcttctttagggttcttaactcacttaaactacttgcggcttagcaggaatcttttatctgggcaagtccctcacctcgtcgctggcctctcaggtctttctttcttgattgtaggaaatgcatttctttgtggtccagcttcccaagagctttgctcagatgctacacctgtgagaaatgcgacgggtttgtctgaaaaggacaatagcaaacatcacagcttagtgctctcttttgcatttggcattgttgttgcctttatcatctccctaatgtttctcttcttctgggtgctttggcatcgatcacgtctctcaagatcacacgtgcagcaagactacgaatttgaaatcggccatctgaaaaggttcagttttcgcgaaatacaaaccgcaacaagcaattttagtccaaagaacattttgggacaaggagggtttgggatggtttataaagggtatctcccaaatggaactgtggtggcagttaaaagattgaaagatccgatttatacaggagaagttcagtttcaaaccgaagtagagatgattggcttagctgttcaccgtaaccttttacgcctctttggattctgtatgaccccggaagagagaatgcttgtgtatccgtacatgccaaatggaagcgtagctgatcgtctgagagacaattatggagaaaagccgtctctagattggaatcggaggataagcattgcactcggcgcagctcgaggacttgtttacttgcacgagcaatgcaatccaaagattattcacagagacgtcaaagctgcaaatattctacttgatgagagctttgaagcaatagttggcgattttggtctagcaaagcttttagaccagagagattcacatgtcactaccgcagtccgaggaaccattggacacatcgctcccgagtacctttccactggacagtcctcagagaaaaccgatgttttcggattcggagtactaatccttgaactcataacaggtcataagatgattgatcaaggcaatggtcaagttcgaaaaggaatgatattgagctgggtaaggacattgaaagcagagaagagatttgcagagatggtggacagagatttgaagggagagtttgatgatttggtgttggaggaagtagtggaattggctttgctttgtacacagccacatccgaatctaagaccgaggatgtctcaagtgttgaaggtactagaaggtttagtggaacagtgtgaaggagggtatgaagctagagctccaagtgtctctaggaactacagtaatggtcatgaagagcagtcctttattattgaagccattgagctctctggaccacgatga

SEQ ID NO: 48987 - protein, 570 aa, Arabidopsis thaliana
  peptide (1)..(570): Ceres Seq. ID no. 12575103
MEISLMKFLFLGIWVYYYSVLDSVSAMDSLLSPKGVNYEVAALMSVKNKMKDEKEVLSGWDINSVDPCTWNMVGCSSEGFVVSLLLQNNQLTGPIPSELGQLSELETLDLSGNRFSGEIPASLGFLTHLNYLRLSRNLLSGQVPHLVAGLSGLSFLIVGNAFLCGPASQELCSDATPVRNATGLSEKDNSKHHSLVLSFAFGIVVAFIISLMFLFFWVLWHRSRLSRSHVQQDYEFEIGHLKRFSFREIQTATSNFSPKNILGQGGFGMVYKGYLPNGTVVAVKRLKDPIYTGEVQFQTEVEMIGLAVHRNLLRLFGFCMTPEERMLVYPYMPNGSVADRLRDNYGEKPSLDWNRRISIALGAARGLVYLHEQCNPKIIHRDVKAANILLDESFEAIVGDFGLAKLLDQRDSHVTTAVRGTIGHIAPEYLSTGQSSEKTDVFGFGVLILELITGHKMIDQGNGQVRKGMILSWVRTLKAEKRFAEMVDRDLKGEFDDLVLEEVVELALLCTQPHPNLRPRMSQVLKVLEGLVEQCEGGYEARAPSVSRNYSNGHEEQSFIIEAIELSGPR

SEQ ID NO: 48988 - protein, 565 aa, Arabidopsis thaliana
  peptide (1)..(565): Ceres Seq. ID no. 12575104
MKFLFLGIWVYYYSVLDSVSAMDSLLSPKGVNYEVAALMSVKNKMKDEKEVLSGWDINSVDPCTWNMVGCSSEGFVVSLLLQNNQLTGPIPSELGQLSELETLDLSGNRFSGEIPASLGFLTHLNYLRLSRNLLSGQVPHLVAGLSGLSFLIVGNAFLCGPASQELCSDATPVRNATGLSEKDNSKHHSLVLSFAFGIVVAFIISLMFLFFWVLWHRSRLSRSHVQQDYEFEIGHLKRFSFREIQTATSNFSPKNILGQGGFGMVYKGYLPNGTVVAVKRLKDPIYTGEVQFQTEVEMIGLAVHRNLLRLFGFCMTPEERMLVYPYMPNGSVADRLRDNYGEKPSLDWNRRISIALGAARGLVYLHEQCNPKIIHRDVKAANILLDESFEAIVGDFGLAKLLDQRDSHVTTAVRGTIGHIAPEYLSTGQSSEKTDVFGFGVLILELITGHKMIDQGNGQVRKGMILSWVRTLKAEKRFAEMVDRDLKGEFDDLVLEEVVELALLCTQPHPNLRPRMSQVLKVLEGLVEQCEGGYEARAPSVSRNYSNGHEEQSFIIEAIELSGPR

SEQ ID NO: 48989 - protein, 544 aa, Arabidopsis thaliana
  peptide (1)..(544): Ceres Seq. ID no. 12575105
MDSLLSPKGVNYEVAALMSVKNKMKDEKEVLSGWDINSVDPCTWNMVGCSSEGFVVSLLLQNNQLTGPIPSELGQLSELETLDLSGNRFSGEIPASLGFLTHLNYLRLSRNLLSGQVPHLVAGLSGLSFLIVGNAFLCGPASQELCSDATPVRNATGLSEKDNSKHHSLVLSFAFGIVVAFIISLMFLFFWVLWHRSRLSRSHVQQDYEFEIGHLKRFSFREIQTATSNFSPKNILGQGGFGMVYKGYLPNGTVVAVKRLKDPIYTGEVQFQTEVEMIGLAVHRNLLRLFGFCMTPEERMLVYPYMPNGSVADRLRDNYGEKPSLDWNRRISIALGAARGLVYLHEQCNPKIIHRDVKAANILLDESFEAIVGDFGLAKLLDQRDSHVTTAVRGTIGHIAPEYLSTGQSSEKTDVFGFGVLILELITGHKMIDQGNGQVRKGMILSWVRTLKAEKRFAEMVDRDLKGEFDDLVLEEVVELALLCTQPHPNLRPRMSQVLKVLEGLVEQCEGGYEARAPSVSRNYSNGHEEQSFIIEAIELSGPR

SEQ ID NO: 48990 - DNA, 3582 bp, Arabidopsis thaliana
  misc_feature (1)..(3582): Ceres Seq. ID no. 12575140
  misc_feature (1)..(3582): Ortholog of  Ceres SEQ ID NO 13600310 as cited in SEQ ID NO 5086
  misc_feature (1)..(3582): Ortholog of  Ceres SEQ ID NO 15180362 as cited in SEQ ID NO 0
agagaagaagaagaaagagagaagtgagagaaagacgaagaagatgaagagcatattgctttttctgtccccagccatatttttaccgagtccgtaaccgagtttgaacgagttagtggatggcttcatcgtcgtctagaactaggagtcgttctcctttctcgcaccgtagacctccgagtccttactcttcggcttcgtctacttcttcgtctcttataaataatcgtctattacctcgttcttcttccacacctacttctaccgtttacaattccggcggtgtaaccgggtcccgatctatgtcgattactcgcaccatttccgattccggtcccatcggcggctccgggacttatggagcccaatcgtacccatcggaggggctcattggcgagtctgggcagacgattacctctgagcgagatagcatctccgtcaccgttcgatttcgtccgatgagtgagagggagtatcaacgaggagatgagattgtttggtatcctgacgcagataagatggtcaggaatgaatacaatcccctcacagcttacgcatttgataaagtttttggaccacagtcaacaactccagaagtatatgacgtagctgctaaacctgtagtcaaggctgctatggaaggtgttaacggaaccgtttttgcttatggtgttacaagcagtggaaagacacatacaatgcatggtgatcaagattttcctggaatcataccattagcaataaaagacgtgttcagtatcattcaggaaaccaccggaagagagtttctgctccgtgtttcatatcttgaaatatacaatgaggtgataaatgacttactggatccaacagggcaaaatttacgtattagagaggattcccagggcacttacgttgagggtatcaaggaagaagtcgttttgtctccaggccatgcgttatctttcattgcagctggggaagaacatcgtcatgttggttcaaataatttcaacctgatgagcagcagaagtcacacaatatttacactgatgattgaaagtagtgctcatggagaccaatatgatggagttattttttctcagctaaatttgattgacttagctggatctgagagttccaaaactgagacaacgggactgaggaggaaagagggtgcatacatcaacaagagtcttctgactcttggaactgtgattggaaaactgactgagggcaagacaactcatgtcccatttcgggactctaagctaactcgtcttctgcaatcttcactgagtgggcatgggcatgtatcgctcatatgtacagttactcctgcgtcaagcagtaccgaggaaactcataatactttgaagtttgccagcagggcaaagagaattgaaattaatgcctcacgcaataagatcatagatgagaagtcattgattaagaaatatcagaaagaaatctcgaccctcaaagtcgaacttgatcagctaagaaggggtgtgctagttggtgtcagtcacgaagagttattgagcctaaagcaacagctacaagaaggtcaagtgaagatgcaatcaagattggaggaagaagaagaagctaaagcagctctaatgagtagaatccaaaagcttacaaagctcatacttgtctctaccaagaattctattcctggatatttaggtgacacaccagctcattctcgcagcatttctgctggtaaagatgataagttagactctctgctcttggatagtgataatctggcatctccatcttcgactctctctctagcatcagatgcgcgacggtcttccagcaagtttaaggatgaaaactctccagttggttctcgtgcagaattaactcaaggcgttatgactcccgatgaaatggatctcctcgttgagcaagttaagatgcttgctggtgagatagctttcggcacaagcacactaaagcgtttggtggatcagtccatgaatgatcctgaaaactcgaaaacccaaatccagaatctagaaaatgatattcaagaaaagcaaagacaaatgaaatccttggaacagagaataactgagagtggtgaagcttcaattgctaatgcatcatcgattgagatgcaagagaaagttatgagattgatgacacaatgcaatgagaagagctttgagctggagattatatcagcagataatcgtattctccaagaacaactacagacaaagtgtaccgagaacaatgaattgcacgaaaaggtgcatcttctagagcaacgattatcgagtcagaaggccacactgtcttgttgtgatgttgtgactgaagagtatgtagatgagctgaaaaagaaagtacagtctcaggagattgagaacgaaaagttgaagctagagcatgtgcagagtgtggaggagaagagtggattacgagtgcaaaatcaaaaattagctgaagaagcttcatatgcaaaagaattggcctctgcagctgctattgagctgaagaatctagctgatgaagttacaaagctctcgcttcaaaacgcaaagctagaaaaagaattagtagctgcaagagacttggcagcggcagctcagaagcgtaacaacaactccatgaacagcgcagcgaaccgtaatggaacaaggccagggagaaaggcaaggatctcagactcatggaacctcaaccaagaaaatctcacaatggaattgcaggcaaggaaacagcgagaagcagtacttgaggctgcactagctgagaaagaatacatagaagaagagtttaggaaaaaagctgaagaagcaaagagaagagaagaggcccttgaaaacgatttagccaacatgtgggtgcttgttgccaagttgaagaaagccaatagtggcgccttgtcaatacaaaagagtgacgaagcagagcctgcaaaggaagatgaagtgacagagttagataataagaatgaacaaaatgcaatcttgaaagagaggcaactcgtgaatggacatgaagaagtaatagttgccaaggctgaagagacaccaaaggaggaacctcttgttgctcgtcttaaggcaagaatgcaagagatgaaagagaaagagatgaaatctcaggcggctgcagcagctaatgctgatgcaaactcacatatatgtaaagtctgttttgagtcgccgaccgccacaattctcctcccttgccgtcatttctgcctctgtaaatcttgttcacttgcctgctctgagtgcccaatctgccgaaccaagatctctgatcgcctgttcgccttcccgtcttgacctgcggcaagtatagtcactctcctacacacagtataaggtataaagaactatatggaagtctgtttgtttgctaacattttccagaacggcaggctcgaattcttttattacaagttgttttttgttttcttgtatgtaatgtctttgttatatctttctgttcaaaatgtggtaaagaaagaggaaacataacatgctaacagaaaaataggaaacatatcatagccgtttcatagtaagttcaaaatttgaagtaagtaattaaaaattattttgctaattc

SEQ ID NO: 48991 - protein, 1058 aa, Arabidopsis thaliana
  peptide (1)..(1058): Ceres Seq. ID no. 12575141
MASSSSRTRSRSPFSHRRPPSPYSSASSTSSSLINNRLLPRSSSTPTSTVYNSGGVTGSRSMSITRTISDSGPIGGSGTYGAQSYPSEGLIGESGQTITSERDSISVTVRFRPMSEREYQRGDEIVWYPDADKMVRNEYNPLTAYAFDKVFGPQSTTPEVYDVAAKPVVKAAMEGVNGTVFAYGVTSSGKTHTMHGDQDFPGIIPLAIKDVFSIIQETTGREFLLRVSYLEIYNEVINDLLDPTGQNLRIREDSQGTYVEGIKEEVVLSPGHALSFIAAGEEHRHVGSNNFNLMSSRSHTIFTLMIESSAHGDQYDGVIFSQLNLIDLAGSESSKTETTGLRRKEGAYINKSLLTLGTVIGKLTEGKTTHVPFRDSKLTRLLQSSLSGHGHVSLICTVTPASSSTEETHNTLKFASRAKRIEINASRNKIIDEKSLIKKYQKEISTLKVELDQLRRGVLVGVSHEELLSLKQQLQEGQVKMQSRLEEEEEAKAALMSRIQKLTKLILVSTKNSIPGYLGDTPAHSRSISAGKDDKLDSLLLDSDNLASPSSTLSLASDARRSSSKFKDENSPVGSRAELTQGVMTPDEMDLLVEQVKMLAGEIAFGTSTLKRLVDQSMNDPENSKTQIQNLENDIQEKQRQMKSLEQRITESGEASIANASSIEMQEKVMRLMTQCNEKSFELEIISADNRILQEQLQTKCTENNELHEKVHLLEQRLSSQKATLSCCDVVTEEYVDELKKKVQSQEIENEKLKLEHVQSVEEKSGLRVQNQKLAEEASYAKELASAAAIELKNLADEVTKLSLQNAKLEKELVAARDLAAAAQKRNNNSMNSAANRNGTRPGRKARISDSWNLNQENLTMELQARKQREAVLEAALAEKEYIEEEFRKKAEEAKRREEALENDLANMWVLVAKLKKANSGALSIQKSDEAEPAKEDEVTELDNKNEQNAILKERQLVNGHEEVIVAKAEETPKEEPLVARLKARMQEMKEKEMKSQAAAAANADANSHICKVCFESPTATILLPCRHFCLCKSCSLACSECPICRTKISDRLFAFPS

SEQ ID NO: 48992 - protein, 997 aa, Arabidopsis thaliana
  peptide (1)..(997): Ceres Seq. ID no. 12575142
MSITRTISDSGPIGGSGTYGAQSYPSEGLIGESGQTITSERDSISVTVRFRPMSEREYQRGDEIVWYPDADKMVRNEYNPLTAYAFDKVFGPQSTTPEVYDVAAKPVVKAAMEGVNGTVFAYGVTSSGKTHTMHGDQDFPGIIPLAIKDVFSIIQETTGREFLLRVSYLEIYNEVINDLLDPTGQNLRIREDSQGTYVEGIKEEVVLSPGHALSFIAAGEEHRHVGSNNFNLMSSRSHTIFTLMIESSAHGDQYDGVIFSQLNLIDLAGSESSKTETTGLRRKEGAYINKSLLTLGTVIGKLTEGKTTHVPFRDSKLTRLLQSSLSGHGHVSLICTVTPASSSTEETHNTLKFASRAKRIEINASRNKIIDEKSLIKKYQKEISTLKVELDQLRRGVLVGVSHEELLSLKQQLQEGQVKMQSRLEEEEEAKAALMSRIQKLTKLILVSTKNSIPGYLGDTPAHSRSISAGKDDKLDSLLLDSDNLASPSSTLSLASDARRSSSKFKDENSPVGSRAELTQGVMTPDEMDLLVEQVKMLAGEIAFGTSTLKRLVDQSMNDPENSKTQIQNLENDIQEKQRQMKSLEQRITESGEASIANASSIEMQEKVMRLMTQCNEKSFELEIISADNRILQEQLQTKCTENNELHEKVHLLEQRLSSQKATLSCCDVVTEEYVDELKKKVQSQEIENEKLKLEHVQSVEEKSGLRVQNQKLAEEASYAKELASAAAIELKNLADEVTKLSLQNAKLEKELVAARDLAAAAQKRNNNSMNSAANRNGTRPGRKARISDSWNLNQENLTMELQARKQREAVLEAALAEKEYIEEEFRKKAEEAKRREEALENDLANMWVLVAKLKKANSGALSIQKSDEAEPAKEDEVTELDNKNEQNAILKERQLVNGHEEVIVAKAEETPKEEPLVARLKARMQEMKEKEMKSQAAAAANADANSHICKVCFESPTATILLPCRHFCLCKSCSLACSECPICRTKISDRLFAFPS

SEQ ID NO: 48993 - protein, 945 aa, Arabidopsis thaliana
  peptide (1)..(945): Ceres Seq. ID no. 12575143
MSEREYQRGDEIVWYPDADKMVRNEYNPLTAYAFDKVFGPQSTTPEVYDVAAKPVVKAAMEGVNGTVFAYGVTSSGKTHTMHGDQDFPGIIPLAIKDVFSIIQETTGREFLLRVSYLEIYNEVINDLLDPTGQNLRIREDSQGTYVEGIKEEVVLSPGHALSFIAAGEEHRHVGSNNFNLMSSRSHTIFTLMIESSAHGDQYDGVIFSQLNLIDLAGSESSKTETTGLRRKEGAYINKSLLTLGTVIGKLTEGKTTHVPFRDSKLTRLLQSSLSGHGHVSLICTVTPASSSTEETHNTLKFASRAKRIEINASRNKIIDEKSLIKKYQKEISTLKVELDQLRRGVLVGVSHEELLSLKQQLQEGQVKMQSRLEEEEEAKAALMSRIQKLTKLILVSTKNSIPGYLGDTPAHSRSISAGKDDKLDSLLLDSDNLASPSSTLSLASDARRSSSKFKDENSPVGSRAELTQGVMTPDEMDLLVEQVKMLAGEIAFGTSTLKRLVDQSMNDPENSKTQIQNLENDIQEKQRQMKSLEQRITESGEASIANASSIEMQEKVMRLMTQCNEKSFELEIISADNRILQEQLQTKCTENNELHEKVHLLEQRLSSQKATLSCCDVVTEEYVDELKKKVQSQEIENEKLKLEHVQSVEEKSGLRVQNQKLAEEASYAKELASAAAIELKNLADEVTKLSLQNAKLEKELVAARDLAAAAQKRNNNSMNSAANRNGTRPGRKARISDSWNLNQENLTMELQARKQREAVLEAALAEKEYIEEEFRKKAEEAKRREEALENDLANMWVLVAKLKKANSGALSIQKSDEAEPAKEDEVTELDNKNEQNAILKERQLVNGHEEVIVAKAEETPKEEPLVARLKARMQEMKEKEMKSQAAAAANADANSHICKVCFESPTATILLPCRHFCLCKSCSLACSECPICRTKISDRLFAFPS

SEQ ID NO: 48994 - DNA, 1383 bp, Arabidopsis thaliana
  misc_feature (1)..(1383): Ceres Seq. ID no. 12601598
  misc_feature (1)..(1383): Ortholog of  Ceres SEQ ID NO 13648212 as cited in SEQ ID NO 20387
  misc_feature (1)..(1383): Ortholog of  Ceres SEQ ID NO 14314471 as cited in SEQ ID NO 52369
gaatcgttatctttctcttctttccttaaaccaaaacccaaaaaagagagaccagacaaaaaaaaaaaaactccccaacaaaaaaaagatatctgtctctactaaaagtctctctatagcgatgtcatcggacaacgaatcgacaccgtctcaagcgacggtagaaatgatggcgacttcgccggcgaagattaaagagtatccagaaccattggctttacatgaagttgtcgtcaaggattcttctgtcttctgggatactctcaggcggtttcactcaattatgtccactaagttcatgattcctgtgattggaggaaaagaactagatttgcatgttttgtatgtggaagtcacgaggaggggaggttacgaaaaggtagtcgtagagaaaaaatggagggaagttggaggagtgtttagattctctgcgacaacaacaagtgcttcgtttgtcttaaggaaacattatctcaatcttctcttccattacgaacaagttcatctcttcactgctcgtggtcctcttcttcatcccatagctacatttcatgcaaatccctcaacgagcaaagaaatggcgctcgtcgaatatactcctccgagtataagatatcataatactcatcctccttctcaaggttcgtcgagtttcacagccataggtacaatagaaggcaaattcgattgtggttatctggtaaaagttaagttgggctcagagattcttaacggcgttctttatcattcggcccagcccggcccatcatcatctccaaccgctgttctaaacaatgccgttgtaccttatgttgaaactgggaggagacggcgtcgtttaggtaaaagacgaagaagcagacgcagagaagatccgaattacccgaaaccgaaccggagcggttacaatttcttctttgctgagaaacattgcaagctcaaatcactttatcccaacaaggagagagagtttacgaaacttatcggagaatcgtggagcaatctctctaccgaagaacgaatggtttatcaagacattggattgaaggataaggaaaggtatcagagggagttgaatgagtacagagaaacgttgagacttagggatggtgacatgacaaacggcaaggctttttaggtgatttagttaaaacggcaagtcgttttgttgtaggtcgtttctctcttttaagattggacgcctcgccgtttcttttattttctagcttattgtagttgtccatgcttgcttaactaggctcagtgagaggctagacttgccaaacttgaagagtctttatttatttaagaattttagatgttctaatgtattaatcctttttcgtaaacctttcctgttaaacaagaggtttatgttgcatg

SEQ ID NO: 48995 - protein, 378 aa, Arabidopsis thaliana
  peptide (1)..(378): Ceres Seq. ID no. 12601599
NRYLSLLSLNQNPKKRDQTKKKKLPNKKKISVSTKSLSIAMSSDNESTPSQATVEMMATSPAKIKEYPEPLALHEVVVKDSSVFWDTLRRFHSIMSTKFMIPVIGGKELDLHVLYVEVTRRGGYEKVVVEKKWREVGGVFRFSATTTSASFVLRKHYLNLLFHYEQVHLFTARGPLLHPIATFHANPSTSKEMALVEYTPPSIRYHNTHPPSQGSSSFTAIGTIEGKFDCGYLVKVKLGSEILNGVLYHSAQPGPSSSPTAVLNNAVVPYVETGRRRRRLGKRRRSRRREDPNYPKPNRSGYNFFFAEKHCKLKSLYPNKEREFTKLIGESWSNLSTEERMVYQDIGLKDKERYQRELNEYRETLRLRDGDMTNGKAF

SEQ ID NO: 48996 - protein, 338 aa, Arabidopsis thaliana
  peptide (1)..(338): Ceres Seq. ID no. 12601600
MSSDNESTPSQATVEMMATSPAKIKEYPEPLALHEVVVKDSSVFWDTLRRFHSIMSTKFMIPVIGGKELDLHVLYVEVTRRGGYEKVVVEKKWREVGGVFRFSATTTSASFVLRKHYLNLLFHYEQVHLFTARGPLLHPIATFHANPSTSKEMALVEYTPPSIRYHNTHPPSQGSSSFTAIGTIEGKFDCGYLVKVKLGSEILNGVLYHSAQPGPSSSPTAVLNNAVVPYVETGRRRRRLGKRRRSRRREDPNYPKPNRSGYNFFFAEKHCKLKSLYPNKEREFTKLIGESWSNLSTEERMVYQDIGLKDKERYQRELNEYRETLRLRDGDMTNGKAF

SEQ ID NO: 48997 - protein, 323 aa, Arabidopsis thaliana
  peptide (1)..(323): Ceres Seq. ID no. 12601601
MMATSPAKIKEYPEPLALHEVVVKDSSVFWDTLRRFHSIMSTKFMIPVIGGKELDLHVLYVEVTRRGGYEKVVVEKKWREVGGVFRFSATTTSASFVLRKHYLNLLFHYEQVHLFTARGPLLHPIATFHANPSTSKEMALVEYTPPSIRYHNTHPPSQGSSSFTAIGTIEGKFDCGYLVKVKLGSEILNGVLYHSAQPGPSSSPTAVLNNAVVPYVETGRRRRRLGKRRRSRRREDPNYPKPNRSGYNFFFAEKHCKLKSLYPNKEREFTKLIGESWSNLSTEERMVYQDIGLKDKERYQRELNEYRETLRLRDGDMTNGKAF

SEQ ID NO: 48998 - DNA, 2363 bp, Arabidopsis thaliana
  misc_feature (1)..(2363): Ceres Seq. ID no. 12578070
  misc_feature (1)..(2363): Ortholog of  Ceres SEQ ID NO 13660025 as cited in SEQ ID NO 67389
atttgcctccttcttcttcaaaccaatttcttcttcttcttctctcaggtttgagtctgaggcatcacaacagataaagtcttgaactttgatcaagaattctaaacggagtttttgctcttctcgtcggtgaaagaaaaatcgagatgggttcaactccgttttgctactctatcaatccatctccatcaaagcttgatttcacgaggacccatgtgtttagtcctgtttctaaacagttttacttagatttatcatcgttttccggaaaacccggaggagtatctgggtttaggagccgtcgagctttgctcggagtaaaggcggcgacggcgttagttgagaaggaggagaagagagaggcggtgacggagaagaagaagaaatcgagggttttagttgccggaggtggaatcggaggattggtgtttgctttagcggctaagaagaaaggattcgatgtgttagtgtttgagaaagatttgagtgctataagaggagaaggaaaatacagaggcccgattcaaatacagagcaacgctttagctgctttggaagctattgatattgaagttgctgaacaagttatggaagctgggtgtatcactggtgatcggattaacggtctcgttgatggtatctctggtacttggtatgtaaagtttgatactttcactcctgcggcgtcacggggacttcctgtgactagagtaattagtagaatgactctgcagcagattctagcacgtgcggttggagaagatgtgattagaaacgagagtaatgttgttgattttgaagattctggagataaggttactgtggtactcgagaatggtcaacgctatgaaggtgatctgcttgtgggtgcagatggcatttggtctaaggtgagaaataatttgtttggccgtagtgaagctacttattcaggctacacttgttacacggggattgcagattttataccagcggatatcgagtctgttggctaccgggttttcttgggacacaaacagtactttgtttcttcggatgttggtggtggaaaaatgcaatggtatgcatttcacgaggaaccagctggtggggctgatgctccaaatggtatgaagaaaaggttgtttgaaatatttgacggttggtgcgacaatgtactcgacttgttgcatgcgactgaggaggaagccattctgagaagagatatttatgatagaagtcctggttttacttggggtaaagggcgtgttacgctgctcggggattctatccatgcgatgcagccaaatatgggtcaaggtggatgcatggccattgaggatagttttcaactagcattggagcttgatgaagcatggaaacagagtgttgaaacgactacacctgttgatgttgtttcctctttgaaaagatatgaggaatctagaagactgagagtcgctattatccatgcaatggcgaggatggctgcaattatggcttccacttacaaagcatacttaggtgttgggcttggtcctctgtctttcttgacaaagtttagagtaccacatccaggaagagttggtggtagattcttcgttgacattgctatgccatcgatgcttgactgggtccttggaggtaacagtgaaaaactccaaggaaggccacctagttgcagactcactgacaaagccgatgaccggcttcgagagtggtttgaagatgacgatgctcttgaacgtactataaagggagaatggtatctaattccacacggcgacgattgttgcgtttcggaaacattatgtctaaccaaagatgaagatcaaccttgcatcgtcggaagcgaaccagatcaagattttcctggaatgcgcattgtgatcccttcgtctcaggtttcgaagatgcatgctcgtgtgatttacaaagacggagctttcttcttgatggatcttcgaagcgaacacggaacctatgtgaccgataacgaaggaagaagatatagagcaacaccgaattttcccgcgcggtttagatcgtccgacatcatcgagtttggttcagataagaaggcggcgtttagggtgaaagtaatcaggaaaactccgaaatcgacgaggaagaatgagagtaacaacgataaattacttcagacagcttgaaataagtaaaccgatggtgaaattaagtaattttaatcggtttggcagataatttgagtagtaattttctcaaaagaaaaaaaatctgctttcagctattccttgcatgacaatgtatatataggtctgaaacaaaatataaattatacaagacattaatcttcatttcttcaacttccaggcaacaataatctaattttgattactaaaagg

SEQ ID NO: 48999 - protein, 667 aa, Arabidopsis thaliana
  peptide (1)..(667): Ceres Seq. ID no. 12578071
MGSTPFCYSINPSPSKLDFTRTHVFSPVSKQFYLDLSSFSGKPGGVSGFRSRRALLGVKAATALVEKEEKREAVTEKKKKSRVLVAGGGIGGLVFALAAKKKGFDVLVFEKDLSAIRGEGKYRGPIQIQSNALAALEAIDIEVAEQVMEAGCITGDRINGLVDGISGTWYVKFDTFTPAASRGLPVTRVISRMTLQQILARAVGEDVIRNESNVVDFEDSGDKVTVVLENGQRYEGDLLVGADGIWSKVRNNLFGRSEATYSGYTCYTGIADFIPADIESVGYRVFLGHKQYFVSSDVGGGKMQWYAFHEEPAGGADAPNGMKKRLFEIFDGWCDNVLDLLHATEEEAILRRDIYDRSPGFTWGKGRVTLLGDSIHAMQPNMGQGGCMAIEDSFQLALELDEAWKQSVETTTPVDVVSSLKRYEESRRLRVAIIHAMARMAAIMASTYKAYLGVGLGPLSFLTKFRVPHPGRVGGRFFVDIAMPSMLDWVLGGNSEKLQGRPPSCRLTDKADDRLREWFEDDDALERTIKGEWYLIPHGDDCCVSETLCLTKDEDQPCIVGSEPDQDFPGMRIVIPSSQVSKMHARVIYKDGAFFLMDLRSEHGTYVTDNEGRRYRATPNFPARFRSSDIIEFGSDKKAAFRVKVIRKTPKSTRKNESNNDKLLQTA

SEQ ID NO: 49000 - protein, 520 aa, Arabidopsis thaliana
  peptide (1)..(520): Ceres Seq. ID no. 12578072
MEAGCITGDRINGLVDGISGTWYVKFDTFTPAASRGLPVTRVISRMTLQQILARAVGEDVIRNESNVVDFEDSGDKVTVVLENGQRYEGDLLVGADGIWSKVRNNLFGRSEATYSGYTCYTGIADFIPADIESVGYRVFLGHKQYFVSSDVGGGKMQWYAFHEEPAGGADAPNGMKKRLFEIFDGWCDNVLDLLHATEEEAILRRDIYDRSPGFTWGKGRVTLLGDSIHAMQPNMGQGGCMAIEDSFQLALELDEAWKQSVETTTPVDVVSSLKRYEESRRLRVAIIHAMARMAAIMASTYKAYLGVGLGPLSFLTKFRVPHPGRVGGRFFVDIAMPSMLDWVLGGNSEKLQGRPPSCRLTDKADDRLREWFEDDDALERTIKGEWYLIPHGDDCCVSETLCLTKDEDQPCIVGSEPDQDFPGMRIVIPSSQVSKMHARVIYKDGAFFLMDLRSEHGTYVTDNEGRRYRATPNFPARFRSSDIIEFGSDKKAAFRVKVIRKTPKSTRKNESNNDKLLQTA

SEQ ID NO: 49001 - protein, 475 aa, Arabidopsis thaliana
  peptide (1)..(475): Ceres Seq. ID no. 12578073
MTLQQILARAVGEDVIRNESNVVDFEDSGDKVTVVLENGQRYEGDLLVGADGIWSKVRNNLFGRSEATYSGYTCYTGIADFIPADIESVGYRVFLGHKQYFVSSDVGGGKMQWYAFHEEPAGGADAPNGMKKRLFEIFDGWCDNVLDLLHATEEEAILRRDIYDRSPGFTWGKGRVTLLGDSIHAMQPNMGQGGCMAIEDSFQLALELDEAWKQSVETTTPVDVVSSLKRYEESRRLRVAIIHAMARMAAIMASTYKAYLGVGLGPLSFLTKFRVPHPGRVGGRFFVDIAMPSMLDWVLGGNSEKLQGRPPSCRLTDKADDRLREWFEDDDALERTIKGEWYLIPHGDDCCVSETLCLTKDEDQPCIVGSEPDQDFPGMRIVIPSSQVSKMHARVIYKDGAFFLMDLRSEHGTYVTDNEGRRYRATPNFPARFRSSDIIEFGSDKKAAFRVKVIRKTPKSTRKNESNNDKLLQTA

SEQ ID NO: 49002 - DNA, 1566 bp, Arabidopsis thaliana
  misc_feature (1)..(1566): Ceres Seq. ID no. 12578221
  misc_feature (1)..(1566): Ortholog of  Ceres SEQ ID NO 13594345 as cited in SEQ ID NO 58043
  misc_feature (1)..(1566): Ortholog of  Ceres SEQ ID NO 12614112 as cited in SEQ ID NO 60891
  misc_feature (1)..(1566): Ortholog of  Ceres SEQ ID NO 13597574 as cited in SEQ ID NO 64677
  misc_feature (1)..(1566): Ortholog of  Ceres SEQ ID NO 13662880 as cited in SEQ ID NO 65422
  misc_feature (1)..(1566): Ortholog of  Ceres SEQ ID NO 12779098 as cited in SEQ ID NO 67698
  misc_feature (1)..(1566): Ortholog of  Ceres SEQ ID NO 13591190 as cited in SEQ ID NO 68044
  misc_feature (1)..(1566): Ortholog of  Ceres SEQ ID NO 13596089 as cited in SEQ ID NO 68373
gtcttcaacactttatcatcttcaattgaaaaaaaaaaaaaaatcaacccaaagctctgcttcgttgagctaaaacaatggcggaaacaactcccaaagtgaaaggccacgtcgtaatcttaccatacccagttcaaggccacctaaacccaatggttcaattcgctaaacgtctagtctccaaaaacgtcaaagtcacaatcgccaccactacctacaccgcctcctcaatcacaacaccatcactctccgtcgaaccaatctccgatggattcgatttcatccccataggtatccccggtttcagcgtcgatacttactcagaatccttcaagctcaacggatccgaaaccctaactctcctaatcgagaaattcaaatccacagattcaccaatcgattgcttaatctacgattcgtttcttccttggggacttgaagttgctagatctatggaactttcagctgcttctttcttcactaataatctcactgtttgttctgtgttgcgtaaattctctaacggtgactttcctcttcccgctgatcctaattcggcgccgtttcgtatccgtggcttaccgtctttgagctacgatgagttaccttcgtttgtgggacgtcattggttgactcatcctgagcatggcagagttcttctgaatcagtttcctaaccatgaaaatgctgattggttattcgttaatggctttgaagggttagaagaaacacaagattgtgaaaatggtgagtctgatgcaatgaaggcgacgttgatcggaccgatgattccatcggcttatcttgatgatcggatggaagatgataaagactatggtgcgagtctgttgaaaccgatatcgaaggagtgtatggagtggcttgagactaagcaggctcagtcagtagcatttgtttcgtttggttcgtttgggattctctttgagaagcaacttgcagaggtagctattgcgctacaagaatcggatttgaacttcttgtgggtgattaaagaagctcatatagcgaaattgcctgaagggtttgtggaatcgactaaagatagagccttgttggtttcttggtgtaaccagcttgaggttttagctcatgaatcgataggttgctttttgactcattgtggttggaactctacgttggaagggttgagtttgggagttccgatggttggtgtgcctcagtggagtgatcagatgaatgatgctaagtttgtggaggaagtttggaaagttgggtatagagcgaaagaggaagctggggaagtaatcgtgaagagtgaagaattggtgaggtgtttgaaaggagtgatggaaggagagagtagtgtgaagattagagagagttcgaagaagtggaaagatttggctgtgaaggcaatgagtgaaggaggaagctctgatcgaagcattaacgagtttatagagagtttagggaagtaacattattgattcaactttgtaaatcatgaaatgtaagtgtttgttgatgttgtataagagcattgtaccacgatgactgtgattcaataataaaccaattgtgatt

SEQ ID NO: 49003 - protein, 460 aa, Arabidopsis thaliana
  peptide (1)..(460): Ceres Seq. ID no. 12578222
MAETTPKVKGHVVILPYPVQGHLNPMVQFAKRLVSKNVKVTIATTTYTASSITTPSLSVEPISDGFDFIPIGIPGFSVDTYSESFKLNGSETLTLLIEKFKSTDSPIDCLIYDSFLPWGLEVARSMELSAASFFTNNLTVCSVLRKFSNGDFPLPADPNSAPFRIRGLPSLSYDELPSFVGRHWLTHPEHGRVLLNQFPNHENADWLFVNGFEGLEETQDCENGESDAMKATLIGPMIPSAYLDDRMEDDKDYGASLLKPISKECMEWLETKQAQSVAFVSFGSFGILFEKQLAEVAIALQESDLNFLWVIKEAHIAKLPEGFVESTKDRALLVSWCNQLEVLAHESIGCFLTHCGWNSTLEGLSLGVPMVGVPQWSDQMNDAKFVEEVWKVGYRAKEEAGEVIVKSEELVRCLKGVMEGESSVKIRESSKKWKDLAVKAMSEGGSSDRSINEFIESLGK

SEQ ID NO: 49004 - protein, 435 aa, Arabidopsis thaliana
  peptide (1)..(435): Ceres Seq. ID no. 12578223
MVQFAKRLVSKNVKVTIATTTYTASSITTPSLSVEPISDGFDFIPIGIPGFSVDTYSESFKLNGSETLTLLIEKFKSTDSPIDCLIYDSFLPWGLEVARSMELSAASFFTNNLTVCSVLRKFSNGDFPLPADPNSAPFRIRGLPSLSYDELPSFVGRHWLTHPEHGRVLLNQFPNHENADWLFVNGFEGLEETQDCENGESDAMKATLIGPMIPSAYLDDRMEDDKDYGASLLKPISKECMEWLETKQAQSVAFVSFGSFGILFEKQLAEVAIALQESDLNFLWVIKEAHIAKLPEGFVESTKDRALLVSWCNQLEVLAHESIGCFLTHCGWNSTLEGLSLGVPMVGVPQWSDQMNDAKFVEEVWKVGYRAKEEAGEVIVKSEELVRCLKGVMEGESSVKIRESSKKWKDLAVKAMSEGGSSDRSINEFIESLGK

SEQ ID NO: 49005 - protein, 335 aa, Arabidopsis thaliana
  peptide (1)..(335): Ceres Seq. ID no. 12578224
MELSAASFFTNNLTVCSVLRKFSNGDFPLPADPNSAPFRIRGLPSLSYDELPSFVGRHWLTHPEHGRVLLNQFPNHENADWLFVNGFEGLEETQDCENGESDAMKATLIGPMIPSAYLDDRMEDDKDYGASLLKPISKECMEWLETKQAQSVAFVSFGSFGILFEKQLAEVAIALQESDLNFLWVIKEAHIAKLPEGFVESTKDRALLVSWCNQLEVLAHESIGCFLTHCGWNSTLEGLSLGVPMVGVPQWSDQMNDAKFVEEVWKVGYRAKEEAGEVIVKSEELVRCLKGVMEGESSVKIRESSKKWKDLAVKAMSEGGSSDRSINEFIESLGK

SEQ ID NO: 49006 - DNA, 2773 bp, Arabidopsis thaliana
  misc_feature (1)..(2773): Ceres Seq. ID no. 12604179
  misc_feature (1)..(2773): Ortholog of  Ceres SEQ ID NO 13518411 as cited in SEQ ID NO 55230
  misc_feature (1)..(2773): Ortholog of  Ceres SEQ ID NO 13654989 as cited in SEQ ID NO 63117
  misc_feature (1)..(2773): Ortholog of  Ceres SEQ ID NO 13584744 as cited in SEQ ID NO 69137
aaaacgaaactcaagtcaatgaataaaaagacgaaacaatgctatgataagaaaagaaacaacactcgaaaaagttcttctttttcttccgcacatgtctgactctctcataagcgtaaatcgctctgtcaaatatctctgaccagagagacagagttgcctccacgtttcttcagacaagactcacgctcttccctttcaccacattcccttctccatttctcaatctcacttaccttctcgattcttgctccaatttcgaatcttccgagtgaaaaaagcttcaaagtttggaactttctagtgtttattaatctgggtctgctctgagtttcgtgtgtagctgcatatgagcttaaagctcgagtttttccatctgggtttggaattctagggctagtgattggagattttgggaatttaggttgattttagtaggtttgacttcaggttgcgtaatttaggttgattttgatccgatttgtggaattagggtttgtttgttcacaaagcttcaatttttggagtttaaatggatcgataacgactgtgttagaagaaagtttgctgcttcagattcgtattcgatatagaaatgagtttggttcctcctttaccgattttatcaccaccgtcgtcaaattcttcaacaactgcacctcctccgttacagactcagcccaccactccatctgctccacctccggttacaccacctccttctccgccgcaatctccgccgccggttgtatcatcatcaccaccaccaccggttgtttcgtcacctccaccgtcttcttctccaccaccgtcacctcctgtcatcacttcacctcctcccaccgttgcttcttcccctccacctcctgtggtgattgcttcccctcctccctcaactccggcgacaacaccaccagctcctccgcaaactgtctcacctccaccgcctcctgatgcttctccatcacctcccgcaccaacaacaacaaatcctcctcctaaaccttctccttcaccgccgggagaaacaccttcaccaccgggagaaacaccttcaccgcctaaaccttctccgtcaactccaactccaacaacaaccacatctcctcctcctcctccagctacctctgcttctcctccgtcttcaaatcctactgatccttctacgttagctcctcctccaactccattacctgttgttcccagagagaaaccaattgctaaaccaactggaccagcttcaaacaatggaaacaacactttgccgtctagttcaccaggtaaaagcgaagttggtactggaggtattgtagctatcggagtgattgtgggattggtttttcttagcctttttgtgatgggtgtgtggttcactcggaaacgaaagcgaaaggaccctggaacctttgttggatacacaatgcctccttccgcttattcatctcctcaaggctcagatgtagtgctcttcaactcgcgttcttcagctcctcctaaaatgagaagccattctggtagcgattacatgtatgcgtcatctgattcaggcatggttagcaaccaaagatcatggttttcatatgatgagttatctcaagttaccagtgggttctccgagaagaatcttctcggtgaaggagggtttggctgtgtatacaaaggcgttctttctgacggaagggaagtggcagttaaacagttaaagattggtggaagccaaggggagagagagttcaaagcagaagttgaaatcatttctcgggttcatcaccgccatttggttacactagttggttattgcatctcagagcaacataggttgcttgtatatgattatgtacctaacaacactctccattatcatctccatgctccaggaagaccagttatgacttgggaaactcgggtaagggtcgctgctggtgcagctcgtggaatcgcctacttacatgaagactgtcatccccgcattattcaccgtgacataaaatcttccaacatacttcttgataacagctttgaagccttggttgcggattttggacttgcaaaaattgcacaagaactggatttaaacacacacgtctcaacgcgcgtaatgggaacctttgggtacatggctcctgaatatgcaacaagtggaaagctgtctgaaaaagcagatgtttattcgtatggggtaatactgttggagcttataactggccgtaaacccgtagatacgtctcaaccacttggtgatgagagccttgttgaatgggcaagacccttgctgggtcaagcaatcgagaacgaagaattcgacgagctagtagatccgaggctagggaaaaacttcatcccaggagagatgttcagaatggtagaagctgcggctgcatgtgtccgccactcagctgcaaaaagaccaaagatgagtcaagtggtgagagctttggacacacttgaagaagcaacggacataaccaacggaatgagaccaggacagagccaagtgtttgactcgagacaacaatctgctcagataaggatgtttcaaagaatggcttttgggagtcaagattatagttctgacttctttgatcgctcacagtcacatagtagctggggcagtcgtgaccagtccagatttgtaccttagtagtttttattgcctttgcttctttcttctttccctttaaacatgtcctcgatcttgtatattcttttgcatgatataatgtatttttgaaatatacatacatacacacataaaatttggtagtcttttgaa

SEQ ID NO: 49007 - protein, 681 aa, Arabidopsis thaliana
  peptide (1)..(681): Ceres Seq. ID no. 12604180
MSLVPPLPILSPPSSNSSTTAPPPLQTQPTTPSAPPPVTPPPSPPQSPPPVVSSSPPPPVVSSPPPSSSPPPSPPVITSPPPTVASSPPPPVVIASPPPSTPATTPPAPPQTVSPPPPPDASPSPPAPTTTNPPPKPSPSPPGETPSPPGETPSPPKPSPSTPTPTTTTSPPPPPATSASPPSSNPTDPSTLAPPPTPLPVVPREKPIAKPTGPASNNGNNTLPSSSPGKSEVGTGGIVAIGVIVGLVFLSLFVMGVWFTRKRKRKDPGTFVGYTMPPSAYSSPQGSDVVLFNSRSSAPPKMRSHSGSDYMYASSDSGMVSNQRSWFSYDELSQVTSGFSEKNLLGEGGFGCVYKGVLSDGREVAVKQLKIGGSQGEREFKAEVEIISRVHHRHLVTLVGYCISEQHRLLVYDYVPNNTLHYHLHAPGRPVMTWETRVRVAAGAARGIAYLHEDCHPRIIHRDIKSSNILLDNSFEALVADFGLAKIAQELDLNTHVSTRVMGTFGYMAPEYATSGKLSEKADVYSYGVILLELITGRKPVDTSQPLGDESLVEWARPLLGQAIENEEFDELVDPRLGKNFIPGEMFRMVEAAAACVRHSAAKRPKMSQVVRALDTLEEATDITNGMRPGQSQVFDSRQQSAQIRMFQRMAFGSQDYSSDFFDRSQSHSSWGSRDQSRFVP

SEQ ID NO: 49008 - protein, 427 aa, Arabidopsis thaliana
  peptide (1)..(427): Ceres Seq. ID no. 12604181
MGVWFTRKRKRKDPGTFVGYTMPPSAYSSPQGSDVVLFNSRSSAPPKMRSHSGSDYMYASSDSGMVSNQRSWFSYDELSQVTSGFSEKNLLGEGGFGCVYKGVLSDGREVAVKQLKIGGSQGEREFKAEVEIISRVHHRHLVTLVGYCISEQHRLLVYDYVPNNTLHYHLHAPGRPVMTWETRVRVAAGAARGIAYLHEDCHPRIIHRDIKSSNILLDNSFEALVADFGLAKIAQELDLNTHVSTRVMGTFGYMAPEYATSGKLSEKADVYSYGVILLELITGRKPVDTSQPLGDESLVEWARPLLGQAIENEEFDELVDPRLGKNFIPGEMFRMVEAAAACVRHSAAKRPKMSQVVRALDTLEEATDITNGMRPGQSQVFDSRQQSAQIRMFQRMAFGSQDYSSDFFDRSQSHSSWGSRDQSRFVP

SEQ ID NO: 49009 - protein, 406 aa, Arabidopsis thaliana
  peptide (1)..(406): Ceres Seq. ID no. 12604182
MPPSAYSSPQGSDVVLFNSRSSAPPKMRSHSGSDYMYASSDSGMVSNQRSWFSYDELSQVTSGFSEKNLLGEGGFGCVYKGVLSDGREVAVKQLKIGGSQGEREFKAEVEIISRVHHRHLVTLVGYCISEQHRLLVYDYVPNNTLHYHLHAPGRPVMTWETRVRVAAGAARGIAYLHEDCHPRIIHRDIKSSNILLDNSFEALVADFGLAKIAQELDLNTHVSTRVMGTFGYMAPEYATSGKLSEKADVYSYGVILLELITGRKPVDTSQPLGDESLVEWARPLLGQAIENEEFDELVDPRLGKNFIPGEMFRMVEAAAACVRHSAAKRPKMSQVVRALDTLEEATDITNGMRPGQSQVFDSRQQSAQIRMFQRMAFGSQDYSSDFFDRSQSHSSWGSRDQSRFVP

SEQ ID NO: 49010 - DNA, 1138 bp, Arabidopsis thaliana
  misc_feature (1)..(1138): Ceres Seq. ID no. 12578074
  misc_feature (1)..(1138): Ortholog of  Ceres SEQ ID NO 14312711 as cited in SEQ ID NO 1401
  misc_feature (1)..(1138): Ortholog of  Ceres SEQ ID NO 13586635 as cited in SEQ ID NO 14217
  misc_feature (1)..(1138): Ortholog of  Ceres SEQ ID NO 14316543 as cited in SEQ ID NO 57118
  misc_feature (1)..(1138): Ortholog of  Ceres SEQ ID NO 12616285 as cited in SEQ ID NO 63483
acgaccacacaaagtaattacaatggaacacagaaaggtaagagggaacggcatagacattcacgtagcaatccaaggtccctccgatggtcctatagtcctcctcctccatggtttccctgagctttggtactcatggcgccaccagatccctggactcgccgctcgtggctaccgtgccgtcgctcctgacctacgtggttacggtgactccgatgctcccgctgagatctcttcctacacatgcttcaacatcgttggtgacttaatcgccgtcatatccgccttaaccgcctcagaggatgagaaggtctttgtggttggacatgattggggagctctcatcgcttggtatttatgtctcttccgaccagatagagtcaaagctctggtcaacctcagtgttccgttctctttccggccaaccgatccatcggtgaagcccgttgatcgcatgcgtgctttctacggcgatgattactatatctgcaggtttcaggaatttggagatgtagaagctgagattgcagaggttggaacagagagagtcatgaagagactactcacttatagaactcctggaccggtaattatcccgaaggacaaaagtttttggggatccaaaggcgaaactataccactcccgtcttggctaacggaggaagatgttgcttacttcgtcagcaagtttgaagagaaaggcttctctggtccagtcaattactaccgtaacttcaacaggaacaatgagttgttgggtccatgggtgggaagcaaaatccaggttcctacaaagtttgtgataggggagcttgatctggtctactatatgcctggtgtgaaggaatatatacatggtccccagtttaaggaagatgtgcctttgcttgaagagcctgtggtcatggaaggagtggctcacttcattaaccaagaaaagcctcaggagattctccaaattatccttgatttcatctccaaattctaatgttgctttcccttaaattactcttttaatcaagttccataataagttgaattatgaggatatacatcctcatgtatggttgtatcatcctataacctatataatctatgtatggatgcgtgcatattatttgacattcttttaagttat

SEQ ID NO: 49011 - protein, 328 aa, Arabidopsis thaliana
  peptide (1)..(328): Ceres Seq. ID no. 12578075
RPHKVITMEHRKVRGNGIDIHVAIQGPSDGPIVLLLHGFPELWYSWRHQIPGLAARGYRAVAPDLRGYGDSDAPAEISSYTCFNIVGDLIAVISALTASEDEKVFVVGHDWGALIAWYLCLFRPDRVKALVNLSVPFSFRPTDPSVKPVDRMRAFYGDDYYICRFQEFGDVEAEIAEVGTERVMKRLLTYRTPGPVIIPKDKSFWGSKGETIPLPSWLTEEDVAYFVSKFEEKGFSGPVNYYRNFNRNNELLGPWVGSKIQVPTKFVIGELDLVYYMPGVKEYIHGPQFKEDVPLLEEPVVMEGVAHFINQEKPQEILQIILDFISKF

SEQ ID NO: 49012 - protein, 321 aa, Arabidopsis thaliana
  peptide (1)..(321): Ceres Seq. ID no. 12578076
MEHRKVRGNGIDIHVAIQGPSDGPIVLLLHGFPELWYSWRHQIPGLAARGYRAVAPDLRGYGDSDAPAEISSYTCFNIVGDLIAVISALTASEDEKVFVVGHDWGALIAWYLCLFRPDRVKALVNLSVPFSFRPTDPSVKPVDRMRAFYGDDYYICRFQEFGDVEAEIAEVGTERVMKRLLTYRTPGPVIIPKDKSFWGSKGETIPLPSWLTEEDVAYFVSKFEEKGFSGPVNYYRNFNRNNELLGPWVGSKIQVPTKFVIGELDLVYYMPGVKEYIHGPQFKEDVPLLEEPVVMEGVAHFINQEKPQEILQIILDFISKF

SEQ ID NO: 49013 - protein, 177 aa, Arabidopsis thaliana
  peptide (1)..(177): Ceres Seq. ID no. 12578077
MRAFYGDDYYICRFQEFGDVEAEIAEVGTERVMKRLLTYRTPGPVIIPKDKSFWGSKGETIPLPSWLTEEDVAYFVSKFEEKGFSGPVNYYRNFNRNNELLGPWVGSKIQVPTKFVIGELDLVYYMPGVKEYIHGPQFKEDVPLLEEPVVMEGVAHFINQEKPQEILQIILDFISKF

SEQ ID NO: 49014 - DNA, 1370 bp, Arabidopsis thaliana
  misc_feature (1)..(1370): Ceres Seq. ID no. 13592099
  misc_feature (1)..(1370): Ortholog of  Ceres SEQ ID NO 15175368 as cited in SEQ ID NO 60071
  misc_feature (1)..(1370): Ortholog of  Ceres SEQ ID NO 13528157 as cited in SEQ ID NO 60102
  misc_feature (1)..(1370): Ortholog of  Ceres SEQ ID NO 15179340 as cited in SEQ ID NO 0
gatatttattattcacatttattaacatttttatatctctccctattaaattattttattctctcttagcaacattcatcaaccagagcagattcactatcatcatcttataacacatcttcttcctctaaagtttattttcttaaacttattacaaaaaacatgatcttcaaaagttgatttaatctctttttatccatcttcttcttcatttctcaatatcaaacttttctttttttgtaagcttaacataaaccctaatattttcttgatttttttcaagaaaataaaaacataaagatgcttgaagttagatcaatggatatgactccaaaatcaccagaacccgaatccgaaactccgacccggatccaaccagctaaaccaatctctttcagtaacggaatcatcaaacgccaccaccaccaccaccacaacaacaacaaagtcacttacaaagaatgtctcaagaaccacgcggcggcgattggtggtcacgcgcttgacggttgcggcgaatttatgccgtctccttcgtcaacaccttccgatccaacttctctcaagtgtgcagcttgtggttgtcaccgtaacttccaccgccgtgaaactgacgattcctccgccgttccaccaccgtctcttcttccatcttcaacaacaaccgccgcaattgagtatcagcctcatcaccgtcatcatcctcctcctccgctagctcctccgttaccacgtagtcctaattcatcttctccgccgcctatctcttcctcctacatgcttttagctctctccggtaataataaaaccgcaccgttctcagatctaaacttcgccgccgcggctaaccatctctccgccacgcctggctcgaggaagcgattcaggacgaagtttagctcaaatcagaaagagaagatgcatgaattcgccgatcgaatcggttggaagattcagaaacgtgacgaagacgaagttcgtgatttttgccgtgagatcggagttgataaaggtgttctcaaagtttggatgcataataacaaaaactccttcaaattctccggcggaggagcaaccaccgtgcagagaaacgataacggtatcggcggcgagaacagtaacgatgatggagttcgcggtttagctaacgacggtgacggtggtggtgggagatttgagagtgatagtggaggagctgatggtggcggaaacgtaaacgcctcgtcgtcttcgtcgtgaagaagaaaacatcatgtcgttttgcagggaaagagttataataatggaagcttaagctttgtttttagctttagatcatagagagtaagcactggtattattatcgttaatacgttttattaatattaatt

SEQ ID NO: 49015 - protein, 312 aa, Arabidopsis thaliana
  peptide (1)..(312): Ceres Seq. ID no. 13592100
MLEVRSMDMTPKSPEPESETPTRIQPAKPISFSNGIIKRHHHHHHNNNKVTYKECLKNHAAAIGGHALDGCGEFMPSPSSTPSDPTSLKCAACGCHRNFHRRETDDSSAVPPPSLLPSSTTTAAIEYQPHHRHHPPPPLAPPLPRSPNSSSPPPISSSYMLLALSGNNKTAPFSDLNFAAAANHLSATPGSRKRFRTKFSSNQKEKMHEFADRIGWKIQKRDEDEVRDFCREIGVDKGVLKVWMHNNKNSFKFSGGGATTVQRNDNGIGGENSNDDGVRGLANDGDGGGGRFESDSGGADGGGNVNASSSSS

SEQ ID NO: 49016 - protein, 306 aa, Arabidopsis thaliana
  peptide (1)..(306): Ceres Seq. ID no. 13592101
MDMTPKSPEPESETPTRIQPAKPISFSNGIIKRHHHHHHNNNKVTYKECLKNHAAAIGGHALDGCGEFMPSPSSTPSDPTSLKCAACGCHRNFHRRETDDSSAVPPPSLLPSSTTTAAIEYQPHHRHHPPPPLAPPLPRSPNSSSPPPISSSYMLLALSGNNKTAPFSDLNFAAAANHLSATPGSRKRFRTKFSSNQKEKMHEFADRIGWKIQKRDEDEVRDFCREIGVDKGVLKVWMHNNKNSFKFSGGGATTVQRNDNGIGGENSNDDGVRGLANDGDGGGGRFESDSGGADGGGNVNASSSSS

SEQ ID NO: 49017 - protein, 304 aa, Arabidopsis thaliana
  peptide (1)..(304): Ceres Seq. ID no. 13592102
MTPKSPEPESETPTRIQPAKPISFSNGIIKRHHHHHHNNNKVTYKECLKNHAAAIGGHALDGCGEFMPSPSSTPSDPTSLKCAACGCHRNFHRRETDDSSAVPPPSLLPSSTTTAAIEYQPHHRHHPPPPLAPPLPRSPNSSSPPPISSSYMLLALSGNNKTAPFSDLNFAAAANHLSATPGSRKRFRTKFSSNQKEKMHEFADRIGWKIQKRDEDEVRDFCREIGVDKGVLKVWMHNNKNSFKFSGGGATTVQRNDNGIGGENSNDDGVRGLANDGDGGGGRFESDSGGADGGGNVNASSSSS

SEQ ID NO: 49018 - DNA, 3198 bp, Arabidopsis thaliana; identical to SEQ ID NO: 30942
  misc_feature (1)..(3198): Ceres Seq. ID no. 13579859
  misc_feature (1)..(3198): Ortholog of  Ceres SEQ ID NO 14304202 as cited in SEQ ID NO 56346
  misc_feature (1)..(3198): Ortholog of  Ceres SEQ ID NO 14304159 as cited in SEQ ID NO 56494
  misc_feature (1)..(3198): Ortholog of  Ceres SEQ ID NO 14314198 as cited in SEQ ID NO 57472
  misc_feature (1)..(3198): Ortholog of  Ceres SEQ ID NO 12623915 as cited in SEQ ID NO 61013
  misc_feature (1)..(3198): Ortholog of  Ceres SEQ ID NO 14302314 as cited in SEQ ID NO 62543
  misc_feature (1)..(3198): Ortholog of  Ceres SEQ ID NO 13598391 as cited in SEQ ID NO 62769

SEQ ID NO: 49019 - protein, 274 aa, Arabidopsis thaliana; identical to SEQ ID NO: 30943
  peptide (1)..(274): Ceres Seq. ID no. 13579860

SEQ ID NO: 49020 - protein, 207 aa, Arabidopsis thaliana; identical to SEQ ID NO: 30944
  peptide (1)..(207): Ceres Seq. ID no. 13579861

SEQ ID NO: 49021 - protein, 156 aa, Arabidopsis thaliana; identical to SEQ ID NO: 30945
  peptide (1)..(156): Ceres Seq. ID no. 13579862

SEQ ID NO: 49022 - DNA, 670 bp, Arabidopsis thaliana; identical to SEQ ID NO: 31021
  misc_feature (1)..(670): Ceres Seq. ID no. 12601447
  misc_feature (1)..(670): Ortholog of  Ceres SEQ ID NO 15178884 as cited in SEQ ID NO 0

SEQ ID NO: 49023 - protein, 223 aa, Arabidopsis thaliana; identical to SEQ ID NO: 31022
  peptide (1)..(223): Ceres Seq. ID no. 12601448

SEQ ID NO: 49024 - protein, 213 aa, Arabidopsis thaliana; identical to SEQ ID NO: 31023
  peptide (1)..(213): Ceres Seq. ID no. 12601449

SEQ ID NO: 49025 - DNA, 1230 bp, Arabidopsis thaliana
  misc_feature (1)..(1230): Ceres Seq. ID no. 13600802
  misc_feature (1)..(1230): Ortholog of  Ceres SEQ ID NO 15169607 as cited in SEQ ID NO 69301
agacacgcatagagagattgattattgcatcgaatcaagcttggtttgttagtaatggcgggaatagctttagttttagatctactgaagaaatctcaatctaagaacactctccactcatcttccttctattccgcctccgccgccgctgtttctgctgccgcctctgctccttttgcgtctaggtttctcttcggttcttttgagcctagagttgcgtattgtgatgctgctgctgcaatagatgatgattaccttggtgctatacggaaaatgtctgcggatgttttgcagcgtcaaccccttgcgtatatttctaggtccaaggaatacaatatccagccaaaaccagttctctcggcctttgagttcagggcacttgcaatgactacagtgagatcccttttgatgttttatttgcctcttttggagcctaaaacggcttcagaggatgatgatgatttcctaaacaatgctgcagaagaaaaccgccacacagacttgattgttcctcttaaaaagtcagcaaagcaaattgcccgtgagaccacagttgtgaccactcggagagtccttgaaaggctggctctgagttatgtctcacagcgtatggcatggaaacttctaaaggatgtgcctcagtcggctttacgcaaggctcagagagggttgccgacacatgtatatatctttaaagtcagccaaacaactcttagaggtcacttcctgggaatcgcagcatcatgggtagttcaagtaggcattgaaatctacagatgtgtgttcccgaatgttaaacccgaggaagaagaagaagaggagaaagtcgagatatcacagcaagctaaggatctcggaaacaaagttgtgggtatcacagtacgatgtggcgcgtccttagtatttgctgccattggagccgggatatgttcttgccttatccgtccctccacgggccaatggatcggttgcgcgctgggagacttggctggtccgatggttgtttcggtttgcctgcagaagactcttcaagctgattattaagttcttgtgtggaaattgaattcttctacttgaatcttgatgatccaaatgaaatcatagagcttgttttttgtttctgaaatttcttattgtcttcactgaaccttaaaaacaatgatcaatagatttctcaaaatgtacctacttttgacaacagcacaataagtcaggtatttattttcctcg

SEQ ID NO: 49026 - protein, 329 aa, Arabidopsis thaliana
  peptide (1)..(329): Ceres Seq. ID no. 13600803
MAGIALVLDLLKKSQSKNTLHSSSFYSASAAAVSAAASAPFASRFLFGSFEPRVAYCDAAAAIDDDYLGAIRKMSADVLQRQPLAYISRSKEYNIQPKPVLSAFEFRALAMTTVRSLLMFYLPLLEPKTASEDDDDFLNNAAEENRHTDLIVPLKKSAKQIARETTVVTTRRVLERLALSYVSQRMAWKLLKDVPQSALRKAQRGLPTHVYIFKVSQTTLRGHFLGIAASWVVQVGIEIYRCVFPNVKPEEEEEEEKVEISQQAKDLGNKVVGITVRCGASLVFAAIGAGICSCLIRPSTGQWIGCALGDLAGPMVVSVCLQKTLQADY

SEQ ID NO: 49027 - protein, 256 aa, Arabidopsis thaliana
  peptide (1)..(256): Ceres Seq. ID no. 13600804
MSADVLQRQPLAYISRSKEYNIQPKPVLSAFEFRALAMTTVRSLLMFYLPLLEPKTASEDDDDFLNNAAEENRHTDLIVPLKKSAKQIARETTVVTTRRVLERLALSYVSQRMAWKLLKDVPQSALRKAQRGLPTHVYIFKVSQTTLRGHFLGIAASWVVQVGIEIYRCVFPNVKPEEEEEEEKVEISQQAKDLGNKVVGITVRCGASLVFAAIGAGICSCLIRPSTGQWIGCALGDLAGPMVVSVCLQKTLQADY

SEQ ID NO: 49028 - protein, 219 aa, Arabidopsis thaliana
  peptide (1)..(219): Ceres Seq. ID no. 13600805
MTTVRSLLMFYLPLLEPKTASEDDDDFLNNAAEENRHTDLIVPLKKSAKQIARETTVVTTRRVLERLALSYVSQRMAWKLLKDVPQSALRKAQRGLPTHVYIFKVSQTTLRGHFLGIAASWVVQVGIEIYRCVFPNVKPEEEEEEEKVEISQQAKDLGNKVVGITVRCGASLVFAAIGAGICSCLIRPSTGQWIGCALGDLAGPMVVSVCLQKTLQADY

SEQ ID NO: 49029 - DNA, 1966 bp, Arabidopsis thaliana; identical to SEQ ID NO: 45864
  misc_feature (1)..(1966): Ceres Seq. ID no. 13591692
  misc_feature (1)..(1966): Ortholog of  Ceres SEQ ID NO 13656435 as cited in SEQ ID NO 65853

SEQ ID NO: 49030 - protein, 460 aa, Arabidopsis thaliana; identical to SEQ ID NO: 45865
  peptide (1)..(460): Ceres Seq. ID no. 13591693

SEQ ID NO: 49031 - protein, 258 aa, Arabidopsis thaliana; identical to SEQ ID NO: 45866
  peptide (1)..(258): Ceres Seq. ID no. 13591694

SEQ ID NO: 49032 - DNA, 414 bp, Arabidopsis thaliana
  misc_feature (1)..(414): Ceres Seq. ID no. 13592077
  misc_feature (1)..(414): Ortholog of  Ceres SEQ ID NO 15173457 as cited in SEQ ID NO 63597
ggtgattaaaaaagaaagcaaaactctgtaatcgaaactgaagaaagccctaagaataaaaagcctgttgtgggaatggaacaagctgcagagaggagttcaaccattgttgcatccacctctgaagggtcggattttgatccgatatctcgattgaggaagctcttgttccgccaaatgcttgtgggaatcaaagacggcagattcttccttggaaatttccattgcattgacaaacaaggaaacatcattctccaagacactgtggagtatcgtagcatacgaagatcatctccttcgcctactgaacagcgttgtcttggtatgatcctaatcccttcctcttgcaggacatcttgccatgttgattgctctatcgatgaacagctttcgttgattcagctgaaagagtag

SEQ ID NO: 49033 - protein, 112 aa, Arabidopsis thaliana
  peptide (1)..(112): Ceres Seq. ID no. 13592078
MEQAAERSSTIVASTSEGSDFDPISRLRKLLFRQMLVGIKDGRFFLGNFHCIDKQGNIILQDTVEYRSIRRSSPSPTEQRCLGMILIPSSCRTSCHVDCSIDEQLSLIQLKE

SEQ ID NO: 49034 - protein, 78 aa, Arabidopsis thaliana
  peptide (1)..(78): Ceres Seq. ID no. 13592079
MLVGIKDGRFFLGNFHCIDKQGNIILQDTVEYRSIRRSSPSPTEQRCLGMILIPSSCRTSCHVDCSIDEQLSLIQLKE

SEQ ID NO: 49035 - DNA, 1119 bp, Arabidopsis thaliana
  misc_feature (1)..(1119): Ceres Seq. ID no. 12578086
  misc_feature (1)..(1119): Ortholog of  Ceres SEQ ID NO 14315330 as cited in SEQ ID NO 58134
atcttgttgatatgtctttatctttttcttctcctgttaaagcatggcttctggaacctagatgaagatcgaaaggctctacgagttctccagccggatttggtgctcttcacaggcagcttctctgttactgacgtcaaattgatttccttttttttttgaatttctccatttctcttcacactacctctaatgattttgattaaagttagaacatttgaatccaattccaaattctgtcaggtgattttggtgaagaaaacgtcccactggttcaaagtgttgccgctcttactttccctaaagcagtcatattggggaatcatgatgcctggttcacccaagattttccaaggaaagaaaaacaaaaacaaaacggtgttcaaatgcaactcgatatccttggtgacgagcacataggatatcaacgcatggacttcccatcttttaagctcagtattgttggtggtcgacccttttcacatggtggggatcgattgtttcggaaaaatctgcttgtccagaggtatggagttcatgatatggaagccagtgctgggagtatttgtcgagctgcacatggaacaccggaagatcacgtggctataattctcgctcacaatgggccaacaggtcttggttggcaagcagaggatatatgtggaaaagactggggggctgaaggcggtgaccatggtgatccagatctagagcaggcgatacgacagttgaaggagacgactaagttgtcgattcctttagttgtgtttgggcacatgcataaggagctgcaacgggggaaaggaaatcggaaaatggtagtgcaagatagtgacaaccagactgtgtatgtgaacggtgcaatagttccaagggttaaagaggcaaagaaaagaggagcagcagagtctgagagtggtggcacaacaagagctttcacattggtggagattttagatgggaaaatcaagaaaatagcagaaatttgggtacatgtaaatggaagtatggctaagattgtggaggaaaatactttgtttgaagatgtaacctgatttgaaatttaaacaattaattcgggacaagactgtaataactaattatacatttgtcttggcg

SEQ ID NO: 49036 - protein, 222 aa, Arabidopsis thaliana; identical to SEQ ID NO: 22352
  peptide (1)..(222): Ceres Seq. ID no. 12578087

SEQ ID NO: 49037 - protein, 207 aa, Arabidopsis thaliana
  peptide (1)..(207): Ceres Seq. ID no. 12578088
MDFPSFKLSIVGGRPFSHGGDRLFRKNLLVQRYGVHDMEASAGSICRAAHGTPEDHVAIILAHNGPTGLGWQAEDICGKDWGAEGGDHGDPDLEQAIRQLKETTKLSIPLVVFGHMHKELQRGKGNRKMVVQDSDNQTVYVNGAIVPRVKEAKKRGAAESESGGTTRAFTLVEILDGKIKKIAEIWVHVNGSMAKIVEENTLFEDVT

SEQ ID NO: 49038 - protein, 170 aa, Arabidopsis thaliana
  peptide (1)..(170): Ceres Seq. ID no. 12578089
MEASAGSICRAAHGTPEDHVAIILAHNGPTGLGWQAEDICGKDWGAEGGDHGDPDLEQAIRQLKETTKLSIPLVVFGHMHKELQRGKGNRKMVVQDSDNQTVYVNGAIVPRVKEAKKRGAAESESGGTTRAFTLVEILDGKIKKIAEIWVHVNGSMAKIVEENTLFEDVT

SEQ ID NO: 49039 - DNA, 2323 bp, Arabidopsis thaliana
  misc_feature (1)..(2323): Ceres Seq. ID no. 13592080
  misc_feature (1)..(2323): Ortholog of  Ceres SEQ ID NO 13639469 as cited in SEQ ID NO 54825
  misc_feature (1)..(2323): Ortholog of  Ceres SEQ ID NO 15179301 as cited in SEQ ID NO 0
gaatttagttaaggatgaggaagatgaagatgatgatgattcgaaaatgaaggtggtggatactgcaaatggctgctgagtgctgagacactctcgaaccccacaaaccctaaggatctcctccgaagatttccactattactggaagtgatatagatacgttgcaacaaagaagaccacacaaaaacgttattgagcagccgtgaaatcgatttaccaattgaagcttccccccatgatttgactttccctgatgctcgtttgtgggaaagggtttctaaagtgcagagcacctggagttccattcttttgtgacaaaagaaaatccttcttcactaaaactaagaggggctttcacagtttacctttgggcactggggtccgtgtttatttcaacaacaatcttaggtactcaagcaattcaatagaagttgtggagaaagctgccattaatatgggttcaaaggaagacaaggcagataatccagctttatcttcatatgatgatgccatggaagctctgtcgactcttatttctcgtcgaaaccgtggggatcgcacacctactaaaggaaatcgtgacaagcttgaacaagtcgtcacatatctcaagattttggacctggaagacaaaataaaagaactaaaagttattcatgtcgcaggaacaaaaggaaagggttcaacatgtgtcttcagtgaggcaattttacgtaattgtgggtttcgaaccggaatgtttacatctcctcacttgattgatgtgagggaaagattccgaatagatggcttggatatatctgaggaaaagtttctacagtacttctgggaatgttggaagttattgaaggagaaagctgtagatggtcttaccatgcctcctctttttcagtttctcacagtattggcatttaagatttttgtttgtgaaaaggttgatgttgctgtcattgaagttggacttgggggaaaacttgactcgacaaatgtgattcaaaaacctgttgtctgtggcattgcttctcttgggatggatcatatggacatattgggaaatacgctagctgatattgcctttcataaggctgggattttcaagcctcaaatccccgccttcacagtaccacaactctctgaagcaatggatgttcttcagaaaacagctaataatctcgaggttcctctagaagtagtagcgcctcttgaacctaaaaagttggacggagttacgcttggcttgtctggggatcatcagctagtaaatgcaggtcttgctgtttctctttcaagatgctggcttcaaagaaccgggaattggaagaagatatttccaaatgaaagcaaggaaactgagattcccgtggcattttgtcgtggtcttgcaacggcacgtcttcatgggagagctcaagttgttcatgatgtagtttcagatccgcaggactcatcagactcgatggaaactccatgcggtgatctgatcttttacttggatggtgctcacagtccagagagcatggaggcttgtggtcgatggttctcttctgcagtcagaggagacaaaagcttatccactgctgtcaatggttacatgagacatggggagtatggtacagacttaaacagagtctccaaacagattcttctgttcaactgcatggaagtgagagaccctcaagtcttacttccaaagctggtcaccacttgcgcttcctcaggcactcatttctcaagagcgctttttgtcccgagcatgtctacttacaacaaagtcatttcgggtgcatcagcgattccttcagatacacgtagaaaggatttgacttggcaattcagactacaaagactatgggagaaatcaatccaagggactgatgcggggcttgaccatacactgaaacccgatggaataaccgccttaccacctcatgatttcctgtgcggagatgcacctcaatgtggtggacctgcagggacaccggtcacttccagtgccgtaatgccttcacttccattgactataaactggctaagagactgcgtacgccgaaacccttcactgaaactagaggttctggtcacaggatcgctacatcttgttggagatgtgctcaggttgctaaagagatgattttatttttcaccaacaaatcttcaaaaagactccttaagagtaatcttacagagcttcaattgttctttacttcactgtttttttctcatagttactatttgattctttggtccattttatctaacatgagaagtgagaaccctccacttaagctgtatttttctgctaaattttaatttatatttcctc

SEQ ID NO: 49040 - protein, 625 aa, Arabidopsis thaliana
  peptide (1)..(625): Ceres Seq. ID no. 13592081
MLVCGKGFLKCRAPGVPFFCDKRKSFFTKTKRGFHSLPLGTGVRVYFNNNLRYSSNSIEVVEKAAINMGSKEDKADNPALSSYDDAMEALSTLISRRNRGDRTPTKGNRDKLEQVVTYLKILDLEDKIKELKVIHVAGTKGKGSTCVFSEAILRNCGFRTGMFTSPHLIDVRERFRIDGLDISEEKFLQYFWECWKLLKEKAVDGLTMPPLFQFLTVLAFKIFVCEKVDVAVIEVGLGGKLDSTNVIQKPVVCGIASLGMDHMDILGNTLADIAFHKAGIFKPQIPAFTVPQLSEAMDVLQKTANNLEVPLEVVAPLEPKKLDGVTLGLSGDHQLVNAGLAVSLSRCWLQRTGNWKKIFPNESKETEIPVAFCRGLATARLHGRAQVVHDVVSDPQDSSDSMETPCGDLIFYLDGAHSPESMEACGRWFSSAVRGDKSLSTAVNGYMRHGEYGTDLNRVSKQILLFNCMEVRDPQVLLPKLVTTCASSGTHFSRALFVPSMSTYNKVISGASAIPSDTRRKDLTWQFRLQRLWEKSIQGTDAGLDHTLKPDGITALPPHDFLCGDAPQCGGPAGTPVTSSAVMPSLPLTINWLRDCVRRNPSLKLEVLVTGSLHLVGDVLRLLKR

SEQ ID NO: 49041 - protein, 558 aa, Arabidopsis thaliana
  peptide (1)..(558): Ceres Seq. ID no. 13592082
MGSKEDKADNPALSSYDDAMEALSTLISRRNRGDRTPTKGNRDKLEQVVTYLKILDLEDKIKELKVIHVAGTKGKGSTCVFSEAILRNCGFRTGMFTSPHLIDVRERFRIDGLDISEEKFLQYFWECWKLLKEKAVDGLTMPPLFQFLTVLAFKIFVCEKVDVAVIEVGLGGKLDSTNVIQKPVVCGIASLGMDHMDILGNTLADIAFHKAGIFKPQIPAFTVPQLSEAMDVLQKTANNLEVPLEVVAPLEPKKLDGVTLGLSGDHQLVNAGLAVSLSRCWLQRTGNWKKIFPNESKETEIPVAFCRGLATARLHGRAQVVHDVVSDPQDSSDSMETPCGDLIFYLDGAHSPESMEACGRWFSSAVRGDKSLSTAVNGYMRHGEYGTDLNRVSKQILLFNCMEVRDPQVLLPKLVTTCASSGTHFSRALFVPSMSTYNKVISGASAIPSDTRRKDLTWQFRLQRLWEKSIQGTDAGLDHTLKPDGITALPPHDFLCGDAPQCGGPAGTPVTSSAVMPSLPLTINWLRDCVRRNPSLKLEVLVTGSLHLVGDVLRLLKR

SEQ ID NO: 49042 - protein, 539 aa, Arabidopsis thaliana
  peptide (1)..(539): Ceres Seq. ID no. 13592083
MEALSTLISRRNRGDRTPTKGNRDKLEQVVTYLKILDLEDKIKELKVIHVAGTKGKGSTCVFSEAILRNCGFRTGMFTSPHLIDVRERFRIDGLDISEEKFLQYFWECWKLLKEKAVDGLTMPPLFQFLTVLAFKIFVCEKVDVAVIEVGLGGKLDSTNVIQKPVVCGIASLGMDHMDILGNTLADIAFHKAGIFKPQIPAFTVPQLSEAMDVLQKTANNLEVPLEVVAPLEPKKLDGVTLGLSGDHQLVNAGLAVSLSRCWLQRTGNWKKIFPNESKETEIPVAFCRGLATARLHGRAQVVHDVVSDPQDSSDSMETPCGDLIFYLDGAHSPESMEACGRWFSSAVRGDKSLSTAVNGYMRHGEYGTDLNRVSKQILLFNCMEVRDPQVLLPKLVTTCASSGTHFSRALFVPSMSTYNKVISGASAIPSDTRRKDLTWQFRLQRLWEKSIQGTDAGLDHTLKPDGITALPPHDFLCGDAPQCGGPAGTPVTSSAVMPSLPLTINWLRDCVRRNPSLKLEVLVTGSLHLVGDVLRLLKR

SEQ ID NO: 49043 - DNA, 1706 bp, Arabidopsis thaliana; identical to SEQ ID NO: 46320
  misc_feature (1)..(1706): Ceres Seq. ID no. 13591923
  misc_feature (1)..(1706): Ortholog of  Ceres SEQ ID NO 14307863 as cited in SEQ ID NO 20504

SEQ ID NO: 49044 - protein, 495 aa, Arabidopsis thaliana; identical to SEQ ID NO: 46321
  peptide (1)..(495): Ceres Seq. ID no. 13591924

SEQ ID NO: 49045 - protein, 450 aa, Arabidopsis thaliana; identical to SEQ ID NO: 46322
  peptide (1)..(450): Ceres Seq. ID no. 13591925

SEQ ID NO: 49046 - protein, 415 aa, Arabidopsis thaliana; identical to SEQ ID NO: 46323
  peptide (1)..(415): Ceres Seq. ID no. 13591926

SEQ ID NO: 49047 - DNA, 1620 bp, Arabidopsis thaliana
  misc_feature (1)..(1620): Ceres Seq. ID no. 13579870
  misc_feature (1)..(1620): Ortholog of  Ceres SEQ ID NO 15169533 as cited in SEQ ID NO 67374
aatacaagaggggaaaacaaaaaacaaaaatatattaacatagaacgtgtgagtagagagagaatataaattaccgtacttattgggttcggtttgatggctccagcaagtccacgagtggtggtgaaggtggatttgaagaagaggccatggcagcagactcagccactgcacaatagatggcatcctgagataccatcagttgcagaggtcaagactggtgagttgtttagggtggaaatggttgactggacgggaggtgcagtcaaagaagatggctctgctggcgatattaagagcatagacctctctactgttcattacctgagtgggccgatcaaagttgtggatgaggatggtgttgcagctaggccaggtgatcttcttgctgttgagatatgcaacttgggtcctcttccaggagatgaatggggattcactgcttcatttgatagagagaatggcggtggtttcttgactgaccatttcccttgtgcgaccaaagctatttggtactttgaagggatttatgcctactctcctcaaattcctggagtacgatttccagggttgacacatccaggaatcattggcactgcaccatcaaaagaactcttgagaatatggaatgaaagggaaagacaattagaagaaaaaggtgttgagtccctaacactatgtgaggttgtgcatcagcggccattagcaagcctaccaacaactaaaggatgtctactaggaaatattgaagagaggacatcagaatgggaaagaattgcaaaggaggctgctaggacaataccaggaagggaaaatggaggaaactgtgacataaaaaacctaagcagtggctctaaaatatatcttccagtgtttgtagaaggagctaatctaagcaccggtgacatgcatttctcacagggtgatggcgagatctcattctgtggagccatagagatgagtggatttctagaactcaagtgtgaaatcattagaaacgggatgcaggagtaccttacaccaatgggaccaaccactctccacgtaaacccgatctttgagatagggccagtggaaccaagattctcagagtggcttgtcttcgagggtatcagtgtcgatgagagcggaagacaacattacctagatgcaacagttgcatacaaacgagcagttctcaacgctatagactatctcttcaaattcggttactcaaaagaacaggtatatctcttactctcatgctgtccatgcgaaggaagaatatccggtatagtcgattctccaaatgccgttgctacacttgcaatacccactgccatctttgatcaggatattcgtccaaagacccgaaaagttccaacaggagctcggatagtgaagaagccagacgttatgaagagcacatatgatggaaaacttccaattacaaagaattcaagttcttcctcttagcttctacaaaaacaaaagaagatttagaagctaactaccaagactgtgtaatctagcatatgttccaataagaaagcaataactcggtgtcttgttagttgcagattccatataaaacaactcgagaaacgagaaggcaagcaaaaggcacatactttttctctc

SEQ ID NO: 49048 - protein, 452 aa, Arabidopsis thaliana
  peptide (1)..(452): Ceres Seq. ID no. 13579871
MAPASPRVVVKVDLKKRPWQQTQPLHNRWHPEIPSVAEVKTGELFRVEMVDWTGGAVKEDGSAGDIKSIDLSTVHYLSGPIKVVDEDGVAARPGDLLAVEICNLGPLPGDEWGFTASFDRENGGGFLTDHFPCATKAIWYFEGIYAYSPQIPGVRFPGLTHPGIIGTAPSKELLRIWNERERQLEEKGVESLTLCEVVHQRPLASLPTTKGCLLGNIEERTSEWERIAKEAARTIPGRENGGNCDIKNLSSGSKIYLPVFVEGANLSTGDMHFSQGDGEISFCGAIEMSGFLELKCEIIRNGMQEYLTPMGPTTLHVNPIFEIGPVEPRFSEWLVFEGISVDESGRQHYLDATVAYKRAVLNAIDYLFKFGYSKEQVYLLLSCCPCEGRISGIVDSPNAVATLAIPTAIFDQDIRPKTRKVPTGARIVKKPDVMKSTYDGKLPITKNSSSSS

SEQ ID NO: 49049 - protein, 404 aa, Arabidopsis thaliana
  peptide (1)..(404): Ceres Seq. ID no. 13579872
MVDWTGGAVKEDGSAGDIKSIDLSTVHYLSGPIKVVDEDGVAARPGDLLAVEICNLGPLPGDEWGFTASFDRENGGGFLTDHFPCATKAIWYFEGIYAYSPQIPGVRFPGLTHPGIIGTAPSKELLRIWNERERQLEEKGVESLTLCEVVHQRPLASLPTTKGCLLGNIEERTSEWERIAKEAARTIPGRENGGNCDIKNLSSGSKIYLPVFVEGANLSTGDMHFSQGDGEISFCGAIEMSGFLELKCEIIRNGMQEYLTPMGPTTLHVNPIFEIGPVEPRFSEWLVFEGISVDESGRQHYLDATVAYKRAVLNAIDYLFKFGYSKEQVYLLLSCCPCEGRISGIVDSPNAVATLAIPTAIFDQDIRPKTRKVPTGARIVKKPDVMKSTYDGKLPITKNSSSSS

SEQ ID NO: 49050 - DNA, 2062 bp, Arabidopsis thaliana; identical to SEQ ID NO: 45387
  misc_feature (1)..(2062): Ceres Seq. ID no. 12600320
  misc_feature (1)..(2062): Ortholog of  Ceres SEQ ID NO 15177692 as cited in SEQ ID NO 52664
  misc_feature (1)..(2062): Ortholog of  Ceres SEQ ID NO 14303959 as cited in SEQ ID NO 53709

SEQ ID NO: 49051 - protein, 498 aa, Arabidopsis thaliana; identical to SEQ ID NO: 45388
  peptide (1)..(498): Ceres Seq. ID no. 12600321

SEQ ID NO: 49052 - protein, 497 aa, Arabidopsis thaliana; identical to SEQ ID NO: 45389
  peptide (1)..(497): Ceres Seq. ID no. 12600322

SEQ ID NO: 49053 - protein, 481 aa, Arabidopsis thaliana; identical to SEQ ID NO: 45390
  peptide (1)..(481): Ceres Seq. ID no. 12600323

SEQ ID NO: 49054 - DNA, 1037 bp, Arabidopsis thaliana; identical to SEQ ID NO: 41917
  misc_feature (1)..(1037): Ceres Seq. ID no. 13501430
  misc_feature (1)..(1037): Ortholog of  Ceres SEQ ID NO 13637842 as cited in SEQ ID NO 54650
  misc_feature (1)..(1037): Ortholog of  Ceres SEQ ID NO 12608127 as cited in SEQ ID NO 57579
  misc_feature (1)..(1037): Ortholog of  Ceres SEQ ID NO 12634558 as cited in SEQ ID NO 0

SEQ ID NO: 49055 - protein, 279 aa, Arabidopsis thaliana; identical to SEQ ID NO: 41918
  peptide (1)..(279): Ceres Seq. ID no. 15223123
  misc_feature (1)..(1): Xaa is any aa, unknown or other

SEQ ID NO: 49056 - protein, 265 aa, Arabidopsis thaliana; identical to SEQ ID NO: 41919
  peptide (1)..(265): Ceres Seq. ID no. 15223124

SEQ ID NO: 49057 - DNA, 1038 bp, Arabidopsis thaliana
  misc_feature (1)..(1038): Ceres Seq. ID no. 13579802
  misc_feature (1)..(1038): Ortholog of  Ceres SEQ ID NO 15177807 as cited in SEQ ID NO 59667
atattacaccaaaatttgaaatcatcttctttgattgtttttggtgtgagcgaagatgggaagatcgaattctcaatgcccatctcattggattctcctctgcttcttcatctcttctcagttttggggattctcacttcccacttcgataattcaacaaaatctcgagggttttaaagatcctgaagacggttttcatgagattcattgttcaagagaacgtagcagagttgcttggaaaatcattcaagagtatctcatgccgtatgtggaaaaggagcggtatcagttaccgagtacttgtagagttcatcgagacaatgacatttatagagaacaagaagagcacaaattgcgttcagatattaatgagtggcgttgtggattctgcaaaaaggctttttatgaagagaagtatctcgataagcatttcgattcgcgccattacaatttacttaatgcgagtcatggtaaatgtctgtcggatctttgtggagcgttgcattgtgatcttgttgtagacacagctcggcttaagtccaagtgtaatcctgcagctgctgcaaaaaaccggcacttatgtgagagtttggctaatagttgttttccggtaaataaaggttcatcagccaaccgtcttcacgatttcttcttgcgtcagttctgcgatgcacatacatgttcaggaggatcaaagcccttatctcaaaaaccaaagaagaggagtatagtgtacattattttctccatcatcgttttggtagtgcttcttctctattacagctttgtctatttgttccgaagaggattaaagagaagatctcaagatttgaagcgtattagacacaatggtctgaagaagaaacccttctaaccatatcaagctttagctttaatggcggctgagagagagtacattttttttctttgcaagatgattacaattaggatcagattagtgcattttgcaacatcccttacaattatatcactacttacaccaatattgttacttagaattcaatagtgtttactgcc

SEQ ID NO: 49058 - protein, 272 aa, Arabidopsis thaliana
  peptide (1)..(272): Ceres Seq. ID no. 13579803
MGRSNSQCPSHWILLCFFISSQFWGFSLPTSIIQQNLEGFKDPEDGFHEIHCSRERSRVAWKIIQEYLMPYVEKERYQLPSTCRVHRDNDIYREQEEHKLRSDINEWRCGFCKKAFYEEKYLDKHFDSRHYNLLNASHGKCLSDLCGALHCDLVVDTARLKSKCNPAAAAKNRHLCESLANSCFPVNKGSSANRLHDFFLRQFCDAHTCSGGSKPLSQKPKKRSIVYIIFSIIVLVVLLLYYSFVYLFRRGLKRRSQDLKRIRHNGLKKKPF

SEQ ID NO: 49059 - protein, 204 aa, Arabidopsis thaliana
  peptide (1)..(204): Ceres Seq. ID no. 13579804
MPYVEKERYQLPSTCRVHRDNDIYREQEEHKLRSDINEWRCGFCKKAFYEEKYLDKHFDSRHYNLLNASHGKCLSDLCGALHCDLVVDTARLKSKCNPAAAAKNRHLCESLANSCFPVNKGSSANRLHDFFLRQFCDAHTCSGGSKPLSQKPKKRSIVYIIFSIIVLVVLLLYYSFVYLFRRGLKRRSQDLKRIRHNGLKKKPF

SEQ ID NO: 49060 - DNA, 1602 bp, Arabidopsis thaliana
  misc_feature (1)..(1602): Ceres Seq. ID no. 12578238
  misc_feature (1)..(1602): Ortholog of  Ceres SEQ ID NO 14302588 as cited in SEQ ID NO 0
atgttgacgaaaccaaaacccaattccaaattttcaatcttgttcactttccttttgctcctcagtttcttaatcttcgttgctcgttcctctgatgtcgccgtcgaagccggatccgaggaagaattagacgatctagagcagctccttgcggttgacgaacaattgcaggaagagagaccagagcaacaatctgaagcggagacggtgagcaaggcgcagcggatcgttgtggaactcaacggagacaatacgaagcgattgattgatgggaatgagtatgtgatggttttaggttacgcgccgtggtgtgcgaggagtgctgagctaatgccgagatttgcggaggcggcgacggatttgaaggaaattggtagttcggttttgatggcgaagattgacggcgagaggtattcgaaagtggcgtctcagcttgagattaaaggtttcccaacgcttcttctgtttgttaatggcacatctcagtcttacactggtggattttcctcagaggagatagtgatttgggtgcaaaagaagactggtgcgtctactattaaacttgatacagttgatgaagcttcaggatttctgaagaagcatcatactttcattctcggtctattcgaaaagtctgaggattcttctggacatgatgaatttgtaaaagctgcgtcgttagacaatgaaatccagtttgtagaaacaagcagcattgatgttgctaagcttctcttccctaaccttaaaaccaacaatgtgtttgttggattggttaaaactgaggctgaaaagtatacttcatatgatggaccttgccaagccgagaagatagtggaatttctgaacagtaataaattccctttggttacaaaattgactgaatccaacaccgttcgtgtttactccagtccagtcaagcttcaggttatggtcttttcgaagactgatgactttgaaagtctagctcagcctctagaagatattgcaagaaagttcaaatcaaagcttatgttgatatatattgacatatcaaacgaaaacctcgcaatgccattcttgacattattcgggatagaagatgcaaagaaaactgttgctgcattcgacaacaacctgaactccaagtatttgcttgagtcggatccatctcctagcaatatagaagaattttgtttcggacttgctcatggaactgtttcagcttactataagtcacagcctattccagataatcaaaatgcaagcgtagtggctgtggtcggcaggacttttgatgaagtggtcttgaggagcagcgagaatgttcttcttgaggtgcacacaccatggtgtattaactgtgaggctctgagtaaacaggttgagaagttgtcgcaacactttaaagggtttgaaaatcttgtctttgcaaggatagacgcttctgcaaacgagcatcctaagctaacggttgatgattacccgacaatcttgctttacaagactggtgaaaaggagaatccgttaaagctttcgacgaaatccagtgcgaaggatatggctgttttaatcaacaaagagttgaaatggaaggatcagtctggtaaagatgagttatag

SEQ ID NO: 49061 - protein, 533 aa, Arabidopsis thaliana
  peptide (1)..(533): Ceres Seq. ID no. 12578239
MLTKPKPNSKFSILFTFLLLLSFLIFVARSSDVAVEAGSEEELDDLEQLLAVDEQLQEERPEQQSEAETVSKAQRIVVELNGDNTKRLIDGNEYVMVLGYAPWCARSAELMPRFAEAATDLKEIGSSVLMAKIDGERYSKVASQLEIKGFPTLLLFVNGTSQSYTGGFSSEEIVIWVQKKTGASTIKLDTVDEASGFLKKHHTFILGLFEKSEDSSGHDEFVKAASLDNEIQFVETSSIDVAKLLFPNLKTNNVFVGLVKTEAEKYTSYDGPCQAEKIVEFLNSNKFPLVTKLTESNTVRVYSSPVKLQVMVFSKTDDFESLAQPLEDIARKFKSKLMLIYIDISNENLAMPFLTLFGIEDAKKTVAAFDNNLNSKYLLESDPSPSNIEEFCFGLAHGTVSAYYKSQPIPDNQNASVVAVVGRTFDEVVLRSSENVLLEVHTPWCINCEALSKQVEKLSQHFKGFENLVFARIDASANEHPKLTVDDYPTILLYKTGEKENPLKLSTKSSAKDMAVLINKELKWKDQSGKDEL

SEQ ID NO: 49062 - protein, 438 aa, Arabidopsis thaliana
  peptide (1)..(438): Ceres Seq. ID no. 12578240
MVLGYAPWCARSAELMPRFAEAATDLKEIGSSVLMAKIDGERYSKVASQLEIKGFPTLLLFVNGTSQSYTGGFSSEEIVIWVQKKTGASTIKLDTVDEASGFLKKHHTFILGLFEKSEDSSGHDEFVKAASLDNEIQFVETSSIDVAKLLFPNLKTNNVFVGLVKTEAEKYTSYDGPCQAEKIVEFLNSNKFPLVTKLTESNTVRVYSSPVKLQVMVFSKTDDFESLAQPLEDIARKFKSKLMLIYIDISNENLAMPFLTLFGIEDAKKTVAAFDNNLNSKYLLESDPSPSNIEEFCFGLAHGTVSAYYKSQPIPDNQNASVVAVVGRTFDEVVLRSSENVLLEVHTPWCINCEALSKQVEKLSQHFKGFENLVFARIDASANEHPKLTVDDYPTILLYKTGEKENPLKLSTKSSAKDMAVLINKELKWKDQSGKDEL

SEQ ID NO: 49063 - protein, 423 aa, Arabidopsis thaliana
  peptide (1)..(423): Ceres Seq. ID no. 12578241
MPRFAEAATDLKEIGSSVLMAKIDGERYSKVASQLEIKGFPTLLLFVNGTSQSYTGGFSSEEIVIWVQKKTGASTIKLDTVDEASGFLKKHHTFILGLFEKSEDSSGHDEFVKAASLDNEIQFVETSSIDVAKLLFPNLKTNNVFVGLVKTEAEKYTSYDGPCQAEKIVEFLNSNKFPLVTKLTESNTVRVYSSPVKLQVMVFSKTDDFESLAQPLEDIARKFKSKLMLIYIDISNENLAMPFLTLFGIEDAKKTVAAFDNNLNSKYLLESDPSPSNIEEFCFGLAHGTVSAYYKSQPIPDNQNASVVAVVGRTFDEVVLRSSENVLLEVHTPWCINCEALSKQVEKLSQHFKGFENLVFARIDASANEHPKLTVDDYPTILLYKTGEKENPLKLSTKSSAKDMAVLINKELKWKDQSGKDEL

SEQ ID NO: 49064 - DNA, 1577 bp, Arabidopsis thaliana
  misc_feature (1)..(1577): Ceres Seq. ID no. 12578242
  misc_feature (1)..(1577): Ortholog of  Ceres SEQ ID NO 13654285 as cited in SEQ ID NO 68661
tctctctctcttctcgagacaaagaagaagacaagagtcaaacttgaaggcgacaatcggagcttccatggccgtttcttcctctttcaccaaaccctaatttcaatttcatcttcttttcccttctttctcaccggaaaatggatctctccgacatccgaaacaacaacaacgacaccgccgccgtcgccaccggaggaggagcaagacagctagttgacgcatctctctcaatcgttcccagatctacacctcccgaagactcaacactcgcaacaacctcatctacggcaacggcgactacaacgaagcggtcgactaaagaccgtcacacgaaagtcgacggaagaggacgtcggattcgtatgccggcgctatgtgcagctagagtttttcagttaacgagagagttaggtcataaatccgatggtgaaactattgaatggcttcttcaacaagctgagccagctattgttgctgctacaggtacaggaactattccggcgaacttctctactttaagtgtttcgttacgaagtagtggatcgactctctctgctccgccgtcgaaatcggtgccgctttacggtgctcttggattgactcatcatcagtatgatgaacaaggaggcggcggtgtgtttgctgctcatacgtcgccgcttttagggtttcatcatcagcttcaacaccaccagaaccagaatcagaatcaagatccggtggaaactattcctgaaggtgagaatttctctaggaaacggtatagatcggttgatttgtctaaagaaaacgatgatcggaaacagaacgagaataaatctttgaaagaaagtgaaacgtcgggtcctacggcggcgccgatgtgggcggttgcgccgccgagtaggtctggtgctgggaacactttttggatgcttccggtaccgacaacggccggtaatcaaatggagagtagtagcaacaataacaccgccgcaggccaccgtgctcctcctatgtggccatttgtgaactctgctggaggaggagcgggaggtggaggcggagcagcgactcactttatggcgggaacggggtttagttttccgatggatcagtacagaggaagtccacttcagttaggttcttttttagctcagccgcagccgactcagaacttaggactaagtatgccggactcgaatctcgggatgttagccgctttgaactcggcttattcaagaggcggaaacgcaaacgcgaatgcggaacaagcgaacaatgcggtggagcatcaagagaagcagcaacagagtgatcatgatgatgatagtagagaggagaactcaaatagctctgagtgagtgatgtaaactaatcttgtgaaatcattgaatgtggtaagaaattgatttaaagcgtttgtagcggtttggttgattgttttattgtgagattttgtgtgttgttgtttagtagtgtttagacaagaacaatttatgtgtgaaggaattgttaggtttgggtccaaatggactctcatgggtagagaatgttttcaatgtatagaaggaatgatagtcttttcgattttt

SEQ ID NO: 49065 - protein, 401 aa, Arabidopsis thaliana
  peptide (1)..(401): Ceres Seq. ID no. 12578243
MDLSDIRNNNNDTAAVATGGGARQLVDASLSIVPRSTPPEDSTLATTSSTATATTTKRSTKDRHTKVDGRGRRIRMPALCAARVFQLTRELGHKSDGETIEWLLQQAEPAIVAATGTGTIPANFSTLSVSLRSSGSTLSAPPSKSVPLYGALGLTHHQYDEQGGGGVFAAHTSPLLGFHHQLQHHQNQNQNQDPVETIPEGENFSRKRYRSVDLSKENDDRKQNENKSLKESETSGPTAAPMWAVAPPSRSGAGNTFWMLPVPTTAGNQMESSSNNNTAAGHRAPPMWPFVNSAGGGAGGGGGAATHFMAGTGFSFPMDQYRGSPLQLGSFLAQPQPTQNLGLSMPDSNLGMLAALNSAYSRGGNANANAEQANNAVEHQEKQQQSDHDDDSREENSNSSE

SEQ ID NO: 49066 - protein, 326 aa, Arabidopsis thaliana
  peptide (1)..(326): Ceres Seq. ID no. 12578244
MPALCAARVFQLTRELGHKSDGETIEWLLQQAEPAIVAATGTGTIPANFSTLSVSLRSSGSTLSAPPSKSVPLYGALGLTHHQYDEQGGGGVFAAHTSPLLGFHHQLQHHQNQNQNQDPVETIPEGENFSRKRYRSVDLSKENDDRKQNENKSLKESETSGPTAAPMWAVAPPSRSGAGNTFWMLPVPTTAGNQMESSSNNNTAAGHRAPPMWPFVNSAGGGAGGGGGAATHFMAGTGFSFPMDQYRGSPLQLGSFLAQPQPTQNLGLSMPDSNLGMLAALNSAYSRGGNANANAEQANNAVEHQEKQQQSDHDDDSREENSNSSE

SEQ ID NO: 49067 - DNA, 1599 bp, Arabidopsis thaliana
  misc_feature (1)..(1599): Ceres Seq. ID no. 13579805
  misc_feature (1)..(1599): Ortholog of  Ceres SEQ ID NO 13646221 as cited in SEQ ID NO 20310
  misc_feature (1)..(1599): Ortholog of  Ceres SEQ ID NO 14311423 as cited in SEQ ID NO 53911
  misc_feature (1)..(1599): Ortholog of  Ceres SEQ ID NO 14315261 as cited in SEQ ID NO 58451
atgggttggtttaacaagatctttaaaggctctaaccaaaggctccgggttgggaataataagcacaatcacaatgtttattacgataattatccgactgcttcacatgatgatgagcctagtgcggcggatacagatgctgataatgatgaacctcatcatactcaggaaccatctacatctgaggataatacatcgaatgaccaggaaaatgaagacatagaccgtgcaattgcattgtcgcttttagaagagaatcaagaacagacaagtataagcgggaaatactcgatgccggtggatgaagatgagcaacttgctagagccctacaagaaagtatggtagttgggaattcaccccgtcacaaaagtggaagtacatatgataatgggaatgcatatggagctggagatttatatgggaatggacatatgtatggaggaggaaatgtatatgcaaatggagatatttattatccaagacctattacttttcaaatggatttcaggatttgtgctggctgtaatatggagattggccatggaagatttctgaattgccttaattcactatggcatccagaatgttttcgatgttatggctgcagtcagccgatttctgagtacgagttttcaacatcagggaactacccttttcacaaggcttgttacagggagagatatcatcctaaatgtgatgtctgcagccactttataccaacaaatcatgctggtcttattgaatatagggcacatcctttttgggttcagaagtattgtccttctcacgaacacgatgctaccccgagatgttgcagttgtgaaagaatggagccacggaatacgagatatgttgaacttaacgatggacggaaactttgccttgagtgtttggactcggcggtcatggacaccatgcaatgccaacctctgtacttgcaaatacaaaatttctatgaaggactcaacatgaaggtagagcaggaagttccactcctcttggttgagagacaagcacttaacgaagccagagaaggtgaaaagaatggtcactatcacatgccagaaacaagaggactctgcctttcagaagaacaaactgttagtactgtaagaaagcgatcaaagcatggcacaggaaaatgggccgggaatattacagaaccttacaagttaacacggcaatgtgaagttaccgccattctcatcttattcgggctccctaggttacttactggttcgattctagctcatgagatgatgcatgcgtggatgaggctcaaaggattccgaacactgagccaagatgttgaagaaggtatatgtcaagtgatggctcataaatggttagatgctgagttagctgctggttcaacaaatagcaatgctgcatcatcatcctcctcttctcaaggactgaaaaagggaccgagatctcagtacgagagaaagcttggtgagtttttcaagcaccaaatcgagtctgatgcttctccggtttatggagacgggttcagagctgggaggttagctgttcacaagtacggtttgcgaaaaacacttgagcatatacagatgaccggtagattcccggtttaa

SEQ ID NO: 49068 - protein, 532 aa, Arabidopsis thaliana
  peptide (1)..(532): Ceres Seq. ID no. 13579806
MGWFNKIFKGSNQRLRVGNNKHNHNVYYDNYPTASHDDEPSAADTDADNDEPHHTQEPSTSEDNTSNDQENEDIDRAIALSLLEENQEQTSISGKYSMPVDEDEQLARALQESMVVGNSPRHKSGSTYDNGNAYGAGDLYGNGHMYGGGNVYANGDIYYPRPITFQMDFRICAGCNMEIGHGRFLNCLNSLWHPECFRCYGCSQPISEYEFSTSGNYPFHKACYRERYHPKCDVCSHFIPTNHAGLIEYRAHPFWVQKYCPSHEHDATPRCCSCERMEPRNTRYVELNDGRKLCLECLDSAVMDTMQCQPLYLQIQNFYEGLNMKVEQEVPLLLVERQALNEAREGEKNGHYHMPETRGLCLSEEQTVSTVRKRSKHGTGKWAGNITEPYKLTRQCEVTAILILFGLPRLLTGSILAHEMMHAWMRLKGFRTLSQDVEEGICQVMAHKWLDAELAAGSTNSNAASSSSSSQGLKKGPRSQYERKLGEFFKHQIESDASPVYGDGFRAGRLAVHKYGLRKTLEHIQMTGRFPV

SEQ ID NO: 49069 - protein, 435 aa, Arabidopsis thaliana
  peptide (1)..(435): Ceres Seq. ID no. 13579807
MPVDEDEQLARALQESMVVGNSPRHKSGSTYDNGNAYGAGDLYGNGHMYGGGNVYANGDIYYPRPITFQMDFRICAGCNMEIGHGRFLNCLNSLWHPECFRCYGCSQPISEYEFSTSGNYPFHKACYRERYHPKCDVCSHFIPTNHAGLIEYRAHPFWVQKYCPSHEHDATPRCCSCERMEPRNTRYVELNDGRKLCLECLDSAVMDTMQCQPLYLQIQNFYEGLNMKVEQEVPLLLVERQALNEAREGEKNGHYHMPETRGLCLSEEQTVSTVRKRSKHGTGKWAGNITEPYKLTRQCEVTAILILFGLPRLLTGSILAHEMMHAWMRLKGFRTLSQDVEEGICQVMAHKWLDAELAAGSTNSNAASSSSSSQGLKKGPRSQYERKLGEFFKHQIESDASPVYGDGFRAGRLAVHKYGLRKTLEHIQMTGRFPV

SEQ ID NO: 49070 - protein, 419 aa, Arabidopsis thaliana
  peptide (1)..(419): Ceres Seq. ID no. 13579808
MVVGNSPRHKSGSTYDNGNAYGAGDLYGNGHMYGGGNVYANGDIYYPRPITFQMDFRICAGCNMEIGHGRFLNCLNSLWHPECFRCYGCSQPISEYEFSTSGNYPFHKACYRERYHPKCDVCSHFIPTNHAGLIEYRAHPFWVQKYCPSHEHDATPRCCSCERMEPRNTRYVELNDGRKLCLECLDSAVMDTMQCQPLYLQIQNFYEGLNMKVEQEVPLLLVERQALNEAREGEKNGHYHMPETRGLCLSEEQTVSTVRKRSKHGTGKWAGNITEPYKLTRQCEVTAILILFGLPRLLTGSILAHEMMHAWMRLKGFRTLSQDVEEGICQVMAHKWLDAELAAGSTNSNAASSSSSSQGLKKGPRSQYERKLGEFFKHQIESDASPVYGDGFRAGRLAVHKYGLRKTLEHIQMTGRFPV

SEQ ID NO: 49071 - DNA, 1980 bp, Arabidopsis thaliana
  misc_feature (1)..(1980): Ceres Seq. ID no. 13592092
  misc_feature (1)..(1980): Ortholog of  Ceres SEQ ID NO 14313167 as cited in SEQ ID NO 54354
gattccaaaatcctctgtatatggatctacacctctcctcagtctcatactcaaatcaataatccaaaccccaaaaaaaagaaaaccagagaagagagtttaaaaaatgagaggttcttgcaaagtctctatagttcttcttctggttttaatcaatggtgtgcttggagataacccttatagattcttcacctggaaaattacttatggcgacatttatccccttggtgttaaacaacagggaatattgataaatgggcagtttcctggacctcacattgacgcaatcacaaatgataatatcattatcagtgttttcaattacttgaaagagccttttctcatttcttggaacggagtgcaacagaggaagaactcatggcaagatggagtcgtagggacaacatgtccgattccaccaggcaaaaacttcacttatgtaattcaagtcaaagatcaaattggtagcttctactatttcccttctcttgccttccacaaagccgctggtgcatttggagccatccgtgtctggagtcgtcctcgcatccctgtcccgttctctccccctgacggtgatttctggcttctcgccggagattggtacaaaaccaatcactatgttttgagacgtctactagaagccggaaggaatctaccgaatcctgatggagttctcatcaatggtcgcggctggggaggcaataccttcaccgttcaacccggtaagacctatagattcagaatatcaaacgttggggtcgcgacttcattaaacttcagaatccaaggacacacgatgaagctcgttgaagtagaaggctctcacactgttcaaaacatctacacttcacttgacattcatttaggacagtcttactctgttcttgtgacggctaaccaagctcctcaagactattacatcgtcatctcctcgaggttcacgcggaaagtccttacaacgacttcgattctccattacagtaactcgagaaaaggcgtatctggccctgttccaaatggtcctactttggacatcgcatcttcactctaccaagctcgaactatccggagaaatcttacagcgagtggtccgagaccgaatccgcaaggctcgtatcattacggtttgatcaaaccaggccgtacgatcatactcgccaactcagctccttggatcaacggcaagcaaaggtacgccgtgaacggtgcctcgtttgttgcgcctgacacaccattgaagctcgccgattacttcaagattcccggagtttttaacctcggaagcatcccaacgagtccctctggtggaaacggagggtatcttcaaagctctgttatggccgctaactttagagaattcatcgaggttgttttccaaaactgggaaaattcagtccagtcttggcacgtctccggttactctttcttcgtcgtcggtatggatggaggacaatggactcccggaagccgagcaaagtacaacctgcgggacgcggtttcacggtccaccgttcaagtatatccgagggcatggacagcgatctacatagcgttggataatgttgggatgtggaacataaggtcggagaattgggcaagacagtatttggggcaacaattctatcttcgagtttacacttcctctacttcgtaccgagatgaatatccaccaccaaagaacgctcttatgtgcggacgagctaaaggccgccacactaggccattctaaaagggatattggacgcaacggctcaactgttttttttttctttgtttttttagattgaatgatttgaaatgtttagtattgtcacgagagggtggcaaagagatgtgagcttcgtggatttattcactacggcacaaaaattaggaacaagaaaaatttggagcttgacttgagctttcaacttagtttttatgacgaaatcaaatgttgtgttcttattttaaataatcaaattattttgttttact

SEQ ID NO: 49072 - protein, 541 aa, Arabidopsis thaliana
  peptide (1)..(541): Ceres Seq. ID no. 13592093
MRGSCKVSIVLLLVLINGVLGDNPYRFFTWKITYGDIYPLGVKQQGILINGQFPGPHIDAITNDNIIISVFNYLKEPFLISWNGVQQRKNSWQDGVVGTTCPIPPGKNFTYVIQVKDQIGSFYYFPSLAFHKAAGAFGAIRVWSRPRIPVPFSPPDGDFWLLAGDWYKTNHYVLRRLLEAGRNLPNPDGVLINGRGWGGNTFTVQPGKTYRFRISNVGVATSLNFRIQGHTMKLVEVEGSHTVQNIYTSLDIHLGQSYSVLVTANQAPQDYYIVISSRFTRKVLTTTSILHYSNSRKGVSGPVPNGPTLDIASSLYQARTIRRNLTASGPRPNPQGSYHYGLIKPGRTIILANSAPWINGKQRYAVNGASFVAPDTPLKLADYFKIPGVFNLGSIPTSPSGGNGGYLQSSVMAANFREFIEVVFQNWENSVQSWHVSGYSFFVVGMDGGQWTPGSRAKYNLRDAVSRSTVQVYPRAWTAIYIALDNVGMWNIRSENWARQYLGQQFYLRVYTSSTSYRDEYPPPKNALMCGRAKGRHTRPF

SEQ ID NO: 49073 - protein, 310 aa, Arabidopsis thaliana
  peptide (1)..(310): Ceres Seq. ID no. 13592094
MKLVEVEGSHTVQNIYTSLDIHLGQSYSVLVTANQAPQDYYIVISSRFTRKVLTTTSILHYSNSRKGVSGPVPNGPTLDIASSLYQARTIRRNLTASGPRPNPQGSYHYGLIKPGRTIILANSAPWINGKQRYAVNGASFVAPDTPLKLADYFKIPGVFNLGSIPTSPSGGNGGYLQSSVMAANFREFIEVVFQNWENSVQSWHVSGYSFFVVGMDGGQWTPGSRAKYNLRDAVSRSTVQVYPRAWTAIYIALDNVGMWNIRSENWARQYLGQQFYLRVYTSSTSYRDEYPPPKNALMCGRAKGRHTRPF

SEQ ID NO: 49074 - DNA, 1180 bp, Arabidopsis thaliana; identical to SEQ ID NO: 23631
  misc_feature (1)..(1180): Ceres Seq. ID no. 12330478
  misc_feature (1)..(1180): Ortholog of  Ceres SEQ ID NO 14306066 as cited in SEQ ID NO 57378

SEQ ID NO: 49075 - protein, 254 aa, Arabidopsis thaliana; identical to SEQ ID NO: 23632
  peptide (1)..(254): Ceres Seq. ID no. 12330479

SEQ ID NO: 49076 - protein, 231 aa, Arabidopsis thaliana; identical to SEQ ID NO: 23633
  peptide (1)..(231): Ceres Seq. ID no. 12330480

SEQ ID NO: 49077 - protein, 227 aa, Arabidopsis thaliana; identical to SEQ ID NO: 23634
  peptide (1)..(227): Ceres Seq. ID no. 12330481

SEQ ID NO: 49078 - DNA, 868 bp, Arabidopsis thaliana
  misc_feature (1)..(868): Ceres Seq. ID no. 13579873
  misc_feature (1)..(868): Ortholog of  Ceres SEQ ID NO 15225623 as cited in SEQ ID NO 64319
agcagtgtttgaaatcctttggattgcatcaccaggagcaagagatcacgatgatcatttgttggatttcgtcattgaagctctgaagttttttttcgtcattctcgtatcaactgaatcgctgctttctattgttgatgatattcagtctaagaaacggggactttcgctggaggagaaacgagagaagatgcttcagatattctatgagtctcaagacttcttcctactaaaggaacttgagaagatggggccgaagaagggtgtaattagtcagtctgtgaaagatgttatccagagtttagtcgatgatgatcttgttgcgaaagacaagattggaatttctatctacttttggagccttcccagctgtgctggcaatcaacttaggagtgttcgccagaaacttgaatctgatcttcagggtagtaacaaaaggttagcagaacttgttgatcagtgtgaggccctaaagaagggaagggaagaatcggaggaacgaacagaggccttgacgcaactcaaagatattgaaaagaaacacaaagatctgaagaacgagatggtacaatttgctgacaacgatccagctactttggaggcaaagaggaatgcaattgaagttgctcaccagtcggctaacagatggacagataacatcttcacactgcgacaatggtgttcaaacaacttcccccaggccaaggaacagctagaacatctatacacggaggcgggaatcactgaggactttgattacatagagttatcatcattccctttgagctcatcccatgaagctgataccgcaaagcagctagtacaagatgaagcttagttctaatactctccagcataacagttaaag

SEQ ID NO: 49079 - protein, 278 aa, Arabidopsis thaliana
  peptide (1)..(278): Ceres Seq. ID no. 13579874
AVFEILWIASPGARDHDDHLLDFVIEALKFFFVILVSTESLLSIVDDIQSKKRGLSLEEKREKMLQIFYESQDFFLLKELEKMGPKKGVISQSVKDVIQSLVDDDLVAKDKIGISIYFWSLPSCAGNQLRSVRQKLESDLQGSNKRLAELVDQCEALKKGREESEERTEALTQLKDIEKKHKDLKNEMVQFADNDPATLEAKRNAIEVAHQSANRWTDNIFTLRQWCSNNFPQAKEQLEHLYTEAGITEDFDYIELSSFPLSSSHEADTAKQLVQDEA

SEQ ID NO: 49080 - protein, 215 aa, Arabidopsis thaliana
  peptide (1)..(215): Ceres Seq. ID no. 13579875
MLQIFYESQDFFLLKELEKMGPKKGVISQSVKDVIQSLVDDDLVAKDKIGISIYFWSLPSCAGNQLRSVRQKLESDLQGSNKRLAELVDQCEALKKGREESEERTEALTQLKDIEKKHKDLKNEMVQFADNDPATLEAKRNAIEVAHQSANRWTDNIFTLRQWCSNNFPQAKEQLEHLYTEAGITEDFDYIELSSFPLSSSHEADTAKQLVQDEA

SEQ ID NO: 49081 - protein, 196 aa, Arabidopsis thaliana
  peptide (1)..(196): Ceres Seq. ID no. 13579876
MGPKKGVISQSVKDVIQSLVDDDLVAKDKIGISIYFWSLPSCAGNQLRSVRQKLESDLQGSNKRLAELVDQCEALKKGREESEERTEALTQLKDIEKKHKDLKNEMVQFADNDPATLEAKRNAIEVAHQSANRWTDNIFTLRQWCSNNFPQAKEQLEHLYTEAGITEDFDYIELSSFPLSSSHEADTAKQLVQDEA

SEQ ID NO: 49082 - DNA, 1596 bp, Arabidopsis thaliana
  misc_feature (1)..(1596): Ceres Seq. ID no. 12578257
  misc_feature (1)..(1596): Ortholog of  Ceres SEQ ID NO 13594209 as cited in SEQ ID NO 59089
  misc_feature (1)..(1596): Ortholog of  Ceres SEQ ID NO 13502874 as cited in SEQ ID NO 66298
  misc_feature (1)..(1596): Ortholog of  Ceres SEQ ID NO 12614124 as cited in SEQ ID NO 68392
aaactatgtcgattcttctgtatttcttctttctccccgttattttatcgttaatattcatgaagaaattcaaagactcgaaacgaaatcttcctccgagcccaccgaagctaccaattatcggaaacttacaccagcttcgaggattgtttcatagatgtcttcatgatctctccaagaaacacggtccggtgttacttctccgtctaggttttatcgatatggttgtgatctcatcaaaagaagcagcggaagaagttctcaaagtacatgaccttgagtgttgtactagacctaagaccaacgcctcatcaaaattctcgcgtgatggtaaagacatcgcctttgcgccatacggggaggtttcgagagagttgcggaagctttccttaatcaactttttcagcacgcaaaaggttcgatcttttaggtacatcagagaggaagaaaatgatttgatggtcaagaaactaaaggaatcagctaagaagaagaatacagtggatttgagccaaacacttttctatctagttgggagtatcatattcagggctacctttgggcagcgtttagaccagaacaagcatgtcaataaggaaaagatcgaagaactcatgtttgaggtccagaaagttgggtctctaagcagctctgatattttccctgctggtgtgggatggtttatggactttgtgtcaggacgacataagacacttcacaaagttttcgtcgaggttgatactttgctaaatcatgtaattgatggtcacttgaagaatcctgaagacaaaacaaatcaagatcgccctgatatcatcgactcgatcttagagactatttataaacaagaacaagatgaatctttcaaactcaccattgatcatctcaaaggaattatccaaaatatatatcttgctggagtagacacaagtgccatcaccatgatttgggcaatggcagagcttgttaagaacccacgggtaatgaagaaagctcaagaagagatccgaacatgcattggaatcaaacagaaggagagaatcgaagaagaagatgtcgataagcttcagtacttgaagcttgtgatcaaagaaaccttaagactacacccaccagcacctcttttacttccaagagagacaatggctgatatcaagattcaaggctacgacattcctcggaaaaccattcttttggttaatgcatggtcgataggacgaaaccctgaactctgggaaaaccctgaggaatttaacccggagagatttatcgattgtcctatggattacaaaggaaatagttttgagatgttaccatttggttctggtcggaagatatgtccagggatagcttttggaatagcgaccgttgaactgggactattgaacttgctttactactttgattggagattggctgaggaggataaagatattgacatggaagaggctggtgatgccacaattgttaagaaagttcctcttgaacttgtcccaattattcatcattgaatgatgttccaactctataaataaaaatgaagttatatatttgcttgtcgaaacagaaaaatgttatgtaacatatatttttatt

SEQ ID NO: 49083 - protein, 502 aa, Arabidopsis thaliana
  peptide (1)..(502): Ceres Seq. ID no. 12578258
TMSILLYFFFLPVILSLIFMKKFKDSKRNLPPSPPKLPIIGNLHQLRGLFHRCLHDLSKKHGPVLLLRLGFIDMVVISSKEAAEEVLKVHDLECCTRPKTNASSKFSRDGKDIAFAPYGEVSRELRKLSLINFFSTQKVRSFRYIREEENDLMVKKLKESAKKKNTVDLSQTLFYLVGSIIFRATFGQRLDQNKHVNKEKIEELMFEVQKVGSLSSSDIFPAGVGWFMDFVSGRHKTLHKVFVEVDTLLNHVIDGHLKNPEDKTNQDRPDIIDSILETIYKQEQDESFKLTIDHLKGIIQNIYLAGVDTSAITMIWAMAELVKNPRVMKKAQEEIRTCIGIKQKERIEEEDVDKLQYLKLVIKETLRLHPPAPLLLPRETMADIKIQGYDIPRKTILLVNAWSIGRNPELWENPEEFNPERFIDCPMDYKGNSFEMLPFGSGRKICPGIAFGIATVELGLLNLLYYFDWRLAEEDKDIDMEEAGDATIVKKVPLELVPIIHH

SEQ ID NO: 49084 - protein, 501 aa, Arabidopsis thaliana
  peptide (1)..(501): Ceres Seq. ID no. 12578259
MSILLYFFFLPVILSLIFMKKFKDSKRNLPPSPPKLPIIGNLHQLRGLFHRCLHDLSKKHGPVLLLRLGFIDMVVISSKEAAEEVLKVHDLECCTRPKTNASSKFSRDGKDIAFAPYGEVSRELRKLSLINFFSTQKVRSFRYIREEENDLMVKKLKESAKKKNTVDLSQTLFYLVGSIIFRATFGQRLDQNKHVNKEKIEELMFEVQKVGSLSSSDIFPAGVGWFMDFVSGRHKTLHKVFVEVDTLLNHVIDGHLKNPEDKTNQDRPDIIDSILETIYKQEQDESFKLTIDHLKGIIQNIYLAGVDTSAITMIWAMAELVKNPRVMKKAQEEIRTCIGIKQKERIEEEDVDKLQYLKLVIKETLRLHPPAPLLLPRETMADIKIQGYDIPRKTILLVNAWSIGRNPELWENPEEFNPERFIDCPMDYKGNSFEMLPFGSGRKICPGIAFGIATVELGLLNLLYYFDWRLAEEDKDIDMEEAGDATIVKKVPLELVPIIHH

SEQ ID NO: 49085 - protein, 483 aa, Arabidopsis thaliana
  peptide (1)..(483): Ceres Seq. ID no. 12578260
MKKFKDSKRNLPPSPPKLPIIGNLHQLRGLFHRCLHDLSKKHGPVLLLRLGFIDMVVISSKEAAEEVLKVHDLECCTRPKTNASSKFSRDGKDIAFAPYGEVSRELRKLSLINFFSTQKVRSFRYIREEENDLMVKKLKESAKKKNTVDLSQTLFYLVGSIIFRATFGQRLDQNKHVNKEKIEELMFEVQKVGSLSSSDIFPAGVGWFMDFVSGRHKTLHKVFVEVDTLLNHVIDGHLKNPEDKTNQDRPDIIDSILETIYKQEQDESFKLTIDHLKGIIQNIYLAGVDTSAITMIWAMAELVKNPRVMKKAQEEIRTCIGIKQKERIEEEDVDKLQYLKLVIKETLRLHPPAPLLLPRETMADIKIQGYDIPRKTILLVNAWSIGRNPELWENPEEFNPERFIDCPMDYKGNSFEMLPFGSGRKICPGIAFGIATVELGLLNLLYYFDWRLAEEDKDIDMEEAGDATIVKKVPLELVPIIHH

SEQ ID NO: 49086 - DNA, 761 bp, Arabidopsis thaliana
  misc_feature (1)..(761): Ceres Seq. ID no. 13579813
  misc_feature (1)..(761): Ortholog of  Ceres SEQ ID NO 14309614 as cited in SEQ ID NO 52633
  misc_feature (1)..(761): Ortholog of  Ceres SEQ ID NO 15226850 as cited in SEQ ID NO 62501
  misc_feature (1)..(761): Ortholog of  Ceres SEQ ID NO 15174297 as cited in SEQ ID NO 0
aaagagagacgactctgaatccaaaaaaaamaaaaaactcattaagtaaagacaaaggaagagaagaaagacgatttctcgaagaagctatggcggatcagctaactgatgaacagatctctgagtttaaggaagcttttagcctcttcgacaaagatggagatggttgcatcaccacaaaggagctgggaacagtgatgcggtcactagggcagaacccaacagaagctgagctacaagacatgatcaacgaggttgacgctgatggaaacggaaccattgacttccctgagttcttaaacctaatggctaaaaagatgaaggacacagactcggaggaagagctgaaagaagctttcagggtgttcgacaaagaccagaacggtttcatatccgctgcagagcttcgccatgtgatgacgaatctaggtgagaaactgactgatgaagaggtcgaggagatgattcgtgaagcagatgttgatggagatggtcagataaactacgaggagtttgtcaagattatgatggctaagtgatttgataaaggtgatgatgatgatgatgatgacctttttatgcttctaggagtttaaccaaaaacatttgcatgattggtggagatatgcttttaaacagacataatttgtttttcgttcttttgattttctggtttgtgacttttgtgtgtaatggaaaatcaagtaagttggattgaaaccgatgggttgggtttttactttttacccacattttgttgc

SEQ ID NO: 49087 - protein, 178 aa, Arabidopsis thaliana
  peptide (1)..(178): Ceres Seq. ID no. 15222700
  misc_feature (10)..(10): Xaa is any aa, unknown or other
RETTLNPKKXKNSLSKDKGREERRFLEEAMADQLTDEQISEFKEAFSLFDKDGDGCITTKELGTVMRSLGQNPTEAELQDMINEVDADGNGTIDFPEFLNLMAKKMKDTDSEEELKEAFRVFDKDQNGFISAAELRHVMTNLGEKLTDEEVEEMIREADVDGDGQINYEEFVKIMMAK

SEQ ID NO: 49088 - protein, 149 aa, Arabidopsis thaliana; identical to SEQ ID NO: 27678
  peptide (1)..(149): Ceres Seq. ID no. 15222701

SEQ ID NO: 49089 - protein, 113 aa, Arabidopsis thaliana; identical to SEQ ID NO: 27679
  peptide (1)..(113): Ceres Seq. ID no. 15222702

SEQ ID NO: 49090 - DNA, 2527 bp, Arabidopsis thaliana
  misc_feature (1)..(2527): Ceres Seq. ID no. 12578261
  misc_feature (1)..(2527): Ortholog of  Ceres SEQ ID NO 13663928 as cited in SEQ ID NO 60804
aaacaaaaaaaccattgaagaagatcggaggcgacgacggtgatgacgatggacagagaaaaggagagagaacttgagctcgagagtgcaatgtacacaaactgtttgcttttaggtttggatccgaatgtgatcggactcggagcctccaatggcacgcctcgggtcgggttatttcgccattcgaatccaaagctcggtgaacagcttctctacttcatcctctcttctcttcgtggccctgctcagtcttcaaaggattttgataaggtttggccaattttcgattcggctcaatctcgcgattttcgtaaggttgttcaagcgattataagcgagcttgaatcacaaggggcattaccaaggagtaattcgagggtttcatcactagccacttgctgtggaccaagatttgtggagctcttgtggcaactttcactgcatgcgttaagagaagttcataggcggacatttcctgctgatgtagcttccaatcctctaccttcttctctaactgacgtttctttctcacatgcagctactttgcttcctgtaaccaaggcccggatagtgcttgagcgccgtcggtttcttaaaaatgcagagactgcggtacaaagacaggccatgtggtctaatttagcccatgagatgactgcagagttccgtggtctctgtgctgaagaggcttaccttcaacaggaactagagaaacttaacgatttgagaaacaaagtgaagcaggaaggagaagtgtgggatgaccttgtgtctagctccagtcagaattctcatctagtttcaaaggcaactaggttatgggattctataatggctcgtaaaggtcagcatgaagttcttgcgtcaggtcccattgaggacttgatagctcacagggagcatagataccggatttcaggatcggccctacttgcagcgatggatcagagttctcaagttcctcgagcagaattactctctgcccactcagatgattcagcttcacttgcggatgacaaagaactaagtgatggatcgtacacaaacatgcatgaccactctttagtagatagttttgaaacagccagctcacaagcaagtgatgaaacactttctcgagtagatgatagaggtggaaagatcaatcagacagtcgatgtagcggaagtcataaggcgctggacacatgcattacagcgtattcataaacagtctcttcttctggctaaagcaaatgatggggatggtccagatattttgcggactgcgagtgatggtggtacaagtgggcatgttgaatcattggctgcaactttgactgaacatcaacaacatttagctagctttcaggttcttatcaaccaattaaaggaagtttctccagccatacaaaagtccatatcggaatgtactgagatggttaatagtcttcccccaaccttgcctccagttacgagaagtaatggacaagcatcttcacttctacaatctcagggcagtgggagaattatggaaggtgtatcaaatgatgttgctgagctgacctcgacaatgtctaatgttcagctcgagaaagtctcagctagtcctacattaaagcttccacagttatttagttccactcctacttcttctggtaaaggaggaaatggacaaaagcgacagacaatggcttcccaggtcaataaaatggaaagcttgtctgagaagaactctacagaccaagcactatcaaatgctcgaccagacaacttaccgactgatacaagcagttcttttgtccataacctgaagaaatctgtgagggaagcggctttattgattccttcttcagcaggctcatcacgggatagtcaatccgatgagggctccgagcattattttgtacctctttcagcaactggcttttcccgttttccatcagaaaccaaagccctgcctctcagagggtcgagagcacttacctctctgagcgagccttcgtttcttgaacccaatgttcccgatagctttgcaccaagcaagtacagcgatatacctgacacgtatgatgatcttgattcattcaaagattacgataatgggaacgggtttctgtcggttgctggatcaaacagtgtagcttctgatgcacaacaatcattttacgatattgatgatcaagtattttccccacctttactaatggactcatccctattatcagatgcctatgaagacttgttagctcctctttcagaaaccgaagccgctttaatggagcattaggaagaagccttgaatcattataacacttgtgtttcttcaacaattgttcttgggggaatttgaagcctgtgatcgatctctcggtctcacacaggtgtatcaattatttaccatttaacaaggctttcgtaatttatcttggatttgttggtaatgggactgactcttgatgaatgattcatgatatcactatttgtttgtgttgtgtcaagtgtgtgtgtaaaaagaaactcgagcttaggtagaagcattgctcact

SEQ ID NO: 49091 - protein, 741 aa, Arabidopsis thaliana
  peptide (1)..(741): Ceres Seq. ID no. 12578262
MTMDREKERELELESAMYTNCLLLGLDPNVIGLGASNGTPRVGLFRHSNPKLGEQLLYFILSSLRGPAQSSKDFDKVWPIFDSAQSRDFRKVVQAIISELESQGALPRSNSRVSSLATCCGPRFVELLWQLSLHALREVHRRTFPADVASNPLPSSLTDVSFSHAATLLPVTKARIVLERRRFLKNAETAVQRQAMWSNLAHEMTAEFRGLCAEEAYLQQELEKLNDLRNKVKQEGEVWDDLVSSSSQNSHLVSKATRLWDSIMARKGQHEVLASGPIEDLIAHREHRYRISGSALLAAMDQSSQVPRAELLSAHSDDSASLADDKELSDGSYTNMHDHSLVDSFETASSQASDETLSRVDDRGGKINQTVDVAEVIRRWTHALQRIHKQSLLLAKANDGDGPDILRTASDGGTSGHVESLAATLTEHQQHLASFQVLINQLKEVSPAIQKSISECTEMVNSLPPTLPPVTRSNGQASSLLQSQGSGRIMEGVSNDVAELTSTMSNVQLEKVSASPTLKLPQLFSSTPTSSGKGGNGQKRQTMASQVNKMESLSEKNSTDQALSNARPDNLPTDTSSSFVHNLKKSVREAALLIPSSAGSSRDSQSDEGSEHYFVPLSATGFSRFPSETKALPLRGSRALTSLSEPSFLEPNVPDSFAPSKYSDIPDTYDDLDSFKDYDNGNGFLSVAGSNSVASDAQQSFYDIDDQVFSPPLLMDSSLLSDAYEDLLAPLSETEAALMEH

SEQ ID NO: 49092 - protein, 739 aa, Arabidopsis thaliana
  peptide (1)..(739): Ceres Seq. ID no. 12578263
MDREKERELELESAMYTNCLLLGLDPNVIGLGASNGTPRVGLFRHSNPKLGEQLLYFILSSLRGPAQSSKDFDKVWPIFDSAQSRDFRKVVQAIISELESQGALPRSNSRVSSLATCCGPRFVELLWQLSLHALREVHRRTFPADVASNPLPSSLTDVSFSHAATLLPVTKARIVLERRRFLKNAETAVQRQAMWSNLAHEMTAEFRGLCAEEAYLQQELEKLNDLRNKVKQEGEVWDDLVSSSSQNSHLVSKATRLWDSIMARKGQHEVLASGPIEDLIAHREHRYRISGSALLAAMDQSSQVPRAELLSAHSDDSASLADDKELSDGSYTNMHDHSLVDSFETASSQASDETLSRVDDRGGKINQTVDVAEVIRRWTHALQRIHKQSLLLAKANDGDGPDILRTASDGGTSGHVESLAATLTEHQQHLASFQVLINQLKEVSPAIQKSISECTEMVNSLPPTLPPVTRSNGQASSLLQSQGSGRIMEGVSNDVAELTSTMSNVQLEKVSASPTLKLPQLFSSTPTSSGKGGNGQKRQTMASQVNKMESLSEKNSTDQALSNARPDNLPTDTSSSFVHNLKKSVREAALLIPSSAGSSRDSQSDEGSEHYFVPLSATGFSRFPSETKALPLRGSRALTSLSEPSFLEPNVPDSFAPSKYSDIPDTYDDLDSFKDYDNGNGFLSVAGSNSVASDAQQSFYDIDDQVFSPPLLMDSSLLSDAYEDLLAPLSETEAALMEH

SEQ ID NO: 49093 - protein, 725 aa, Arabidopsis thaliana
  peptide (1)..(725): Ceres Seq. ID no. 12578264
MYTNCLLLGLDPNVIGLGASNGTPRVGLFRHSNPKLGEQLLYFILSSLRGPAQSSKDFDKVWPIFDSAQSRDFRKVVQAIISELESQGALPRSNSRVSSLATCCGPRFVELLWQLSLHALREVHRRTFPADVASNPLPSSLTDVSFSHAATLLPVTKARIVLERRRFLKNAETAVQRQAMWSNLAHEMTAEFRGLCAEEAYLQQELEKLNDLRNKVKQEGEVWDDLVSSSSQNSHLVSKATRLWDSIMARKGQHEVLASGPIEDLIAHREHRYRISGSALLAAMDQSSQVPRAELLSAHSDDSASLADDKELSDGSYTNMHDHSLVDSFETASSQASDETLSRVDDRGGKINQTVDVAEVIRRWTHALQRIHKQSLLLAKANDGDGPDILRTASDGGTSGHVESLAATLTEHQQHLASFQVLINQLKEVSPAIQKSISECTEMVNSLPPTLPPVTRSNGQASSLLQSQGSGRIMEGVSNDVAELTSTMSNVQLEKVSASPTLKLPQLFSSTPTSSGKGGNGQKRQTMASQVNKMESLSEKNSTDQALSNARPDNLPTDTSSSFVHNLKKSVREAALLIPSSAGSSRDSQSDEGSEHYFVPLSATGFSRFPSETKALPLRGSRALTSLSEPSFLEPNVPDSFAPSKYSDIPDTYDDLDSFKDYDNGNGFLSVAGSNSVASDAQQSFYDIDDQVFSPPLLMDSSLLSDAYEDLLAPLSETEAALMEH

SEQ ID NO: 49094 - DNA, 2318 bp, Arabidopsis thaliana
  misc_feature (1)..(2318): Ceres Seq. ID no. 13579877
  misc_feature (1)..(2318): Ortholog of  Ceres SEQ ID NO 12581802 as cited in SEQ ID NO 54880
acggtcgtcttgtttggtctctgtttttcacgccggagatagagagagagaagtaaaaaagcgagaaaaagctagaaactttagaatacccaataatggatccgatcgaatctgtcgagtacaatggcttcgagacctctaacggtaacgtcgaccatggttggaagaaagtcgtgtacccgaaacgtcaccggaagcaaaaacaagcggatcaagcgacggcaaatggtggcaaaactgttgcttcaaatggaaccgtagctaacggcggagataacgttttccgttcgttggaagagcaagctgaggatcgtcgacgacggatcttagcggcgaagatgactgctattgattcagatgatgatggtgttgttagatctaaacatcgatctaatggttacggtgatgatgggtatgattttgatggtagtgatgatgagatcgcaacgctgaaggttgaggaagttaagaagccaaagcctaagaaggagaagaagcctaaagtttctttgcctgaagctgcatcaaagatcgatcctttaaatctcgaagcttttctcgttgaagcatcggaatcgtatgcgagtcagcctgagattcagctaatgagatttgctgattactttgggagagcactttctggagtctcatctgtgcaatttccatgggtgaagatgtttaaagagtctcctttgtctaagctgattgaagttccgttagctcatattccggaaccagtgtataagacatcagttgattggatcaaccatcgtccaattgaggcacttggagcctttgtgttgtgggcttttgattgtattctcacagatttagcagcacaacaaggtggtgctaaaggtgggaagaagggtggtcaacaaactacttccaaatctcaggtggcaatatttgttgcattagcgatggtattgcgtaggaagcctgatgctttgactaatgtattgccaactctgagggagaatcctaagtatcagggtcaggataagcttccggttacagtttggatgatggctcaggcctcccaaggtgatatagctgtaggcttgtattcatgggctcacaacttgttacctgttgtcggtaataagaactgtaaccctcagtcaagggatctcatcctgcagttggttgagaaaattttgacgaatccaaaggctcgtaccatacttgtaaatggagctgttaggaagggagagcgtttgattccacctccttcatttgagatcttgttgcggcttacattccctgcatcatctgcaagagtaaaggctacagagaggtttgaggcaatatatcccttgctgaaagaagtggctcttgctggtgcaccaggaagcaaggcgatgaaacaagtcacacaacagatattcacttttgctctgaaattagctggagaaggaaatcctgttttagccaaggaagctacagcaattgctatctggtctgtgacccaaaactttgattgctgcaagcactgggacaatctctacaaggagaatctggaagctagtgttgctgttcttaaaaagcttgttgaagaatggaaagagcattcggtcaaactatcatcatcaccgaatgatgctctcactctcaaccgaactatgaaaagcttcaggctaaagaacgaggaggtcatcactgagggaggagccaatgcttctctttacaaagaagctgacaagtcttgcaaaacgatctcggggagactctcccgtggaagtggctgcctcaaaggaacagccattactttagtgtttctagctgctgcaggagccgctgctgcagctgttctatcttccaacccggaggttacaaacgagctgaagaacctggtggactcattggagctgcatgaatacatcaacaaatacactgaggttatctccacagctttgaagaagtaagagaaaagaaacaatcaaaaacctgaggatgatatagagaggtaactcttaatatcatcggtgtagagaattacttaaaagttaaagccttttactctccaagatacaaaattttgaacatcttgaccagaacttaggggttatggaggtgaagagaataatgagagttttcgtttttataatcacagagtctgttcaaagttgttgaaggttttttttagactgtttaatttgtttctgagataatttatatttcttcttttttccctgatgacaataaagttatttctgtttattacatgtttgatttggatttctcttgaacataagtgtatgcacaagccattacattgtgttcatgtgaatgcagagtatatacatacagtctca

SEQ ID NO: 49095 - protein, 610 aa, Arabidopsis thaliana
  peptide (1)..(610): Ceres Seq. ID no. 13579878
MDPIESVEYNGFETSNGNVDHGWKKVVYPKRHRKQKQADQATANGGKTVASNGTVANGGDNVFRSLEEQAEDRRRRILAAKMTAIDSDDDGVVRSKHRSNGYGDDGYDFDGSDDEIATLKVEEVKKPKPKKEKKPKVSLPEAASKIDPLNLEAFLVEASESYASQPEIQLMRFADYFGRALSGVSSVQFPWVKMFKESPLSKLIEVPLAHIPEPVYKTSVDWINHRPIEALGAFVLWAFDCILTDLAAQQGGAKGGKKGGQQTTSKSQVAIFVALAMVLRRKPDALTNVLPTLRENPKYQGQDKLPVTVWMMAQASQGDIAVGLYSWAHNLLPVVGNKNCNPQSRDLILQLVEKILTNPKARTILVNGAVRKGERLIPPPSFEILLRLTFPASSARVKATERFEAIYPLLKEVALAGAPGSKAMKQVTQQIFTFALKLAGEGNPVLAKEATAIAIWSVTQNFDCCKHWDNLYKENLEASVAVLKKLVEEWKEHSVKLSSSPNDALTLNRTMKSFRLKNEEVITEGGANASLYKEADKSCKTISGRLSRGSGCLKGTAITLVFLAAAGAAAAAVLSSNPEVTNELKNLVDSLELHEYINKYTEVISTALKK

SEQ ID NO: 49096 - protein, 529 aa, Arabidopsis thaliana
  peptide (1)..(529): Ceres Seq. ID no. 13579879
MTAIDSDDDGVVRSKHRSNGYGDDGYDFDGSDDEIATLKVEEVKKPKPKKEKKPKVSLPEAASKIDPLNLEAFLVEASESYASQPEIQLMRFADYFGRALSGVSSVQFPWVKMFKESPLSKLIEVPLAHIPEPVYKTSVDWINHRPIEALGAFVLWAFDCILTDLAAQQGGAKGGKKGGQQTTSKSQVAIFVALAMVLRRKPDALTNVLPTLRENPKYQGQDKLPVTVWMMAQASQGDIAVGLYSWAHNLLPVVGNKNCNPQSRDLILQLVEKILTNPKARTILVNGAVRKGERLIPPPSFEILLRLTFPASSARVKATERFEAIYPLLKEVALAGAPGSKAMKQVTQQIFTFALKLAGEGNPVLAKEATAIAIWSVTQNFDCCKHWDNLYKENLEASVAVLKKLVEEWKEHSVKLSSSPNDALTLNRTMKSFRLKNEEVITEGGANASLYKEADKSCKTISGRLSRGSGCLKGTAITLVFLAAAGAAAAAVLSSNPEVTNELKNLVDSLELHEYINKYTEVISTALKK

SEQ ID NO: 49097 - protein, 440 aa, Arabidopsis thaliana
  peptide (1)..(440): Ceres Seq. ID no. 13579880
MRFADYFGRALSGVSSVQFPWVKMFKESPLSKLIEVPLAHIPEPVYKTSVDWINHRPIEALGAFVLWAFDCILTDLAAQQGGAKGGKKGGQQTTSKSQVAIFVALAMVLRRKPDALTNVLPTLRENPKYQGQDKLPVTVWMMAQASQGDIAVGLYSWAHNLLPVVGNKNCNPQSRDLILQLVEKILTNPKARTILVNGAVRKGERLIPPPSFEILLRLTFPASSARVKATERFEAIYPLLKEVALAGAPGSKAMKQVTQQIFTFALKLAGEGNPVLAKEATAIAIWSVTQNFDCCKHWDNLYKENLEASVAVLKKLVEEWKEHSVKLSSSPNDALTLNRTMKSFRLKNEEVITEGGANASLYKEADKSCKTISGRLSRGSGCLKGTAITLVFLAAAGAAAAAVLSSNPEVTNELKNLVDSLELHEYINKYTEVISTALKK

SEQ ID NO: 49098 - DNA, 2036 bp, Arabidopsis thaliana; identical to SEQ ID NO: 47325
  misc_feature (1)..(2036): Ceres Seq. ID no. 13592107
  misc_feature (1)..(2036): Ortholog of  Ceres SEQ ID NO 12780298 as cited in SEQ ID NO 65880
  misc_feature (1)..(2036): Ortholog of  Ceres SEQ ID NO 13654539 as cited in SEQ ID NO 68015

SEQ ID NO: 49099 - protein, 626 aa, Arabidopsis thaliana; identical to SEQ ID NO: 47326
  peptide (1)..(626): Ceres Seq. ID no. 13592108

SEQ ID NO: 49100 - protein, 614 aa, Arabidopsis thaliana; identical to SEQ ID NO: 47327
  peptide (1)..(614): Ceres Seq. ID no. 13592109

SEQ ID NO: 49101 - protein, 461 aa, Arabidopsis thaliana; identical to SEQ ID NO: 47328
  peptide (1)..(461): Ceres Seq. ID no. 13592110

SEQ ID NO: 49102 - DNA, 989 bp, Arabidopsis thaliana
  misc_feature (1)..(989): Ceres Seq. ID no. 13579814
  misc_feature (1)..(989): Ortholog of  Ceres SEQ ID NO 13599900 as cited in SEQ ID NO 531
  misc_feature (1)..(989): Ortholog of  Ceres SEQ ID NO 14310498 as cited in SEQ ID NO 55066
  misc_feature (1)..(989): Ortholog of  Ceres SEQ ID NO 15176759 as cited in SEQ ID NO 59678
  misc_feature (1)..(989): Ortholog of  Ceres SEQ ID NO 15172875 as cited in SEQ ID NO 60423
  misc_feature (1)..(989): Ortholog of  Ceres SEQ ID NO 13596509 as cited in SEQ ID NO 62004
  misc_feature (1)..(989): Ortholog of  Ceres SEQ ID NO 13659971 as cited in SEQ ID NO 67565
  misc_feature (1)..(989): Ortholog of  Ceres SEQ ID NO 13500385 as cited in SEQ ID NO 67583
atctccgctctctttctctctcgaacttcctctgaaaactaaggctcttgctcttgctttctcgccgtcgtctgagtcgttagcagtacggtgatcggaaaaatgagtaagaaatcgacagaatctgacgctggcaatactgagaagcaatggtccctggcagatttcgagatcgggagaccacttggaaaaggcaaatttggcagagtctatctcgcccgagaagccaagagcaagtacatagtggcgctgaaagtcatattcaaggaacagatagagaagtataaaattcatcatcagcttaggagagaaatggagatccaaacgagtttaaggcacccaaatatcttgcgtctttttggttggttccatgacaatgagaggattttcttgattctcgagtatgctcatggtggtgagctctatggtgtgctcaaacagaatggtcatcttactgaacaacaagccgccacttacattgcaagtctcagtcaggcactggcctattgtcatggcaaatgtgtgattcatagagacatcaaacctgaaaatttgttgctcgatcatgaggggagattgaaaattgctgactttggatggtcagttcagtcaagtaacaagaggaaaaccatgtgtggaaccttggattacttagcacctgagatggtagaaaatagagatcatgattatgcagttgataactggaccttaggcatactgtgttacgagtttctctacggtaaccctccattcgaagccgagagtcaaaaagatacattcaagagaattcttaagattgatctgagttttcctcttacaccgaatgtttcagaagaagccaaaaatcttatcagtcagcttcttgttaaggatccctccaaacgactctctattgagaagatcatgcaacatccatggattgtcaagaacgcagatccgaaaggtgtgtgtgcctcaattgatatttgatgtattctctcccaattctc

SEQ ID NO: 49103 - protein, 288 aa, Arabidopsis thaliana
  peptide (1)..(288): Ceres Seq. ID no. 13579815
MSKKSTESDAGNTEKQWSLADFEIGRPLGKGKFGRVYLAREAKSKYIVALKVIFKEQIEKYKIHHQLRREMEIQTSLRHPNILRLFGWFHDNERIFLILEYAHGGELYGVLKQNGHLTEQQAATYIASLSQALAYCHGKCVIHRDIKPENLLLDHEGRLKIADFGWSVQSSNKRKTMCGTLDYLAPEMVENRDHDYAVDNWTLGILCYEFLYGNPPFEAESQKDTFKRILKIDLSFPLTPNVSEEAKNLISQLLVKDPSKRLSIEKIMQHPWIVKNADPKGVCASIDI

SEQ ID NO: 49104 - protein, 218 aa, Arabidopsis thaliana
  peptide (1)..(218): Ceres Seq. ID no. 13579816
MEIQTSLRHPNILRLFGWFHDNERIFLILEYAHGGELYGVLKQNGHLTEQQAATYIASLSQALAYCHGKCVIHRDIKPENLLLDHEGRLKIADFGWSVQSSNKRKTMCGTLDYLAPEMVENRDHDYAVDNWTLGILCYEFLYGNPPFEAESQKDTFKRILKIDLSFPLTPNVSEEAKNLISQLLVKDPSKRLSIEKIMQHPWIVKNADPKGVCASIDI

SEQ ID NO: 49105 - DNA, 818 bp, Arabidopsis thaliana
  misc_feature (1)..(818): Ceres Seq. ID no. 13592088
  misc_feature (1)..(818): Ortholog of  Ceres SEQ ID NO 12635789 as cited in SEQ ID NO 0
gaaaagtggcggcttcatcgaaattagggtttcgcgttaggagaagaagttaaagcaaaacacatacaaacgcagtcaccttctctatcgcctccttcttcaatctcatcgcaatcatgatcatatcagagactaaccgccgtgagatctccaagtacctcttcaaagagggtgttttgtttgctaaaaaggatttcaacttaccacaacatcctttgattgagagtgttccaaatctgcaagttatcaagttgatgcagagtttcaaatctaaggaatatgtgagagagacctttgcttggatgcattactactggttcctcacaaatgaaggtattgactttctcaggacttaccttaatctcccatctgagattgttcctgctactttgaagaagcaacagaagcctcttggtcgaccttttggaggtggtggtgaccgtccccgtggccctcctcgtggtgatggagagaggaggtttggtgacagagatggataccgtggaggtcctaaatcaggtggagagtatggtgacaaggctggagcacctgctgattaccagcctggcttcaggggtggagctggtggagctaggcaagggtttggtcgtggagctggtggtttcggtggtggtgctgctggatctgatcttccttgaaaaggactttcttgtttctttttggtcttatttaaggttacatagtacctttgatttgagaacgaatgtgtcttttggaactttgtttctttctctaaaaccatctcacaatatgattgttttttacgttagaattttatgaagaaatgttggatcgtt

SEQ ID NO: 49106 - protein, 180 aa, Arabidopsis thaliana
  peptide (1)..(180): Ceres Seq. ID no. 13592089
MIISETNRREISKYLFKEGVLFAKKDFNLPQHPLIESVPNLQVIKLMQSFKSKEYVRETFAWMHYYWFLTNEGIDFLRTYLNLPSEIVPATLKKQQKPLGRPFGGGGDRPRGPPRGDGERRFGDRDGYRGGPKSGGEYGDKAGAPADYQPGFRGGAGGARQGFGRGAGGFGGGAAGSDLP

SEQ ID NO: 49107 - protein, 134 aa, Arabidopsis thaliana
  peptide (1)..(134): Ceres Seq. ID no. 13592090
MQSFKSKEYVRETFAWMHYYWFLTNEGIDFLRTYLNLPSEIVPATLKKQQKPLGRPFGGGGDRPRGPPRGDGERRFGDRDGYRGGPKSGGEYGDKAGAPADYQPGFRGGAGGARQGFGRGAGGFGGGAAGSDLP

SEQ ID NO: 49108 - protein, 118 aa, Arabidopsis thaliana
  peptide (1)..(118): Ceres Seq. ID no. 13592091
MHYYWFLTNEGIDFLRTYLNLPSEIVPATLKKQQKPLGRPFGGGGDRPRGPPRGDGERRFGDRDGYRGGPKSGGEYGDKAGAPADYQPGFRGGAGGARQGFGRGAGGFGGGAAGSDLP

SEQ ID NO: 49109 - DNA, 1571 bp, Arabidopsis thaliana; identical to SEQ ID NO: 44608
  misc_feature (1)..(1571): Ceres Seq. ID no. 12488514
  misc_feature (1)..(1571): Ortholog of  Ceres SEQ ID NO 15171265 as cited in SEQ ID NO 52326

SEQ ID NO: 49110 - protein, 330 aa, Arabidopsis thaliana; identical to SEQ ID NO: 44609
  peptide (1)..(330): Ceres Seq. ID no. 12488515

SEQ ID NO: 49111 - protein, 315 aa, Arabidopsis thaliana; identical to SEQ ID NO: 44610
  peptide (1)..(315): Ceres Seq. ID no. 12488516

SEQ ID NO: 49112 - DNA, 895 bp, Arabidopsis thaliana
  misc_feature (1)..(895): Ceres Seq. ID no. 12578273
  misc_feature (1)..(895): Ortholog of  Ceres SEQ ID NO 15175368 as cited in SEQ ID NO 60071
  misc_feature (1)..(895): Ortholog of  Ceres SEQ ID NO 15225423 as cited in SEQ ID NO 64689
  misc_feature (1)..(895): Ortholog of  Ceres SEQ ID NO 15179340 as cited in SEQ ID NO 0
atactcttaactctcatgaattattggtctctctattatagttttttaagtaacaatctaattgtagtacggatgtctcttgagatgttcaagaattaagaaataaagaaagagggatcggagaatgaattttgaggatcaagaagaagatatggagatgtcaggtgttaatcccccctgcggttacgactctctaagcggtgagggagccacatctagtggtggtggaggagtaggaaggagtaaaggagttggagcgaagataaggtatagagagtgcttgaagaaccatgctgttaacataggtggccacgccgtggacggttgttgcgagtttatgccttccggtgaagatggaacgctcgacgctcttaagtgtgcagcttgcggctgccaccgcaacttccaccgcaaggaaaccgaaagcatcggcggtagagcccacagagttcccacgtactacaaccgcccgccgcagccgcatcagccgcctggatatcttcatctaacatctcccgcggcgccttacaggccacccgcggcatcgggggacgaggaggatacatcaaatcctagcagcagcggcgggaccacgaagaggtttagaacgaagttcacggcggaacagaaagagaagatgttagcctttgcggagaggttggggtggagaattcagaagcatgatgacgtggcggttgagcagttctgtgcggagactggtgttaggagacaagtgcttaaaatctggatgcataacaacaagaactctcttggtaagaaaccctaattttgctcgagacatgatttaaaacactagaggatcataattgtttctttttttggtatgactcttctgtaactacttctgcttattagttatgttattttttcctgg

SEQ ID NO: 49113 - protein, 220 aa, Arabidopsis thaliana
  peptide (1)..(220): Ceres Seq. ID no. 12578274
MNFEDQEEDMEMSGVNPPCGYDSLSGEGATSSGGGGVGRSKGVGAKIRYRECLKNHAVNIGGHAVDGCCEFMPSGEDGTLDALKCAACGCHRNFHRKETESIGGRAHRVPTYYNRPPQPHQPPGYLHLTSPAAPYRPPAASGDEEDTSNPSSSGGTTKRFRTKFTAEQKEKMLAFAERLGWRIQKHDDVAVEQFCAETGVRRQVLKIWMHNNKNSLGKKP

SEQ ID NO: 49114 - protein, 211 aa, Arabidopsis thaliana
  peptide (1)..(211): Ceres Seq. ID no. 12578275
MEMSGVNPPCGYDSLSGEGATSSGGGGVGRSKGVGAKIRYRECLKNHAVNIGGHAVDGCCEFMPSGEDGTLDALKCAACGCHRNFHRKETESIGGRAHRVPTYYNRPPQPHQPPGYLHLTSPAAPYRPPAASGDEEDTSNPSSSGGTTKRFRTKFTAEQKEKMLAFAERLGWRIQKHDDVAVEQFCAETGVRRQVLKIWMHNNKNSLGKKP

SEQ ID NO: 49115 - protein, 209 aa, Arabidopsis thaliana
  peptide (1)..(209): Ceres Seq. ID no. 12578276
MSGVNPPCGYDSLSGEGATSSGGGGVGRSKGVGAKIRYRECLKNHAVNIGGHAVDGCCEFMPSGEDGTLDALKCAACGCHRNFHRKETESIGGRAHRVPTYYNRPPQPHQPPGYLHLTSPAAPYRPPAASGDEEDTSNPSSSGGTTKRFRTKFTAEQKEKMLAFAERLGWRIQKHDDVAVEQFCAETGVRRQVLKIWMHNNKNSLGKKP

SEQ ID NO: 49116 - DNA, 1935 bp, Arabidopsis thaliana
  misc_feature (1)..(1935): Ceres Seq. ID no. 12578277
  misc_feature (1)..(1935): Ortholog of  Ceres SEQ ID NO 15177343 as cited in SEQ ID NO 51182
gaagaaaaaatatcggcaacaagaacaaaacgctcttctatttttctccatcttccaatttccaggaacaagattggacgaaagctaaaggtattgcatccatttaaaaagttcatggataggtggtccagtaaaagagccatggaggcgagacctgactctaagaagaagggtggtgttgtttttagagatagatttaacagcaatagttgcaaggttcctatttgtagtgatgagaaaaaatcaatgaactttactaggtttgttggctcttcagataagaaagagaaatcagtgttgtctacataccgctcttcgccaaacgggaaggaagtaattggaacttcctctaagatttgtatctctagctcctcttctgtgaaaagtggtgagaagcaaccgttttctcagatagccattgattcatcagagagcagcagaggtagtgaagacgaggtagagtcagaaatcttgcaagttcctcttggaagagataaaagaagaatgaacaataaacttatttatggaaaagttataacacctgaagcggaatgctcaaagttgccatcaagctcaagaatcaagagaggttttaggcagagatttgggttgagcaagcaagagtttcatcctggtccatctggccagtcaacatctgctaaccggggatgcagcccgttgttgtcaggtgtcattccaagtggttttggattggacaaaagattaagtcggaaggcagatacaatcagtaagacaaaagtttacggagaaagcagttctagctcctcagctagggggaagaatgtaacagaacctccaccagttgaagtgagacgtcgtagttttaatccgagaggttctgtttctgatagtagacgggctagacactgcattttggatgatgacaacgatgttgcttcagttgggagtcagagattggcaaatagaaataatagtcgcattagagggagtggtagagacggtttatcctctgtcacggcagcagagatgtctcagactgaaacatcaaacaatctcaattctcctgtctctttggagctgttctctggttttccagaatttggcctctctggttccttattgagtcatgacagttttcgcagttataatttagatgggatctccgagattctgccagaacttgataggatcgaacaagatatcgaacttaattatgaggatctgcttatcatggaaacaggtttacttctcggtggactaagcttccatgaccaacaccgagacatgaggctagacatcgataacatgtcatatgaggaactattagctctagaagagaggattggtacagtaagcactgctttgacagaagaagcaatatcaaagtgcttgaaaacaagtatctatcagatgaaacctttgagttatgggtctatcaccaaaagtcctagtgataacaaggaagatgccaaatgcagcatctgccaggaagaatatacgattggagatgaagttgggaggctacactgtgagcacacataccatgtgaagtgtgtgcaagagtggttgcggataaagagttggtgcccaatctgcaaagccacagccgaaacctcctctaaataaccgtcttcttcttcttcctcgttcgttgtattagttctttcatctaaagcctgtgaacaacaatggaacctgcgtaaaaaaggcctcaccatttcctttgtgtacataccaattcacaccggctctgtctctctctcccttttgtctaatgacaaagctatcctgtgtttctcttgtcttttcctctctttactgttgacttccgtaatgtaaagtgggaaagacggaaacgatttcatttgaactttgaagatcaagtaaacatgatcttttaattcttaaaattggacaatttgttgaaaagcaacaaagagcgtggttctttgg

SEQ ID NO: 49117 - protein, 535 aa, Arabidopsis thaliana
  peptide (1)..(535): Ceres Seq. ID no. 12578278
EEKISATRTKRSSIFLHLPISRNKIGRKLKVLHPFKKFMDRWSSKRAMEARPDSKKKGGVVFRDRFNSNSCKVPICSDEKKSMNFTRFVGSSDKKEKSVLSTYRSSPNGKEVIGTSSKICISSSSSVKSGEKQPFSQIAIDSSESSRGSEDEVESEILQVPLGRDKRRMNNKLIYGKVITPEAECSKLPSSSRIKRGFRQRFGLSKQEFHPGPSGQSTSANRGCSPLLSGVIPSGFGLDKRLSRKADTISKTKVYGESSSSSSARGKNVTEPPPVEVRRRSFNPRGSVSDSRRARHCILDDDNDVASVGSQRLANRNNSRIRGSGRDGLSSVTAAEMSQTETSNNLNSPVSLELFSGFPEFGLSGSLLSHDSFRSYNLDGISEILPELDRIEQDIELNYEDLLIMETGLLLGGLSFHDQHRDMRLDIDNMSYEELLALEERIGTVSTALTEEAISKCLKTSIYQMKPLSYGSITKSPSDNKEDAKCSICQEEYTIGDEVGRLHCEHTYHVKCVQEWLRIKSWCPICKATAETSSK

SEQ ID NO: 49118 - protein, 497 aa, Arabidopsis thaliana
  peptide (1)..(497): Ceres Seq. ID no. 12578279
MDRWSSKRAMEARPDSKKKGGVVFRDRFNSNSCKVPICSDEKKSMNFTRFVGSSDKKEKSVLSTYRSSPNGKEVIGTSSKICISSSSSVKSGEKQPFSQIAIDSSESSRGSEDEVESEILQVPLGRDKRRMNNKLIYGKVITPEAECSKLPSSSRIKRGFRQRFGLSKQEFHPGPSGQSTSANRGCSPLLSGVIPSGFGLDKRLSRKADTISKTKVYGESSSSSSARGKNVTEPPPVEVRRRSFNPRGSVSDSRRARHCILDDDNDVASVGSQRLANRNNSRIRGSGRDGLSSVTAAEMSQTETSNNLNSPVSLELFSGFPEFGLSGSLLSHDSFRSYNLDGISEILPELDRIEQDIELNYEDLLIMETGLLLGGLSFHDQHRDMRLDIDNMSYEELLALEERIGTVSTALTEEAISKCLKTSIYQMKPLSYGSITKSPSDNKEDAKCSICQEEYTIGDEVGRLHCEHTYHVKCVQEWLRIKSWCPICKATAETSSK

SEQ ID NO: 49119 - protein, 488 aa, Arabidopsis thaliana
  peptide (1)..(488): Ceres Seq. ID no. 12578280
MEARPDSKKKGGVVFRDRFNSNSCKVPICSDEKKSMNFTRFVGSSDKKEKSVLSTYRSSPNGKEVIGTSSKICISSSSSVKSGEKQPFSQIAIDSSESSRGSEDEVESEILQVPLGRDKRRMNNKLIYGKVITPEAECSKLPSSSRIKRGFRQRFGLSKQEFHPGPSGQSTSANRGCSPLLSGVIPSGFGLDKRLSRKADTISKTKVYGESSSSSSARGKNVTEPPPVEVRRRSFNPRGSVSDSRRARHCILDDDNDVASVGSQRLANRNNSRIRGSGRDGLSSVTAAEMSQTETSNNLNSPVSLELFSGFPEFGLSGSLLSHDSFRSYNLDGISEILPELDRIEQDIELNYEDLLIMETGLLLGGLSFHDQHRDMRLDIDNMSYEELLALEERIGTVSTALTEEAISKCLKTSIYQMKPLSYGSITKSPSDNKEDAKCSICQEEYTIGDEVGRLHCEHTYHVKCVQEWLRIKSWCPICKATAETSSK

SEQ ID NO: 49120 - DNA, 1919 bp, Arabidopsis thaliana
  misc_feature (1)..(1919): Ceres Seq. ID no. 13592095
  misc_feature (1)..(1919): Ortholog of  Ceres SEQ ID NO 14303282 as cited in SEQ ID NO 0
gatccgagatttcatcatcttcttcggaaggagcttatcgttccacaccaatggcttcttctgtccttaatctcttcaaatcatgtagacccttcactccaatacgcttctcttctcttcccaagtctcaattcagaatccaatttcccctcagacccggaaaagaaactcaactacgtcgctgtttcacgactctgtcatcattaacggacggtggagcaccaatttccggtgggaaggagctgtggctgcacaacacgatgagccggaagaaggagctgtttaagcctaaggtcgaaggtaaagttggaatgtacgtttgcggtgtcactgcttacgatctcagtcacattggacacgcacgagtctacgtcactttcgatgtactcttgaggtaccttaagcatctaggatatgaagtgtcttacgttcgaaatttcacggatgtggatgacaagattattgccagagcgaaagaattagaggaagatccaatcagtttgagcagacgtttctgtgaggaatttaatcgagatatggaacagcttcaatgtttagatccgtctgtccaaccacgagtttcagatcatatacctcaaatcatcgacctgatcaagcagattcttgataatggctatgcctacaaagttgatggagacatttacttctcagtcgacaaatttccaacatatggaaaattgtctgggcgaaaattagaagataaccgtgcaggtgagagagtcgcagttgacacgaggaagaaacatcccgcagattttgctctgtggaaagctgcaaaagaaggggaacccttttgggagagtccgtggggaagaggaaggcccggttggcacatagagtgcagtgcgatgagcgcggcttatctcggttatagttttgacatacatggtggcggaatggatcttgtgttccctcaccatgaaaatgaaattgctcagagttgtgctgcatgtgatagcagcaacattagctattggatccataatggttttgttactgttgactccgagaagatgtcaaaatccttggggaatttcttcactatcagacaggttatagacctttatcatcctcttgctctgagacttttcctaatgggaactcattatcggtctcctatcaattactccgatttcctcctcgagagtgcttcggagcgcattttttatatttatcagacgttacacgactgtgaaagcgctttaggcgagaaagattcgacatttgagaatggttctgttccttcagacactttgacaagcatcaacacattccgtactgaatttgtcgcctcgatgtctgatgatcttctcacacctgtaactctggctgcaatgtcagaaccactgaaaactatcaacgatctcattcacacccgaaaggggaaaaaacaagcaagaagagaagagtcacttaaggctctagagacaacaatcagagatgttcttactatcttagggcttatgcccacaagttactcagaggttctcgagcagctaaaagagaaggcactaaagcgagctggactaaaagaggaagatgtgttgcagagagtgcaagagagaacagacgcaaggaagaataaagaatacgaaagatctgatgcaattaggaaagatttggcaaaagttgggatcgctttgatggatagtcctgagggaacaacttggagaccagccattcctcttgcacttcaagaacctgtaactactacaccttgagtttttaatcctatactacaatatctattctttttcttagtggttcatagtatttttgtatcagttttgttgaattcgaccaaaagattaaagaagtaacattggattcttgtactattcgtttttgtgtaagtccagcgaacttgttatacaatgcctatgctcaataatcagagg

SEQ ID NO: 49121 - protein, 579 aa, Arabidopsis thaliana
  peptide (1)..(579): Ceres Seq. ID no. 13592096
SEISSSSSEGAYRSTPMASSVLNLFKSCRPFTPIRFSSLPKSQFRIQFPLRPGKETQLRRCFTTLSSLTDGGAPISGGKELWLHNTMSRKKELFKPKVEGKVGMYVCGVTAYDLSHIGHARVYVTFDVLLRYLKHLGYEVSYVRNFTDVDDKIIARAKELEEDPISLSRRFCEEFNRDMEQLQCLDPSVQPRVSDHIPQIIDLIKQILDNGYAYKVDGDIYFSVDKFPTYGKLSGRKLEDNRAGERVAVDTRKKHPADFALWKAAKEGEPFWESPWGRGRPGWHIECSAMSAAYLGYSFDIHGGGMDLVFPHHENEIAQSCAACDSSNISYWIHNGFVTVDSEKMSKSLGNFFTIRQVIDLYHPLALRLFLMGTHYRSPINYSDFLLESASERIFYIYQTLHDCESALGEKDSTFENGSVPSDTLTSINTFRTEFVASMSDDLLTPVTLAAMSEPLKTINDLIHTRKGKKQARREESLKALETTIRDVLTILGLMPTSYSEVLEQLKEKALKRAGLKEEDVLQRVQERTDARKNKEYERSDAIRKDLAKVGIALMDSPEGTTWRPAIPLALQEPVTTTP

SEQ ID NO: 49122 - protein, 563 aa, Arabidopsis thaliana
  peptide (1)..(563): Ceres Seq. ID no. 13592097
MASSVLNLFKSCRPFTPIRFSSLPKSQFRIQFPLRPGKETQLRRCFTTLSSLTDGGAPISGGKELWLHNTMSRKKELFKPKVEGKVGMYVCGVTAYDLSHIGHARVYVTFDVLLRYLKHLGYEVSYVRNFTDVDDKIIARAKELEEDPISLSRRFCEEFNRDMEQLQCLDPSVQPRVSDHIPQIIDLIKQILDNGYAYKVDGDIYFSVDKFPTYGKLSGRKLEDNRAGERVAVDTRKKHPADFALWKAAKEGEPFWESPWGRGRPGWHIECSAMSAAYLGYSFDIHGGGMDLVFPHHENEIAQSCAACDSSNISYWIHNGFVTVDSEKMSKSLGNFFTIRQVIDLYHPLALRLFLMGTHYRSPINYSDFLLESASERIFYIYQTLHDCESALGEKDSTFENGSVPSDTLTSINTFRTEFVASMSDDLLTPVTLAAMSEPLKTINDLIHTRKGKKQARREESLKALETTIRDVLTILGLMPTSYSEVLEQLKEKALKRAGLKEEDVLQRVQERTDARKNKEYERSDAIRKDLAKVGIALMDSPEGTTWRPAIPLALQEPVTTTP

SEQ ID NO: 49123 - protein, 493 aa, Arabidopsis thaliana
  peptide (1)..(493): Ceres Seq. ID no. 13592098
MSRKKELFKPKVEGKVGMYVCGVTAYDLSHIGHARVYVTFDVLLRYLKHLGYEVSYVRNFTDVDDKIIARAKELEEDPISLSRRFCEEFNRDMEQLQCLDPSVQPRVSDHIPQIIDLIKQILDNGYAYKVDGDIYFSVDKFPTYGKLSGRKLEDNRAGERVAVDTRKKHPADFALWKAAKEGEPFWESPWGRGRPGWHIECSAMSAAYLGYSFDIHGGGMDLVFPHHENEIAQSCAACDSSNISYWIHNGFVTVDSEKMSKSLGNFFTIRQVIDLYHPLALRLFLMGTHYRSPINYSDFLLESASERIFYIYQTLHDCESALGEKDSTFENGSVPSDTLTSINTFRTEFVASMSDDLLTPVTLAAMSEPLKTINDLIHTRKGKKQARREESLKALETTIRDVLTILGLMPTSYSEVLEQLKEKALKRAGLKEEDVLQRVQERTDARKNKEYERSDAIRKDLAKVGIALMDSPEGTTWRPAIPLALQEPVTTTP

SEQ ID NO: 49124 - DNA, 2438 bp, Arabidopsis thaliana; identical to SEQ ID NO: 47996
  misc_feature (1)..(2438): Ceres Seq. ID no. 13593104
  misc_feature (1)..(2438): Ortholog of  Ceres SEQ ID NO 12465083 as cited in SEQ ID NO 68239

SEQ ID NO: 49125 - protein, 682 aa, Arabidopsis thaliana; identical to SEQ ID NO: 47997
  peptide (1)..(682): Ceres Seq. ID no. 13593105

SEQ ID NO: 49126 - protein, 609 aa, Arabidopsis thaliana; identical to SEQ ID NO: 47998
  peptide (1)..(609): Ceres Seq. ID no. 13593106

SEQ ID NO: 49127 - protein, 542 aa, Arabidopsis thaliana; identical to SEQ ID NO: 47999
  peptide (1)..(542): Ceres Seq. ID no. 13593107

SEQ ID NO: 49128 - DNA, 1182 bp, Arabidopsis thaliana
  misc_feature (1)..(1182): Ceres Seq. ID no. 12601515
  misc_feature (1)..(1182): Ortholog of  Ceres SEQ ID NO 13597647 as cited in SEQ ID NO 65258
acttcatcgtcccaaaaaacgcctctgtttcaccggtacgttcctgcagctctctcttaccaatactctcttagatattctcacgcggattcgtttgccatcttagttcttcgccgtgtaagctcgtctctagccatggctcttccgctcgggaagctcaccatcctcatcggtgcaggtcttattggatcagcattttctaaagaagggggcttaccagatgtctccaatttggtttctggtgcttttaagatggtattcaggcaactgaaacaagacgaacctagcaaatcagctagcaaaccccacgatgatgtacttgtggcccaggttaacagtcttaggcatgagatacagttgctggggtcaaacagacctatcaccattgtttcaccttcaggatcaggtggtagaaactatggtttgatcattatcgttggggtgataggctacggatatgtgtggtggaagggctggaaacttccagattttatgtttgcaacaaggcgtagcttatcagatgcatgtaataatgttggcaaccagatcgatggtttttactcatcactcaagggtacaaaacgagagttaagttcagaaattgatatgatgggtcgtcgtttggatgcaaatacagaagtaattcaagaaacaatacaagaggtggctaagctacaggatggtacatcatttataaaggatgacgttaaggctgttttcgatgcttttgaaaatctggcaagcaaagtgtgtcgtatagagggaaatcaggatatcacacttagaggagttggggctctgcatgctcagtgtcaggagaaccaaagaattcaagagtccaataaggctttgccatcaacttcatcactgccagcccttgaggcagctcctatggcaccctcttcaaagactctgtctttacctcctgcttctcccgatgaatcccagtccccgtcaacccctaatgtagctcaaaagtcacggggcctacttcagcacactcaatctatgtctggtttgaaggacataaatgaaagctctagtagccacaacacgtcttcaaatggaatatattttgggggaaacggtgcatcaggatcgagttcgggcgtgcttggtaggttctcaatagcaagaataatgaggactcgtactgtggtcaacacagtgtctactaactga

SEQ ID NO: 49129 - protein, 393 aa, Arabidopsis thaliana
  peptide (1)..(393): Ceres Seq. ID no. 12601516
TSSSQKTPLFHRYVPAALSYQYSLRYSHADSFAILVLRRVSSSLAMALPLGKLTILIGAGLIGSAFSKEGGLPDVSNLVSGAFKMVFRQLKQDEPSKSASKPHDDVLVAQVNSLRHEIQLLGSNRPITIVSPSGSGGRNYGLIIIVGVIGYGYVWWKGWKLPDFMFATRRSLSDACNNVGNQIDGFYSSLKGTKRELSSEIDMMGRRLDANTEVIQETIQEVAKLQDGTSFIKDDVKAVFDAFENLASKVCRIEGNQDITLRGVGALHAQCQENQRIQESNKALPSTSSLPALEAAPMAPSSKTLSLPPASPDESQSPSTPNVAQKSRGLLQHTQSMSGLKDINESSSSHNTSSNGIYFGGNGASGSSSGVLGRFSIARIMRTRTVVNTVSTN

SEQ ID NO: 49130 - protein, 348 aa, Arabidopsis thaliana
  peptide (1)..(348): Ceres Seq. ID no. 12601517
MALPLGKLTILIGAGLIGSAFSKEGGLPDVSNLVSGAFKMVFRQLKQDEPSKSASKPHDDVLVAQVNSLRHEIQLLGSNRPITIVSPSGSGGRNYGLIIIVGVIGYGYVWWKGWKLPDFMFATRRSLSDACNNVGNQIDGFYSSLKGTKRELSSEIDMMGRRLDANTEVIQETIQEVAKLQDGTSFIKDDVKAVFDAFENLASKVCRIEGNQDITLRGVGALHAQCQENQRIQESNKALPSTSSLPALEAAPMAPSSKTLSLPPASPDESQSPSTPNVAQKSRGLLQHTQSMSGLKDINESSSSHNTSSNGIYFGGNGASGSSSGVLGRFSIARIMRTRTVVNTVSTN

SEQ ID NO: 49131 - protein, 309 aa, Arabidopsis thaliana
  peptide (1)..(309): Ceres Seq. ID no. 12601518
MVFRQLKQDEPSKSASKPHDDVLVAQVNSLRHEIQLLGSNRPITIVSPSGSGGRNYGLIIIVGVIGYGYVWWKGWKLPDFMFATRRSLSDACNNVGNQIDGFYSSLKGTKRELSSEIDMMGRRLDANTEVIQETIQEVAKLQDGTSFIKDDVKAVFDAFENLASKVCRIEGNQDITLRGVGALHAQCQENQRIQESNKALPSTSSLPALEAAPMAPSSKTLSLPPASPDESQSPSTPNVAQKSRGLLQHTQSMSGLKDINESSSSHNTSSNGIYFGGNGASGSSSGVLGRFSIARIMRTRTVVNTVSTN

SEQ ID NO: 49132 - DNA, 1681 bp, Arabidopsis thaliana
  misc_feature (1)..(1681): Ceres Seq. ID no. 12601473
  misc_feature (1)..(1681): Ortholog of  Ceres SEQ ID NO 13599900 as cited in SEQ ID NO 531
  misc_feature (1)..(1681): Ortholog of  Ceres SEQ ID NO 13659971 as cited in SEQ ID NO 67565
  misc_feature (1)..(1681): Ortholog of  Ceres SEQ ID NO 13500385 as cited in SEQ ID NO 67583
aaagtgtcacattcattcctccgattcttcttcttcacctccccttcttcgaatttctctccttcccttttcatccttttgaaatttctcgtctttcttcttcgaaattggaaactcacagcagcacctgaaaaataacatcataagcttcaagatccaatttgggtcgttctgtgttttcttctgatgggtctcgtcgaaatgtagaacaagtttggagatgttgacaatggacaaggaatttgattcaaagcttactcttcaagggaattcatcttcaaatggtgaaactatttccagaagcaaaagcttcgcctttaaggctcctcaggagaatttcacttaccatgatttcgagctcggcaagatctatggcgttggctcttattctaaggttgttagggcgaagaagaaggataatggaactgtgtatgccttgaagatcatggacaaaaagtttatcaccaaggagaataaaacagcttatgtcaaattggagaggattgttcttgatcaactcgaacatcccgggattgtgaaactcttctttacgtttcaggatacacaatcactatacatggcgcttgagtcttgtgaaggtggggaacttttcgaccaaatcaccagaaaaggtcgtctatctgaggatgaagctcggttctacagtgcagaagttgttgatgctcttgagtatatacataatatgggactgatacatcgagatattaagccggagaatctgttgttaactttagatgggcacataaagattgctgattttggtagcgtaaagccaatgcaagacagccaaatcacagtgcttcctaatgcggcttctgatgataaggcgtgcacttttgtcgggacggctgcatatgttcctcctgaagttctaaactcctctccagcaacgttcggaaatgatctctgggcactcggctgcactctgtaccaaatgctttcaggaacttccccattcaaggatgcaagtgaatggctgattttccaaagaattatagctagagatataaagtttccaaatcatttctcagaagcagcaagagacctcatcgaccgattgctagatacagatcctagtagaagaccaggagctggatcagaaggttatgattctctcaagagacatcctttcttcaagggagttgactggaagaacctaaggtcacaaactcctccaaaactagctccagatcctgcgtctcaatcagcatctcctgagagggacggttctccatggaatccaacacatgttggagatacctcagtcttgcagaacgatggacacaatggactctctgaatcctcaggttccataactcggcttgcctccatagactctttcgattcaagatggcaacagtttctagaaccgggagaatcggttctaatgatatcagcagtgaagaagctacagaaaatcacaagtaagaaggtgcagctaatactcaccaacaaaccaagactgatatacgttgacccatcaaagcttgtagtaaaagggaatattatctggtctgataactccaacgacctcaacgttcaagtctcaagtccttcccatttcaagatttgcacaccgaagaaagttttatcgtttgaagatgcgaagcaaagagctttgcagtggaaaaaggcaatcgaaactcttcaaaaccgttga

SEQ ID NO: 49133 - protein, 486 aa, Arabidopsis thaliana
  peptide (1)..(486): Ceres Seq. ID no. 12601474
MLTMDKEFDSKLTLQGNSSSNGETISRSKSFAFKAPQENFTYHDFELGKIYGVGSYSKVVRAKKKDNGTVYALKIMDKKFITKENKTAYVKLERIVLDQLEHPGIVKLFFTFQDTQSLYMALESCEGGELFDQITRKGRLSEDEARFYSAEVVDALEYIHNMGLIHRDIKPENLLLTLDGHIKIADFGSVKPMQDSQITVLPNAASDDKACTFVGTAAYVPPEVLNSSPATFGNDLWALGCTLYQMLSGTSPFKDASEWLIFQRIIARDIKFPNHFSEAARDLIDRLLDTDPSRRPGAGSEGYDSLKRHPFFKGVDWKNLRSQTPPKLAPDPASQSASPERDGSPWNPTHVGDTSVLQNDGHNGLSESSGSITRLASIDSFDSRWQQFLEPGESVLMISAVKKLQKITSKKVQLILTNKPRLIYVDPSKLVVKGNIIWSDNSNDLNVQVSSPSHFKICTPKKVLSFEDAKQRALQWKKAIETLQNR

SEQ ID NO: 49134 - protein, 483 aa, Arabidopsis thaliana
  peptide (1)..(483): Ceres Seq. ID no. 12601475
MDKEFDSKLTLQGNSSSNGETISRSKSFAFKAPQENFTYHDFELGKIYGVGSYSKVVRAKKKDNGTVYALKIMDKKFITKENKTAYVKLERIVLDQLEHPGIVKLFFTFQDTQSLYMALESCEGGELFDQITRKGRLSEDEARFYSAEVVDALEYIHNMGLIHRDIKPENLLLTLDGHIKIADFGSVKPMQDSQITVLPNAASDDKACTFVGTAAYVPPEVLNSSPATFGNDLWALGCTLYQMLSGTSPFKDASEWLIFQRIIARDIKFPNHFSEAARDLIDRLLDTDPSRRPGAGSEGYDSLKRHPFFKGVDWKNLRSQTPPKLAPDPASQSASPERDGSPWNPTHVGDTSVLQNDGHNGLSESSGSITRLASIDSFDSRWQQFLEPGESVLMISAVKKLQKITSKKVQLILTNKPRLIYVDPSKLVVKGNIIWSDNSNDLNVQVSSPSHFKICTPKKVLSFEDAKQRALQWKKAIETLQNR

SEQ ID NO: 49135 - protein, 411 aa, Arabidopsis thaliana
  peptide (1)..(411): Ceres Seq. ID no. 12601476
MDKKFITKENKTAYVKLERIVLDQLEHPGIVKLFFTFQDTQSLYMALESCEGGELFDQITRKGRLSEDEARFYSAEVVDALEYIHNMGLIHRDIKPENLLLTLDGHIKIADFGSVKPMQDSQITVLPNAASDDKACTFVGTAAYVPPEVLNSSPATFGNDLWALGCTLYQMLSGTSPFKDASEWLIFQRIIARDIKFPNHFSEAARDLIDRLLDTDPSRRPGAGSEGYDSLKRHPFFKGVDWKNLRSQTPPKLAPDPASQSASPERDGSPWNPTHVGDTSVLQNDGHNGLSESSGSITRLASIDSFDSRWQQFLEPGESVLMISAVKKLQKITSKKVQLILTNKPRLIYVDPSKLVVKGNIIWSDNSNDLNVQVSSPSHFKICTPKKVLSFEDAKQRALQWKKAIETLQNR

SEQ ID NO: 49136 - DNA, 831 bp, Arabidopsis thaliana
  misc_feature (1)..(831): Ceres Seq. ID no. 13579836
  misc_feature (1)..(831): Ortholog of  Ceres SEQ ID NO 13661994 as cited in SEQ ID NO 60568
  misc_feature (1)..(831): Ortholog of  Ceres SEQ ID NO 12584790 as cited in SEQ ID NO 62648
atcgctcggtgaattcgaggatcctcgagcttyttgatcggagactttttctctcatcgtcgttgtttgaattctccggctgagagatgcttgcttgacgacgaatctccaccgatcttttaccttttcgcacaacaagtaagagaaggatgtcgacgccagcaaggaagaggttaatgagggatttcaagaggttgcagcaagacccacctgcgggtattagtggtgctccacaggacaacaacattatgctctggaatgctgtcatatttgggcctgatgacacaccatgggatggaggtactttcaaactctcactgcagttctctgaagattatcccaataaaccaccaacagttcggtttgtgtcacggatgtttcatcctaatatttatgcagatgggagtatctgcttggacattctacaaaaccagtggagtccaatctatgatgttgctgctatacttacctccatccagtccttgctctgtgaccctaatccgaattctcctgcaaactcggaagctgctcggatgtacagcgaaagcaagcgcgagtacaacaggagagtgcgtgatgttgttgagcaaagctggactgctgactagtaattatatcattgtagcatttgtcttcaaataacattaaacctcctctcttgtatctgatttcgaccactcacatctctgagagaagtttactctccctaccactctcttttatgtctttctgtgtttttcaaactctgtgatttgttgctcttcatgttttttttctttgtattttcgtaaccacattcatcttcataattatcatatgtatttcagtcgy

SEQ ID NO: 49137 - protein, 152 aa, Arabidopsis thaliana; identical to SEQ ID NO: 30521
  peptide (1)..(152): Ceres Seq. ID no. 15222703

SEQ ID NO: 49138 - protein, 143 aa, Arabidopsis thaliana; identical to SEQ ID NO: 30522
  peptide (1)..(143): Ceres Seq. ID no. 15222704

SEQ ID NO: 49139 - protein, 127 aa, Arabidopsis thaliana
  peptide (1)..(127): Ceres Seq. ID no. 15222705
MLSYLGLMTHHGMEVLSNSHCSSLKIIPINHQQFGLCHGCFILIFMQMGVSAWTFYKTSGVQSMMLLLYLPPSSPCSVTLIRILLQTRKLLGCTAKASASTTGECVMLLSKAGLLTSNYIIVAFVFK

SEQ ID NO: 49140 - DNA, 1500 bp, Arabidopsis thaliana
  misc_feature (1)..(1500): Ceres Seq. ID no. 12601477
  misc_feature (1)..(1500): Ortholog of  Ceres SEQ ID NO 14301932 as cited in SEQ ID NO 67747
gggaacttttcctctctctctctctctacttcgaacaggaagaagatagattctctcagttctttcaaatccataaaaatatacctggaatcttgtttctatacttcttctgtttctcatactctccactaatactaacatttttccagaattttgttaaaccctacaaaaatttgaactttttaaaaccctagaaatttccaaattcgtaaaaccctagccaagttcctctattgngtgaggggaactcatcagaacccacgaatcgaaatgaagaatccagaaaaacccttacttctgtttctaattttagcttcaagcttagcatcaatggcgactgcaaaatccacaatagagccttgctccagtaaagacacttgtaactcattgctaggctacactctctacaccgacctcaaagtcacagaagtcgcttctctcttccaagtagacccagtttcaatgcttttgtctaactccattgatatctcttacccagacgtcgagaaccatgtccttcccgctaagctcttcctcaagatcccaatcacttgctcctgtgtcgacggaatcagaaaatccctctcgactcattacaagactcgtacttctgacacactaggatcgattgctgactctgtttacggtggtctggtctctccggagcagattcaggtcgcgaattcagagactgacctttcggttctcgatgtaggtacaaagcttgtgattccattgccttgcgcttgcttcaatggtaccgatgaatctcttccggcgctttatctatcttacgttgtgagaggaatcgacactatggctggaatcgcaaagagattctcgacctctgttactgatttaacaaacgtgaatgctatgggagctcctgatatcaatcctggtgatatcctcgctgtcccattgctagcttgtagttcaaatttccccaaatacgctacggattacggattaatcattccaaatggaagctatgctctcactgcaggccactgtgtacaatgcagctgtgttctcggaagccgaagtatgagatgtagaaacagcaacttcatgcttggtaacattacttcgcagcagagtagctccggttgtaaacttactacttgtagttacaacggtttcgctagcggcactatcttgaccacgttgtccatgtctcttcaacctcgatgccctggaccgcaacaattagcaccgcttatagccccgcctgataatgttccaaaggaactgatgtatctaccttcaccttcaccttcgccatcaccagagtttgatgatattgctggtggaggatcatctatagccgcagtccccgcggcttcacctggaggagctacggtttcttcaagcaattcaatcccgggtaatccagctaatggtccaggcggaagtatttctatagcttcttgtccattgagctattactcattcattgcgttactcatccccattggttcttgcttttttgttttctaa

SEQ ID NO: 49141 - protein, 409 aa, Arabidopsis thaliana
  peptide (1)..(409): Ceres Seq. ID no. 12601478
MKNPEKPLLLFLILASSLASMATAKSTIEPCSSKDTCNSLLGYTLYTDLKVTEVASLFQVDPVSMLLSNSIDISYPDVENHVLPAKLFLKIPITCSCVDGIRKSLSTHYKTRTSDTLGSIADSVYGGLVSPEQIQVANSETDLSVLDVGTKLVIPLPCACFNGTDESLPALYLSYVVRGIDTMAGIAKRFSTSVTDLTNVNAMGAPDINPGDILAVPLLACSSNFPKYATDYGLIIPNGSYALTAGHCVQCSCVLGSRSMRCRNSNFMLGNITSQQSSSGCKLTTCSYNGFASGTILTTLSMSLQPRCPGPQQLAPLIAPPDNVPKELMYLPSPSPSPSPEFDDIAGGGSSIAAVPAASPGGATVSSSNSIPGNPANGPGGSISIASCPLSYYSFIALLIPIGSCFFVF

SEQ ID NO: 49142 - protein, 389 aa, Arabidopsis thaliana
  peptide (1)..(389): Ceres Seq. ID no. 12601479
MATAKSTIEPCSSKDTCNSLLGYTLYTDLKVTEVASLFQVDPVSMLLSNSIDISYPDVENHVLPAKLFLKIPITCSCVDGIRKSLSTHYKTRTSDTLGSIADSVYGGLVSPEQIQVANSETDLSVLDVGTKLVIPLPCACFNGTDESLPALYLSYVVRGIDTMAGIAKRFSTSVTDLTNVNAMGAPDINPGDILAVPLLACSSNFPKYATDYGLIIPNGSYALTAGHCVQCSCVLGSRSMRCRNSNFMLGNITSQQSSSGCKLTTCSYNGFASGTILTTLSMSLQPRCPGPQQLAPLIAPPDNVPKELMYLPSPSPSPSPEFDDIAGGGSSIAAVPAASPGGATVSSSNSIPGNPANGPGGSISIASCPLSYYSFIALLIPIGSCFFVF

SEQ ID NO: 49143 - protein, 345 aa, Arabidopsis thaliana
  peptide (1)..(345): Ceres Seq. ID no. 12601480
MLLSNSIDISYPDVENHVLPAKLFLKIPITCSCVDGIRKSLSTHYKTRTSDTLGSIADSVYGGLVSPEQIQVANSETDLSVLDVGTKLVIPLPCACFNGTDESLPALYLSYVVRGIDTMAGIAKRFSTSVTDLTNVNAMGAPDINPGDILAVPLLACSSNFPKYATDYGLIIPNGSYALTAGHCVQCSCVLGSRSMRCRNSNFMLGNITSQQSSSGCKLTTCSYNGFASGTILTTLSMSLQPRCPGPQQLAPLIAPPDNVPKELMYLPSPSPSPSPEFDDIAGGGSSIAAVPAASPGGATVSSSNSIPGNPANGPGGSISIASCPLSYYSFIALLIPIGSCFFVF

SEQ ID NO: 49144 - DNA, 1228 bp, Arabidopsis thaliana
  misc_feature (1)..(1228): Ceres Seq. ID no. 12601521
  misc_feature (1)..(1228): Ortholog of  Ceres SEQ ID NO 13590967 as cited in SEQ ID NO 65553
  misc_feature (1)..(1228): Ortholog of  Ceres SEQ ID NO 14309438 as cited in SEQ ID NO 0
gagagaaatggcgatctaacgttgaagataataagaaggacgaaacgggcattttttttttgtgtgtgtgtgtcacatcttttttattatcctctcatggcggataacacgagacctgtccaaaggctcttcttcttcttcgtcatcactactactactcctctctaacgttttcctcattcttcttaattccgatttttgagtgatggctatggcctctgcttctggttctgctctttgcttcactgatgcatctagctctcttgctttaagacgcgattgtggagctctttgcttgcctcctaggacagttacgtttggatttgtcgataaacctcttgtcaatctcgagcgattaagattatccactttgaagattagagcatcaaatgctactgctgtggagaatggaaagcaagaaggaagtgctgctgattctgataaagttccaactccagttgttataatcgaccaagattctgaccctgatgcaaccgttcttgaagttacattcggagatcgtcttggagctttacttgacactatgaatgcgctcaaaaacttgggattgaatgtcgtcaaggcaaatgtttaccttgattcttccggcaagcacaacaaatttgccattactagagcagatagtggaagaaaagtagaagaccctgaattgcttgaggccattcgtctcacagtcataaacaatctgcttgagtttcatcctgaatcaagttctcagttggcaatgggagcagcttttggtgttcttcctccaactgaaccgattgacgtggacatagcaacacatataaccattgaagatgatggaccagaccgcagtttactcttcatagaatcagcggatagacctggactattagttgagctggtgaagatcatttcagatatcagcgtcgctgttgaatctggagaattcgacaccgagggtttgttggctaaggtgaagtttcatgtaagctacaggaacaaagccctaatcaagcctctccagcaggtccttgctaatagtctgaggtacttcttgaggcgtccatcaactgacgagtcaagtttctgattatgcccatttttcaaaatctcaagtctcattcctcgtgactactatttttaccacttttttttttttttacatttgaccaaaataagctgcttcatacacctgtaatagtaacattatgcatcattcatccaatttactttgattcac

SEQ ID NO: 49145 - protein, 290 aa, Arabidopsis thaliana
  peptide (1)..(290): Ceres Seq. ID no. 12601522
MAMASASGSALCFTDASSSLALRRDCGALCLPPRTVTFGFVDKPLVNLERLRLSTLKIRASNATAVENGKQEGSAADSDKVPTPVVIIDQDSDPDATVLEVTFGDRLGALLDTMNALKNLGLNVVKANVYLDSSGKHNKFAITRADSGRKVEDPELLEAIRLTVINNLLEFHPESSSQLAMGAAFGVLPPTEPIDVDIATHITIEDDGPDRSLLFIESADRPGLLVELVKIISDISVAVESGEFDTEGLLAKVKFHVSYRNKALIKPLQQVLANSLRYFLRRPSTDESSF

SEQ ID NO: 49146 - protein, 288 aa, Arabidopsis thaliana
  peptide (1)..(288): Ceres Seq. ID no. 12601523
MASASGSALCFTDASSSLALRRDCGALCLPPRTVTFGFVDKPLVNLERLRLSTLKIRASNATAVENGKQEGSAADSDKVPTPVVIIDQDSDPDATVLEVTFGDRLGALLDTMNALKNLGLNVVKANVYLDSSGKHNKFAITRADSGRKVEDPELLEAIRLTVINNLLEFHPESSSQLAMGAAFGVLPPTEPIDVDIATHITIEDDGPDRSLLFIESADRPGLLVELVKIISDISVAVESGEFDTEGLLAKVKFHVSYRNKALIKPLQQVLANSLRYFLRRPSTDESSF

SEQ ID NO: 49147 - protein, 177 aa, Arabidopsis thaliana
  peptide (1)..(177): Ceres Seq. ID no. 12601524
MNALKNLGLNVVKANVYLDSSGKHNKFAITRADSGRKVEDPELLEAIRLTVINNLLEFHPESSSQLAMGAAFGVLPPTEPIDVDIATHITIEDDGPDRSLLFIESADRPGLLVELVKIISDISVAVESGEFDTEGLLAKVKFHVSYRNKALIKPLQQVLANSLRYFLRRPSTDESSF

SEQ ID NO: 49148 - DNA, 1821 bp, Arabidopsis thaliana; identical to SEQ ID NO: 45461
  misc_feature (1)..(1821): Ceres Seq. ID no. 12600449
  misc_feature (1)..(1821): Ortholog of  Ceres SEQ ID NO 15177298 as cited in SEQ ID NO 52711

SEQ ID NO: 49149 - protein, 446 aa, Arabidopsis thaliana; identical to SEQ ID NO: 45462
  peptide (1)..(446): Ceres Seq. ID no. 12600450

SEQ ID NO: 49150 - protein, 293 aa, Arabidopsis thaliana; identical to SEQ ID NO: 45463
  peptide (1)..(293): Ceres Seq. ID no. 12600451

SEQ ID NO: 49151 - protein, 229 aa, Arabidopsis thaliana; identical to SEQ ID NO: 45464
  peptide (1)..(229): Ceres Seq. ID no. 12600452

SEQ ID NO: 49152 - DNA, 1443 bp, Arabidopsis thaliana
  misc_feature (1)..(1443): Ceres Seq. ID no. 12578173
  misc_feature (1)..(1443): Ortholog of  Ceres SEQ ID NO 15170438 as cited in SEQ ID NO 52845
  misc_feature (1)..(1443): Ortholog of  Ceres SEQ ID NO 13503557 as cited in SEQ ID NO 69075
acctccaccaattcctcattcttccaatcgcacttcctttaccagatcagacgtcaatttcaactcttcagtgaagagatttctttcaccgaattttctactccgatcgatcaattgaagattgaaatggaagctaattcaggcggaggaggaggagctgaaggcggaagagcggtaaccggaggaggaggaggaggaggagggagcgatgtggaattggtgagcaagacgttgcaagtggagcataagctattctattttgatcttaaggagaatcctcgtggaaggtatctaaagatatcggagaagacgtcggcgacgaggtcaaccatcattgttccttcctccggcatctcttggttccttgatctcttcaactactatgtcaattctgaggaacacgagctttttagcaaagaattgcagcttgattccaaggtgttttacttcgatatcggtgagaacagaagaggacgcttcttgaaggtgtcagaagcatcggttagtagaaatcgaagtaccattattgttccagctggaagctctcctgatgaaggatgggcagctttcaggaatatattggctgagatacatgaagcatcaggactttttgtgatgccaaatcaggtgaaaccttctgatggacaggaacacttggttgatgatgttggagctggttttatacctggacatggtagtcagcagccatcttcttcagaacataatgtggatcgaacaattgactcgccaggccaggaagaaaccggaatgactggtgtttctaaagtaatcagagctgaccagaaacggttcttctttgatcttgggaacaataacaggggccatttcttaaggatatctgaggtggcaggttctgacaggtcttccatcattctaccgttatcgggtcttaagcagtttcacgaagtaattggtcactttgtggagatcaccaaagataaaattgaaggtatgacaggtgcaaatgtcaggacagttgatcctcctcagagataagtattgattctcttagaggatggaaattttcaatcctctaaccatttgaatctggcaacttcaagtcgactgcctgatcgcggtgtgcaatagtttcacgtaatatctctcgccccttcacatcttctaaaaataattcagcaggatcatcatttgccttaatagtagataaaacaaactttggagtctgcaactgggaataagctgaaaatcatccaccatgtgtatctctctctctctctctctctctccctccctccctcatttgcttctgttctgttttaactttttttgtttttgttcagtttgggtcattgggtgtatatctgttgacggcttgatgcatttcaattgtaaaagaatattggggtttatatgtttgggctaatgcctgttggaataaaagatgaagtgtaagttctatac

SEQ ID NO: 49153 - protein, 338 aa, Arabidopsis thaliana
  peptide (1)..(338): Ceres Seq. ID no. 12578174
TSTNSSFFQSHFLYQIRRQFQLFSEEISFTEFSTPIDQLKIEMEANSGGGGGAEGGRAVTGGGGGGGGSDVELVSKTLQVEHKLFYFDLKENPRGRYLKISEKTSATRSTIIVPSSGISWFLDLFNYYVNSEEHELFSKELQLDSKVFYFDIGENRRGRFLKVSEASVSRNRSTIIVPAGSSPDEGWAAFRNILAEIHEASGLFVMPNQVKPSDGQEHLVDDVGAGFIPGHGSQQPSSSEHNVDRTIDSPGQEETGMTGVSKVIRADQKRFFFDLGNNNRGHFLRISEVAGSDRSSIILPLSGLKQFHEVIGHFVEITKDKIEGMTGANVRTVDPPQR

SEQ ID NO: 49154 - protein, 296 aa, Arabidopsis thaliana
  peptide (1)..(296): Ceres Seq. ID no. 12578175
MEANSGGGGGAEGGRAVTGGGGGGGGSDVELVSKTLQVEHKLFYFDLKENPRGRYLKISEKTSATRSTIIVPSSGISWFLDLFNYYVNSEEHELFSKELQLDSKVFYFDIGENRRGRFLKVSEASVSRNRSTIIVPAGSSPDEGWAAFRNILAEIHEASGLFVMPNQVKPSDGQEHLVDDVGAGFIPGHGSQQPSSSEHNVDRTIDSPGQEETGMTGVSKVIRADQKRFFFDLGNNNRGHFLRISEVAGSDRSSIILPLSGLKQFHEVIGHFVEITKDKIEGMTGANVRTVDPPQR

SEQ ID NO: 49155 - DNA, 957 bp, Arabidopsis thaliana
  misc_feature (1)..(957): Ceres Seq. ID no. 12578284
  misc_feature (1)..(957): Ortholog of  Ceres SEQ ID NO 13597570 as cited in SEQ ID NO 64673
atcttcttctcctcttagggtagaagaaggacgaaaatcggaggaggaagaagaagatcgattcgatttgtgatcaacgatgagctccttcaatggaaacagcaacatcgacaacctcctaatccaaaccctacttggacgtctccaaattcgtccccctaactctcatttcctctctcaatccctagacgacctcctcttcaaatccgacgacagcgacggcgatgatgacggagaaggtcagaccagtctcgacagagaagaagctaggcttgagaaagagctaatccgagtcatcgtctctggtcgaagcgattctctcaagccgaattcaggtcaagccgtgacagtcaacgaacaccacatctgcgttgggtttcatgaggatgaggaatcggattatcgtgtttgggagtggcatggtcatatcatgttgtttgatgaagagaatgggtacacgcctgagtatatctacgggaattacttcgagaggttgcctgtgaagcttcctaataaccgccgtgtggagaaggagaagaagaaggagatgaaagaagaggaggtggagaatttggggcttagagagttgatcgatggtggtgacgctgctcctggtaggattcttcataggaacaacatcaacatcggttcctcaagggtctaagttcctaagagcgtcttggtagggagaggtcacattgttcgggaagatttcagatgtgtgaacaactcgcgacaacaaaacataaggtgctggtgggtctacgggttctattccgttttatttaaaccgggaaatccatgggtgaatctgttttctttaagaaattcatctgaagttgtttctgaaccaaatttacaatacatgttaatgaagagagaaaagattacaatgcatggtcatcgaactcggaagctttcaagtttccccatgtttgtttattttgtgttcttaaa

SEQ ID NO: 49156 - protein, 194 aa, Arabidopsis thaliana
  peptide (1)..(194): Ceres Seq. ID no. 12578285
MSSFNGNSNIDNLLIQTLLGRLQIRPPNSHFLSQSLDDLLFKSDDSDGDDDGEGQTSLDREEARLEKELIRVIVSGRSDSLKPNSGQAVTVNEHHICVGFHEDEESDYRVWEWHGHIMLFDEENGYTPEYIYGNYFERLPVKLPNNRRVEKEKKKEMKEEEVENLGLRELIDGGDAAPGRILHRNNINIGSSRV

SEQ ID NO: 49157 - DNA, 2263 bp, Arabidopsis thaliana; identical to SEQ ID NO: 44996
  misc_feature (1)..(2263): Ceres Seq. ID no. 13591573
  misc_feature (1)..(2263): Ortholog of  Ceres SEQ ID NO 13595870 as cited in SEQ ID NO 62101
  misc_feature (1)..(2263): Ortholog of  Ceres SEQ ID NO 13590241 as cited in SEQ ID NO 63878
  misc_feature (1)..(2263): Ortholog of  Ceres SEQ ID NO 13657939 as cited in SEQ ID NO 66349

SEQ ID NO: 49158 - protein, 695 aa, Arabidopsis thaliana; identical to SEQ ID NO: 44997
  peptide (1)..(695): Ceres Seq. ID no. 13591574

SEQ ID NO: 49159 - protein, 604 aa, Arabidopsis thaliana; identical to SEQ ID NO: 44998
  peptide (1)..(604): Ceres Seq. ID no. 13591575

SEQ ID NO: 49160 - protein, 499 aa, Arabidopsis thaliana; identical to SEQ ID NO: 44999
  peptide (1)..(499): Ceres Seq. ID no. 13591576

SEQ ID NO: 49161 - DNA, 653 bp, Arabidopsis thaliana
  misc_feature (1)..(653): Ceres Seq. ID no. 13579848
  misc_feature (1)..(653): Ortholog of  Ceres SEQ ID NO 13594828 as cited in SEQ ID NO 56431
  misc_feature (1)..(653): Ortholog of  Ceres SEQ ID NO 14316363 as cited in SEQ ID NO 57222
  misc_feature (1)..(653): Ortholog of  Ceres SEQ ID NO 15177754 as cited in SEQ ID NO 57945
  misc_feature (1)..(653): Ortholog of  Ceres SEQ ID NO 13594354 as cited in SEQ ID NO 58082
  misc_feature (1)..(653): Ortholog of  Ceres SEQ ID NO 14316408 as cited in SEQ ID NO 58228
  misc_feature (1)..(653): Ortholog of  Ceres SEQ ID NO 13528075 as cited in SEQ ID NO 60188
  misc_feature (1)..(653): Ortholog of  Ceres SEQ ID NO 13600483 as cited in SEQ ID NO 0
agaaaagctttcagaggatcgagcgcacttcttcaatggcgaccaaagtttacatagtgtactactcaatgtatggtcatgtggagaaattagctcaagagattaggaaaggtgctgcttctgttgatggtgttgaagccatactctggcaggtacccgaaacgctccaagaagatgtgctctctaaaatgagtgcaccaccaaagagtgatgctcctattatcaccccaaacgagctcgctgaggctgatggatttatcttcggcttcccaacgaggtttggtatgatggctgctcagttcaaggcatttttagatgcgaccggcggcctttggaggactcagcaactcgccggtaaaccagccggaatcttctacagcacagggtcccaaggtggtggtcaagaaaccaccgcattaactgccattactcagctggttcatcacgggatgatctttgtcccgattggctacacatttggtgccggaatgtttgagatggaaaatgtgaaaggtggaagcccgtacggggcgggaacatttgccggagatgggtcgagacagccaacggaactggagttggggcaagcatttcaccaagggaagtacattgccgccataagtaagaagctcaagggacctgctgctgcttag

SEQ ID NO: 49162 - protein, 216 aa, Arabidopsis thaliana
  peptide (1)..(216): Ceres Seq. ID no. 13579849
KSFQRIERTSSMATKVYIVYYSMYGHVEKLAQEIRKGAASVDGVEAILWQVPETLQEDVLSKMSAPPKSDAPIITPNELAEADGFIFGFPTRFGMMAAQFKAFLDATGGLWRTQQLAGKPAGIFYSTGSQGGGQETTALTAITQLVHHGMIFVPIGYTFGAGMFEMENVKGGSPYGAGTFAGDGSRQPTELELGQAFHQGKYIAAISKKLKGPAAA

SEQ ID NO: 49163 - protein, 205 aa, Arabidopsis thaliana
  peptide (1)..(205): Ceres Seq. ID no. 13579850
MATKVYIVYYSMYGHVEKLAQEIRKGAASVDGVEAILWQVPETLQEDVLSKMSAPPKSDAPIITPNELAEADGFIFGFPTRFGMMAAQFKAFLDATGGLWRTQQLAGKPAGIFYSTGSQGGGQETTALTAITQLVHHGMIFVPIGYTFGAGMFEMENVKGGSPYGAGTFAGDGSRQPTELELGQAFHQGKYIAAISKKLKGPAAA

SEQ ID NO: 49164 - protein, 194 aa, Arabidopsis thaliana
  peptide (1)..(194): Ceres Seq. ID no. 13579851
MYGHVEKLAQEIRKGAASVDGVEAILWQVPETLQEDVLSKMSAPPKSDAPIITPNELAEADGFIFGFPTRFGMMAAQFKAFLDATGGLWRTQQLAGKPAGIFYSTGSQGGGQETTALTAITQLVHHGMIFVPIGYTFGAGMFEMENVKGGSPYGAGTFAGDGSRQPTELELGQAFHQGKYIAAISKKLKGPAAA

SEQ ID NO: 49165 - DNA, 2649 bp, Arabidopsis thaliana; identical to SEQ ID NO: 46523
  misc_feature (1)..(2649): Ceres Seq. ID no. 13592024
  misc_feature (1)..(2649): Ortholog of  Ceres SEQ ID NO 13595900 as cited in SEQ ID NO 69289

SEQ ID NO: 49166 - protein, 703 aa, Arabidopsis thaliana; identical to SEQ ID NO: 46524
  peptide (1)..(703): Ceres Seq. ID no. 13592025

SEQ ID NO: 49167 - protein, 603 aa, Arabidopsis thaliana; identical to SEQ ID NO: 46525
  peptide (1)..(603): Ceres Seq. ID no. 13592026

SEQ ID NO: 49168 - protein, 485 aa, Arabidopsis thaliana; identical to SEQ ID NO: 46526
  peptide (1)..(485): Ceres Seq. ID no. 13592027

SEQ ID NO: 49169 - DNA, 1563 bp, Arabidopsis thaliana
  misc_feature (1)..(1563): Ceres Seq. ID no. 12578031
  misc_feature (1)..(1563): Ortholog of  Ceres SEQ ID NO 15176053 as cited in SEQ ID NO 57792
  misc_feature (1)..(1563): Ortholog of  Ceres SEQ ID NO 14308023 as cited in SEQ ID NO 65865
  misc_feature (1)..(1563): Ortholog of  Ceres SEQ ID NO 14307972 as cited in SEQ ID NO 66436
  misc_feature (1)..(1563): Ortholog of  Ceres SEQ ID NO 15169623 as cited in SEQ ID NO 67523
  misc_feature (1)..(1563): Ortholog of  Ceres SEQ ID NO 12614670 as cited in SEQ ID NO 68565
atggaggaagaaagtagcagctggttcattccaaaggttcttgttctgtctgtaatcttaagtcttgtaatagtgaagggtatgtctctgttatggtggagaccaagaaagattgaagaacatttctctaaacaaggaattcgaggtcctccttatcatttcttcatcggaaatgttaaagaacttgttggaatgatgcttaaagcttcttctcatcctatgcctttctctcacaatattcttcctagagttctctctttttaccatcactggagaaaaatctacggtgctacatttctggtttggttcggtccaactttccggttaacggtagccgatcctgatttgatcagagagatcttctctaagtctgagttctacgagaagaatgaagctcaccctttggttaaacaacttgaaggcgatggactacttagtctcaaaggtgaaaaatgggctcatcatcgaaaaatcattagccctacttttcatatggagaatcttaagttgcttgtaccagttgtgttgaagagtgtgactgatatggtggataaatggtccgataagttatcagaaaacggtgaagttgaggtagatgtctatgagtggtttcagattttgactgaagatgttattagtagaacagcttttggaagtagctatgaagatggtcgagcagtttttcgacttcaagctcaacaaatgcttctttgtgctgaagcttttcaaaaagtcttcattcctggctatagattttttccgacaagagggaatttgaagtcttggaagttagacaaggagataaggaagtcgttgttgaagctgatagagcggcggagacaaaacgctatagatggagaaggggaagaatgtaaggagccggcggcgaaggatttgttgggattaatgattcaggcaaagaatgtgacggttcaggacattgtggaggagtgtaaaagctttttcttcgccgggaaacagacaacttctaatctgctgacgtggacgaccatcttgctatccatgcacccggagtggcaggccaaagcacgtgatgaggtcctcagggtctgcggctcacgtgatgtccctaccaaggaccatgtcgttaagcttaaaacgttgagtatgatcttgaacgagtctttaaggttgtatccaccaatagtagctacgattcgacgcgctaaatcggatgtgaagctaggagggtacaaaatcccatgtggcacggagcttctaatcccaatcatagcggtccatcatgaccaagccatttggggtaatgacgtgaacgaattcaatccagctcggtttgcggatggagtgccgcgtgctgccaaacaccccgttggcttcataccgtttggcctcggagttcgtacatgcattggtcagaatcttgctatacttcaggccaaattgacactcgctgtaatgatccaacgcttcacctttcacttggctcctacttatcagcatgcacctaccgtccttatgttgctttatcctcaacatggtgcaccaatcaccttccggagattgaccaatcatgaggattga

SEQ ID NO: 49170 - protein, 520 aa, Arabidopsis thaliana
  peptide (1)..(520): Ceres Seq. ID no. 12578032
MEEESSSWFIPKVLVLSVILSLVIVKGMSLLWWRPRKIEEHFSKQGIRGPPYHFFIGNVKELVGMMLKASSHPMPFSHNILPRVLSFYHHWRKIYGATFLVWFGPTFRLTVADPDLIREIFSKSEFYEKNEAHPLVKQLEGDGLLSLKGEKWAHHRKIISPTFHMENLKLLVPVVLKSVTDMVDKWSDKLSENGEVEVDVYEWFQILTEDVISRTAFGSSYEDGRAVFRLQAQQMLLCAEAFQKVFIPGYRFFPTRGNLKSWKLDKEIRKSLLKLIERRRQNAIDGEGEECKEPAAKDLLGLMIQAKNVTVQDIVEECKSFFFAGKQTTSNLLTWTTILLSMHPEWQAKARDEVLRVCGSRDVPTKDHVVKLKTLSMILNESLRLYPPIVATIRRAKSDVKLGGYKIPCGTELLIPIIAVHHDQAIWGNDVNEFNPARFADGVPRAAKHPVGFIPFGLGVRTCIGQNLAILQAKLTLAVMIQRFTFHLAPTYQHAPTVLMLLYPQHGAPITFRRLTNHED

SEQ ID NO: 49171 - protein, 493 aa, Arabidopsis thaliana
  peptide (1)..(493): Ceres Seq. ID no. 12578033
MSLLWWRPRKIEEHFSKQGIRGPPYHFFIGNVKELVGMMLKASSHPMPFSHNILPRVLSFYHHWRKIYGATFLVWFGPTFRLTVADPDLIREIFSKSEFYEKNEAHPLVKQLEGDGLLSLKGEKWAHHRKIISPTFHMENLKLLVPVVLKSVTDMVDKWSDKLSENGEVEVDVYEWFQILTEDVISRTAFGSSYEDGRAVFRLQAQQMLLCAEAFQKVFIPGYRFFPTRGNLKSWKLDKEIRKSLLKLIERRRQNAIDGEGEECKEPAAKDLLGLMIQAKNVTVQDIVEECKSFFFAGKQTTSNLLTWTTILLSMHPEWQAKARDEVLRVCGSRDVPTKDHVVKLKTLSMILNESLRLYPPIVATIRRAKSDVKLGGYKIPCGTELLIPIIAVHHDQAIWGNDVNEFNPARFADGVPRAAKHPVGFIPFGLGVRTCIGQNLAILQAKLTLAVMIQRFTFHLAPTYQHAPTVLMLLYPQHGAPITFRRLTNHED

SEQ ID NO: 49172 - protein, 456 aa, Arabidopsis thaliana
  peptide (1)..(456): Ceres Seq. ID no. 12578034
MMLKASSHPMPFSHNILPRVLSFYHHWRKIYGATFLVWFGPTFRLTVADPDLIREIFSKSEFYEKNEAHPLVKQLEGDGLLSLKGEKWAHHRKIISPTFHMENLKLLVPVVLKSVTDMVDKWSDKLSENGEVEVDVYEWFQILTEDVISRTAFGSSYEDGRAVFRLQAQQMLLCAEAFQKVFIPGYRFFPTRGNLKSWKLDKEIRKSLLKLIERRRQNAIDGEGEECKEPAAKDLLGLMIQAKNVTVQDIVEECKSFFFAGKQTTSNLLTWTTILLSMHPEWQAKARDEVLRVCGSRDVPTKDHVVKLKTLSMILNESLRLYPPIVATIRRAKSDVKLGGYKIPCGTELLIPIIAVHHDQAIWGNDVNEFNPARFADGVPRAAKHPVGFIPFGLGVRTCIGQNLAILQAKLTLAVMIQRFTFHLAPTYQHAPTVLMLLYPQHGAPITFRRLTNHED

SEQ ID NO: 49173 - DNA, 1829 bp, Arabidopsis thaliana
  misc_feature (1)..(1829): Ceres Seq. ID no. 12578035
  misc_feature (1)..(1829): Ortholog of  Ceres SEQ ID NO 14311207 as cited in SEQ ID NO 60304
ctgccgcttttaaatctctcatcttcttcctcgtgtcactctttctctcacactctgcaaaaacattttcttgtctctcctctgcccaaattttttttctttccaggaatatttcctagaaaaacccaagcaaagctttaaccccttcctcctccaaaagtagcatcttcctctttttctatttctcctttcctcttcttatctctctctcgtttgtgaacgattccttaagaatataaccaaaagcccttttctcctttcttcaactttccgggaaaaatcttcacgcagcaaggtttctctctcggctctcgcagtgtttttcgtgccttttgttctttctataaaaaaaaaattcgcgtcctttaagaaaactttttccacctagagaagaagaagagtatcactcttgttgttcaagtttctctctttaataaaaaatccatctttattctttgtcttctttcctttttgctttccctaatctctatgttataaacacacagagagaaacaaagtcacagtctcgagtcaaaaacagagaatacgaaagaaaaatggaagcggagaagaaaatggttctaccgagaatcaaattcacagagcacaaaaccaacacgacaacaatcgtatcggagttaaccaacactcaccaaaccaggattcttcgtatctcagtcactgacccagacgctactgattcctccagtgacgacgaagaagaagaacatcaacgctttgtctctaaacgccgtcgtgttaagaagtttgtcaacgaagtctatctcgattccggtgctgttgttactggtagttgtggtcaaatggagtcgaagaagagacaaaagagagcggttaaatcggagtctactgtttctccggttgtttcagcgacgacgactacgacgggagagaagaagttccgaggagtgagacagcgtccatggggaaaatgggcggcggagataagagatccgttgaaacgtgtacggctctggttaggtacttacaacacggcggaagaagctgctatggtttacgataacgccgctattcagcttcgtggtcccgacgctctgactaatttctcagtcactccgacaacagcgacggagaagaaagccccaccaccgtctccggtgaagaagaagaagaagaaaaacaacaaaagcaaaaaatccgttactgcttcttcctccatcagcagaagcagcagcaacgattgtctctgctctccggtgtctgttctccgatctcctttcgccgtcgacgaattctccggcatttcttcatcaccagtcgcggccgttgtagtcaaggaagagccatccatgacaacggtatctgaaactttctctgatttctcggcgcccttgttctcagatgatgacgtgttcgatttccggagctcagtggttcccgactatctcggcggcgatttatttggggaagatctattcacggcggatatgtgtacggatatgaacttcggattcgatttcggatccggattatccagctggcacatggaggaccattttcaagatatcggggatctattcgggtcggatcctcttttagctgtttaataatattttaaataaataaatagttataccggccgttactaaacggaaccggagaaagttttgtataccggtgacataaaatctcggttatgttcgtaatctttttttctttgttatatataaaaatatgaatgaaactgaattaatgtaagttaatggtgataattattaacgttttaagttttgaaaaataattttcgtctgttaacgataatgggaggtcgagtttctttttgcttc

SEQ ID NO: 49174 - protein, 343 aa, Arabidopsis thaliana
  peptide (1)..(343): Ceres Seq. ID no. 12578036
MEAEKKMVLPRIKFTEHKTNTTTIVSELTNTHQTRILRISVTDPDATDSSSDDEEEEHQRFVSKRRRVKKFVNEVYLDSGAVVTGSCGQMESKKRQKRAVKSESTVSPVVSATTTTTGEKKFRGVRQRPWGKWAAEIRDPLKRVRLWLGTYNTAEEAAMVYDNAAIQLRGPDALTNFSVTPTTATEKKAPPPSPVKKKKKKNNKSKKSVTASSSISRSSSNDCLCSPVSVLRSPFAVDEFSGISSSPVAAVVVKEEPSMTTVSETFSDFSAPLFSDDDVFDFRSSVVPDYLGGDLFGEDLFTADMCTDMNFGFDFGSGLSSWHMEDHFQDIGDLFGSDPLLAV

SEQ ID NO: 49175 - protein, 337 aa, Arabidopsis thaliana
  peptide (1)..(337): Ceres Seq. ID no. 12578037
MVLPRIKFTEHKTNTTTIVSELTNTHQTRILRISVTDPDATDSSSDDEEEEHQRFVSKRRRVKKFVNEVYLDSGAVVTGSCGQMESKKRQKRAVKSESTVSPVVSATTTTTGEKKFRGVRQRPWGKWAAEIRDPLKRVRLWLGTYNTAEEAAMVYDNAAIQLRGPDALTNFSVTPTTATEKKAPPPSPVKKKKKKNNKSKKSVTASSSISRSSSNDCLCSPVSVLRSPFAVDEFSGISSSPVAAVVVKEEPSMTTVSETFSDFSAPLFSDDDVFDFRSSVVPDYLGGDLFGEDLFTADMCTDMNFGFDFGSGLSSWHMEDHFQDIGDLFGSDPLLAV

SEQ ID NO: 49176 - protein, 254 aa, Arabidopsis thaliana
  peptide (1)..(254): Ceres Seq. ID no. 12578038
MESKKRQKRAVKSESTVSPVVSATTTTTGEKKFRGVRQRPWGKWAAEIRDPLKRVRLWLGTYNTAEEAAMVYDNAAIQLRGPDALTNFSVTPTTATEKKAPPPSPVKKKKKKNNKSKKSVTASSSISRSSSNDCLCSPVSVLRSPFAVDEFSGISSSPVAAVVVKEEPSMTTVSETFSDFSAPLFSDDDVFDFRSSVVPDYLGGDLFGEDLFTADMCTDMNFGFDFGSGLSSWHMEDHFQDIGDLFGSDPLLAV

SEQ ID NO: 49177 - DNA, 1492 bp, Arabidopsis thaliana
  misc_feature (1)..(1492): Ceres Seq. ID no. 12578039
  misc_feature (1)..(1492): Ortholog of  Ceres SEQ ID NO 14311934 as cited in SEQ ID NO 51605
actcacacctcgtctcctaatctgtacggttcttatttcgaaagggtaaaaaccaaaagcgacgcaaagggcaaaatcggaaaaagtgttttatttatggccgccgttagtagttcgtcggagaccggagactgcggcgttacgggaaagagagatgagatcatgttgttcggagttagagtcgtggttgatccgatgagaaagtgtgtgagtttgaacaatctctctgattatgaaaagtcttctccggaggatgagatccctaagatagtcaccgccggagctggagatggtgaagataagaacgaaacggatgcgacggtgattgtcgctgacggttacgcctccgccaatgacgctgtccagatttcgtcttcttccggcgggaggaaacgaggggttccatggacagagaacgagcataagaggttcttgattgggttgcagaaagtaggaaaaggagattggaaaggaatatcaagaaactttgtgaagagtaggactcctactcaagtagctagtcatgctcagaaatacttcctccgacgaaccaacctcaaccgtcgccgaagaagatctagcctttttgatatcactactgagacggttacagaaatggccatggagcaagatcctactcaggagaactcaccactacctgaaaccaacatcagctctggacagcaagcgatgcaagtttttactgacgtgccgacaaaaactgagaatgcaccagagacatttcatctcaacgatccatatctggttccagtaaccttccaagcaaagccaacattcaatctaaacacagatgctgctccactttctctcaacctttgtctggcatcctcatttaatcttaacgagcaacccaactcaagacactcggctttcacgatgatgccaagcttcagcgatggagatagcaatagcagcatcatcagagttgcttagagcttaaacccaaggtgaatctacaagaccttgtttctttctttgtttctctgttgttgtagtactagtagtacatattaggtataaacagataagaaaaaagaaccctattaagtctcagtcctgtttttgatctttctttaggccttactttgtcaaacttttatgtattttgtctgaaaatataatcaggggaaaaaaaaaacagaacaaaaacagaggaaggctatagagattgatggacaaactgtgtctagggtgcttcatcatctttgtttgtttgtaaaactcttgtcacacacactgttatgagtcattttctgctgtgtgtgttttgttttgtggtgatgtaagttaaaaacaagcgtgattctcatgtggcccatctcaatcaatggttggtgatttgtggggtttttaggcttttctattatcttatcttttggggataagataaaagcctaaaactgtatgtaactatgtatggttcttcgaatattttatcatttatctctaatgtcataataatgttgccaat

SEQ ID NO: 49178 - protein, 317 aa, Arabidopsis thaliana
  peptide (1)..(317): Ceres Seq. ID no. 12578040
THTSSPNLYGSYFERVKTKSDAKGKIGKSVLFMAAVSSSSETGDCGVTGKRDEIMLFGVRVVVDPMRKCVSLNNLSDYEKSSPEDEIPKIVTAGAGDGEDKNETDATVIVADGYASANDAVQISSSSGGRKRGVPWTENEHKRFLIGLQKVGKGDWKGISRNFVKSRTPTQVASHAQKYFLRRTNLNRRRRRSSLFDITTETVTEMAMEQDPTQENSPLPETNISSGQQAMQVFTDVPTKTENAPETFHLNDPYLVPVTFQAKPTFNLNTDAAPLSLNLCLASSFNLNEQPNSRHSAFTMMPSFSDGDSNSSIIRVA

SEQ ID NO: 49179 - protein, 285 aa, Arabidopsis thaliana
  peptide (1)..(285): Ceres Seq. ID no. 12578041
MAAVSSSSETGDCGVTGKRDEIMLFGVRVVVDPMRKCVSLNNLSDYEKSSPEDEIPKIVTAGAGDGEDKNETDATVIVADGYASANDAVQISSSSGGRKRGVPWTENEHKRFLIGLQKVGKGDWKGISRNFVKSRTPTQVASHAQKYFLRRTNLNRRRRRSSLFDITTETVTEMAMEQDPTQENSPLPETNISSGQQAMQVFTDVPTKTENAPETFHLNDPYLVPVTFQAKPTFNLNTDAAPLSLNLCLASSFNLNEQPNSRHSAFTMMPSFSDGDSNSSIIRVA

SEQ ID NO: 49180 - protein, 263 aa, Arabidopsis thaliana
  peptide (1)..(263): Ceres Seq. ID no. 12578042
MLFGVRVVVDPMRKCVSLNNLSDYEKSSPEDEIPKIVTAGAGDGEDKNETDATVIVADGYASANDAVQISSSSGGRKRGVPWTENEHKRFLIGLQKVGKGDWKGISRNFVKSRTPTQVASHAQKYFLRRTNLNRRRRRSSLFDITTETVTEMAMEQDPTQENSPLPETNISSGQQAMQVFTDVPTKTENAPETFHLNDPYLVPVTFQAKPTFNLNTDAAPLSLNLCLASSFNLNEQPNSRHSAFTMMPSFSDGDSNSSIIRVA

SEQ ID NO: 49181 - DNA, 1770 bp, Arabidopsis thaliana
  misc_feature (1)..(1770): Ceres Seq. ID no. 12601427
  misc_feature (1)..(1770): Ortholog of  Ceres SEQ ID NO 13579556 as cited in SEQ ID NO 53743
atccttttttttgttttccttctccggcgaatccccggggagattggtaatcggtaatcacggctatttacgggataaagccacggcctttgagctttcatgtccaacgaaagggttgtttaatcataactaatcctttgcctcacggaggacgtggagctctgccgtctgaaggcggcagtccctccgatctcctcttcctcgccggaggcggttccacaaatagccactaaccctaaccctttttctaattaggtttttagttcttagagtcctgtattaatctgttatttcgagattataatatttgtgagcaatgttgttgaagatcaaaagagttccaacagttgtatcgaattatcaaaaagatgagacagttgaagaaggtggatgtggtcggaattgtctgagcaagtgttgcatcaatggggcaagacttcctttatatacctgcaagaatcttgataaatccgtcggagagaacacagaatctccggtgacgttcctcgaatccttagttattggagagtgggaagatcgtttccaaagaggtctttttcgctatgatgtcaccgcctgcgaaaccaaggttataccggggaagtacggtttcattgcgcagctgaatgaaggtcggcatctcaagaagagaccaaccgagttccgtgttgacaaagttcttcaaccatttgatggaaacaaattcaatttcactaaagttggtcaagaagagttgcttttccagtttaaagctagcactaatgatgatgatagtgaaattcagttcttggcgagtatgcctctagacgctgataattctcctagcgtcgttgcaatcaatgtgagtccgattgagtatgggcatgtgttgctgattcctcgtgttcttgattgcttacctcaaaggattgatcacaaaagccttttgcttgctcttcaaatggcggctgaagccgataatccgtatttccgacttggatacaacagtctaggcgctttcgctaccattaaccatcttcactttcaggcttactatttggcaatgcaattcccgatagagaaagcttcttccttgaagatcactaccaccaataatggcgtcaaaatctctaaactcttgaattaccctgtgagaggtcttctagttgaaggtggaaacaccattaaagatctcgcagatactgtatcagacgcatccgtttgtcttcagaacaacaacattcctttcaacattctcatctctgactctggcaaacgaatcttccttctccctcagtgttacgcagagaaacaggctttaggagaagttagctcaacgctattggatacgcaagtgaatccagcggtttgggagatgagtggacacatggtgttgaagaggaaagaagactatgaaggagcgtcagaagagaaggcatggaggttactagctgaagtttctttatcagaggagagattcagagaagttaacactatgatatttgatgccatcggttttagtagtcacgaagaagaagaagaagaggagcttgaagagcagaattcgatgaatggtggcagcttcacaatagtgcattgtccttcagtgaaagaagaggctgtctctaattgaggcgctttataactaaaagcaaaaacataactgtcgtcgtgattttgcataacttgtgtttgacattttactgttttgtagtttttttcttttcttcttggctttgttacgtctttgttcgaaccttttgaatcaataaaatcgaaatcgcctaattc

SEQ ID NO: 49182 - protein, 431 aa, Arabidopsis thaliana
  peptide (1)..(431): Ceres Seq. ID no. 12601428
MLLKIKRVPTVVSNYQKDETVEEGGCGRNCLSKCCINGARLPLYTCKNLDKSVGENTESPVTFLESLVIGEWEDRFQRGLFRYDVTACETKVIPGKYGFIAQLNEGRHLKKRPTEFRVDKVLQPFDGNKFNFTKVGQEELLFQFKASTNDDDSEIQFLASMPLDADNSPSVVAINVSPIEYGHVLLIPRVLDCLPQRIDHKSLLLALQMAAEADNPYFRLGYNSLGAFATINHLHFQAYYLAMQFPIEKASSLKITTTNNGVKISKLLNYPVRGLLVEGGNTIKDLADTVSDASVCLQNNNIPFNILISDSGKRIFLLPQCYAEKQALGEVSSTLLDTQVNPAVWEMSGHMVLKRKEDYEGASEEKAWRLLAEVSLSEERFREVNTMIFDAIGFSSHEEEEEEELEEQNSMNGGSFTIVHCPSVKEEAVSN

SEQ ID NO: 49183 - protein, 271 aa, Arabidopsis thaliana
  peptide (1)..(271): Ceres Seq. ID no. 12601429
MPLDADNSPSVVAINVSPIEYGHVLLIPRVLDCLPQRIDHKSLLLALQMAAEADNPYFRLGYNSLGAFATINHLHFQAYYLAMQFPIEKASSLKITTTNNGVKISKLLNYPVRGLLVEGGNTIKDLADTVSDASVCLQNNNIPFNILISDSGKRIFLLPQCYAEKQALGEVSSTLLDTQVNPAVWEMSGHMVLKRKEDYEGASEEKAWRLLAEVSLSEERFREVNTMIFDAIGFSSHEEEEEEELEEQNSMNGGSFTIVHCPSVKEEAVSN

SEQ ID NO: 49184 - protein, 223 aa, Arabidopsis thaliana
  peptide (1)..(223): Ceres Seq. ID no. 12601430
MAAEADNPYFRLGYNSLGAFATINHLHFQAYYLAMQFPIEKASSLKITTTNNGVKISKLLNYPVRGLLVEGGNTIKDLADTVSDASVCLQNNNIPFNILISDSGKRIFLLPQCYAEKQALGEVSSTLLDTQVNPAVWEMSGHMVLKRKEDYEGASEEKAWRLLAEVSLSEERFREVNTMIFDAIGFSSHEEEEEEELEEQNSMNGGSFTIVHCPSVKEEAVSN

SEQ ID NO: 49185 - DNA, 1586 bp, Arabidopsis thaliana
  misc_feature (1)..(1586): Ceres Seq. ID no. 12578202
  misc_feature (1)..(1586): Ortholog of  Ceres SEQ ID NO 13597407 as cited in SEQ ID NO 64106
gttgtatcattacatgcatgcataaaatgatggtggtggagaaagaaagaagcatagaagaaaggcttttgcagctcaagaaccaaaacgacgattcagaatgtcgtattactgcttgtgttatccttagtactttcatcgctgtgtgtggttctttctcctttggtgtctctcttggttatacttcaggtgcagagataggaattatgaaggacttggatctttctatcgcgcaattttcagcatttgcttcattatccactttgggagctgcaattggagctttgtttagcggtaaaatggcgatcatccttggcagaagaaaaacaatgtgggtgtccgatctcctctgtatcattggttggttctccatcgctttcgctaaggatgtgatgtggttgaacttcggaagaatctcctcagggataggactcggcttaattagctatgtggtacctgtctatatagcagaaatttcaccaaaacatgttcgtggtacatttacctttacaaatcagctccttcaaaactctggactcgcaatggtttatttttctgggaattttctcaactggaggatattggctttattaggtgctttaccatgcttcattcaagtaatcggtttattcttcgtaccagagtccccaagatggctggcaaaagttggctccgataaagaactagaaaattcacttcttcgtcttagggggggaaatgctgatatttcacgtgaagcctcagacattgaagttatgaccaaaatggtagaaaatgattcaaagtcgagtttttgtgatttgttccagagaaaatatagatacactctcgtggtaggaatcgggctaatgttgatacaacaattttcaggaagttctgcagtgctctcatatgccagtaccattttacggaaagcaggtttttcggtgaccattggatcgacgctactaggtctcttcatgataccaaaagccatgattggtgtcattcttgtcgataaatggggcagacggcctctcttgttgacttctgtatctgggatgtgcataacttccatgcttattggagtcgccttcacattacagaaaatgcaattgctaccggagctaacaccagtattcacgtttatatgcgttacgctgtatattggaacttatgctataggcttgggaggccttccttgggtaattatgtctgagatatttccaatgaatataaaagtaactgcaggaagtatagtaacgttagtatcatggtcaagtagttcgatcgtcacttatgctttcaactttctgctcgagtggagcactcaaggaacattttacgtatttggagcagtcggaggactagcattgctttttatttggttgctcgttccggaaacgaaaggattatcacttgaagaaatacaagcttcgcttattcgtgagcccgatagaataaatcaaagttagattgaaacgtttaagttttattttaatagataaataattaaaatcaatttatgatactgtgctaagaaagtaattttttttttcattatgtaatcactatttaatttttctaatacttagaattttttatgt

SEQ ID NO: 49186 - protein, 483 aa, Arabidopsis thaliana
  peptide (1)..(483): Ceres Seq. ID no. 12578203
CIITCMHKMMVVEKERSIEERLLQLKNQNDDSECRITACVILSTFIAVCGSFSFGVSLGYTSGAEIGIMKDLDLSIAQFSAFASLSTLGAAIGALFSGKMAIILGRRKTMWVSDLLCIIGWFSIAFAKDVMWLNFGRISSGIGLGLISYVVPVYIAEISPKHVRGTFTFTNQLLQNSGLAMVYFSGNFLNWRILALLGALPCFIQVIGLFFVPESPRWLAKVGSDKELENSLLRLRGGNADISREASDIEVMTKMVENDSKSSFCDLFQRKYRYTLVVGIGLMLIQQFSGSSAVLSYASTILRKAGFSVTIGSTLLGLFMIPKAMIGVILVDKWGRRPLLLTSVSGMCITSMLIGVAFTLQKMQLLPELTPVFTFICVTLYIGTYAIGLGGLPWVIMSEIFPMNIKVTAGSIVTLVSWSSSSIVTYAFNFLLEWSTQGTFYVFGAVGGLALLFIWLLVPETKGLSLEEIQASLIREPDRINQS

SEQ ID NO: 49187 - protein, 478 aa, Arabidopsis thaliana
  peptide (1)..(478): Ceres Seq. ID no. 12578204
MHKMMVVEKERSIEERLLQLKNQNDDSECRITACVILSTFIAVCGSFSFGVSLGYTSGAEIGIMKDLDLSIAQFSAFASLSTLGAAIGALFSGKMAIILGRRKTMWVSDLLCIIGWFSIAFAKDVMWLNFGRISSGIGLGLISYVVPVYIAEISPKHVRGTFTFTNQLLQNSGLAMVYFSGNFLNWRILALLGALPCFIQVIGLFFVPESPRWLAKVGSDKELENSLLRLRGGNADISREASDIEVMTKMVENDSKSSFCDLFQRKYRYTLVVGIGLMLIQQFSGSSAVLSYASTILRKAGFSVTIGSTLLGLFMIPKAMIGVILVDKWGRRPLLLTSVSGMCITSMLIGVAFTLQKMQLLPELTPVFTFICVTLYIGTYAIGLGGLPWVIMSEIFPMNIKVTAGSIVTLVSWSSSSIVTYAFNFLLEWSTQGTFYVFGAVGGLALLFIWLLVPETKGLSLEEIQASLIREPDRINQS

SEQ ID NO: 49188 - protein, 475 aa, Arabidopsis thaliana
  peptide (1)..(475): Ceres Seq. ID no. 12578205
MMVVEKERSIEERLLQLKNQNDDSECRITACVILSTFIAVCGSFSFGVSLGYTSGAEIGIMKDLDLSIAQFSAFASLSTLGAAIGALFSGKMAIILGRRKTMWVSDLLCIIGWFSIAFAKDVMWLNFGRISSGIGLGLISYVVPVYIAEISPKHVRGTFTFTNQLLQNSGLAMVYFSGNFLNWRILALLGALPCFIQVIGLFFVPESPRWLAKVGSDKELENSLLRLRGGNADISREASDIEVMTKMVENDSKSSFCDLFQRKYRYTLVVGIGLMLIQQFSGSSAVLSYASTILRKAGFSVTIGSTLLGLFMIPKAMIGVILVDKWGRRPLLLTSVSGMCITSMLIGVAFTLQKMQLLPELTPVFTFICVTLYIGTYAIGLGGLPWVIMSEIFPMNIKVTAGSIVTLVSWSSSSIVTYAFNFLLEWSTQGTFYVFGAVGGLALLFIWLLVPETKGLSLEEIQASLIREPDRINQS

SEQ ID NO: 49189 - DNA, 1202 bp, Arabidopsis thaliana
  misc_feature (1)..(1202): Ceres Seq. ID no. 12578046
  misc_feature (1)..(1202): Ortholog of  Ceres SEQ ID NO 14307265 as cited in SEQ ID NO 54298
acgacttaccttgcgggaatcacgcgaccaattgattcttcttctcacaagcagttggcgttaactcttgtttatctaccagttgaaagatgttttacgatggatacgcttatcatggaactacctttgagcagacttaccggtgttatccctcatcctttattgataagcctcaaattgaaagtggtgacaagattataatgccaccatcagcccttgatcgtctagcttctttgcagattgattatccaatgctctttgaacttcgtaatgcttcaacagatagtttttctcactgcggagtccttgagttcatcgcagaagaaggcgtgatttacattccctactggatgatgcagaatttgctgttgcaagaaggagacatggtgagagttagaaatgtcactcttccaaagggaacctacgtgaaactgcaaccccacacaacagactttctcgatatagctaacccgaaagccatcttggagaccgcattgaggaactattcatgtctaacggtcggagatagcattatggtcccatacaacaataagaaatacttcatagacatagtggaggcaaagccttctaatggtattagcatcattgaaactgattgcgaggttgatttcgcacctccccttgattacaaggaacccgaacgacctgtagcacctgctccagccaaagctaaggaggttgatgtggctgaagcagaaccaaagtttaaccctttcacgggttcgggaagacgtttggatggacgacctttatcctatgaaccgcaacctggtgctgctaacagtaacggccaatcacatcctgttgcaagtagtagtagtagtgggtcagagaaggctacgcaacaaaatcgagggaaacttgtgttcggttcaaatgtagagcggtctactaaagagacaacaaaggttggagctgggaaagatagaaagcaagaggaagaggctgagaaggaagccaagttccaagcttttagtggtaaaaaatattcattgaggggttgaaccaaccaatgtgtggaaccaatctctcgtcttatttatgattttactcttgtgcttatgtattatctatggaattaaacgtttaaaggaagaaaaaaaacacaaataaattcaagaaaaaaagaagaagatgatgtatgtgattcatcatcattaattttagagtgggatttattt

SEQ ID NO: 49190 - protein, 311 aa, Arabidopsis thaliana
  peptide (1)..(311): Ceres Seq. ID no. 12578047
MFYDGYAYHGTTFEQTYRCYPSSFIDKPQIESGDKIIMPPSALDRLASLQIDYPMLFELRNASTDSFSHCGVLEFIAEEGVIYIPYWMMQNLLLQEGDMVRVRNVTLPKGTYVKLQPHTTDFLDIANPKAILETALRNYSCLTVGDSIMVPYNNKKYFIDIVEAKPSNGISIIETDCEVDFAPPLDYKEPERPVAPAPAKAKEVDVAEAEPKFNPFTGSGRRLDGRPLSYEPQPGAANSNGQSHPVASSSSSGSEKATQQNRGKLVFGSNVERSTKETTKVGAGKDRKQEEEAEKEAKFQAFSGKKYSLRG

SEQ ID NO: 49191 - protein, 274 aa, Arabidopsis thaliana
  peptide (1)..(274): Ceres Seq. ID no. 12578048
MPPSALDRLASLQIDYPMLFELRNASTDSFSHCGVLEFIAEEGVIYIPYWMMQNLLLQEGDMVRVRNVTLPKGTYVKLQPHTTDFLDIANPKAILETALRNYSCLTVGDSIMVPYNNKKYFIDIVEAKPSNGISIIETDCEVDFAPPLDYKEPERPVAPAPAKAKEVDVAEAEPKFNPFTGSGRRLDGRPLSYEPQPGAANSNGQSHPVASSSSSGSEKATQQNRGKLVFGSNVERSTKETTKVGAGKDRKQEEEAEKEAKFQAFSGKKYSLRG

SEQ ID NO: 49192 - protein, 257 aa, Arabidopsis thaliana
  peptide (1)..(257): Ceres Seq. ID no. 12578049
MLFELRNASTDSFSHCGVLEFIAEEGVIYIPYWMMQNLLLQEGDMVRVRNVTLPKGTYVKLQPHTTDFLDIANPKAILETALRNYSCLTVGDSIMVPYNNKKYFIDIVEAKPSNGISIIETDCEVDFAPPLDYKEPERPVAPAPAKAKEVDVAEAEPKFNPFTGSGRRLDGRPLSYEPQPGAANSNGQSHPVASSSSSGSEKATQQNRGKLVFGSNVERSTKETTKVGAGKDRKQEEEAEKEAKFQAFSGKKYSLRG

SEQ ID NO: 49193 - DNA, 1657 bp, Arabidopsis thaliana
  misc_feature (1)..(1657): Ceres Seq. ID no. 12578206
  misc_feature (1)..(1657): Ortholog of  Ceres SEQ ID NO 15174752 as cited in SEQ ID NO 53279
  misc_feature (1)..(1657): Ortholog of  Ceres SEQ ID NO 14308389 as cited in SEQ ID NO 55226
  misc_feature (1)..(1657): Ortholog of  Ceres SEQ ID NO 15177652 as cited in SEQ ID NO 56858
  misc_feature (1)..(1657): Ortholog of  Ceres SEQ ID NO 15226087 as cited in SEQ ID NO 58655
  misc_feature (1)..(1657): Ortholog of  Ceres SEQ ID NO 13662197 as cited in SEQ ID NO 63622
  misc_feature (1)..(1657): Ortholog of  Ceres SEQ ID NO 13597162 as cited in SEQ ID NO 63955
  misc_feature (1)..(1657): Ortholog of  Ceres SEQ ID NO 14308049 as cited in SEQ ID NO 66203
  misc_feature (1)..(1657): Ortholog of  Ceres SEQ ID NO 14313292 as cited in SEQ ID NO 67393
  misc_feature (1)..(1657): Ortholog of  Ceres SEQ ID NO 14313567 as cited in SEQ ID NO 68074
atactaacattcatcccaaaagttccattctttttcacaaagccattgtgctgttttctccatttggatcaaaatggttgctgagaacaataaaaacaaggacgtaacactctctgcatcaatggacaacaacaacaacaacatcaaaggaactaacattcatcttgaggttcatcaaaaggaaccagctttggtcaaacctgaatccgagacacgaaagggcctttacttcttgtcgaatcttgaccagaacatcgccgtgattgttcgtacaatctactgtttcaaatccgaggagagagggaacgaggaagcagtccaagtgatcaagaaagctctgagtcaagttcttgttcattactatcctctcgctggacgcctcaccatcagtcctgaaggtaaactcacagttgactgtaccgaagaaggagttgtgtttgtggaagcagaagcaaactgtaaaatggatgagattggtgacattaccaaacccgatcctgaaactctagggaagcttgtgtacgatgtcgtagacgccaagaacattcttgagatccctcctgttaccgctcaggtgactaaattcaaatgtggagggtttgttctcggactctgtatgaatcactgtatgttcgatggaattggagctatggagtttgttaactcatggggtcaagtcgctagaggcttaccattaacaactcccccattctcagacagaaccattctcaatgctcgaaaccctccaaagatcgagaatctccaccaagaatttgaagagatcgaagataaatccaacatcaactctctttacaccaaagagccaactctctacagatccttctgctttgatccagagaaaatcaagaaacttaagctccaagcaacagagaacagtgagtctctcctcggtaactcatgcacaagttttgaggctttatctgcttttgtctggagagcaagaaccaagtcgttgaagatgttgagtgatcagaaaacgaagcttctcttcgccgttgatggtagagccaagttcgagcctcaactgccaaaagggtacttcggaaatggaattgttctcacaaactccatctgtgaagctggggagcttatcgaaaaaccgttgagtttcgcggtgggattagtcagagaagccattaagatggtaactgatgggtacatgagatctgctattgattacttcgaagtcacgagagcaagaccttctctttcctcgactcttctgatcactacatggtcaagattgggtttccacacgacagatttcggttggggagaaccgattttatccggtccagtagctttgcctgagaaagaagtaactctgtttttgtctcatggagaacagaggagaagcatcaatgtgcttcttggacttcccgctacagccatggatgtgtttcaagaacagtttttacagatataatatgaacaacgacaaaatacaaatatctggcaattattgtcaaaacctattcgttttactctgtttttcttgcttccttttttttttatctttttgatttatgctgaattattattgttatcttcatcttaaacttgtctgtatcttgcatcaagtttcaaccataaatttatattatttcaaactatattgtaataatattattacttg

SEQ ID NO: 49194 - protein, 457 aa, Arabidopsis thaliana
  peptide (1)..(457): Ceres Seq. ID no. 12578207
MVAENNKNKDVTLSASMDNNNNNIKGTNIHLEVHQKEPALVKPESETRKGLYFLSNLDQNIAVIVRTIYCFKSEERGNEEAVQVIKKALSQVLVHYYPLAGRLTISPEGKLTVDCTEEGVVFVEAEANCKMDEIGDITKPDPETLGKLVYDVVDAKNILEIPPVTAQVTKFKCGGFVLGLCMNHCMFDGIGAMEFVNSWGQVARGLPLTTPPFSDRTILNARNPPKIENLHQEFEEIEDKSNINSLYTKEPTLYRSFCFDPEKIKKLKLQATENSESLLGNSCTSFEALSAFVWRARTKSLKMLSDQKTKLLFAVDGRAKFEPQLPKGYFGNGIVLTNSICEAGELIEKPLSFAVGLVREAIKMVTDGYMRSAIDYFEVTRARPSLSSTLLITTWSRLGFHTTDFGWGEPILSGPVALPEKEVTLFLSHGEQRRSINVLLGLPATAMDVFQEQFLQI

SEQ ID NO: 49195 - protein, 441 aa, Arabidopsis thaliana
  peptide (1)..(441): Ceres Seq. ID no. 12578208
MDNNNNNIKGTNIHLEVHQKEPALVKPESETRKGLYFLSNLDQNIAVIVRTIYCFKSEERGNEEAVQVIKKALSQVLVHYYPLAGRLTISPEGKLTVDCTEEGVVFVEAEANCKMDEIGDITKPDPETLGKLVYDVVDAKNILEIPPVTAQVTKFKCGGFVLGLCMNHCMFDGIGAMEFVNSWGQVARGLPLTTPPFSDRTILNARNPPKIENLHQEFEEIEDKSNINSLYTKEPTLYRSFCFDPEKIKKLKLQATENSESLLGNSCTSFEALSAFVWRARTKSLKMLSDQKTKLLFAVDGRAKFEPQLPKGYFGNGIVLTNSICEAGELIEKPLSFAVGLVREAIKMVTDGYMRSAIDYFEVTRARPSLSSTLLITTWSRLGFHTTDFGWGEPILSGPVALPEKEVTLFLSHGEQRRSINVLLGLPATAMDVFQEQFLQI

SEQ ID NO: 49196 - protein, 327 aa, Arabidopsis thaliana
  peptide (1)..(327): Ceres Seq. ID no. 12578209
MDEIGDITKPDPETLGKLVYDVVDAKNILEIPPVTAQVTKFKCGGFVLGLCMNHCMFDGIGAMEFVNSWGQVARGLPLTTPPFSDRTILNARNPPKIENLHQEFEEIEDKSNINSLYTKEPTLYRSFCFDPEKIKKLKLQATENSESLLGNSCTSFEALSAFVWRARTKSLKMLSDQKTKLLFAVDGRAKFEPQLPKGYFGNGIVLTNSICEAGELIEKPLSFAVGLVREAIKMVTDGYMRSAIDYFEVTRARPSLSSTLLITTWSRLGFHTTDFGWGEPILSGPVALPEKEVTLFLSHGEQRRSINVLLGLPATAMDVFQEQFLQI

SEQ ID NO: 49197 - DNA, 2820 bp, Arabidopsis thaliana
  misc_feature (1)..(2820): Ceres Seq. ID no. 13592072
  misc_feature (1)..(2820): Ortholog of  Ceres SEQ ID NO 12586556 as cited in SEQ ID NO 64667
  misc_feature (1)..(2820): Ortholog of  Ceres SEQ ID NO 13660894 as cited in SEQ ID NO 67475
  misc_feature (1)..(2820): Ortholog of  Ceres SEQ ID NO 15177486 as cited in SEQ ID NO 0
atgctccatctcttcctcttctcctccgccgcctccaccaccaccgccgtagaagacaattccaccaccatgcccccttcttctagatccgccgctaatcaaaactcctcctcttctctccatctctgcaaacattcaccgtcggcgactctcgacctcttaatcctaatcctcgtcctcttctccggcacattcctcctctcctcttacttctcataccttatccactccttatctctcctctcctctcatttcccttcaatcaccatctccctctcctctctcctccctcctctaatcatcttcttctcctccgatcacagcaccgaagatgaagatcatcatcatccctcaggaaaaatccctcctccggcttcgttcttcttcgcattcgcagtttttttcgcggcttcaattgcgtttctcgacctgtgttgtggttcaagatcaaggaaatgtcgtaaccctaagtgtaaaggaatgaagaaagctatggagtttgatttgcagttacagacagaggaatgtgttaaatccggttcggttaaagagattgatcggttaccgtggaaaggaggtagtgagagtaatcctgattatgagtgtttgagagctgagctgaggaagatggctccggttaatggtcgagctgttttgattttccgatcaaaatgtggttgccctattgctaagcttgaaggttggggacctaagagaagtcggcgtcataaaaaatggaacttggtgactagtgaatttgtaggttctgtttatcctgttcttgcgacgtatttattgccattgatcattttgagaccagcgagatgcttctctgctccgagtcggacccacttcgatttctccggcgaaagctccgatactgaacgagctctcgtctctgctcttggatcgtgcgcttccagtaatgacgtcacttgtggtagacagattcattgccgtgtcttgaaatccggtcttgattctaatggatacatatgtaatagcgttcttaacatgtacgctaaatgccgtctcttggctgatgcggaatctgttttcagggatcacgcgaagcttgattctgcttcgttcaatattatggttgatgggtatgttagatctcgtagactttgggatgcgcttaagttgttcgacgtaatgcctgagagaagctgtgtctcgtatactactttgataaagggttatgctcaaaacaatcagtggagtgaagctatggagctttttagggagatgagaaatttgggaattatgctaaatgaagttactttagccactgttatatctgcttgctcacatttgggtgggatttgggattgtaggatgttgcagagtttggctattaaactcaagcttgaaggtcgtgtttttgtttcgacgaatttgctgcatatgtactgtctttgtttgtgtttgaaggatgctcggaagttgtttgatgaaatgcctgagagaaatttagttacttggaacgtgatgttaaatgggtactcaaaagctggacttattgaacaggctgaggaattgtttgatcagattactgagaaagatattgtctcgtggggtacaatgattgatgggtgtctccgaaagaatcagcttgacgaagctcttgtttactacaccgagatgctgcgctgtggaatgaagcctagtgaagttatgatggtggaccttctctcggcttcagctcgatcagttggtagctccaagggtttgcaacttcatggtaccattgtgaaaaggggttttgattgttatgatttcttacaagcaacgatcatacatttctacgctgtctctaatgacataaaactcgctcttcagcagtttgaagcgagtgttaaggaccacattgcgtcgagaaacgcgttgattgcaggatttgtgaagaatggaatggttgagcaggcaagagaagtatttgatcagactcatgataaagacatcttttcatggaacgctatgatatcgggttacgcgcaaagtctatcgcctcagttagctctacatctattccgcgaaatgatcagtagtagccaagtaaaaccagatgcaatcacaatggttagtgttttttctgcaatttcttctctaggatcgttggaagaagggaagagagcacatgattatctaaactttagcacgattcctcccaacgacaatctaaccgctgctataatcgacatgtacgccaaatgtggaagcatcgaaactgctctaaacattttccaccaaacaaagaacatttcttcttctacaatctctccctggaacgccatcatttgcggctcagcgacacatggccatgcaaaactagcgcttgatctctactccgatctccaatctctccccatcaaaccgaacagcatcacttttgtcggtgtcttgagcgcatgctgccatgcagggctagtggagttaggtaaaacgtatttcgaaagcatgaagagcgatcacgggatcgagccagacatcaaacattatggatgtatggttgatttattggggaaagctgggagattagaggaagctaaagaaatgatcaagaagatgcctgtaaaggctgatgtaatgatctgggggatgttattatcagcttcacgaactcacgggaacgtcgagatcgccgaacttgcggctactgagctagcagcgattgatccatctcatggaggatgcaaagttatgctttcgaacgtttatgcagacgcagggagatgggaagatgtagctttggttagagaagagatgcgaacgagagatgttgagtggtcacgtgccttcagtggtgttgtgtga

SEQ ID NO: 49198 - protein, 939 aa, Arabidopsis thaliana
  peptide (1)..(939): Ceres Seq. ID no. 13592073
MLHLFLFSSAASTTTAVEDNSTTMPPSSRSAANQNSSSSLHLCKHSPSATLDLLILILVLFSGTFLLSSYFSYLIHSLSLLSSHFPSITISLSSLLPPLIIFFSSDHSTEDEDHHHPSGKIPPPASFFFAFAVFFAASIAFLDLCCGSRSRKCRNPKCKGMKKAMEFDLQLQTEECVKSGSVKEIDRLPWKGGSESNPDYECLRAELRKMAPVNGRAVLIFRSKCGCPIAKLEGWGPKRSRRHKKWNLVTSEFVGSVYPVLATYLLPLIILRPARCFSAPSRTHFDFSGESSDTERALVSALGSCASSNDVTCGRQIHCRVLKSGLDSNGYICNSVLNMYAKCRLLADAESVFRDHAKLDSASFNIMVDGYVRSRRLWDALKLFDVMPERSCVSYTTLIKGYAQNNQWSEAMELFREMRNLGIMLNEVTLATVISACSHLGGIWDCRMLQSLAIKLKLEGRVFVSTNLLHMYCLCLCLKDARKLFDEMPERNLVTWNVMLNGYSKAGLIEQAEELFDQITEKDIVSWGTMIDGCLRKNQLDEALVYYTEMLRCGMKPSEVMMVDLLSASARSVGSSKGLQLHGTIVKRGFDCYDFLQATIIHFYAVSNDIKLALQQFEASVKDHIASRNALIAGFVKNGMVEQAREVFDQTHDKDIFSWNAMISGYAQSLSPQLALHLFREMISSSQVKPDAITMVSVFSAISSLGSLEEGKRAHDYLNFSTIPPNDNLTAAIIDMYAKCGSIETALNIFHQTKNISSSTISPWNAIICGSATHGHAKLALDLYSDLQSLPIKPNSITFVGVLSACCHAGLVELGKTYFESMKSDHGIEPDIKHYGCMVDLLGKAGRLEEAKEMIKKMPVKADVMIWGMLLSASRTHGNVEIAELAATELAAIDPSHGGCKVMLSNVYADAGRWEDVALVREEMRTRDVEWSRAFSGVV

SEQ ID NO: 49199 - protein, 916 aa, Arabidopsis thaliana
  peptide (1)..(916): Ceres Seq. ID no. 13592074
MPPSSRSAANQNSSSSLHLCKHSPSATLDLLILILVLFSGTFLLSSYFSYLIHSLSLLSSHFPSITISLSSLLPPLIIFFSSDHSTEDEDHHHPSGKIPPPASFFFAFAVFFAASIAFLDLCCGSRSRKCRNPKCKGMKKAMEFDLQLQTEECVKSGSVKEIDRLPWKGGSESNPDYECLRAELRKMAPVNGRAVLIFRSKCGCPIAKLEGWGPKRSRRHKKWNLVTSEFVGSVYPVLATYLLPLIILRPARCFSAPSRTHFDFSGESSDTERALVSALGSCASSNDVTCGRQIHCRVLKSGLDSNGYICNSVLNMYAKCRLLADAESVFRDHAKLDSASFNIMVDGYVRSRRLWDALKLFDVMPERSCVSYTTLIKGYAQNNQWSEAMELFREMRNLGIMLNEVTLATVISACSHLGGIWDCRMLQSLAIKLKLEGRVFVSTNLLHMYCLCLCLKDARKLFDEMPERNLVTWNVMLNGYSKAGLIEQAEELFDQITEKDIVSWGTMIDGCLRKNQLDEALVYYTEMLRCGMKPSEVMMVDLLSASARSVGSSKGLQLHGTIVKRGFDCYDFLQATIIHFYAVSNDIKLALQQFEASVKDHIASRNALIAGFVKNGMVEQAREVFDQTHDKDIFSWNAMISGYAQSLSPQLALHLFREMISSSQVKPDAITMVSVFSAISSLGSLEEGKRAHDYLNFSTIPPNDNLTAAIIDMYAKCGSIETALNIFHQTKNISSSTISPWNAIICGSATHGHAKLALDLYSDLQSLPIKPNSITFVGVLSACCHAGLVELGKTYFESMKSDHGIEPDIKHYGCMVDLLGKAGRLEEAKEMIKKMPVKADVMIWGMLLSASRTHGNVEIAELAATELAAIDPSHGGCKVMLSNVYADAGRWEDVALVREEMRTRDVEWSRAFSGVV

SEQ ID NO: 49200 - protein, 779 aa, Arabidopsis thaliana
  peptide (1)..(779): Ceres Seq. ID no. 13592075
MKKAMEFDLQLQTEECVKSGSVKEIDRLPWKGGSESNPDYECLRAELRKMAPVNGRAVLIFRSKCGCPIAKLEGWGPKRSRRHKKWNLVTSEFVGSVYPVLATYLLPLIILRPARCFSAPSRTHFDFSGESSDTERALVSALGSCASSNDVTCGRQIHCRVLKSGLDSNGYICNSVLNMYAKCRLLADAESVFRDHAKLDSASFNIMVDGYVRSRRLWDALKLFDVMPERSCVSYTTLIKGYAQNNQWSEAMELFREMRNLGIMLNEVTLATVISACSHLGGIWDCRMLQSLAIKLKLEGRVFVSTNLLHMYCLCLCLKDARKLFDEMPERNLVTWNVMLNGYSKAGLIEQAEELFDQITEKDIVSWGTMIDGCLRKNQLDEALVYYTEMLRCGMKPSEVMMVDLLSASARSVGSSKGLQLHGTIVKRGFDCYDFLQATIIHFYAVSNDIKLALQQFEASVKDHIASRNALIAGFVKNGMVEQAREVFDQTHDKDIFSWNAMISGYAQSLSPQLALHLFREMISSSQVKPDAITMVSVFSAISSLGSLEEGKRAHDYLNFSTIPPNDNLTAAIIDMYAKCGSIETALNIFHQTKNISSSTISPWNAIICGSATHGHAKLALDLYSDLQSLPIKPNSITFVGVLSACCHAGLVELGKTYFESMKSDHGIEPDIKHYGCMVDLLGKAGRLEEAKEMIKKMPVKADVMIWGMLLSASRTHGNVEIAELAATELAAIDPSHGGCKVMLSNVYADAGRWEDVALVREEMRTRDVEWSRAFSGVV

SEQ ID NO: 49201 - DNA, 1663 bp, Arabidopsis thaliana
  misc_feature (1)..(1663): Ceres Seq. ID no. 13647024
  misc_feature (1)..(1663): Ortholog of  Ceres SEQ ID NO 13595900 as cited in SEQ ID NO 69289
aaaacaacaaccctaaatccttatctctatccttgcgcttgatccagattcggttstgaytcggagctgccatggaacgtatcatcggcggcaagtacaagctcggacggaagattggcggtggttcctttggagagattttcctagctacgcacatcgataccttcgagattgtagctgttaagatcgagaacagtaaaacaaaacatcctcagcttctctatgaagctaagctatatagaactcttgaaggaggaagtggaattccgcgcataagatggtttggagttgatggaacagagaatgctttagtgatggatttgctcggtccaagtctcgaagatcttttcgtctactgtgggagaaaattttcaccaaagacggtcttgatgttggctgatcaaatgctaactagaatagaatatgtacattccaaaggatatctgcatagagatataaaaccagataactttctcatgggcctaggccgcaaagcgaatcaggtttatctaattgactttggactggccaaaagatatcgtgatgccaacaccaaccgccacatcccttatagggaaaacaagaatttaacaggaactgcacgatatgcaagttgcaatacacatcttggtattgagcaaggtagacgggatgacctagagtctcttggatatgtgcttctgtacttcttaagaggaagccttccatggcagggtcttaaggctgttgacaagaagcaaaagtatgacaaaatttgtgagaagaagatatcaactcctattgaggttctatgcaaaagccaccccgtggagtttgcttcatattttcattattgccacacactgacatttgatcaacgccctgattatggattcttgaagcggctttttcgtgatttattctcacgggaaggatatgagtttgactatatatatgactggactattataaagtatcagcaatcacagaaaactagaagtcagtctcaggccgttcctgggtctagtaatgctcgtgcaataccaatggacacaagcaatcatcgaggaggaactaagatttcacatgaagcccaagtctctgaccgtgtcagaccggctaatgccagtggtccaagcccacagattaataccgctgtagggaggagtctgggttttgatcaagtccacaagaatatgaacatgccatcatccacttcattatctcctgcgggtacctcaaaaagaaatgtcagacccgaaacctcaaattctgggtttgggagcgggaataaaaccggcggttggacttcaccattcatgtcaccggggaaatgatgcaaaaaaagttggagtatatcattcatctgatctgctgagcaagattatgtgtgcctttgggtctaaactgtgatttctgcagtgaaaagctctagactgaggttgaagatctgaatggagtttttccatgaacagcttactgtttgacaaaaggcatgaagattatgtttgctttccttcaagattctcacaaatgactgacttcaacctttgtataaaatcttgcaaccgggcgtgtaatttggttcttgtgattcattctcccaagttttcttctataaaactttgttcgtatttctgtacgtagttccctgtgttggggcataacctgggtttgctgtgtc

SEQ ID NO: 49202 - protein, 414 aa, Arabidopsis thaliana
  peptide (1)..(414): Ceres Seq. ID no. 15219128
MERIIGGKYKLGRKIGGGSFGEIFLATHIDTFEIVAVKIENSKTKHPQLLYEAKLYRTLEGGSGIPRIRWFGVDGTENALVMDLLGPSLEDLFVYCGRKFSPKTVLMLADQMLTRIEYVHSKGYLHRDIKPDNFLMGLGRKANQVYLIDFGLAKRYRDANTNRHIPYRENKNLTGTARYASCNTHLGIEQGRRDDLESLGYVLLYFLRGSLPWQGLKAVDKKQKYDKICEKKISTPIEVLCKSHPVEFASYFHYCHTLTFDQRPDYGFLKRLFRDLFSREGYEFDYIYDWTIIKYQQSQKTRSQSQAVPGSSNARAIPMDTSNHRGGTKISHEAQVSDRVRPANASGPSPQINTAVGRSLGFDQVHKNMNMPSSTSLSPAGTSKRNVRPETSNSGFGSGNKTGGWTSPFMSPGK

SEQ ID NO: 49203 - protein, 333 aa, Arabidopsis thaliana
  peptide (1)..(333): Ceres Seq. ID no. 15219129
MDLLGPSLEDLFVYCGRKFSPKTVLMLADQMLTRIEYVHSKGYLHRDIKPDNFLMGLGRKANQVYLIDFGLAKRYRDANTNRHIPYRENKNLTGTARYASCNTHLGIEQGRRDDLESLGYVLLYFLRGSLPWQGLKAVDKKQKYDKICEKKISTPIEVLCKSHPVEFASYFHYCHTLTFDQRPDYGFLKRLFRDLFSREGYEFDYIYDWTIIKYQQSQKTRSQSQAVPGSSNARAIPMDTSNHRGGTKISHEAQVSDRVRPANASGPSPQINTAVGRSLGFDQVHKNMNMPSSTSLSPAGTSKRNVRPETSNSGFGSGNKTGGWTSPFMSPGK

SEQ ID NO: 49204 - protein, 308 aa, Arabidopsis thaliana
  peptide (1)..(308): Ceres Seq. ID no. 15219130
MLADQMLTRIEYVHSKGYLHRDIKPDNFLMGLGRKANQVYLIDFGLAKRYRDANTNRHIPYRENKNLTGTARYASCNTHLGIEQGRRDDLESLGYVLLYFLRGSLPWQGLKAVDKKQKYDKICEKKISTPIEVLCKSHPVEFASYFHYCHTLTFDQRPDYGFLKRLFRDLFSREGYEFDYIYDWTIIKYQQSQKTRSQSQAVPGSSNARAIPMDTSNHRGGTKISHEAQVSDRVRPANASGPSPQINTAVGRSLGFDQVHKNMNMPSSTSLSPAGTSKRNVRPETSNSGFGSGNKTGGWTSPFMSPGK

SEQ ID NO: 49205 - DNA, 2463 bp, Arabidopsis thaliana; identical to SEQ ID NO: 36172
  misc_feature (1)..(2463): Ceres Seq. ID no. 12601343
  misc_feature (1)..(2463): Ortholog of  Ceres SEQ ID NO 12465083 as cited in SEQ ID NO 68239

SEQ ID NO: 49206 - protein, 718 aa, Arabidopsis thaliana; identical to SEQ ID NO: 36173
  peptide (1)..(718): Ceres Seq. ID no. 12601344

SEQ ID NO: 49207 - protein, 685 aa, Arabidopsis thaliana; identical to SEQ ID NO: 36174
  peptide (1)..(685): Ceres Seq. ID no. 12601345

SEQ ID NO: 49208 - protein, 662 aa, Arabidopsis thaliana; identical to SEQ ID NO: 36175
  peptide (1)..(662): Ceres Seq. ID no. 12601346

SEQ ID NO: 49209 - DNA, 1614 bp, Arabidopsis thaliana
  misc_feature (1)..(1614): Ceres Seq. ID no. 13647099
  misc_feature (1)..(1614): Ortholog of  Ceres SEQ ID NO 14314589 as cited in SEQ ID NO 52301
agcgagagattatgaaattgacttttggccaaaacgctaactttaatcgcaaaagtaagaaaatctagtaaaacagatgctgagagcaaaatctgcgatcttctgctatttccccatttgaaactccaccgttcaagccggtcactgctccaacggaccggcggaacaaggagacaaaaagatgggtgaatctccagatttcataagcgatctacctcaaagcattattgagaatatccttactcggctttcgattagagatgcaataagaacaagtgtattatctagcaaatggagatataaatggtctacactcactgatcttgtctttgatgagaaatgtgtttctccttctaatgaccgttgtgttgttgagactaatcttgtgagattcattactggagtgcttctccttcaccaaggacctatccacaagtttcagctctctacttctttcaaacaatgtcgtccagatattgatcagtggttgctttttctttcgaggaacgggattaaggagcttgttcttaagttaggtgaaggagaattcagggttcctgcatgtctctttaactgtttgaaattgacctgtttggagttatgtcattgtgagtttgatccgcctcagtatttcaaagggttttcgtatctgaagagtttaaaccttcaccagatccttgttgctcctgaggttattgaaagtctgatctcaggatgtccgcttctcgagttcctgtctttgtcttactttgacagtttggttttgagtatatcagctccgaatctcatgtacttgtatctagacggcgaattcaaagacattttcctcgagaatacgcccaagctagttgcaatatcggtttcaatgtacatgcatgaggatgttactgattttgagcagagttcggattataatctcgttaagttccttggtggtgtgccccttcttgagaagctcgtcggttatatctacttcacaaagtacttgagtataggagatgacccgggaaggcttccacttacttacatacatcttaaaactatagaactttaccaagtatgctttgaagatgccgatgaggtgctagttcttcttcgtttggtcactcactctcccaaccttaaagagctcaaagtttcggcttcaccagtccaaccatttcctcttgaagaagaaggttttgaccttttcgaaagagattacttcgactacaaactcccaagccttgaaagcgtgaagataacagacgcctctggcatcagatatgaattggaatttatcagattcttgctgggaacttcaccagttttggagacagtcactgtatcatcaagtttatcagataaagatgcgaaaatggatatggttatcgaattgctcaggtatccacgtgtctctcctcgagctcagctcctcttccttcaagactgaaatctgattccccttctccatctctctccctctctctctttctgttatcatgtctaaacatgttttggtgttgaatctgttggaggaaatatataattgtggaaagataacaaaactgttgaatctgcaggagtgaacttagttgaccaaagatagtaaaaaagagttactacttgtacttg

SEQ ID NO: 49210 - protein, 416 aa, Arabidopsis thaliana
  peptide (1)..(416): Ceres Seq. ID no. 13647100
MGESPDFISDLPQSIIENILTRLSIRDAIRTSVLSSKWRYKWSTLTDLVFDEKCVSPSNDRCVVETNLVRFITGVLLLHQGPIHKFQLSTSFKQCRPDIDQWLLFLSRNGIKELVLKLGEGEFRVPACLFNCLKLTCLELCHCEFDPPQYFKGFSYLKSLNLHQILVAPEVIESLISGCPLLEFLSLSYFDSLVLSISAPNLMYLYLDGEFKDIFLENTPKLVAISVSMYMHEDVTDFEQSSDYNLVKFLGGVPLLEKLVGYIYFTKYLSIGDDPGRLPLTYIHLKTIELYQVCFEDADEVLVLLRLVTHSPNLKELKVSASPVQPFPLEEEGFDLFERDYFDYKLPSLESVKITDASGIRYELEFIRFLLGTSPVLETVTVSSSLSDKDAKMDMVIELLRYPRVSPRAQLLFLQD

SEQ ID NO: 49211 - protein, 214 aa, Arabidopsis thaliana
  peptide (1)..(214): Ceres Seq. ID no. 13647101
MYLYLDGEFKDIFLENTPKLVAISVSMYMHEDVTDFEQSSDYNLVKFLGGVPLLEKLVGYIYFTKYLSIGDDPGRLPLTYIHLKTIELYQVCFEDADEVLVLLRLVTHSPNLKELKVSASPVQPFPLEEEGFDLFERDYFDYKLPSLESVKITDASGIRYELEFIRFLLGTSPVLETVTVSSSLSDKDAKMDMVIELLRYPRVSPRAQLLFLQD

SEQ ID NO: 49212 - DNA, 1426 bp, Arabidopsis thaliana; identical to SEQ ID NO: 41458
  misc_feature (1)..(1426): Ceres Seq. ID no. 12329714
  misc_feature (1)..(1426): Ortholog of  Ceres SEQ ID NO 15176596 as cited in SEQ ID NO 55168
  misc_feature (1)..(1426): Ortholog of  Ceres SEQ ID NO 14301576 as cited in SEQ ID NO 62362

SEQ ID NO: 49213 - protein, 360 aa, Arabidopsis thaliana; identical to SEQ ID NO: 41459
  peptide (1)..(360): Ceres Seq. ID no. 12329715

SEQ ID NO: 49214 - DNA, 1573 bp, Arabidopsis thaliana
  misc_feature (1)..(1573): Ceres Seq. ID no. 13600765
  misc_feature (1)..(1573): Ortholog of  Ceres SEQ ID NO 13597407 as cited in SEQ ID NO 64106
acaagtaaactctctctgattctctctttctctctttctctcgctctctatctctctctctcctctgtttgttatatcaattaatcaagaagatttcttgtgtttttttttctgaaaaagaagatttcttgagagaaaataaggtggattgaaggattatcctttaagaatggtggtggaggaggagaatagaagcatggaggaaggacttcttcagcatcaaaacgacagagatgatcgtcgtatcacagcttgtgtcatcctcagcacttttgtcgctgtttgtagtgccttcagctacggatgtgccgctggttatacttcaggcgctgagactgctatcatgaaggagttagacctttctatggcacaattttcagcgtttggctcctttctgaatgtgggaggtgcggtgggggccttgttcagcggtcaattggcagtcatcctcggcagaagacgaacgttgtgggcatgcgattttttctgcgtttttggctggctctccattgctttcgcaaagaatgtcttctggctggacttgggaagaatttccttgggcataggagtcggcttgattagctacgtggtcccagtctatattgcggaaatcactccaaaacatgttcgtggcgcatttactgcttcaaaccagcttcttcaaaacagtggagtttccctgatttatttttttgggactgtaattaattggcgggttatggccgttataggtgcaattccatgcatccttcaaacgatcggtatattttttataccggaatctccaagatggctggctaaaatccgtttaagtaaagaagtagaaagttctttgcatcgacttagagggaaagatactgatgtttcaggtgaagcagctgaaattcaggttatgacaaaaatgcttgaagaagattcaaagtctagtttctctgacatgtttcagaagaagtacagacgaactcttgtggttggaattggtttaatgttgatacaacaattatctggagctagcggtatcacatattattcaaatgccatatttagaaaagctggcttttcagagagacttggatcaatgatatttggtgtgttcgtgatcccaaaagctttggttggtctgattcttgtggatagatggggaagacgaccactcctattggcttctgctgttggaatgtccatcggatccttgcttattggagttagcttcacgttacagcaaatgaatgtgcttcctgaattgatcccaattttcgtcttcgtaaacattctggtctacttcggatgttttgcattcggtataggagggctaccttgggtcattatgtctgagatctttccgataaatataaaagtttcagcaggaacaattgtagcattaacatcatggactagtgggtggttcgtgagttacgctttcaactttatgtttgaatggagcgcacaaggaacattttacatatttgcggctgtcggaggaatgtcattcatttttatttggatgctcgtaccggaaaccaaaggacaatcattggaagaattacaagcttcgcttacggggacatcctaa

SEQ ID NO: 49215 - protein, 467 aa, Arabidopsis thaliana
  peptide (1)..(467): Ceres Seq. ID no. 13600766
MVVEEENRSMEEGLLQHQNDRDDRRITACVILSTFVAVCSAFSYGCAAGYTSGAETAIMKELDLSMAQFSAFGSFLNVGGAVGALFSGQLAVILGRRRTLWACDFFCVFGWLSIAFAKNVFWLDLGRISLGIGVGLISYVVPVYIAEITPKHVRGAFTASNQLLQNSGVSLIYFFGTVINWRVMAVIGAIPCILQTIGIFFIPESPRWLAKIRLSKEVESSLHRLRGKDTDVSGEAAEIQVMTKMLEEDSKSSFSDMFQKKYRRTLVVGIGLMLIQQLSGASGITYYSNAIFRKAGFSERLGSMIFGVFVIPKALVGLILVDRWGRRPLLLASAVGMSIGSLLIGVSFTLQQMNVLPELIPIFVFVNILVYFGCFAFGIGGLPWVIMSEIFPINIKVSAGTIVALTSWTSGWFVSYAFNFMFEWSAQGTFYIFAAVGGMSFIFIWMLVPETKGQSLEELQASLTGTS

SEQ ID NO: 49216 - protein, 458 aa, Arabidopsis thaliana
  peptide (1)..(458): Ceres Seq. ID no. 13600767
MEEGLLQHQNDRDDRRITACVILSTFVAVCSAFSYGCAAGYTSGAETAIMKELDLSMAQFSAFGSFLNVGGAVGALFSGQLAVILGRRRTLWACDFFCVFGWLSIAFAKNVFWLDLGRISLGIGVGLISYVVPVYIAEITPKHVRGAFTASNQLLQNSGVSLIYFFGTVINWRVMAVIGAIPCILQTIGIFFIPESPRWLAKIRLSKEVESSLHRLRGKDTDVSGEAAEIQVMTKMLEEDSKSSFSDMFQKKYRRTLVVGIGLMLIQQLSGASGITYYSNAIFRKAGFSERLGSMIFGVFVIPKALVGLILVDRWGRRPLLLASAVGMSIGSLLIGVSFTLQQMNVLPELIPIFVFVNILVYFGCFAFGIGGLPWVIMSEIFPINIKVSAGTIVALTSWTSGWFVSYAFNFMFEWSAQGTFYIFAAVGGMSFIFIWMLVPETKGQSLEELQASLTGTS

SEQ ID NO: 49217 - protein, 409 aa, Arabidopsis thaliana
  peptide (1)..(409): Ceres Seq. ID no. 13600768
MKELDLSMAQFSAFGSFLNVGGAVGALFSGQLAVILGRRRTLWACDFFCVFGWLSIAFAKNVFWLDLGRISLGIGVGLISYVVPVYIAEITPKHVRGAFTASNQLLQNSGVSLIYFFGTVINWRVMAVIGAIPCILQTIGIFFIPESPRWLAKIRLSKEVESSLHRLRGKDTDVSGEAAEIQVMTKMLEEDSKSSFSDMFQKKYRRTLVVGIGLMLIQQLSGASGITYYSNAIFRKAGFSERLGSMIFGVFVIPKALVGLILVDRWGRRPLLLASAVGMSIGSLLIGVSFTLQQMNVLPELIPIFVFVNILVYFGCFAFGIGGLPWVIMSEIFPINIKVSAGTIVALTSWTSGWFVSYAFNFMFEWSAQGTFYIFAAVGGMSFIFIWMLVPETKGQSLEELQASLTGTS

SEQ ID NO: 49218 - DNA, 839 bp, Arabidopsis thaliana; identical to SEQ ID NO: 21803
  misc_feature (1)..(839): Ceres Seq. ID no. 12601485
  misc_feature (1)..(839): Ortholog of  Ceres SEQ ID NO 15178424 as cited in SEQ ID NO 1107
  misc_feature (1)..(839): Ortholog of  Ceres SEQ ID NO 13661185 as cited in SEQ ID NO 61118
  misc_feature (1)..(839): Ortholog of  Ceres SEQ ID NO 14309350 as cited in SEQ ID NO 0
  misc_feature (1)..(839): Ortholog of  Ceres SEQ ID NO 15175181 as cited in SEQ ID NO 0

SEQ ID NO: 49219 - protein, 212 aa, Arabidopsis thaliana; identical to SEQ ID NO: 21804
  peptide (1)..(212): Ceres Seq. ID no. 12601486

SEQ ID NO: 49220 - protein, 166 aa, Arabidopsis thaliana; identical to SEQ ID NO: 21805
  peptide (1)..(166): Ceres Seq. ID no. 12601487

SEQ ID NO: 49221 - protein, 138 aa, Arabidopsis thaliana; identical to SEQ ID NO: 21806
  peptide (1)..(138): Ceres Seq. ID no. 12601488

SEQ ID NO: 49222 - DNA, 904 bp, Arabidopsis thaliana
  misc_feature (1)..(904): Ceres Seq. ID no. 13647008
  misc_feature (1)..(904): Ortholog of  Ceres SEQ ID NO 14305990 as cited in SEQ ID NO 51104
  misc_feature (1)..(904): Ortholog of  Ceres SEQ ID NO 13581866 as cited in SEQ ID NO 52179
  misc_feature (1)..(904): Ortholog of  Ceres SEQ ID NO 14315451 as cited in SEQ ID NO 59289
gacaagattctatgaggatttttcagtaaatggatagcctgacacgagaaagctgacctcactcgctacttgggttgattgagtatatatatgtaagtatcgccgttgagaaattgggactctgatctgttgcagaaagccgaaagctttggtctttggagctctaacctctgcctctgaacacacacagaatctcccatggctgcatttgcaacggcagaagcgtgtgacagcaacgcagaactaatatcaaatggagacttacgcgctcttcacccaatcttcaagatctatggccaaagaagatgcttctcaggaccaatcgtgactctcaaggtctttgaagacaatgtcctcgtcagaaaccaactagaaacgaaaggagaaggcggagtcttagttatagacggtggtggaagcatgagatgcgcgcttgttggaggaaacctcggacagttagctcagaacaacgggtggtcggggattgttgtgaatggatgcgttagagatgtggatgagatcaatgactgcgatgttggggtcagggcattgggatctaacccgttgaaatctactaagaaaggtcatggtgagaagaatgtgccggttcatattggaggaactttgattagagatggagagtggctatatgctgatagtgatggtatcttgatctccaagaccgaactctctgtttgagtcagaacgtttccgtgatagtgctaagagactacagcttcttggagcaaggtggtttattggaattcttaagaatctgtttaatactccaaataatcatttttattacaatatacttacgttttatgaaattacaaaataaaagtctatatagttcaacaagtttggatcatgtgatagtataagaaactctcatgaatgaaag

SEQ ID NO: 49223 - protein, 166 aa, Arabidopsis thaliana
  peptide (1)..(166): Ceres Seq. ID no. 13647009
MAAFATAEACDSNAELISNGDLRALHPIFKIYGQRRCFSGPIVTLKVFEDNVLVRNQLETKGEGGVLVIDGGGSMRCALVGGNLGQLAQNNGWSGIVVNGCVRDVDEINDCDVGVRALGSNPLKSTKKGHGEKNVPVHIGGTLIRDGEWLYADSDGILISKTELSV

SEQ ID NO: 49224 - protein, 92 aa, Arabidopsis thaliana
  peptide (1)..(92): Ceres Seq. ID no. 13647010
MRCALVGGNLGQLAQNNGWSGIVVNGCVRDVDEINDCDVGVRALGSNPLKSTKKGHGEKNVPVHIGGTLIRDGEWLYADSDGILISKTELSV

SEQ ID NO: 49225 - DNA, 2589 bp, Arabidopsis thaliana; identical to SEQ ID NO: 46443
  misc_feature (1)..(2589): Ceres Seq. ID no. 12600667
  misc_feature (1)..(2589): Ortholog of  Ceres SEQ ID NO 15173102 as cited in SEQ ID NO 61106

SEQ ID NO: 49226 - protein, 798 aa, Arabidopsis thaliana; identical to SEQ ID NO: 46444
  peptide (1)..(798): Ceres Seq. ID no. 12600668

SEQ ID NO: 49227 - protein, 774 aa, Arabidopsis thaliana; identical to SEQ ID NO: 46445
  peptide (1)..(774): Ceres Seq. ID no. 12600669

SEQ ID NO: 49228 - protein, 626 aa, Arabidopsis thaliana; identical to SEQ ID NO: 46446
  peptide (1)..(626): Ceres Seq. ID no. 12600670

SEQ ID NO: 49229 - DNA, 640 bp, Arabidopsis thaliana; identical to SEQ ID NO: 38920
  misc_feature (1)..(640): Ceres Seq. ID no. 12652846
  misc_feature (1)..(640): Ortholog of  Ceres SEQ ID NO 15174406 as cited in SEQ ID NO 0

SEQ ID NO: 49230 - protein, 118 aa, Arabidopsis thaliana; identical to SEQ ID NO: 38921
  peptide (1)..(118): Ceres Seq. ID no. 12652847

SEQ ID NO: 49231 - protein, 114 aa, Arabidopsis thaliana; identical to SEQ ID NO: 38922
  peptide (1)..(114): Ceres Seq. ID no. 12652848

SEQ ID NO: 49232 - protein, 104 aa, Arabidopsis thaliana; identical to SEQ ID NO: 38923
  peptide (1)..(104): Ceres Seq. ID no. 12652849

SEQ ID NO: 49233 - DNA, 3946 bp, Arabidopsis thaliana
  misc_feature (1)..(3946): Ceres Seq. ID no. 13579790
  misc_feature (1)..(3946): Ortholog of  Ceres SEQ ID NO 13658778 as cited in SEQ ID NO 66511
atttttgctcacgactaagtcccattcctcgtctcttctttttcttctccttaattagtttgggcaacacgatcacagttgattccttcacaatcgatttgttaaattaagaaatcattttcttctctctctctctctctctgtctaaaatatctatcggttgaagaagatctgaagcttaactttgctctgttacagactctcagggatctgccggctacaaagtccggtggatagtgttattattagacaatggcgtctaataatcatttcatgaacagtagatccaatctatcaacaaactctgatgctgctgaagctgagaggcaccagcagcctgtgtcaaattctgtgacatttgcccgcaggactccctctggccgatatgtcaactactccagagatgatctcgatagcgaacttggaagtgttgatttaactggctattcggttcacattcctccaactccggataaccaacctatggatccgtccatctctcagaaggttgaggagcagtatgtctcgaattccttgttcacgggcggttttaacagcgtcactcgggctcatcttatggaaaaagtgatcgatactgagactagccatccgcagatggcaggtgctaaaggatcttcttgcgcggttcctggttgtgatgtcaaggtgatgagtgatgagagaggtcaagatcttcttccctgtgagtgtgatttcaaaatctgtagggattgctttatggatgctgtgaaaaccggtgggatgtgtcccgggtgtaaggagccttacaggaacacggatttggcggattttgctgataacaacaagcagcaacggcctatgcttccgccaccagcgggcgggtccaagatggacaggagattgtcattgatgaagtcaactaagtctggtttgatgaggagtcaaaccggggattttgatcacaatagatggttgtttgagactagtgggacttacggtttcggtaatgctttctggacaaaagacgggaatttcgggagtgacaaggatgggaatggccacggtatggggccgcaggatctgatgagcagaccgtggagaccacttactcggaaactgcagattcctgcagctgttattagtccttacaggcttttgatacttatccgaattgttgttcttgcgcttttcttgatgtggaggattaagcacaaaaacccagatgcaatatggctatggggaatgtctgtggtttgtgagctttggttcgccttatcttggctacttgatcagcttccaaagctgtgtccgattaacagagctacggatctcaatgttcttaaagaaaaatttgaaacacctacaccgagcaacccgactgggaaatctgatctcccaggactggatatgtttgtatctacagcagatccagagaaagaacctcctcttgtcacttccaacaccattttatcgattctcgctgctgactaccctgtagaaaagcttgcttgctatgtatcagatgatggaggagcgcttttgacattcgaagccatggctgaagcagcgagttttgcaaacatgtgggttcctttctgtcgtaaacacaatatcgagccgaggaatccggattcatactttagtcttaaaagagatccttacaagaacaaagtgaaggctgattttgttaaggatcgaagacgggtgaagcgtgagtatgatgagtttaaggttaggatcaacagcttgcctgactcgatcaggcgccgttctgatgcttatcacgcaagggaagagattaaggccatgaagctgcaaagacaaaacagagatgaagagatagtagagccagtcaagattcctaaagctacatggatggctgatggtactcattggcctggaacttggataaattctggtcctgaccattcccgtagtgaccatgctggtatcattcaggtgatgttgaagccgccaagtgatgagccattacatggagtgtctgaagggttcttagatcttacagatgttgacattcgtcttccgcttcttgtctatgtttcgcgtgagaagcgaccgggttatgatcataacaagaaagcaggagccatgaatgccctggtccgagcttctgcaattatgtccaacggtccattcatactcaatcttgattgtgatcattacatatacaactctcaagctttaagagaaggaatgtgtttcatgatggatcgaggtggtgaccggctttgctatgttcagttcccacaacggtttgaaggtattgacccatcagatcgttatgcgaatcacaacacagtcttctttgatgtgaacatgagagctcttgatgggttgatgggtcctgtttatgtcggaacgggttgtctctttagaagaatcgcgttgtacggattcgatccacctcgggctaaagaacaccatcccggattctgcagttgctgcttctctcgcaagaagaagaaaagccgtgtgccagaagaaaaccgatctttgagaatgggtggtgactcagatgatgatgaagagatgaatctttctttggttccgaagaaattcggaaactccactttccttatcgattcaatcccggttgccgagttccaaggtcgtcctcttgcggatcacccagctgtgcaaaacggacgaccacccggagctctcaccattcctcgcgagcttcttgatgcatcaactgtggcagaagccatagccgtcatctcttgttggtacgaggataaaaccgagtggggatctcggatcggttggatttatggatctgtcacggaagatgtggtcacaggttatagaatgcataaccgaggctggaaatcggtttactgtgtgaccaaaagggatgctttccgtggcacagctccaatcaacttgacggataggcttcaccaggttctccgatgggctactggctcggtagagatcttcttctcaagaaacaatgccttctttgctagcccgagaatgaaaatcctccagagaatcgcttacctaaacgttggaatctacccgttcacatcattcttcctcatagtctactgcttcctcccagctctctccctattctcaggccagttcatagtccaaacactcaatgtcacattccttgtctacctcttaatcatctccattacgctctgcttactcgctctcctcgagatcaaatggtcaggaatctcactcgaggaatggtggcgaaacgagcagttctggctcattggaggaacaagcgctcacttagccgcggttatccaagggctgctcaaagttgttgccggaatcgaaatctcattcacattgacatctaaatccggaggagaggatgtagacgacgaatttgcggatctctacattgtgaaatggacatccctcatgatcccaccaatcacaatcatgatggtgaacctaatcgccatcgcggtcgggtttagcaggacgatatacagtgtgattccgcagtggagtaagttgattggaggagtgttcttcagtttctgggtactggctcatctttatccattcgctaaagggcttatgggaagaagaggaaggactccgaccattgtatatgtctggtctggacttgttgccatcaccatatctctgctttgggttgccattaatccacctgctggttccactcaaatcggaggatctttcactttcccatgattcataggtttggtttctcaaaaattctctttctttagtcctttctaaagatggagacagagattggccaagaaacacacaagtatagttgagccaaaatatagagcaagtcaaagaacttctctcattgtcttttattttttgtttttttatttggttgggaaaggacattttttatttgtctttttaaattttgtaatcttttatctgttgatggaattatttatgctactactgttaattatttattcagttc

SEQ ID NO: 49234 - protein, 1145 aa, Arabidopsis thaliana
  peptide (1)..(1145): Ceres Seq. ID no. 13579791
MASNNHFMNSRSNLSTNSDAAEAERHQQPVSNSVTFARRTPSGRYVNYSRDDLDSELGSVDLTGYSVHIPPTPDNQPMDPSISQKVEEQYVSNSLFTGGFNSVTRAHLMEKVIDTETSHPQMAGAKGSSCAVPGCDVKVMSDERGQDLLPCECDFKICRDCFMDAVKTGGMCPGCKEPYRNTDLADFADNNKQQRPMLPPPAGGSKMDRRLSLMKSTKSGLMRSQTGDFDHNRWLFETSGTYGFGNAFWTKDGNFGSDKDGNGHGMGPQDLMSRPWRPLTRKLQIPAAVISPYRLLILIRIVVLALFLMWRIKHKNPDAIWLWGMSVVCELWFALSWLLDQLPKLCPINRATDLNVLKEKFETPTPSNPTGKSDLPGLDMFVSTADPEKEPPLVTSNTILSILAADYPVEKLACYVSDDGGALLTFEAMAEAASFANMWVPFCRKHNIEPRNPDSYFSLKRDPYKNKVKADFVKDRRRVKREYDEFKVRINSLPDSIRRRSDAYHAREEIKAMKLQRQNRDEEIVEPVKIPKATWMADGTHWPGTWINSGPDHSRSDHAGIIQVMLKPPSDEPLHGVSEGFLDLTDVDIRLPLLVYVSREKRPGYDHNKKAGAMNALVRASAIMSNGPFILNLDCDHYIYNSQALREGMCFMMDRGGDRLCYVQFPQRFEGIDPSDRYANHNTVFFDVNMRALDGLMGPVYVGTGCLFRRIALYGFDPPRAKEHHPGFCSCCFSRKKKKSRVPEENRSLRMGGDSDDDEEMNLSLVPKKFGNSTFLIDSIPVAEFQGRPLADHPAVQNGRPPGALTIPRELLDASTVAEAIAVISCWYEDKTEWGSRIGWIYGSVTEDVVTGYRMHNRGWKSVYCVTKRDAFRGTAPINLTDRLHQVLRWATGSVEIFFSRNNAFFASPRMKILQRIAYLNVGIYPFTSFFLIVYCFLPALSLFSGQFIVQTLNVTFLVYLLIISITLCLLALLEIKWSGISLEEWWRNEQFWLIGGTSAHLAAVIQGLLKVVAGIEISFTLTSKSGGEDVDDEFADLYIVKWTSLMIPPITIMMVNLIAIAVGFSRTIYSVIPQWSKLIGGVFFSFWVLAHLYPFAKGLMGRRGRTPTIVYVWSGLVAITISLLWVAINPPAGSTQIGGSFTFP

SEQ ID NO: 49235 - protein, 1138 aa, Arabidopsis thaliana
  peptide (1)..(1138): Ceres Seq. ID no. 13579792
MNSRSNLSTNSDAAEAERHQQPVSNSVTFARRTPSGRYVNYSRDDLDSELGSVDLTGYSVHIPPTPDNQPMDPSISQKVEEQYVSNSLFTGGFNSVTRAHLMEKVIDTETSHPQMAGAKGSSCAVPGCDVKVMSDERGQDLLPCECDFKICRDCFMDAVKTGGMCPGCKEPYRNTDLADFADNNKQQRPMLPPPAGGSKMDRRLSLMKSTKSGLMRSQTGDFDHNRWLFETSGTYGFGNAFWTKDGNFGSDKDGNGHGMGPQDLMSRPWRPLTRKLQIPAAVISPYRLLILIRIVVLALFLMWRIKHKNPDAIWLWGMSVVCELWFALSWLLDQLPKLCPINRATDLNVLKEKFETPTPSNPTGKSDLPGLDMFVSTADPEKEPPLVTSNTILSILAADYPVEKLACYVSDDGGALLTFEAMAEAASFANMWVPFCRKHNIEPRNPDSYFSLKRDPYKNKVKADFVKDRRRVKREYDEFKVRINSLPDSIRRRSDAYHAREEIKAMKLQRQNRDEEIVEPVKIPKATWMADGTHWPGTWINSGPDHSRSDHAGIIQVMLKPPSDEPLHGVSEGFLDLTDVDIRLPLLVYVSREKRPGYDHNKKAGAMNALVRASAIMSNGPFILNLDCDHYIYNSQALREGMCFMMDRGGDRLCYVQFPQRFEGIDPSDRYANHNTVFFDVNMRALDGLMGPVYVGTGCLFRRIALYGFDPPRAKEHHPGFCSCCFSRKKKKSRVPEENRSLRMGGDSDDDEEMNLSLVPKKFGNSTFLIDSIPVAEFQGRPLADHPAVQNGRPPGALTIPRELLDASTVAEAIAVISCWYEDKTEWGSRIGWIYGSVTEDVVTGYRMHNRGWKSVYCVTKRDAFRGTAPINLTDRLHQVLRWATGSVEIFFSRNNAFFASPRMKILQRIAYLNVGIYPFTSFFLIVYCFLPALSLFSGQFIVQTLNVTFLVYLLIISITLCLLALLEIKWSGISLEEWWRNEQFWLIGGTSAHLAAVIQGLLKVVAGIEISFTLTSKSGGEDVDDEFADLYIVKWTSLMIPPITIMMVNLIAIAVGFSRTIYSVIPQWSKLIGGVFFSFWVLAHLYPFAKGLMGRRGRTPTIVYVWSGLVAITISLLWVAINPPAGSTQIGGSFTFP

SEQ ID NO: 49236 - protein, 1068 aa, Arabidopsis thaliana
  peptide (1)..(1068): Ceres Seq. ID no. 13579793
MDPSISQKVEEQYVSNSLFTGGFNSVTRAHLMEKVIDTETSHPQMAGAKGSSCAVPGCDVKVMSDERGQDLLPCECDFKICRDCFMDAVKTGGMCPGCKEPYRNTDLADFADNNKQQRPMLPPPAGGSKMDRRLSLMKSTKSGLMRSQTGDFDHNRWLFETSGTYGFGNAFWTKDGNFGSDKDGNGHGMGPQDLMSRPWRPLTRKLQIPAAVISPYRLLILIRIVVLALFLMWRIKHKNPDAIWLWGMSVVCELWFALSWLLDQLPKLCPINRATDLNVLKEKFETPTPSNPTGKSDLPGLDMFVSTADPEKEPPLVTSNTILSILAADYPVEKLACYVSDDGGALLTFEAMAEAASFANMWVPFCRKHNIEPRNPDSYFSLKRDPYKNKVKADFVKDRRRVKREYDEFKVRINSLPDSIRRRSDAYHAREEIKAMKLQRQNRDEEIVEPVKIPKATWMADGTHWPGTWINSGPDHSRSDHAGIIQVMLKPPSDEPLHGVSEGFLDLTDVDIRLPLLVYVSREKRPGYDHNKKAGAMNALVRASAIMSNGPFILNLDCDHYIYNSQALREGMCFMMDRGGDRLCYVQFPQRFEGIDPSDRYANHNTVFFDVNMRALDGLMGPVYVGTGCLFRRIALYGFDPPRAKEHHPGFCSCCFSRKKKKSRVPEENRSLRMGGDSDDDEEMNLSLVPKKFGNSTFLIDSIPVAEFQGRPLADHPAVQNGRPPGALTIPRELLDASTVAEAIAVISCWYEDKTEWGSRIGWIYGSVTEDVVTGYRMHNRGWKSVYCVTKRDAFRGTAPINLTDRLHQVLRWATGSVEIFFSRNNAFFASPRMKILQRIAYLNVGIYPFTSFFLIVYCFLPALSLFSGQFIVQTLNVTFLVYLLIISITLCLLALLEIKWSGISLEEWWRNEQFWLIGGTSAHLAAVIQGLLKVVAGIEISFTLTSKSGGEDVDDEFADLYIVKWTSLMIPPITIMMVNLIAIAVGFSRTIYSVIPQWSKLIGGVFFSFWVLAHLYPFAKGLMGRRGRTPTIVYVWSGLVAITISLLWVAINPPAGSTQIGGSFTFP

SEQ ID NO: 49237 - DNA, 1453 bp, Arabidopsis thaliana; identical to SEQ ID NO: 47431
  misc_feature (1)..(1453): Ceres Seq. ID no. 12601489
  misc_feature (1)..(1453): Ortholog of  Ceres SEQ ID NO 14301994 as cited in SEQ ID NO 56653
  misc_feature (1)..(1453): Ortholog of  Ceres SEQ ID NO 14304120 as cited in SEQ ID NO 58862
  misc_feature (1)..(1453): Ortholog of  Ceres SEQ ID NO 13595658 as cited in SEQ ID NO 59888
  misc_feature (1)..(1453): Ortholog of  Ceres SEQ ID NO 13661330 as cited in SEQ ID NO 61614
  misc_feature (1)..(1453): Ortholog of  Ceres SEQ ID NO 13596025 as cited in SEQ ID NO 62024
  misc_feature (1)..(1453): Ortholog of  Ceres SEQ ID NO 13662324 as cited in SEQ ID NO 62162
  misc_feature (1)..(1453): Ortholog of  Ceres SEQ ID NO 12625713 as cited in SEQ ID NO 64160
  misc_feature (1)..(1453): Ortholog of  Ceres SEQ ID NO 14303564 as cited in SEQ ID NO 65360
  misc_feature (1)..(1453): Ortholog of  Ceres SEQ ID NO 15170103 as cited in SEQ ID NO 66345
  misc_feature (1)..(1453): Ortholog of  Ceres SEQ ID NO 14313495 as cited in SEQ ID NO 0

SEQ ID NO: 49238 - protein, 330 aa, Arabidopsis thaliana; identical to SEQ ID NO: 47432
  peptide (1)..(330): Ceres Seq. ID no. 12601490

SEQ ID NO: 49239 - protein, 304 aa, Arabidopsis thaliana; identical to SEQ ID NO: 47433
  peptide (1)..(304): Ceres Seq. ID no. 12601491

SEQ ID NO: 49240 - protein, 193 aa, Arabidopsis thaliana; identical to SEQ ID NO: 47434
  peptide (1)..(193): Ceres Seq. ID no. 12601492

SEQ ID NO: 49241 - DNA, 1569 bp, Arabidopsis thaliana
  misc_feature (1)..(1569): Ceres Seq. ID no. 14303122
  misc_feature (1)..(1569): Ortholog of  Ceres SEQ ID NO 14310419 as cited in SEQ ID NO 55050
  misc_feature (1)..(1569): Ortholog of  Ceres SEQ ID NO 13657789 as cited in SEQ ID NO 66154
gatgcgtactgtgaccattacatactacagttagctttcttctctagccgtcgaagtttcacgcgccgccgtgagaaaatgcagcacacaccggagcaaccgagagtcactctttacataatcctcaccaccgcgtttctctctctatgtttcctcctctctctctcttcctcttcccagtactcttcatcttcctacaccggacgacccgatgatctacgacccgacccgagactctttccttcttcctccaaaatcgccgccgatacagctcctccttcaatcgcttacctaatttccggatcttctggtgacacgcgacgaatccttcgacttctctacgctacttaccatcctcgaaatcgatatcttcttcatctcgatagcttagcgacacaatctgaacgagatcggctcgctgttgatgtacaagatgtaccgatttttagagctgcaaggaatgttgatgttattgggaagcctgatttcgcgtatcagagaggatcgtctccgatggcttcaacgcttcatggtgcttcgattcttcttagattgtcaggaacttgggattggtttgttagtattagtgttgatgattatcctctcgttactcaagatgagcttcttcatattatgtcacatttgcctaaggacttgaattttgtgaaccacactagctacattggttggaaagagtccaggaagttgaagccagttattgttgatccagggctctatcttgtggagaaaaccgatatgtttttcgcttcgcagaaacgagagttgcctaaggctttcaagttattctcaggtccatctttctccatcttaagccggaatttcatggagcactgtgtcttaggcactgacaacttccctcggactctactcatgtacttgtccaacacacctgattctctttccaactacttcccaactatcctctgcaacacggataccttcaaaaagaccatcatgaacaacaacttactctacctagcttctaacgacacttctaaagaaagataccatcagcttgatcacaaagagttcacagaaatggttgactccggagcagcttttgcaagaggattcaggtacgacgacactgtccttgatcgcatcgatcatgaacttctgggacgcaaacctggtgaagttgtgcctggtggttggtgtttaggagattctagtaaaaaccgtagctcgtgttccgtctggggtgactcgggtatccttcggcccggttctggttccgataggctcgagagacgaattgttgagttactatcaaacgattggttcagattgcaccaatgcgtacctgaatgatcggatgatcctcaccgcactttcaatagagtaaatagttgtccaagacacgaagaagataacggtactttatgcttctgtatctttagagagagttccacttctacattgtaacctgtgactttgagagtgtttgttccattgttgttgtagaaaaaccatctcaaagctgagaaatgaaacgactcggttcattggttgaagtttaaaccggtataaaatcccggtttttttttt

SEQ ID NO: 49242 - protein, 443 aa, Arabidopsis thaliana
  peptide (1)..(443): Ceres Seq. ID no. 14303123
DAYCDHYILQLAFFSSRRSFTRRREKMQHTPEQPRVTLYIILTTAFLSLCFLLSLSSSSQYSSSSYTGRPDDLRPDPRLFPSSSKIAADTAPPSIAYLISGSSGDTRRILRLLYATYHPRNRYLLHLDSLATQSERDRLAVDVQDVPIFRAARNVDVIGKPDFAYQRGSSPMASTLHGASILLRLSGTWDWFVSISVDDYPLVTQDELLHIMSHLPKDLNFVNHTSYIGWKESRKLKPVIVDPGLYLVEKTDMFFASQKRELPKAFKLFSGPSFSILSRNFMEHCVLGTDNFPRTLLMYLSNTPDSLSNYFPTILCNTDTFKKTIMNNNLLYLASNDTSKERYHQLDHKEFTEMVDSGAAFARGFRYDDTVLDRIDHELLGRKPGEVVPGGWCLGDSSKNRSSCSVWGDSGILRPGSGSDRLERRIVELLSNDWFRLHQCVPE

SEQ ID NO: 49243 - protein, 417 aa, Arabidopsis thaliana
  peptide (1)..(417): Ceres Seq. ID no. 14303124
MQHTPEQPRVTLYIILTTAFLSLCFLLSLSSSSQYSSSSYTGRPDDLRPDPRLFPSSSKIAADTAPPSIAYLISGSSGDTRRILRLLYATYHPRNRYLLHLDSLATQSERDRLAVDVQDVPIFRAARNVDVIGKPDFAYQRGSSPMASTLHGASILLRLSGTWDWFVSISVDDYPLVTQDELLHIMSHLPKDLNFVNHTSYIGWKESRKLKPVIVDPGLYLVEKTDMFFASQKRELPKAFKLFSGPSFSILSRNFMEHCVLGTDNFPRTLLMYLSNTPDSLSNYFPTILCNTDTFKKTIMNNNLLYLASNDTSKERYHQLDHKEFTEMVDSGAAFARGFRYDDTVLDRIDHELLGRKPGEVVPGGWCLGDSSKNRSSCSVWGDSGILRPGSGSDRLERRIVELLSNDWFRLHQCVPE

SEQ ID NO: 49244 - protein, 272 aa, Arabidopsis thaliana
  peptide (1)..(272): Ceres Seq. ID no. 14303125
MASTLHGASILLRLSGTWDWFVSISVDDYPLVTQDELLHIMSHLPKDLNFVNHTSYIGWKESRKLKPVIVDPGLYLVEKTDMFFASQKRELPKAFKLFSGPSFSILSRNFMEHCVLGTDNFPRTLLMYLSNTPDSLSNYFPTILCNTDTFKKTIMNNNLLYLASNDTSKERYHQLDHKEFTEMVDSGAAFARGFRYDDTVLDRIDHELLGRKPGEVVPGGWCLGDSSKNRSSCSVWGDSGILRPGSGSDRLERRIVELLSNDWFRLHQCVPE

SEQ ID NO: 49245 - DNA, 1485 bp, Arabidopsis thaliana; identical to SEQ ID NO: 47351
  misc_feature (1)..(1485): Ceres Seq. ID no. 12604670
  misc_feature (1)..(1485): Ortholog of  Ceres SEQ ID NO 13656849 as cited in SEQ ID NO 65764

SEQ ID NO: 49246 - protein, 432 aa, Arabidopsis thaliana; identical to SEQ ID NO: 47352
  peptide (1)..(432): Ceres Seq. ID no. 12604671

SEQ ID NO: 49247 - DNA, 1998 bp, Arabidopsis thaliana
  misc_feature (1)..(1998): Ceres Seq. ID no. 13579794
  misc_feature (1)..(1998): Ortholog of  Ceres SEQ ID NO 14311055 as cited in SEQ ID NO 53705
atggcttgcatgaagctgggatccaaatctgatgctttccagagacaaggccaggcttggttttgcacaactggacttcctagtgatattgtcgttgaagttggggagatgtcttttcatctccacaagtttcccttgctctctagaagtggagtcatggaaagaaggattgcagaagcatcaaaagaaggcgatgataaatgtctcattgaaatctctgatcttcctggtggagacaaaacgtttgaactagtcgctaagttctgctatggtgtgaagcttgaactcactgcttctaacgttgtatatctcagatgcgctgctgagcatctcgaaatgactgaagaacatggggaaggaaatcttatttctcaaactgaaacatttttcaatcaagtagtcctcaaaagctggaaagattcaataaaagcgcttcatagctgcgatgaggtcctcgagtatgctgatgaattgaacattaccaagaaatgcattgagtcactagccatgagagcatcgacagacccaaacttgtttggatggccagttgtggagcatggtgggcccatgcagagtccaggtggcagtgttttatggaatgggataagcaccggggctagacctaaacatactagttcagactggtggtacgaggatgcatcgatgctaagttttcccctttttaagagacttatcacggtgatggagtcccgcggcattagagaagacatcatcgctggctccctaacctattacacacgaaaacacttgcctggcttaaaaagacgacgtggtggacctgaatctagtggtcgtttcagcacacctttgggctcagggaatgtactgtccgaggaagagcagaagaacttgcttgaagagatccaggagcttcttcgtatgcaaaaaggtttagttccaaccaagtttttcgttgacatgcttcgaatcgccaagattttaaaagcaagtccggattgcatagccaatttggagaagaggatagggatgcagcttgaccaggctgcgttggaagatcttgtaatgcctagcttttctcatactatggagaccctatacgatgttgactctgtgcaaaggatcttggaccattttcttgggacagatcagattatgcctggtggggttggctctccttgttcttcagtagatgacgggaatttaatcggatccccacagtcaataacaccaatgacagcggttgcaaagctgattgatgggtatcttgctgaagttgctcctgatgtcaatcttaagcttccaaagttccaagctttagctgcttctattcctgaatacgccagactcttagatgacggactctatcgtgcaatagacatttatctaaagcatcatccatggttggcggaaacagaaagagagaatctgtgccggttgttagattgtcagaaactctctttagaagcttgtacacatgcggcgcagaacgagagattaccgctaagaataatcgtccaagtgctcttctttgagcagctacagctcagaacctctgtagctggatgcttcctggtctcagacaacctcgatggcggatcaagacagttaagaagcggaggatatgtaggaggaccaaacgaaggaggcggaggaggaggaggatgggcaaccgcggtaagagagaatcaagtcctgaaagttggaatggacagtatgagaatgcgagtttgtgagttagagaaagaatgttccaacatgagacaagagattgagaaactcggtaagacgacaaaaggtggtggttctgcaagcaatggagtcggtagcaagacttgggaaaacgtttctaagaaactcgggttcggttttaagctgaagtcgcatcaaatgtgcagtgctcaggaaggttctgtgtctaagtctaacaacgagaatgtgaagatagagaagctaaaggatgttaaagagcgtcgtgggaagcataagaaagcttcgagcattagttctgagaggtga

SEQ ID NO: 49248 - protein, 665 aa, Arabidopsis thaliana
  peptide (1)..(665): Ceres Seq. ID no. 13579795
MACMKLGSKSDAFQRQGQAWFCTTGLPSDIVVEVGEMSFHLHKFPLLSRSGVMERRIAEASKEGDDKCLIEISDLPGGDKTFELVAKFCYGVKLELTASNVVYLRCAAEHLEMTEEHGEGNLISQTETFFNQVVLKSWKDSIKALHSCDEVLEYADELNITKKCIESLAMRASTDPNLFGWPVVEHGGPMQSPGGSVLWNGISTGARPKHTSSDWWYEDASMLSFPLFKRLITVMESRGIREDIIAGSLTYYTRKHLPGLKRRRGGPESSGRFSTPLGSGNVLSEEEQKNLLEEIQELLRMQKGLVPTKFFVDMLRIAKILKASPDCIANLEKRIGMQLDQAALEDLVMPSFSHTMETLYDVDSVQRILDHFLGTDQIMPGGVGSPCSSVDDGNLIGSPQSITPMTAVAKLIDGYLAEVAPDVNLKLPKFQALAASIPEYARLLDDGLYRAIDIYLKHHPWLAETERENLCRLLDCQKLSLEACTHAAQNERLPLRIIVQVLFFEQLQLRTSVAGCFLVSDNLDGGSRQLRSGGYVGGPNEGGGGGGGWATAVRENQVLKVGMDSMRMRVCELEKECSNMRQEIEKLGKTTKGGGSASNGVGSKTWENVSKKLGFGFKLKSHQMCSAQEGSVSKSNNENVKIEKLKDVKERRGKHKKASSISSER

SEQ ID NO: 49249 - protein, 662 aa, Arabidopsis thaliana
  peptide (1)..(662): Ceres Seq. ID no. 13579796
MKLGSKSDAFQRQGQAWFCTTGLPSDIVVEVGEMSFHLHKFPLLSRSGVMERRIAEASKEGDDKCLIEISDLPGGDKTFELVAKFCYGVKLELTASNVVYLRCAAEHLEMTEEHGEGNLISQTETFFNQVVLKSWKDSIKALHSCDEVLEYADELNITKKCIESLAMRASTDPNLFGWPVVEHGGPMQSPGGSVLWNGISTGARPKHTSSDWWYEDASMLSFPLFKRLITVMESRGIREDIIAGSLTYYTRKHLPGLKRRRGGPESSGRFSTPLGSGNVLSEEEQKNLLEEIQELLRMQKGLVPTKFFVDMLRIAKILKASPDCIANLEKRIGMQLDQAALEDLVMPSFSHTMETLYDVDSVQRILDHFLGTDQIMPGGVGSPCSSVDDGNLIGSPQSITPMTAVAKLIDGYLAEVAPDVNLKLPKFQALAASIPEYARLLDDGLYRAIDIYLKHHPWLAETERENLCRLLDCQKLSLEACTHAAQNERLPLRIIVQVLFFEQLQLRTSVAGCFLVSDNLDGGSRQLRSGGYVGGPNEGGGGGGGWATAVRENQVLKVGMDSMRMRVCELEKECSNMRQEIEKLGKTTKGGGSASNGVGSKTWENVSKKLGFGFKLKSHQMCSAQEGSVSKSNNENVKIEKLKDVKERRGKHKKASSISSER

SEQ ID NO: 49250 - protein, 629 aa, Arabidopsis thaliana
  peptide (1)..(629): Ceres Seq. ID no. 13579797
MSFHLHKFPLLSRSGVMERRIAEASKEGDDKCLIEISDLPGGDKTFELVAKFCYGVKLELTASNVVYLRCAAEHLEMTEEHGEGNLISQTETFFNQVVLKSWKDSIKALHSCDEVLEYADELNITKKCIESLAMRASTDPNLFGWPVVEHGGPMQSPGGSVLWNGISTGARPKHTSSDWWYEDASMLSFPLFKRLITVMESRGIREDIIAGSLTYYTRKHLPGLKRRRGGPESSGRFSTPLGSGNVLSEEEQKNLLEEIQELLRMQKGLVPTKFFVDMLRIAKILKASPDCIANLEKRIGMQLDQAALEDLVMPSFSHTMETLYDVDSVQRILDHFLGTDQIMPGGVGSPCSSVDDGNLIGSPQSITPMTAVAKLIDGYLAEVAPDVNLKLPKFQALAASIPEYARLLDDGLYRAIDIYLKHHPWLAETERENLCRLLDCQKLSLEACTHAAQNERLPLRIIVQVLFFEQLQLRTSVAGCFLVSDNLDGGSRQLRSGGYVGGPNEGGGGGGGWATAVRENQVLKVGMDSMRMRVCELEKECSNMRQEIEKLGKTTKGGGSASNGVGSKTWENVSKKLGFGFKLKSHQMCSAQEGSVSKSNNENVKIEKLKDVKERRGKHKKASSISSER

SEQ ID NO: 49251 - DNA, 1403 bp, Arabidopsis thaliana; identical to SEQ ID NO: 23886
  misc_feature (1)..(1403): Ceres Seq. ID no. 12601443
  misc_feature (1)..(1403): Ortholog of  Ceres SEQ ID NO 14304969 as cited in SEQ ID NO 53193
  misc_feature (1)..(1403): Ortholog of  Ceres SEQ ID NO 14314851 as cited in SEQ ID NO 54014
  misc_feature (1)..(1403): Ortholog of  Ceres SEQ ID NO 14307442 as cited in SEQ ID NO 54239
  misc_feature (1)..(1403): Ortholog of  Ceres SEQ ID NO 15227214 as cited in SEQ ID NO 55368
  misc_feature (1)..(1403): Ortholog of  Ceres SEQ ID NO 13638897 as cited in SEQ ID NO 55839
  misc_feature (1)..(1403): Ortholog of  Ceres SEQ ID NO 15173484 as cited in SEQ ID NO 61804
  misc_feature (1)..(1403): Ortholog of  Ceres SEQ ID NO 13596958 as cited in SEQ ID NO 63319
  misc_feature (1)..(1403): Ortholog of  Ceres SEQ ID NO 12614573 as cited in SEQ ID NO 68344
  misc_feature (1)..(1403): Ortholog of  Ceres SEQ ID NO 12614814 as cited in SEQ ID NO 68816
  misc_feature (1)..(1403): Ortholog of  Ceres SEQ ID NO 13624040 as cited in SEQ ID NO 0

SEQ ID NO: 49252 - protein, 321 aa, Arabidopsis thaliana; identical to SEQ ID NO: 23887
  peptide (1)..(321): Ceres Seq. ID no. 12601444

SEQ ID NO: 49253 - protein, 190 aa, Arabidopsis thaliana; identical to SEQ ID NO: 23888
  peptide (1)..(190): Ceres Seq. ID no. 12601445

SEQ ID NO: 49254 - protein, 189 aa, Arabidopsis thaliana; identical to SEQ ID NO: 23889
  peptide (1)..(189): Ceres Seq. ID no. 12601446

SEQ ID NO: 49255 - DNA, 1448 bp, Arabidopsis thaliana
  misc_feature (1)..(1448): Ceres Seq. ID no. 13647020
  misc_feature (1)..(1448): Ortholog of  Ceres SEQ ID NO 15176709 as cited in SEQ ID NO 1148
  misc_feature (1)..(1448): Ortholog of  Ceres SEQ ID NO 13658922 as cited in SEQ ID NO 66316
aaagagaattctctcatttcttcttcttcgctcagctccgacaacgaagggcgaagaatctcgctccctcaatttcgcattgccatcgattttcttagaggttaaaatggttgaacagactcagcaccccacgattcttcagaaggtttctggccaactcttgagctcgagtgtttctcaggacattcgtggttatgcttcggcttccaaaaggcctgctacataccagaaacatgcagcttacggaaactactccaatgctgcatttcaatatcctcttgtggctgcatctcagattgcaactactacttctcctgtgtttgtccaagctccaggagagaagggatttactaactttgctattgatttcatgatgggtggtgtttctgctgctgtgtcaaagactgctgctgctcccattgagcgtgtcaagcttttgattcaaaaccaggatgagatgcttaaggctggaaggcttactgagccatacaagggtattcgtgactgtttcggcaggacaattagggatgaaggtattggttcgttgtggagaggaaacaccgctaatgttatccgttacttccccactcaggccttgaactttgcattcaaagattacttcaagaggcttttcaacttcaagaaagacaaggatggctactggaagtggtttgctggtaacttggcatctggaggtgctgctggtgcctcttcccttctctttgtgtactctcttgactatgcacgtacccgtcttgccaatgactccaagtctgccaagaagggaggaggtgaaaggcagttcaatggtcttgttgatgtctacaagaagaccctcaagtcagatggtattgctggactttaccgtggtttcaacatctcgtgtgctggtatcattgtctaccgtggtctctactttggactgtacgactctgtgaagcctgtcctcctcactggagacctgcaggacagtttcttcgctagttttgctcttggatggctcatcaccaatggtgcgggtcttgcgtcgtacccgattgacacggttagaagaagaatgatgatgacatcaggtgaagcggtgaagtacaagagctcatttgatgcgttctcacagatcgtgaagaaggaaggagccaagtctctgttcaagggtgcgggtgccaacatcctgcgtgccgttgcaggtgctggtgtgcttgctggctacgacaagctgcagttaatcgtcttcggcaagaagtatggatctggaggtgcctaagtaccaccaaatcccgcagtcattaagcttcggcttttgtttttttctccattttttttgcagtttcagatttcttttataaaaaagatgttgatgaaatcatttccccataaaattagagaggagcaaggggaaatattatctgttcgacgataaggtttttgttatatggaataaattttgt

SEQ ID NO: 49256 - protein, 420 aa, Arabidopsis thaliana
  peptide (1)..(420): Ceres Seq. ID no. 13647021
KRILSFLLLRSAPTTKGEESRSLNFALPSIFLEVKMVEQTQHPTILQKVSGQLLSSSVSQDIRGYASASKRPATYQKHAAYGNYSNAAFQYPLVAASQIATTTSPVFVQAPGEKGFTNFAIDFMMGGVSAAVSKTAAAPIERVKLLIQNQDEMLKAGRLTEPYKGIRDCFGRTIRDEGIGSLWRGNTANVIRYFPTQALNFAFKDYFKRLFNFKKDKDGYWKWFAGNLASGGAAGASSLLFVYSLDYARTRLANDSKSAKKGGGERQFNGLVDVYKKTLKSDGIAGLYRGFNISCAGIIVYRGLYFGLYDSVKPVLLTGDLQDSFFASFALGWLITNGAGLASYPIDTVRRRMMMTSGEAVKYKSSFDAFSQIVKKEGAKSLFKGAGANILRAVAGAGVLAGYDKLQLIVFGKKYGSGGA

SEQ ID NO: 49257 - protein, 385 aa, Arabidopsis thaliana
  peptide (1)..(385): Ceres Seq. ID no. 13647022
MVEQTQHPTILQKVSGQLLSSSVSQDIRGYASASKRPATYQKHAAYGNYSNAAFQYPLVAASQIATTTSPVFVQAPGEKGFTNFAIDFMMGGVSAAVSKTAAAPIERVKLLIQNQDEMLKAGRLTEPYKGIRDCFGRTIRDEGIGSLWRGNTANVIRYFPTQALNFAFKDYFKRLFNFKKDKDGYWKWFAGNLASGGAAGASSLLFVYSLDYARTRLANDSKSAKKGGGERQFNGLVDVYKKTLKSDGIAGLYRGFNISCAGIIVYRGLYFGLYDSVKPVLLTGDLQDSFFASFALGWLITNGAGLASYPIDTVRRRMMMTSGEAVKYKSSFDAFSQIVKKEGAKSLFKGAGANILRAVAGAGVLAGYDKLQLIVFGKKYGSGGA

SEQ ID NO: 49258 - protein, 297 aa, Arabidopsis thaliana
  peptide (1)..(297): Ceres Seq. ID no. 13647023
MMGGVSAAVSKTAAAPIERVKLLIQNQDEMLKAGRLTEPYKGIRDCFGRTIRDEGIGSLWRGNTANVIRYFPTQALNFAFKDYFKRLFNFKKDKDGYWKWFAGNLASGGAAGASSLLFVYSLDYARTRLANDSKSAKKGGGERQFNGLVDVYKKTLKSDGIAGLYRGFNISCAGIIVYRGLYFGLYDSVKPVLLTGDLQDSFFASFALGWLITNGAGLASYPIDTVRRRMMMTSGEAVKYKSSFDAFSQIVKKEGAKSLFKGAGANILRAVAGAGVLAGYDKLQLIVFGKKYGSGGA

SEQ ID NO: 49259 - DNA, 2298 bp, Arabidopsis thaliana
  misc_feature (1)..(2298): Ceres Seq. ID no. 13588537
  misc_feature (1)..(2298): Ortholog of  Ceres SEQ ID NO 13586013 as cited in SEQ ID NO 1182
gttctctacaacgaactttaaagtaacaaagtacacagaaaggtttttacttcttccttgcttgttgtgtgtattctcattcacatacaattgtttttttgtaactatggagaatactataacgagctctacctcctcaccgaagggccggggagtaaatttctcgaccccgagaggctttggttcaaaatttaagtcaaaatgtaaagaaaccttctttcccgatgatccattcaaaccgatatcgcaagagccaaaccgtttgctaaaaacaaagaagttattggagtattttgtgccaatctttgagtggctcccaaagtatgatatgcaaaaactaaagtatgatgtgctcgccggaatcaccatcaccagtcttgctgttcctcagggcatcagctatgctaagctcgccagtatccctcccatcataggcctatattcaagttttgtgccgccttttgtgtatgccgtgttcggaagttcgaacaatctggcagtgggaacagtcgcagcatgctctttgctgatcgctgagacattcggtgaggagatgataaaaaatgagcctgaactctaccttcatttgatcttcaccgccactctcatcaccggtctattccaatttgctatgggattcttgaggttggggatattggtggatttcttgtcacactcgaccataacgggcttcatgggcggtaccgcaatcatcattctcctacaacagcttaagggcatctttggactagtccattttacgcacaaaaccgatgtcgtatcagttctccactcaatcttagacaaccgggctgagtggaagtggcaaagtaccttggctggtgtctgctttcttgtatttctacaatccactcgatacataaagcaaagatacccaaagctattttgggtatcagcaatgggtccaatggtggtggtcgttgtgggttgcgttgttgcttatttggtgaaaggaacagcacacggcattgctactgttgggcctttaaagaaaggactaaatcctccttctattcaacttttgaactttgactccaagtatctagggatggtgtttaaggccggaatcgtcacaggactcatcgctttggccgaagggatagcaattggaagaagctttgctgtaatgaagaacgaacaaacggacgggaacaaagagatgatagcatttggtcttatgaacgtaattggctccttcacttcttgctatttgacaacggggccattttcaaagacagcagtgaactacaacgcggggacaaagacaccgatgtcgaatgtagtaatgggcgtttgcatgatgcttgtgcttctcttcctagcgcctctattcagctacacaccattagttggtctctcagccatcattatgtcagccatgttgggtctcatcaactacgaggagatgtaccatctcttcaaggttgacaagtttgatttcctcgtctgcatgtccgcctttttcggtgtttcattccttagcatggactacggtctcatcatctccgttggattttctatcgtaagagctttgttgtacgttgcaaggccctccacttgtaaattgggaaggataccaaactcggttatgtttagagacatagaacagtaccctgcctccgaggagatgcttggttatatcattcttcaattaggctctccagtcttttttgccaatagcacttacgtccgtgaacggatcttgaggtggattcgtgatgaacctgaagccatcgagtttcttctccttgatctctctggagtttcaaccattgacatgaccgggatggaaacactactcgaaattcagagaatccttggatcaaaaaacatcaagatggtgataataaatccaagatttgaagtcttggaaaagatgatgttgtcccatttcgtggagaagataggaaaagagtatatgttcttatcgattgacgatgcagttcaagcatgccgatttaatcttaccaccaccaagccggaagtgtgaccttcttcttagttattagtgggaaggttctaataaaatgcgtaatcttttcttttttgtcaatggaagttaaactgcttaacagtggaaccaaaatatagattaagaaagaaaaaaaaaacagaagttaaactgcttatctttgaattatgggaattaaatgtagtggacccaaaatcatgaaatggttttaattagaccactatgattgcttcgtggctatgaaagagttgtaaccgagaaagaaaagcaagaagcgataaatgaaaatttcagtattattgact

SEQ ID NO: 49260 - protein, 669 aa, Arabidopsis thaliana
  peptide (1)..(669): Ceres Seq. ID no. 15220887
FSTTNFKVTKYTERFLLLPCLLCVFSFTYNCFFVTMENTITSSTSSPKGRGVNFSTPRGFGSKFKSKCKETFFPDDPFKPISQEPNRLLKTKKLLEYFVPIFEWLPKYDMQKLKYDVLAGITITSLAVPQGISYAKLASIPPIIGLYSSFVPPFVYAVFGSSNNLAVGTVAACSLLIAETFGEEMIKNEPELYLHLIFTATLITGLFQFAMGFLRLGILVDFLSHSTITGFMGGTAIIILLQQLKGIFGLVHFTHKTDVVSVLHSILDNRAEWKWQSTLAGVCFLVFLQSTRYIKQRYPKLFWVSAMGPMVVVVVGCVVAYLVKGTAHGIATVGPLKKGLNPPSIQLLNFDSKYLGMVFKAGIVTGLIALAEGIAIGRSFAVMKNEQTDGNKEMIAFGLMNVIGSFTSCYLTTGPFSKTAVNYNAGTKTPMSNVVMGVCMMLVLLFLAPLFSYTPLVGLSAIIMSAMLGLINYEEMYHLFKVDKFDFLVCMSAFFGVSFLSMDYGLIISVGFSIVRALLYVARPSTCKLGRIPNSVMFRDIEQYPASEEMLGYIILQLGSPVFFANSTYVRERILRWIRDEPEAIEFLLLDLSGVSTIDMTGMETLLEIQRILGSKNIKMVIINPRFEVLEKMMLSHFVEKIGKEYMFLSIDDAVQACRFNLTTTKPEV

SEQ ID NO: 49261 - protein, 634 aa, Arabidopsis thaliana
  peptide (1)..(634): Ceres Seq. ID no. 15220888
MENTITSSTSSPKGRGVNFSTPRGFGSKFKSKCKETFFPDDPFKPISQEPNRLLKTKKLLEYFVPIFEWLPKYDMQKLKYDVLAGITITSLAVPQGISYAKLASIPPIIGLYSSFVPPFVYAVFGSSNNLAVGTVAACSLLIAETFGEEMIKNEPELYLHLIFTATLITGLFQFAMGFLRLGILVDFLSHSTITGFMGGTAIIILLQQLKGIFGLVHFTHKTDVVSVLHSILDNRAEWKWQSTLAGVCFLVFLQSTRYIKQRYPKLFWVSAMGPMVVVVVGCVVAYLVKGTAHGIATVGPLKKGLNPPSIQLLNFDSKYLGMVFKAGIVTGLIALAEGIAIGRSFAVMKNEQTDGNKEMIAFGLMNVIGSFTSCYLTTGPFSKTAVNYNAGTKTPMSNVVMGVCMMLVLLFLAPLFSYTPLVGLSAIIMSAMLGLINYEEMYHLFKVDKFDFLVCMSAFFGVSFLSMDYGLIISVGFSIVRALLYVARPSTCKLGRIPNSVMFRDIEQYPASEEMLGYIILQLGSPVFFANSTYVRERILRWIRDEPEAIEFLLLDLSGVSTIDMTGMETLLEIQRILGSKNIKMVIINPRFEVLEKMMLSHFVEKIGKEYMFLSIDDAVQACRFNLTTTKPEV

SEQ ID NO: 49262 - protein, 560 aa, Arabidopsis thaliana
  peptide (1)..(560): Ceres Seq. ID no. 15220889
MQKLKYDVLAGITITSLAVPQGISYAKLASIPPIIGLYSSFVPPFVYAVFGSSNNLAVGTVAACSLLIAETFGEEMIKNEPELYLHLIFTATLITGLFQFAMGFLRLGILVDFLSHSTITGFMGGTAIIILLQQLKGIFGLVHFTHKTDVVSVLHSILDNRAEWKWQSTLAGVCFLVFLQSTRYIKQRYPKLFWVSAMGPMVVVVVGCVVAYLVKGTAHGIATVGPLKKGLNPPSIQLLNFDSKYLGMVFKAGIVTGLIALAEGIAIGRSFAVMKNEQTDGNKEMIAFGLMNVIGSFTSCYLTTGPFSKTAVNYNAGTKTPMSNVVMGVCMMLVLLFLAPLFSYTPLVGLSAIIMSAMLGLINYEEMYHLFKVDKFDFLVCMSAFFGVSFLSMDYGLIISVGFSIVRALLYVARPSTCKLGRIPNSVMFRDIEQYPASEEMLGYIILQLGSPVFFANSTYVRERILRWIRDEPEAIEFLLLDLSGVSTIDMTGMETLLEIQRILGSKNIKMVIINPRFEVLEKMMLSHFVEKIGKEYMFLSIDDAVQACRFNLTTTKPEV

SEQ ID NO: 49263 - DNA, 1790 bp, Arabidopsis thaliana
  misc_feature (1)..(1790): Ceres Seq. ID no. 13592250
  misc_feature (1)..(1790): Ortholog of  Ceres SEQ ID NO 14311862 as cited in SEQ ID NO 51654
  misc_feature (1)..(1790): Ortholog of  Ceres SEQ ID NO 13597334 as cited in SEQ ID NO 64244
  misc_feature (1)..(1790): Ortholog of  Ceres SEQ ID NO 15224550 as cited in SEQ ID NO 0
aagaagaagaaatagaaaagttcggattttgatctgtgtggttggattgttgcaagaactaaaccagacccacctttcaaaactttgtccctaacgaacaacattaatcattcattctcctgtgtgagctcttcctcttcttctgtttaaggttctttctccttcttcttttgagggggtttaaagcttcagtggacgaaaagagtttgttttttgggtgacaatgggaggagtggtgcatcttagcacggcgaagttagctagaggtttcttagtgtgtttatgtctttggggttttttctcgctatcatacgccgcaaggtccggcgtatcaaagcagaagtttgaagtgaagaaacatttgaacaggctgaacaaacctgctgtcaaaagcattcagagttcagatggtgatgtgattgactgtgttccaatctcaaagcaaccagcttttgatcatccgttcctcaaagatcacaagattcagatgaagcctaattaccaccctgaaggactctttgatgacaacaaagtgtctgctcctaaatcaaatgagaaagaagggcatattcctcagttgtggcatcgatatggtaaatgttctgaaggaactattcccatgaggaggacaaaggaagatgatgttttgagagcaagttcagttaaaagatatggcaagaagaagcgtagaagtgtccctttacctaaatctgcagaacctgaccttattaaccaaagtggtcaccagcatgccatagcttatgtagaaggagataagtactatggagctaaggctactataaatgtgtgggagccaaagatacagcagcagaatgagttcagcttgtcacagatatggcttcttggtggctcattcggacaagatcttaatagcatcgaagctggttggcaggtgagcccggatctgtatggtgacaataacacgagactcttcacttactggactagtgatgcatatcaagctaccggttgctacaatcttctttgctccggttttattcaaatcaacagtgacatagcaatgggagcaagcatttccccggtctctggatatcgtaactcgcagtacgatatcagtattctgatctggaaggatcctaaagagggacactggtggatgcaatttgggaacggctatgttttaggctattggccatcttttctcttctcctacttgacagaaagtgcatcgatgattgaatggggaggagaagtcgtgaactcacaatcagatggccagcacacttcaacacaaatgggcagtggtaaatttccagaagaaggctttagcaaagcaagttacttcaggaacattcaggtggttgatgggtcaaacaacctcaaggcacctaaaggacttggaacattcactgaacagtctaactgttatgatgttcaaaccggaagcaatgatgattggggtcattacttttactatggaggccctggtaaaaaccagaagtgtccataagctaggctccaagtagtagtggctcgtctctcgagttatcttgtcttgtgaattcaccttgtttctttctacacacactcactcaaatccgccttcttgggtagtttttagggatggttaaagttatgtaatggtaaaagtttggtgtctttttctccatgtaagtaggtggggaagaagtggaaaggtgtggcttaagtttctttgaaaactcagaaactttggcccttagtgtaattttactttgtctcctttgtattgtgatttgtttaaacaagtgaatgaatctctctttctc

SEQ ID NO: 49264 - protein, 422 aa, Arabidopsis thaliana
  peptide (1)..(422): Ceres Seq. ID no. 13592251
MGGVVHLSTAKLARGFLVCLCLWGFFSLSYAARSGVSKQKFEVKKHLNRLNKPAVKSIQSSDGDVIDCVPISKQPAFDHPFLKDHKIQMKPNYHPEGLFDDNKVSAPKSNEKEGHIPQLWHRYGKCSEGTIPMRRTKEDDVLRASSVKRYGKKKRRSVPLPKSAEPDLINQSGHQHAIAYVEGDKYYGAKATINVWEPKIQQQNEFSLSQIWLLGGSFGQDLNSIEAGWQVSPDLYGDNNTRLFTYWTSDAYQATGCYNLLCSGFIQINSDIAMGASISPVSGYRNSQYDISILIWKDPKEGHWWMQFGNGYVLGYWPSFLFSYLTESASMIEWGGEVVNSQSDGQHTSTQMGSGKFPEEGFSKASYFRNIQVVDGSNNLKAPKGLGTFTEQSNCYDVQTGSNDDWGHYFYYGGPGKNQKCP

SEQ ID NO: 49265 - protein, 334 aa, Arabidopsis thaliana
  peptide (1)..(334): Ceres Seq. ID no. 13592252
MKPNYHPEGLFDDNKVSAPKSNEKEGHIPQLWHRYGKCSEGTIPMRRTKEDDVLRASSVKRYGKKKRRSVPLPKSAEPDLINQSGHQHAIAYVEGDKYYGAKATINVWEPKIQQQNEFSLSQIWLLGGSFGQDLNSIEAGWQVSPDLYGDNNTRLFTYWTSDAYQATGCYNLLCSGFIQINSDIAMGASISPVSGYRNSQYDISILIWKDPKEGHWWMQFGNGYVLGYWPSFLFSYLTESASMIEWGGEVVNSQSDGQHTSTQMGSGKFPEEGFSKASYFRNIQVVDGSNNLKAPKGLGTFTEQSNCYDVQTGSNDDWGHYFYYGGPGKNQKCP

SEQ ID NO: 49266 - protein, 290 aa, Arabidopsis thaliana
  peptide (1)..(290): Ceres Seq. ID no. 13592253
MRRTKEDDVLRASSVKRYGKKKRRSVPLPKSAEPDLINQSGHQHAIAYVEGDKYYGAKATINVWEPKIQQQNEFSLSQIWLLGGSFGQDLNSIEAGWQVSPDLYGDNNTRLFTYWTSDAYQATGCYNLLCSGFIQINSDIAMGASISPVSGYRNSQYDISILIWKDPKEGHWWMQFGNGYVLGYWPSFLFSYLTESASMIEWGGEVVNSQSDGQHTSTQMGSGKFPEEGFSKASYFRNIQVVDGSNNLKAPKGLGTFTEQSNCYDVQTGSNDDWGHYFYYGGPGKNQKCP

SEQ ID NO: 49267 - DNA, 1382 bp, Arabidopsis thaliana; identical to SEQ ID NO: 22475
  misc_feature (1)..(1382): Ceres Seq. ID no. 13592682
  misc_feature (1)..(1382): Ortholog of  Ceres SEQ ID NO 14301830 as cited in SEQ ID NO 62310
  misc_feature (1)..(1382): Ortholog of  Ceres SEQ ID NO 15179524 as cited in SEQ ID NO 0

SEQ ID NO: 49268 - protein, 357 aa, Arabidopsis thaliana; identical to SEQ ID NO: 22476
  peptide (1)..(357): Ceres Seq. ID no. 13592683

SEQ ID NO: 49269 - protein, 321 aa, Arabidopsis thaliana; identical to SEQ ID NO: 22477
  peptide (1)..(321): Ceres Seq. ID no. 13592684

SEQ ID NO: 49270 - protein, 259 aa, Arabidopsis thaliana; identical to SEQ ID NO: 22478
  peptide (1)..(259): Ceres Seq. ID no. 13592685

SEQ ID NO: 49271 - DNA, 1268 bp, Arabidopsis thaliana
  misc_feature (1)..(1268): Ceres Seq. ID no. 13588538
  misc_feature (1)..(1268): Ortholog of  Ceres SEQ ID NO 15178909 as cited in SEQ ID NO 0
gtcagaaaaccaaaaaataaataaataaaaaaatagaataataaaaataaaaataataataaatgggttcatatttaggaatttctgcagttcttttcgtaatatctttgctgggattttcagccaatgctgaggtgttcaacgttggtggttctccaggttctgatattactcaggcacttctgaaagcattcacatcagcatgccaagctccgacagcgagcaaggtggtgatcacaaagggtgagttcaagcttggtgagatcgagatgacgggcccatgcaaagctccagtcgagatcaacctccaaggtactctcaaagctgatggaaaagctatccaggggaaggaaagatgggtcgtcttcctaagaattaatggctttaagttaaacggaggtggaatcttcgacggtgaaggcaatgcagcttggagagtcaataactgtcacaagactttcgagtgcaagaaacttcccatcagtataaggtttgatttcgtggagaatgctgagattagagacatatcctcgatagatgctaagaacttccacataaacgttctcggcgccaagaacatgacctttgataacgtcaaggtcatcgctccggcagagagccccaacactgacggtatccatttgggaagaagtgaaggagtcaagatcctcaactctaagatagccaccggagatgactgcatctctgttggggatgggatgaagaacctccacgtcgagaacgttatgtgcggtcctggacacggaatcagtgtcgggagtcttggaaggtacgtgcatgagcaagatgtcacaggcattactgtcgtgaactgcacccttcagggaactgacaatgggctaaggatcaagacatggccatctgcggcttgcgccaccaccgcctctggtattcattttgagaacatcatccttaacaacgttagcaacccaatcctcattgaccaggagtactgcccttggaaccagtgcaacaagcagaaaccatcgacgattaagctggtggacataagcttcaagaatattagaggaacatcagggaacaaggacgcagtgaagctattgtgcagcaaggcgcatccatgtgcgaatgttgagattggaaacattaaccttgagtacaagggagccgatggtccaccgactttcatgtgctcaaacgtttcccctaagcttgtgggaactcagaacccgaaggcttgtagcgccggacccactcccaagacagctgctaagggagacttgtag

SEQ ID NO: 49272 - protein, 401 aa, Arabidopsis thaliana
  peptide (1)..(401): Ceres Seq. ID no. 13588539
MGSYLGISAVLFVISLLGFSANAEVFNVGGSPGSDITQALLKAFTSACQAPTASKVVITKGEFKLGEIEMTGPCKAPVEINLQGTLKADGKAIQGKERWVVFLRINGFKLNGGGIFDGEGNAAWRVNNCHKTFECKKLPISIRFDFVENAEIRDISSIDAKNFHINVLGAKNMTFDNVKVIAPAESPNTDGIHLGRSEGVKILNSKIATGDDCISVGDGMKNLHVENVMCGPGHGISVGSLGRYVHEQDVTGITVVNCTLQGTDNGLRIKTWPSAACATTASGIHFENIILNNVSNPILIDQEYCPWNQCNKQKPSTIKLVDISFKNIRGTSGNKDAVKLLCSKAHPCANVEIGNINLEYKGADGPPTFMCSNVSPKLVGTQNPKACSAGPTPKTAAKGDL

SEQ ID NO: 49273 - protein, 332 aa, Arabidopsis thaliana
  peptide (1)..(332): Ceres Seq. ID no. 13588540
MTGPCKAPVEINLQGTLKADGKAIQGKERWVVFLRINGFKLNGGGIFDGEGNAAWRVNNCHKTFECKKLPISIRFDFVENAEIRDISSIDAKNFHINVLGAKNMTFDNVKVIAPAESPNTDGIHLGRSEGVKILNSKIATGDDCISVGDGMKNLHVENVMCGPGHGISVGSLGRYVHEQDVTGITVVNCTLQGTDNGLRIKTWPSAACATTASGIHFENIILNNVSNPILIDQEYCPWNQCNKQKPSTIKLVDISFKNIRGTSGNKDAVKLLCSKAHPCANVEIGNINLEYKGADGPPTFMCSNVSPKLVGTQNPKACSAGPTPKTAAKGDL

SEQ ID NO: 49274 - protein, 229 aa, Arabidopsis thaliana
  peptide (1)..(229): Ceres Seq. ID no. 13588541
MTFDNVKVIAPAESPNTDGIHLGRSEGVKILNSKIATGDDCISVGDGMKNLHVENVMCGPGHGISVGSLGRYVHEQDVTGITVVNCTLQGTDNGLRIKTWPSAACATTASGIHFENIILNNVSNPILIDQEYCPWNQCNKQKPSTIKLVDISFKNIRGTSGNKDAVKLLCSKAHPCANVEIGNINLEYKGADGPPTFMCSNVSPKLVGTQNPKACSAGPTPKTAAKGDL

SEQ ID NO: 49275 - DNA, 1966 bp, Arabidopsis thaliana; identical to SEQ ID NO: 45864
  misc_feature (1)..(1966): Ceres Seq. ID no. 13591692
  misc_feature (1)..(1966): Ortholog of  Ceres SEQ ID NO 13656435 as cited in SEQ ID NO 65853

SEQ ID NO: 49276 - protein, 460 aa, Arabidopsis thaliana; identical to SEQ ID NO: 45865
  peptide (1)..(460): Ceres Seq. ID no. 13591693

SEQ ID NO: 49277 - protein, 258 aa, Arabidopsis thaliana; identical to SEQ ID NO: 45866
  peptide (1)..(258): Ceres Seq. ID no. 13591694

SEQ ID NO: 49278 - DNA, 1962 bp, Arabidopsis thaliana
  misc_feature (1)..(1962): Ceres Seq. ID no. 13648455
  misc_feature (1)..(1962): Ortholog of  Ceres SEQ ID NO 14308709 as cited in SEQ ID NO 55376
  misc_feature (1)..(1962): Ortholog of  Ceres SEQ ID NO 15178157 as cited in SEQ ID NO 57481
  misc_feature (1)..(1962): Ortholog of  Ceres SEQ ID NO 13597407 as cited in SEQ ID NO 64106
  misc_feature (1)..(1962): Ortholog of  Ceres SEQ ID NO 12637747 as cited in SEQ ID NO 0
gtcgtctttttaaaaacgttttactttccacggcgaattttggtctgaatccaaattcttccctagtttgaaaaatcttctgtattctgaaaagagattttatgcgtatcgctgaaataggaagaaaacagattcctttccatttcccaaattttgtcattgagtcttggcatttcaaccaatcgcaatttattgaaattccggcgagtcattagatttttttggattccgtttcaaggtacggtgctttttcgcagattgagaagagcttaataagaaagatgacattgacgatcccaaacgcacctgggagctccgggtacttggatatgttcccagagagaaggatgtcgtattttgggaattcttacattctgggtttgactgtcactgccggaatcggtggccttctgttcggttatgatacaggtgtaatttccggtgcccttttgtacattaaggatgatttcgaagttgttaagcagagcagtttcttacaggaaactattgtaagtatggctttagttggtgccatgattggtgctgcagctggaggttggatcaatgactactacggtcgtaaaaaggcgactctttttgcagatgttgtctttgcagctggagctatcgttatggctgctgctcctgatccgtatgttttgatatcgggtcgtctcttggtcggtttaggagttggtgttgcttctgtgactgctccggtttatatagcggaagcatctccatcggaagttagaggtggacttgtgagcaccaacgtattgatgatcactggtggacagtttctttcatatctcgttaattctgctttcacacaggttccaggaacatggagatggatgcttggtgtttcaggcgttcccgctgtgattcagttcatcctcatgcttttcatgccagaatcccctcgatggcttttcatgaaaaatcgtaaagcggaagccatccaagtgctcgccagaacctatgacatctcgcggttagaagacgagattgatcatctttcagcggctgaagaggaagaaaaacaaaggaagcgcactgttggctacttggatgttttcagatccaaagaattgagacttgcatttcttgccggagcaggacttcaggcgtttcagcagttcactggtatcaatacagttatgtactacagccctacgatagtccaaatggctggatttcactcaaaccagctcgctttgttcctgtctctcattgttgctgccatgaatgctgctggaacagtcgtggggatttacttcatcgatcattgtggaaggaaaaagctagctctctcaagtttatttggcgtcattatatcactcttaatcctctcagtctcgtttttcaaacaatctgagacatcatctgatggagggctctatggttggctcgctgtgcttggcttagctctatacattgttttctttgcaccgggaatgggaccagtcccatggacggtgaactcagagatataccctcaacaataccgaggcatatgcggaggcatgtcagctacagttaactggatcagcaatttgattgtggcacaaacattcttgacaatcgcggaagctgctggaacaggaatgactttcttgattttggcgggaattgcggttcttgctgtaatctttgtgattgtgtttgtccctgagactcaagggctaacgttttcggaagttgaacagatttggaaagaaagagcttatggaaatatcagtggctggggcagtagcagtgatagcaacaacatggaagggttactcgagcagggatctcaatcttaaagatcttggatggctcatgagtcatgcatgacttacacattgtgaaatcacatagtagtaaaccgggattggttccggtttagcaatgtgagatgtatgtgatgttggaattgtaatgttcttaggaactgtgattgtaaataaatacatt

SEQ ID NO: 49279 - protein, 509 aa, Arabidopsis thaliana
  peptide (1)..(509): Ceres Seq. ID no. 13648456
MTLTIPNAPGSSGYLDMFPERRMSYFGNSYILGLTVTAGIGGLLFGYDTGVISGALLYIKDDFEVVKQSSFLQETIVSMALVGAMIGAAAGGWINDYYGRKKATLFADVVFAAGAIVMAAAPDPYVLISGRLLVGLGVGVASVTAPVYIAEASPSEVRGGLVSTNVLMITGGQFLSYLVNSAFTQVPGTWRWMLGVSGVPAVIQFILMLFMPESPRWLFMKNRKAEAIQVLARTYDISRLEDEIDHLSAAEEEEKQRKRTVGYLDVFRSKELRLAFLAGAGLQAFQQFTGINTVMYYSPTIVQMAGFHSNQLALFLSLIVAAMNAAGTVVGIYFIDHCGRKKLALSSLFGVIISLLILSVSFFKQSETSSDGGLYGWLAVLGLALYIVFFAPGMGPVPWTVNSEIYPQQYRGICGGMSATVNWISNLIVAQTFLTIAEAAGTGMTFLILAGIAVLAVIFVIVFVPETQGLTFSEVEQIWKERAYGNISGWGSSSDSNNMEGLLEQGSQS

SEQ ID NO: 49280 - protein, 493 aa, Arabidopsis thaliana
  peptide (1)..(493): Ceres Seq. ID no. 13648457
MFPERRMSYFGNSYILGLTVTAGIGGLLFGYDTGVISGALLYIKDDFEVVKQSSFLQETIVSMALVGAMIGAAAGGWINDYYGRKKATLFADVVFAAGAIVMAAAPDPYVLISGRLLVGLGVGVASVTAPVYIAEASPSEVRGGLVSTNVLMITGGQFLSYLVNSAFTQVPGTWRWMLGVSGVPAVIQFILMLFMPESPRWLFMKNRKAEAIQVLARTYDISRLEDEIDHLSAAEEEEKQRKRTVGYLDVFRSKELRLAFLAGAGLQAFQQFTGINTVMYYSPTIVQMAGFHSNQLALFLSLIVAAMNAAGTVVGIYFIDHCGRKKLALSSLFGVIISLLILSVSFFKQSETSSDGGLYGWLAVLGLALYIVFFAPGMGPVPWTVNSEIYPQQYRGICGGMSATVNWISNLIVAQTFLTIAEAAGTGMTFLILAGIAVLAVIFVIVFVPETQGLTFSEVEQIWKERAYGNISGWGSSSDSNNMEGLLEQGSQS

SEQ ID NO: 49281 - protein, 487 aa, Arabidopsis thaliana
  peptide (1)..(487): Ceres Seq. ID no. 13648458
MSYFGNSYILGLTVTAGIGGLLFGYDTGVISGALLYIKDDFEVVKQSSFLQETIVSMALVGAMIGAAAGGWINDYYGRKKATLFADVVFAAGAIVMAAAPDPYVLISGRLLVGLGVGVASVTAPVYIAEASPSEVRGGLVSTNVLMITGGQFLSYLVNSAFTQVPGTWRWMLGVSGVPAVIQFILMLFMPESPRWLFMKNRKAEAIQVLARTYDISRLEDEIDHLSAAEEEEKQRKRTVGYLDVFRSKELRLAFLAGAGLQAFQQFTGINTVMYYSPTIVQMAGFHSNQLALFLSLIVAAMNAAGTVVGIYFIDHCGRKKLALSSLFGVIISLLILSVSFFKQSETSSDGGLYGWLAVLGLALYIVFFAPGMGPVPWTVNSEIYPQQYRGICGGMSATVNWISNLIVAQTFLTIAEAAGTGMTFLILAGIAVLAVIFVIVFVPETQGLTFSEVEQIWKERAYGNISGWGSSSDSNNMEGLLEQGSQS

SEQ ID NO: 49282 - DNA, 2056 bp, Arabidopsis thaliana
  misc_feature (1)..(2056): Ceres Seq. ID no. 14304349
  misc_feature (1)..(2056): Ortholog of  Ceres SEQ ID NO 14310547 as cited in SEQ ID NO 55132
  misc_feature (1)..(2056): Ortholog of  Ceres SEQ ID NO 13596261 as cited in SEQ ID NO 67817
  misc_feature (1)..(2056): Ortholog of  Ceres SEQ ID NO 13662360 as cited in SEQ ID NO 68830
actttttcgtctagatacattcttcgtgaagaaatccaagtgcacacattcattagtgttggacggacccattttattttggatttttttgtataattctttggggtttttttgttaataattcacttctgtctataatatgattatgattgttcatcatattttagctgtaatttcctctcttgaacaaaattattattttcgtgatgtttttaagtacgtgacgaaagatcatttggtgatctcactgacatgatttgcccagcctgtcaggtttacctatggtcaaatatcattttctcgattttgccccaaacggtcaaggcatatatccccaatcttcaaagggtatttatgtacttttcgctattaaccgtgtggctatatgaagccgattcctcataacaactacaaaaaaggaaagcttcttccctccggcaaattcttacgtttctccggcggttagaaaaatgacaccacagatcaaaactcatctcttgccgaagcaagaaccttcttcgtctgagaaccatggatcatcaacctccggcatcgttttcaacgtgtcaacgagtataatcggagccggaataatgtcgatgccggcggcgtttaaagttcttggaatagttccagcgtttttgattatcacgatcatagcttggctttccacaatttccgttggatttctgatgaaatcaactctcgccggagaatcaactacttacgccggagttatgaaagagtcgtttggtaaaacaggatccatcgctgtacagattgctacgatggttgctacttttggttgtatgattatattttcgattattataggagatgtgctttctggtaatgaaaatggtggtcctgaacatattggagttttgcaagaatggtttggttcttactggtggaacacgagaatcttcgctttgttatttgtctacggctttgtcttgcttccattggtcctgcgtagacgagtcgaaagactggcaattagttccgctgtatcgtttcttcttgcggttctatttgttgtcataagctcggtgctggcgatttccgcgctggtgaatggacaaacgaagaatccaagactgtttccggagttgagcaatggaggatcgttctggcaactcttcacagcttcccctgttatagttacagccttcacgtttcacttcaatgttcatccaattggattcgagctcaaagatccattacaagtgatcccagcaactaagatctctgtcatcttgtgtgctgctatctacttcgcaactggactctttggttaccttctctttggagatgcaactatgtcggatattctagtgaactttgaccagagctctggttcttccattggttctcttctcaacgacattgtcagactcagctacgtgcttcacctcatgctggtctttcctctcctgaacttctcattgagagcaaatctcgacgaactcttgtaccccaagaagccgtccttggaaaaagacacaaaaagattcatcggactcactctggctctactgatttgctgtttcttgtctgcaatcgctgtaccagacatttggtacttctttcagttcatgggatcaaccatcacagtctccatagcattcatatttccagccgccattgttctaaggaatatccatggtgtatcaacctcaagagagaagatcgtagctgcaataatgcttgttcttgctgttgccactagcattattgctatctcgacaaatttatacagcctcgcagcaaactagtcgttgaaaaaagttttgcaaacagtcccttccatgatcacttcaaagaaatctgtaaaattattagcttgccgtagcattcatatttatatctttgtgaaataggtttgtcagaaaatgcaatgtaatagctatacaaagtgcaatttttgttgctgcttgaaacagagaaagaggaaatgaacaactcttcaaaacttgtattctttaaattactttttgtagaccattatttgaatgaacaaagtacatctgtatcagactattcctttctttgg

SEQ ID NO: 49283 - protein, 435 aa, Arabidopsis thaliana; identical to SEQ ID NO: 48079
  peptide (1)..(435): Ceres Seq. ID no. 14304350

SEQ ID NO: 49284 - protein, 394 aa, Arabidopsis thaliana; identical to SEQ ID NO: 48080
  peptide (1)..(394): Ceres Seq. ID no. 14304351

SEQ ID NO: 49285 - protein, 392 aa, Arabidopsis thaliana; identical to SEQ ID NO: 48081
  peptide (1)..(392): Ceres Seq. ID no. 14304352

SEQ ID NO: 49286 - DNA, 1429 bp, Arabidopsis thaliana; identical to SEQ ID NO: 39266
  misc_feature (1)..(1429): Ceres Seq. ID no. 13575008
  misc_feature (1)..(1429): Ortholog of  Ceres SEQ ID NO 12781552 as cited in SEQ ID NO 51997
  misc_feature (1)..(1429): Ortholog of  Ceres SEQ ID NO 15176548 as cited in SEQ ID NO 53387
  misc_feature (1)..(1429): Ortholog of  Ceres SEQ ID NO 15169228 as cited in SEQ ID NO 55423
  misc_feature (1)..(1429): Ortholog of  Ceres SEQ ID NO 14312196 as cited in SEQ ID NO 56984
  misc_feature (1)..(1429): Ortholog of  Ceres SEQ ID NO 13597237 as cited in SEQ ID NO 64136
  misc_feature (1)..(1429): Ortholog of  Ceres SEQ ID NO 13598601 as cited in SEQ ID NO 69129

SEQ ID NO: 49287 - protein, 286 aa, Arabidopsis thaliana; identical to SEQ ID NO: 39267
  peptide (1)..(286): Ceres Seq. ID no. 13575009

SEQ ID NO: 49288 - protein, 240 aa, Arabidopsis thaliana; identical to SEQ ID NO: 39268
  peptide (1)..(240): Ceres Seq. ID no. 13575010

SEQ ID NO: 49289 - protein, 226 aa, Arabidopsis thaliana; identical to SEQ ID NO: 39269
  peptide (1)..(226): Ceres Seq. ID no. 13575011

SEQ ID NO: 49290 - DNA, 1306 bp, Arabidopsis thaliana
  misc_feature (1)..(1306): Ceres Seq. ID no. 13647617
  misc_feature (1)..(1306): Ortholog of  Ceres SEQ ID NO 12364737 as cited in SEQ ID NO 51089
  misc_feature (1)..(1306): Ortholog of  Ceres SEQ ID NO 13595567 as cited in SEQ ID NO 56760
  misc_feature (1)..(1306): Ortholog of  Ceres SEQ ID NO 13655302 as cited in SEQ ID NO 63307
  misc_feature (1)..(1306): Ortholog of  Ceres SEQ ID NO 13597389 as cited in SEQ ID NO 63426
  misc_feature (1)..(1306): Ortholog of  Ceres SEQ ID NO 13597380 as cited in SEQ ID NO 64054
  misc_feature (1)..(1306): Ortholog of  Ceres SEQ ID NO 12625474 as cited in SEQ ID NO 64169
  misc_feature (1)..(1306): Ortholog of  Ceres SEQ ID NO 13597502 as cited in SEQ ID NO 64681
  misc_feature (1)..(1306): Ortholog of  Ceres SEQ ID NO 15180805 as cited in SEQ ID NO 0
gaaaaatcaagaaatatggccacaagagcttctacatctagcagagtctctccagctttcactttcctcgtcatcttcttcctcttatctctcactgcttcagtagaagctgctggtcgtggagttaacaatgacaagaaaggcggcggattaggagcttctttcatattcggagattctctagtcgatgccggaaataataattatctatcgacgttgtctagggctaatatgaagcctaatggtattgatttcaaagcctccggaggaactcctaccggccggttcaccaatggacggaccatcggtgatatcgttggggaagaactcggatcagcgaactacgcgatcccgttcttggcaccagacgcgaagggaaaagctttattagccggagtgaactatgcatctggaggaggaggaatcatgaatgccaccgggagaatctttgtgaatagattaggtatggatgtacaagttgatttcttcaacactacacggaaacagtttgatgatctacttggaaaagagaaagcaaaagattacatagccaagaaatcgatattctcaatcactataggagcaaatgatttcctcaacaattatctattcccactactctcggtaggaacacggttcactcaaactcccgatgattttattggcgacatgcttgaacatctacgcgaccaactaaccaggctgtatcaattggatgcgaggaagtttgtgatcgggaacgttggaccgattggatgcataccgtaccagaaaacaatcaatcaattagacgaaaacgagtgtgtggatttggctaataaactagcaaatcaatacaatgttcggttaaagagtttattagaggaactaaacaagaaacttcccggagcaatgtttgtccatgcaaacgtctacgatctcgtcatggagctcattactaactacgataaatacgggttcaaaagtgcgacaaaggcttgttgcggtaatggaggacaatacgcgggtataattccgtgcggaccgacttcgagtttgtgtgaagagagggataaatatgtgttttgggatccttatcatccgagtgaagcagcaaatgtcatcatcgcgaagcaattgttatatggtgatgttaaagttatatctccagttaatctcagcaaacttagagatatgtgatttgattgtttgttgaactaaattaaatgtcccttggaggtatttatatacataatttgttatacgccaagttaagattactctttcactctttgtatatgtatgtgtgttggtcgtgtttgatttt

SEQ ID NO: 49291 - protein, 392 aa, Arabidopsis thaliana
  peptide (1)..(392): Ceres Seq. ID no. 13647618
EKSRNMATRASTSSRVSPAFTFLVIFFLLSLTASVEAAGRGVNNDKKGGGLGASFIFGDSLVDAGNNNYLSTLSRANMKPNGIDFKASGGTPTGRFTNGRTIGDIVGEELGSANYAIPFLAPDAKGKALLAGVNYASGGGGIMNATGRIFVNRLGMDVQVDFFNTTRKQFDDLLGKEKAKDYIAKKSIFSITIGANDFLNNYLFPLLSVGTRFTQTPDDFIGDMLEHLRDQLTRLYQLDARKFVIGNVGPIGCIPYQKTINQLDENECVDLANKLANQYNVRLKSLLEELNKKLPGAMFVHANVYDLVMELITNYDKYGFKSATKACCGNGGQYAGIIPCGPTSSLCEERDKYVFWDPYHPSEAANVIIAKQLLYGDVKVISPVNLSKLRDM

SEQ ID NO: 49292 - protein, 387 aa, Arabidopsis thaliana
  peptide (1)..(387): Ceres Seq. ID no. 13647619
MATRASTSSRVSPAFTFLVIFFLLSLTASVEAAGRGVNNDKKGGGLGASFIFGDSLVDAGNNNYLSTLSRANMKPNGIDFKASGGTPTGRFTNGRTIGDIVGEELGSANYAIPFLAPDAKGKALLAGVNYASGGGGIMNATGRIFVNRLGMDVQVDFFNTTRKQFDDLLGKEKAKDYIAKKSIFSITIGANDFLNNYLFPLLSVGTRFTQTPDDFIGDMLEHLRDQLTRLYQLDARKFVIGNVGPIGCIPYQKTINQLDENECVDLANKLANQYNVRLKSLLEELNKKLPGAMFVHANVYDLVMELITNYDKYGFKSATKACCGNGGQYAGIIPCGPTSSLCEERDKYVFWDPYHPSEAANVIIAKQLLYGDVKVISPVNLSKLRDM

SEQ ID NO: 49293 - protein, 315 aa, Arabidopsis thaliana
  peptide (1)..(315): Ceres Seq. ID no. 13647620
MKPNGIDFKASGGTPTGRFTNGRTIGDIVGEELGSANYAIPFLAPDAKGKALLAGVNYASGGGGIMNATGRIFVNRLGMDVQVDFFNTTRKQFDDLLGKEKAKDYIAKKSIFSITIGANDFLNNYLFPLLSVGTRFTQTPDDFIGDMLEHLRDQLTRLYQLDARKFVIGNVGPIGCIPYQKTINQLDENECVDLANKLANQYNVRLKSLLEELNKKLPGAMFVHANVYDLVMELITNYDKYGFKSATKACCGNGGQYAGIIPCGPTSSLCEERDKYVFWDPYHPSEAANVIIAKQLLYGDVKVISPVNLSKLRDM

SEQ ID NO: 49294 - DNA, 2055 bp, Arabidopsis thaliana; identical to SEQ ID NO: 45977
  misc_feature (1)..(2055): Ceres Seq. ID no. 13576063
  misc_feature (1)..(2055): Ortholog of  Ceres SEQ ID NO 13600098 as cited in SEQ ID NO 0

SEQ ID NO: 49295 - protein, 543 aa, Arabidopsis thaliana; identical to SEQ ID NO: 45978
  peptide (1)..(543): Ceres Seq. ID no. 13576064

SEQ ID NO: 49296 - protein, 489 aa, Arabidopsis thaliana; identical to SEQ ID NO: 45979
  peptide (1)..(489): Ceres Seq. ID no. 13576065

SEQ ID NO: 49297 - protein, 339 aa, Arabidopsis thaliana; identical to SEQ ID NO: 45980
  peptide (1)..(339): Ceres Seq. ID no. 13576066

SEQ ID NO: 49298 - DNA, 1498 bp, Arabidopsis thaliana
  misc_feature (1)..(1498): Ceres Seq. ID no. 13588542
  misc_feature (1)..(1498): Ortholog of  Ceres SEQ ID NO 14313532 as cited in SEQ ID NO 20462
atccttatcactcttcctcaaaacttcgaaaatgcatgcgatcgatttcaaagagattcaggagaagctctctgatggattccggccttggcaacgatcgtttcagttctgggctcgtgccactgatatctacaccggatacaaggtatttcaacttcgtatgaacttcgtcaaggatgttaataagcacgaggagatgtgggagagacaacatgaacttgctgctcataaagtttattctatgtgctctgaccttggtggtttcttccttaagattgcacaaattctagggaaacctgacttggctccagctgcttgggtgagaaaactcgtcactttgtgtgatcaagctcctgccacaccatttgatgccgttcgagttgtcctggagaaagagttaggtaaaagcatcgaacaagtgtttgaaacatttgatgagaagcctcttggctctgcttctattgctcaggtacaccgagcaagagtaaagggtgacaagagggatgttgttgtaaaggtccaacatcctggcgttgagaagttgatgatggttgatatcagaaacttgcaaatatttgcattatacatgcagaaaactgatatcaaatttgacttgttctccatgacaaaggaaatagagaagcagattgggtatgaattcgactttaaaagggaggccaatgcaatggagaagatccgacgttttctatatgataacaatagaaagagtcctgttctggttcccagggtgtttccaaatttggtgaccaggaaggttctggttatggaattcatgaacggaatcccgatcttgagccttggtgatgagatggcaaaaagagggataaatcctcatggtaaaatggcagaggcagcaaaattcaatatactacacagtttgtcccaagcatatggccaaatgatactgaagagtggtttctttcatgcggatccacatcctgggaatatcttgattggtaaaggttcagaggcaagtcatcttttgtttgtagttgcactgctggactatggtcaagtgaaagaactccctgaccacctgagacttggttatgcaaatttggtaattgccatcgctgataacaatgcgtcattggcgttacagagctttagggaacttggtatagctacagtagccaagtgtaagaatgagcaacaagagcttctccagttagcaaaaacaatgttcgacacagagatgcctcctggtacgacaactctgcaacctttctcagaagactcttcgatcaaaaagatttcggttgaggcatttccagaggaactcttctctgttcttcgcacagtagttctgttaagaggactcagcgtagggattggcattaattactcctgcgctcaacactggagggctatggcagaagaggctttgcatgcatctggaagactctcaacaggtagaaagcagaagcgtcgatgtagttctcttagaaggctatacccagggccaagagagagttaa

SEQ ID NO: 49299 - protein, 498 aa, Arabidopsis thaliana
  peptide (1)..(498): Ceres Seq. ID no. 13588543
SLSLFLKTSKMHAIDFKEIQEKLSDGFRPWQRSFQFWARATDIYTGYKVFQLRMNFVKDVNKHEEMWERQHELAAHKVYSMCSDLGGFFLKIAQILGKPDLAPAAWVRKLVTLCDQAPATPFDAVRVVLEKELGKSIEQVFETFDEKPLGSASIAQVHRARVKGDKRDVVVKVQHPGVEKLMMVDIRNLQIFALYMQKTDIKFDLFSMTKEIEKQIGYEFDFKREANAMEKIRRFLYDNNRKSPVLVPRVFPNLVTRKVLVMEFMNGIPILSLGDEMAKRGINPHGKMAEAAKFNILHSLSQAYGQMILKSGFFHADPHPGNILIGKGSEASHLLFVVALLDYGQVKELPDHLRLGYANLVIAIADNNASLALQSFRELGIATVAKCKNEQQELLQLAKTMFDTEMPPGTTTLQPFSEDSSIKKISVEAFPEELFSVLRTVVLLRGLSVGIGINYSCAQHWRAMAEEALHASGRLSTGRKQKRRCSSLRRLYPGPRES

SEQ ID NO: 49300 - protein, 488 aa, Arabidopsis thaliana
  peptide (1)..(488): Ceres Seq. ID no. 13588544
MHAIDFKEIQEKLSDGFRPWQRSFQFWARATDIYTGYKVFQLRMNFVKDVNKHEEMWERQHELAAHKVYSMCSDLGGFFLKIAQILGKPDLAPAAWVRKLVTLCDQAPATPFDAVRVVLEKELGKSIEQVFETFDEKPLGSASIAQVHRARVKGDKRDVVVKVQHPGVEKLMMVDIRNLQIFALYMQKTDIKFDLFSMTKEIEKQIGYEFDFKREANAMEKIRRFLYDNNRKSPVLVPRVFPNLVTRKVLVMEFMNGIPILSLGDEMAKRGINPHGKMAEAAKFNILHSLSQAYGQMILKSGFFHADPHPGNILIGKGSEASHLLFVVALLDYGQVKELPDHLRLGYANLVIAIADNNASLALQSFRELGIATVAKCKNEQQELLQLAKTMFDTEMPPGTTTLQPFSEDSSIKKISVEAFPEELFSVLRTVVLLRGLSVGIGINYSCAQHWRAMAEEALHASGRLSTGRKQKRRCSSLRRLYPGPRES

SEQ ID NO: 49301 - protein, 445 aa, Arabidopsis thaliana
  peptide (1)..(445): Ceres Seq. ID no. 13588545
MNFVKDVNKHEEMWERQHELAAHKVYSMCSDLGGFFLKIAQILGKPDLAPAAWVRKLVTLCDQAPATPFDAVRVVLEKELGKSIEQVFETFDEKPLGSASIAQVHRARVKGDKRDVVVKVQHPGVEKLMMVDIRNLQIFALYMQKTDIKFDLFSMTKEIEKQIGYEFDFKREANAMEKIRRFLYDNNRKSPVLVPRVFPNLVTRKVLVMEFMNGIPILSLGDEMAKRGINPHGKMAEAAKFNILHSLSQAYGQMILKSGFFHADPHPGNILIGKGSEASHLLFVVALLDYGQVKELPDHLRLGYANLVIAIADNNASLALQSFRELGIATVAKCKNEQQELLQLAKTMFDTEMPPGTTTLQPFSEDSSIKKISVEAFPEELFSVLRTVVLLRGLSVGIGINYSCAQHWRAMAEEALHASGRLSTGRKQKRRCSSLRRLYPGPRES

SEQ ID NO: 49302 - DNA, 1241 bp, Arabidopsis thaliana
  misc_feature (1)..(1241): Ceres Seq. ID no. 12591132
  misc_feature (1)..(1241): Ortholog of  Ceres SEQ ID NO 12615296 as cited in SEQ ID NO 62724
  misc_feature (1)..(1241): Ortholog of  Ceres SEQ ID NO 15225093 as cited in SEQ ID NO 65177
  misc_feature (1)..(1241): Ortholog of  Ceres SEQ ID NO 15179532 as cited in SEQ ID NO 0
acggcttcttcttcttctcgctgacgctctttctccgtcaattctcttcgaagatcgttttgatccaagagagaattctctgagagattgagaggggaagagaaattcttcgatccatagagagataattctctttgaacatcgatccatagagagatatgcaaaccatctcgaaagcttcttctgccacctccttttttcgatgttctaggaagctatcaagccagccatgtgtgagacagcttaacataagaaagagtcttgtgtgcagagtgatgaagctggtctcttcacctcttaggactttgcgtggtgctggtaaatctatccgagtttcaaagttctgcagtgtctccaatgtctcctcattgcaaattgaactggtgccttgccttaaggataactatgcttatatcttgcatgacgaggatactggtacagttggggtggttgacccttctgaagctgaacctattatcgattcgttgaagaggagtggtcgtaatctaacatatatattaaatacacatcatcattatgatcacactggtgggaatttggaattaaaagacaggtacggggcaaaggtgattggctcagctatggataaagaccggattcctggaattgatatggccttgaaggatggtgacaaatggatgtttgctggccatgaagtccatgttatggatactcctggccacacaaaaggccatatcagcttatactttccaggatcacgagcgatcttcaccggggacacgatgtttagcttatcatgtggtaaactctttgaaggcactcctaagcagatgcttgcttctctccaaaagatcacatctttaccagatgacacaagcatatactgtggtcatgaatatacactgagtaattccaagtttgcgttgtctctagagccaaacaacgaagtacttcagtcctatgcagctcatgttgcagagctccgaagcaagaaattaccaacgattccgacaacagtgaagatggagaaagcttgtaaccccttcctccgcagctcaaatacagatatccgtcgggctttacgcattccagaggccgcagatgaagcagaagctttagggattatccggaaagcaaaggatgatttctaagcttaggctttttctgaggtaaacctttggtttgcttatgtagtcctcaaatgagtgtgcaccctttgactttgacgttttataaaaaaaaatacaaatacaaaacct

SEQ ID NO: 49303 - protein, 324 aa, Arabidopsis thaliana
  peptide (1)..(324): Ceres Seq. ID no. 12591133
MQTISKASSATSFFRCSRKLSSQPCVRQLNIRKSLVCRVMKLVSSPLRTLRGAGKSIRVSKFCSVSNVSSLQIELVPCLKDNYAYILHDEDTGTVGVVDPSEAEPIIDSLKRSGRNLTYILNTHHHYDHTGGNLELKDRYGAKVIGSAMDKDRIPGIDMALKDGDKWMFAGHEVHVMDTPGHTKGHISLYFPGSRAIFTGDTMFSLSCGKLFEGTPKQMLASLQKITSLPDDTSIYCGHEYTLSNSKFALSLEPNNEVLQSYAAHVAELRSKKLPTIPTTVKMEKACNPFLRSSNTDIRRALRIPEAADEAEALGIIRKAKDDF

SEQ ID NO: 49304 - protein, 285 aa, Arabidopsis thaliana
  peptide (1)..(285): Ceres Seq. ID no. 12591134
MKLVSSPLRTLRGAGKSIRVSKFCSVSNVSSLQIELVPCLKDNYAYILHDEDTGTVGVVDPSEAEPIIDSLKRSGRNLTYILNTHHHYDHTGGNLELKDRYGAKVIGSAMDKDRIPGIDMALKDGDKWMFAGHEVHVMDTPGHTKGHISLYFPGSRAIFTGDTMFSLSCGKLFEGTPKQMLASLQKITSLPDDTSIYCGHEYTLSNSKFALSLEPNNEVLQSYAAHVAELRSKKLPTIPTTVKMEKACNPFLRSSNTDIRRALRIPEAADEAEALGIIRKAKDDF

SEQ ID NO: 49305 - protein, 176 aa, Arabidopsis thaliana
  peptide (1)..(176): Ceres Seq. ID no. 12591135
MDKDRIPGIDMALKDGDKWMFAGHEVHVMDTPGHTKGHISLYFPGSRAIFTGDTMFSLSCGKLFEGTPKQMLASLQKITSLPDDTSIYCGHEYTLSNSKFALSLEPNNEVLQSYAAHVAELRSKKLPTIPTTVKMEKACNPFLRSSNTDIRRALRIPEAADEAEALGIIRKAKDDF

SEQ ID NO: 49306 - DNA, 1170 bp, Arabidopsis thaliana
  misc_feature (1)..(1170): Ceres Seq. ID no. 13588546
  misc_feature (1)..(1170): Ortholog of  Ceres SEQ ID NO 13599859 as cited in SEQ ID NO 1323
  misc_feature (1)..(1170): Ortholog of  Ceres SEQ ID NO 13596244 as cited in SEQ ID NO 69307
atgggtgagacgcagaagattttgcaagggccacgtcaccacacatctctgaagaagcccttatgggttgttttgacagtctcagtgaccagcatgcttctaatctgtactcacatgtatccaaaacatggcaagagctcctcgtgtcacggcctctatagcaccagaggctgtgaggatgctctctctaagtggctacctgttcatgtcaggaaattcactgatgaggagatagcagctcgagcagtggttagagacatactaagaacgcctcccttcataaccaataactccaaaatcgctttcttgttcttgactcccggtactttgccatttgagaagctctgggatgaatttttcaagggtcatgaagggaaattctcgatatatatccacccgtcaaaggaacgaccagttcacatcagccgtcacttttctgatcgagagattcacagtgatgaggttacttggggaaggatttctatggttgatgctgagaagcggttactggttagcgctcttgaagatcctgacaaccaacactttgttcttgtttcagagagttgtattccgttgcatacttttgactacacttatagatatttgttgtactccaacgttagcttcattgagagttttgtggatccgggtccacatggaaccggtagacatatggaacacatgttaccagaaatcgccaaggaagattttagaaagggtgctcagtggttcacaatgaagcgacaacacgcgattatagtgatggccgatggtctttactactcaaaattccgcgagtattgtggacctggaatagaggccgacaagaactgcattgccgatgaacattacttgccaacattcttcaatatgattgatcccatggggatctcaaattggtcagtgacgtttgttgattggtctgaacgaaggtggcatccaaagacatacggaggaaacgagatttcattagaatttatgaaaaatgtcacatccgaggacatgagtgtacatgtcaccagtgtggggaagcatggagatgagctgcattggccttgtacatggaacgggattaaacggccttgctatctatttgcaagaaagttccatcctgatactctcgacacattggtcaacctcttcccaaactacacaaacacagctgtctga

SEQ ID NO: 49307 - protein, 389 aa, Arabidopsis thaliana
  peptide (1)..(389): Ceres Seq. ID no. 15220890
MGETQKILQGPRHHTSLKKPLWVVLTVSVTSMLLICTHMYPKHGKSSSCHGLYSTRGCEDALSKWLPVHVRKFTDEEIAARAVVRDILRTPPFITNNSKIAFLFLTPGTLPFEKLWDEFFKGHEGKFSIYIHPSKERPVHISRHFSDREIHSDEVTWGRISMVDAEKRLLVSALEDPDNQHFVLVSESCIPLHTFDYTYRYLLYSNVSFIESFVDPGPHGTGRHMEHMLPEIAKEDFRKGAQWFTMKRQHAIIVMADGLYYSKFREYCGPGIEADKNCIADEHYLPTFFNMIDPMGISNWSVTFVDWSERRWHPKTYGGNEISLEFMKNVTSEDMSVHVTSVGKHGDELHWPCTWNGIKRPCYLFARKFHPDTLDTLVNLFPNYTNTAV

SEQ ID NO: 49308 - protein, 358 aa, Arabidopsis thaliana
  peptide (1)..(358): Ceres Seq. ID no. 15220891
MLLICTHMYPKHGKSSSCHGLYSTRGCEDALSKWLPVHVRKFTDEEIAARAVVRDILRTPPFITNNSKIAFLFLTPGTLPFEKLWDEFFKGHEGKFSIYIHPSKERPVHISRHFSDREIHSDEVTWGRISMVDAEKRLLVSALEDPDNQHFVLVSESCIPLHTFDYTYRYLLYSNVSFIESFVDPGPHGTGRHMEHMLPEIAKEDFRKGAQWFTMKRQHAIIVMADGLYYSKFREYCGPGIEADKNCIADEHYLPTFFNMIDPMGISNWSVTFVDWSERRWHPKTYGGNEISLEFMKNVTSEDMSVHVTSVGKHGDELHWPCTWNGIKRPCYLFARKFHPDTLDTLVNLFPNYTNTAV

SEQ ID NO: 49309 - protein, 351 aa, Arabidopsis thaliana
  peptide (1)..(351): Ceres Seq. ID no. 15220892
MYPKHGKSSSCHGLYSTRGCEDALSKWLPVHVRKFTDEEIAARAVVRDILRTPPFITNNSKIAFLFLTPGTLPFEKLWDEFFKGHEGKFSIYIHPSKERPVHISRHFSDREIHSDEVTWGRISMVDAEKRLLVSALEDPDNQHFVLVSESCIPLHTFDYTYRYLLYSNVSFIESFVDPGPHGTGRHMEHMLPEIAKEDFRKGAQWFTMKRQHAIIVMADGLYYSKFREYCGPGIEADKNCIADEHYLPTFFNMIDPMGISNWSVTFVDWSERRWHPKTYGGNEISLEFMKNVTSEDMSVHVTSVGKHGDELHWPCTWNGIKRPCYLFARKFHPDTLDTLVNLFPNYTNTAV

SEQ ID NO: 49310 - DNA, 1517 bp, Arabidopsis thaliana
  misc_feature (1)..(1517): Ceres Seq. ID no. 12575274
  misc_feature (1)..(1517): Ortholog of  Ceres SEQ ID NO 15176588 as cited in SEQ ID NO 60461
gattacatctacgtaaagagtttctggtagaaattttccctcttttagctgcagattggcatcagattccgttctggatgtgtcggtgatcgattttccgcgtcggtgatgatagctaacggattcgagagtatggataaagaacgagtcaggaaacgtcctcgtatgacctgggacgaggccccagctgaaccagaggctaaaagggctgtgattaaaggacatggaagcgatgggaggattttgtcaccaccattaagggacgatgatcgtgatggtcattatgttttcagtttgagggacaatctcactcctagatataaaatacttagcaagatgggtgaaggcacatttggtcgggttttggaatgttgggatcgtgatacaaaagaatatgtggcaataaagataattcgaagcattaagaaataccgggatgcagcaatgattgaaattgatgtacttcagaaacttgttaagagtgataaaggccgcacacgctgtgtacagatgaagaactggtttgattaccgaaatcatatttgcattgtgttcgagaagcttgggccaagtttgtttgactttctaaagagaaataaatactccgcatttcctctggcccttgttcgggattttggatgccagcttttggaatctgtagcatatatgcacgagttacagttagttcacaccgacctcaagcctgagaacattctgttggtgtcttctgaaaatgtaaagcttcctgacaataagaggagtgctgcaaatgagacacatttcaggtgcttaccaaagtcaagcgccattaaactgattgattttggcagtactgtttgtgataaccggattcatcactccattgtccaaacaagacattacagatcccccgaggtcattttaggtctaggatggagttaccagtgtgacttatggagtataggttgtatactatttgaactatgcacgggtgaggctctctttcagacgcatgataacctagaacatctagctatgatggagagggcgcttggacctttacctgaacatatgactcgaaaagccagccggggtgctgagaaatatttcaggagagggtgtcggttgaattggccagaaggagccaactctagagaaagtattagggctgtaaaaagacttgatcgtctcaaggatatggtatcgaaacatgttgacaacacgagatctagatttgcagatctattgtatggtttattggcatatgatccatctgagcgtctcacagcaaacgaagctcttgaccatcctttctttaagagctcaagttgagaagaagcaaaatcagaaccataaaatgtagaattttacttggtaacaagtttttttgttagattcctctaaagctcccgttctcagtagcaccaaacagtagtattcctatttcagttacgagtttggctacgtttattctggaaaatacctctgttgtacattgtgttgttgagaatataaaacttgcatcatattttgaaact

SEQ ID NO: 49311 - protein, 400 aa, Arabidopsis thaliana; identical to SEQ ID NO: 46548
  peptide (1)..(400): Ceres Seq. ID no. 12575275

SEQ ID NO: 49312 - protein, 392 aa, Arabidopsis thaliana; identical to SEQ ID NO: 46549
  peptide (1)..(392): Ceres Seq. ID no. 12575276

SEQ ID NO: 49313 - protein, 381 aa, Arabidopsis thaliana; identical to SEQ ID NO: 46550
  peptide (1)..(381): Ceres Seq. ID no. 12575277

SEQ ID NO: 49314 - DNA, 1884 bp, Arabidopsis thaliana
  misc_feature (1)..(1884): Ceres Seq. ID no. 12591136
  misc_feature (1)..(1884): Ortholog of  Ceres SEQ ID NO 15178728 as cited in SEQ ID NO 67280
atgagttctctggttcctgttatggagaagcaagagagcgttcgaggtaactctgtggaggaacagcagagtctcagatgcgttggtgcagagaatcaggtgagaaagggaagagctttggacaagcaagttagtttcctagctgtgaatgttgttgagaaacatggaatcaaaggaagagcaatggagaaacaggagagggcaatggagaggcagagaagctttcgtgggtttgttgagaagcagaaaagctttagggtagtaatggagagacagttaagtttcatgaatgttggtggtgagaggaagaagaagactgactcacctggtaaaagaggagattctcctcttcatctcgcagctcgaacggggaatttgggaaaggttatggaattgattcgagcttgtaacggcattgaagagttgaaggagttgtcatcaaagcagaatctagaaggagagacccctctttatagtgcagcagaaaatgggcattcattagttgttgaagagatgttgaaacatatggatcttgatactgcatcagttaaagctcgcaacggttttgatcctttccatgtcgctgcaaaacaaggccatattgaggcattgaagaaattgttggagacatttccgaatctggctatgacggtggatctatcgtgtacaactgcattgcacacggctgcttcacaaggacacactgatgtggtgaatcttcttttaaagacggattctcatttagctaagatagctaagaacaatggtaaaaccgcacttcattctgcagcgcgaatggggcacagagaagtggttaagtctttgataggtaatgatgcaagcatcgggtttagaactgataagaagggacaaacagcgcttcacatggctgtcaaaggtcagaacgaagggattgttcttgagttggtgaaacctgatcctgcgattttgagtgttgaggatagtaaagggaatacgccgttgcacactgccacaaacaaaggccgtattaagatagtgagatgtttggtatcatttgatggaattaaccttaatgctatgaataaggctggagatactgcacttgatatagccgaaaagattggaaatccagagcttgtgtcggttctgaaggaagcaggagctgcaacagctaaagatcttgggaagcctcgaaacccggctaagcaacttaaccaaacggtcagtgacattaaacacgaggtacagtctcagctccaacagtctcgccaaacgggtgttagggtgcggagaatcgcaaagagactgaagaagcttcacatcaatggtttaaacaacgctataaactctgcaaccgttgtggctgtcctaattgcaacagttgcatttgcagcaatcttcaccattcctgggcaatatgaagaagacagaacaaagggactgttgttattaggagaagcccgcatagccggcaaagccccgtttttagtcttcttcatatttgacagcttggcgctgttcatatctttggctgttgttgtggtgcagacttcagttgtggtgattgagcagaaggcaaagaagaatcttgtgtttgtgatcaacaagctcatgtggttggcttgtttgttcatatccgtagcctttgtttctctttcgtttatcgttgtgggtaaggaggacatttggctggcgatttgtgcaacgattattggcgggacgattatgctaaccacgataggtgcaatgtgttactgtgtggtcatgcataggatcgaggaatctaaactgaaaagcttaaggaaagagagaagcaaatcgaaatctttctcactatctcatatgccttcagagtcagagattctcaacggcgaattcaacaagagaatgtatgcactctga

SEQ ID NO: 49315 - protein, 627 aa, Arabidopsis thaliana
  peptide (1)..(627): Ceres Seq. ID no. 12591137
MSSLVPVMEKQESVRGNSVEEQQSLRCVGAENQVRKGRALDKQVSFLAVNVVEKHGIKGRAMEKQERAMERQRSFRGFVEKQKSFRVVMERQLSFMNVGGERKKKTDSPGKRGDSPLHLAARTGNLGKVMELIRACNGIEELKELSSKQNLEGETPLYSAAENGHSLVVEEMLKHMDLDTASVKARNGFDPFHVAAKQGHIEALKKLLETFPNLAMTVDLSCTTALHTAASQGHTDVVNLLLKTDSHLAKIAKNNGKTALHSAARMGHREVVKSLIGNDASIGFRTDKKGQTALHMAVKGQNEGIVLELVKPDPAILSVEDSKGNTPLHTATNKGRIKIVRCLVSFDGINLNAMNKAGDTALDIAEKIGNPELVSVLKEAGAATAKDLGKPRNPAKQLNQTVSDIKHEVQSQLQQSRQTGVRVRRIAKRLKKLHINGLNNAINSATVVAVLIATVAFAAIFTIPGQYEEDRTKGLLLLGEARIAGKAPFLVFFIFDSLALFISLAVVVVQTSVVVIEQKAKKNLVFVINKLMWLACLFISVAFVSLSFIVVGKEDIWLAICATIIGGTIMLTTIGAMCYCVVMHRIEESKLKSLRKERSKSKSFSLSHMPSESEILNGEFNKRMYAL

SEQ ID NO: 49316 - protein, 620 aa, Arabidopsis thaliana
  peptide (1)..(620): Ceres Seq. ID no. 12591138
MEKQESVRGNSVEEQQSLRCVGAENQVRKGRALDKQVSFLAVNVVEKHGIKGRAMEKQERAMERQRSFRGFVEKQKSFRVVMERQLSFMNVGGERKKKTDSPGKRGDSPLHLAARTGNLGKVMELIRACNGIEELKELSSKQNLEGETPLYSAAENGHSLVVEEMLKHMDLDTASVKARNGFDPFHVAAKQGHIEALKKLLETFPNLAMTVDLSCTTALHTAASQGHTDVVNLLLKTDSHLAKIAKNNGKTALHSAARMGHREVVKSLIGNDASIGFRTDKKGQTALHMAVKGQNEGIVLELVKPDPAILSVEDSKGNTPLHTATNKGRIKIVRCLVSFDGINLNAMNKAGDTALDIAEKIGNPELVSVLKEAGAATAKDLGKPRNPAKQLNQTVSDIKHEVQSQLQQSRQTGVRVRRIAKRLKKLHINGLNNAINSATVVAVLIATVAFAAIFTIPGQYEEDRTKGLLLLGEARIAGKAPFLVFFIFDSLALFISLAVVVVQTSVVVIEQKAKKNLVFVINKLMWLACLFISVAFVSLSFIVVGKEDIWLAICATIIGGTIMLTTIGAMCYCVVMHRIEESKLKSLRKERSKSKSFSLSHMPSESEILNGEFNKRMYAL

SEQ ID NO: 49317 - protein, 566 aa, Arabidopsis thaliana
  peptide (1)..(566): Ceres Seq. ID no. 12591139
MEKQERAMERQRSFRGFVEKQKSFRVVMERQLSFMNVGGERKKKTDSPGKRGDSPLHLAARTGNLGKVMELIRACNGIEELKELSSKQNLEGETPLYSAAENGHSLVVEEMLKHMDLDTASVKARNGFDPFHVAAKQGHIEALKKLLETFPNLAMTVDLSCTTALHTAASQGHTDVVNLLLKTDSHLAKIAKNNGKTALHSAARMGHREVVKSLIGNDASIGFRTDKKGQTALHMAVKGQNEGIVLELVKPDPAILSVEDSKGNTPLHTATNKGRIKIVRCLVSFDGINLNAMNKAGDTALDIAEKIGNPELVSVLKEAGAATAKDLGKPRNPAKQLNQTVSDIKHEVQSQLQQSRQTGVRVRRIAKRLKKLHINGLNNAINSATVVAVLIATVAFAAIFTIPGQYEEDRTKGLLLLGEARIAGKAPFLVFFIFDSLALFISLAVVVVQTSVVVIEQKAKKNLVFVINKLMWLACLFISVAFVSLSFIVVGKEDIWLAICATIIGGTIMLTTIGAMCYCVVMHRIEESKLKSLRKERSKSKSFSLSHMPSESEILNGEFNKRMYAL

SEQ ID NO: 49318 - DNA, 1436 bp, Arabidopsis thaliana
  misc_feature (1)..(1436): Ceres Seq. ID no. 14312095
  misc_feature (1)..(1436): Ortholog of  Ceres SEQ ID NO 15170438 as cited in SEQ ID NO 52845
  misc_feature (1)..(1436): Ortholog of  Ceres SEQ ID NO 13503557 as cited in SEQ ID NO 69075
gaccaattcctcattcttccaatcgcacttcctttaccagatcagacgtcaatttcaactcttcagtgaagagatttctttcaccgagttttctactccgatcgatcaattgaagattgaaatggaagctaattcaggcggaggaggaggagctgaaggcggaagagcggtaaccggaggaggaggagggagcgatgtggaattggtgagcaagacgttgcaagtggagcataagctattctattttgatcttaaggagaatcctcgtggaaggtatctaaagatatcggagaagacgtcggcgacgaggtcaaccatcattgttccttcctccggcatctcttggttccttgatctcttcaactactatgtcaattctgaggaacacgagctttttagcaaagaattgcagcttgattccaaggtgttttacttcgatatcggtgagaacagaagaggacgcttcttgaaggtgtcagaagcatcggttagtagaaatcgaagtaccattattgttccagctggaagctctcctgatgaaggatgggcagctttcaggaatatattggctgagatacatgaagcatcaggactttttgtgatgccaaatcagaaaccttctgatggacaggaacacttggttgatgatgttggagctggttttatacctggacatggtagtcagcagccatcttcttcagaacataatgtggatcgaacaattgactcgccaggccaggaagaaaccggaatgactggtgtttctaaagtaatcagagctgaccagaaacggttcttctttgatcttgggaacaataacaggggccatttcttaaggatatctgaggtggcaggttctgacaggtcttccatcattctaccgttatcgggtcttaagcagtttcacgaagtaattggtcactttgtggagatcaccaaagataaaattgaaggtatgacaggtgcaaatgtcaggacagttgatcctcctcagagataagtattgattctcttagaggatggaaattttcaatcctctaaccatttgaatctggcaacttcaagtcgactgcctgatcgcggtgtgcaatagtttcacgtaatatctctcgccccttcacatcttctaaaaataattcagcaggatcatcatttgccttaatagtagataaaacaaactttggagtccgcaactgggaataagctgaaaatcatccaccatgtgtatctctctctctctgtatctctctctctctctctccctccctccctcatttgcttctgttctgttttaactttttttgtttttgttcagtttgggtcattgggtgtatatctgttgacggcttgatgcatttcaattgtaaaagaatattggggtttatatgtttgggctaatgcctgttggaataaaagatgaagtgtaagttctatcc

SEQ ID NO: 49319 - protein, 332 aa, Arabidopsis thaliana
  peptide (1)..(332): Ceres Seq. ID no. 14312096
TNSSFFQSHFLYQIRRQFQLFSEEISFTEFSTPIDQLKIEMEANSGGGGGAEGGRAVTGGGGGSDVELVSKTLQVEHKLFYFDLKENPRGRYLKISEKTSATRSTIIVPSSGISWFLDLFNYYVNSEEHELFSKELQLDSKVFYFDIGENRRGRFLKVSEASVSRNRSTIIVPAGSSPDEGWAAFRNILAEIHEASGLFVMPNQKPSDGQEHLVDDVGAGFIPGHGSQQPSSSEHNVDRTIDSPGQEETGMTGVSKVIRADQKRFFFDLGNNNRGHFLRISEVAGSDRSSIILPLSGLKQFHEVIGHFVEITKDKIEGMTGANVRTVDPPQR

SEQ ID NO: 49320 - protein, 292 aa, Arabidopsis thaliana
  peptide (1)..(292): Ceres Seq. ID no. 14312097
MEANSGGGGGAEGGRAVTGGGGGSDVELVSKTLQVEHKLFYFDLKENPRGRYLKISEKTSATRSTIIVPSSGISWFLDLFNYYVNSEEHELFSKELQLDSKVFYFDIGENRRGRFLKVSEASVSRNRSTIIVPAGSSPDEGWAAFRNILAEIHEASGLFVMPNQKPSDGQEHLVDDVGAGFIPGHGSQQPSSSEHNVDRTIDSPGQEETGMTGVSKVIRADQKRFFFDLGNNNRGHFLRISEVAGSDRSSIILPLSGLKQFHEVIGHFVEITKDKIEGMTGANVRTVDPPQR

SEQ ID NO: 49321 - DNA, 1789 bp, Arabidopsis thaliana; identical to SEQ ID NO: 27706
  misc_feature (1)..(1789): Ceres Seq. ID no. 13592258
  misc_feature (1)..(1789): Ortholog of  Ceres SEQ ID NO 13664178 as cited in SEQ ID NO 61247
  misc_feature (1)..(1789): Ortholog of  Ceres SEQ ID NO 15179290 as cited in SEQ ID NO 0

SEQ ID NO: 49322 - protein, 474 aa, Arabidopsis thaliana; identical to SEQ ID NO: 27707
  peptide (1)..(474): Ceres Seq. ID no. 13592259

SEQ ID NO: 49323 - protein, 384 aa, Arabidopsis thaliana; identical to SEQ ID NO: 27708
  peptide (1)..(384): Ceres Seq. ID no. 13592260

SEQ ID NO: 49324 - protein, 375 aa, Arabidopsis thaliana; identical to SEQ ID NO: 27709
  peptide (1)..(375): Ceres Seq. ID no. 13592261

SEQ ID NO: 49325 - DNA, 1357 bp, Arabidopsis thaliana; identical to SEQ ID NO: 45687
  misc_feature (1)..(1357): Ceres Seq. ID no. 13646545
  misc_feature (1)..(1357): Ortholog of  Ceres SEQ ID NO 14306671 as cited in SEQ ID NO 53809
  misc_feature (1)..(1357): Ortholog of  Ceres SEQ ID NO 15178206 as cited in SEQ ID NO 57238

SEQ ID NO: 49326 - protein, 213 aa, Arabidopsis thaliana; identical to SEQ ID NO: 45688
  peptide (1)..(213): Ceres Seq. ID no. 13646546

SEQ ID NO: 49327 - protein, 114 aa, Arabidopsis thaliana; identical to SEQ ID NO: 45689
  peptide (1)..(114): Ceres Seq. ID no. 13646547

SEQ ID NO: 49328 - DNA, 1010 bp, Arabidopsis thaliana; identical to SEQ ID NO: 21192
  misc_feature (1)..(1010): Ceres Seq. ID no. 13648013
  misc_feature (1)..(1010): Ortholog of  Ceres SEQ ID NO 13599585 as cited in SEQ ID NO 988
  misc_feature (1)..(1010): Ortholog of  Ceres SEQ ID NO 13594624 as cited in SEQ ID NO 55765
  misc_feature (1)..(1010): Ortholog of  Ceres SEQ ID NO 15177682 as cited in SEQ ID NO 0

SEQ ID NO: 49329 - protein, 262 aa, Arabidopsis thaliana; identical to SEQ ID NO: 21193
  peptide (1)..(262): Ceres Seq. ID no. 15219523

SEQ ID NO: 49330 - protein, 170 aa, Arabidopsis thaliana; identical to SEQ ID NO: 21194
  peptide (1)..(170): Ceres Seq. ID no. 15219524

SEQ ID NO: 49331 - DNA, 1849 bp, Arabidopsis thaliana
  misc_feature (1)..(1849): Ceres Seq. ID no. 13587980
  misc_feature (1)..(1849): Ortholog of  Ceres SEQ ID NO 15171856 as cited in SEQ ID NO 55120
acagacaaacaaaaaaaggtttggttccaaaagctaaaaagcttccatctacattagagtctctctatttagcatttacacacaatcacacacacacacacacacacaccaaaatgatagcttacatagaaccatacttcttggataacgacgccgaggctgcctctgccgccaccgccgccggaaaatctacggatggtgtttctgagtcacttaacatccaaggagaaatcttatgtggtggagctgcggcggatatcgccgggagagattttggcggcatgaactgtgtgaagcctcttgctgtggtgagaccagtgggaccggaagatatcgccggagcggtgaaagcggctctgaggtcagataaactaacggtggcggcgcgtggaaacggccattctatcaacggtcaagccatggcggaaggaggactcgttgtcgatatgagtaccacggcggagaatcatttcgaggttggttatttatccggcggtgatgccacggcgtttgttgatgtctccggaggggcattatgggaagatgtattgaaacggtgcgtttcggagtacggtttggctccgaggtcttggactgattatcttgggttaacggtgggaggtacgttgtcaaatgccggcgttagtggtcaagcgttccgttacggaccacagacgtcaaatgtaacggagttggacgtcgttacgggaaatggtgacgtcgttacttgctcggagattgagaattcagagctattcttctctgttttaggtggtcttggtcagtttggtatcatcaccagagctagggttttgctacagccagctcctgatatggtgagatggataagagtagtatacaccgagttcgatgagttcactcaagacgccgagtggctagtaagtcagaagaacgagtcatcgttcgattacgtggaaggattcgtgtttgtcaacggtgctgacccggttaacggatggccaacagttcccctccacccggaccacgagtttgacccgacccgactaccacaatcttgcgggtcggttctttattgcctcgaactcggtcttcactacagagactccgattccaactcaaccattgacaagagggtggagagattgatcggacggctaagatttaatgaaggattaagattcgaggtagatctgccgtacgttgactttttactacgagtcaaacggtcagaagaaatcgcgaaggagaacggtacgtgggaaacgcctcacccttggctcaacctcttcgtgtcgaagcgagacatcggagatttcaatcggacggtgttcaaagaacttgtcaagaacggagtcaatggtccaatgcttgtgtacccactcttgcgaagcaggtgggatgatcggacgtccgtggttataccggaagaaggagagatattctacattgtggcattgcttcggttcgtgccgccgtgtgcgaaagtctcttcggtagagaaaatggtagctcaaaaccaagagatcgttcattggtgtgtcaaaaacggaattgattacaaattgtatcttcctcattacaagtctcaagaggaatggattcgccattttggaaaccgatggtcgagatttgttgataggaaagctatgtttgatcccatggctatactttcaccgggtcaaaagattttcaataggtctctttgacccctcatatttttactttttttacttttcttatttttacttttgtattcttgagttttgtggtctttatgtaattttttctgtatttttcttttttcccaagaaaaaaatcagctggttttttataaaaggtggcctacgagtcatgtccaattatgaat

SEQ ID NO: 49332 - protein, 561 aa, Arabidopsis thaliana
  peptide (1)..(561): Ceres Seq. ID no. 13587981
RQTKKGLVPKAKKLPSTLESLYLAFTHNHTHTHTHTKMIAYIEPYFLDNDAEAASAATAAGKSTDGVSESLNIQGEILCGGAAADIAGRDFGGMNCVKPLAVVRPVGPEDIAGAVKAALRSDKLTVAARGNGHSINGQAMAEGGLVVDMSTTAENHFEVGYLSGGDATAFVDVSGGALWEDVLKRCVSEYGLAPRSWTDYLGLTVGGTLSNAGVSGQAFRYGPQTSNVTELDVVTGNGDVVTCSEIENSELFFSVLGGLGQFGIITRARVLLQPAPDMVRWIRVVYTEFDEFTQDAEWLVSQKNESSFDYVEGFVFVNGADPVNGWPTVPLHPDHEFDPTRLPQSCGSVLYCLELGLHYRDSDSNSTIDKRVERLIGRLRFNEGLRFEVDLPYVDFLLRVKRSEEIAKENGTWETPHPWLNLFVSKRDIGDFNRTVFKELVKNGVNGPMLVYPLLRSRWDDRTSVVIPEEGEIFYIVALLRFVPPCAKVSSVEKMVAQNQEIVHWCVKNGIDYKLYLPHYKSQEEWIRHFGNRWSRFVDRKAMFDPMAILSPGQKIFNRSL

SEQ ID NO: 49333 - protein, 524 aa, Arabidopsis thaliana
  peptide (1)..(524): Ceres Seq. ID no. 13587982
MIAYIEPYFLDNDAEAASAATAAGKSTDGVSESLNIQGEILCGGAAADIAGRDFGGMNCVKPLAVVRPVGPEDIAGAVKAALRSDKLTVAARGNGHSINGQAMAEGGLVVDMSTTAENHFEVGYLSGGDATAFVDVSGGALWEDVLKRCVSEYGLAPRSWTDYLGLTVGGTLSNAGVSGQAFRYGPQTSNVTELDVVTGNGDVVTCSEIENSELFFSVLGGLGQFGIITRARVLLQPAPDMVRWIRVVYTEFDEFTQDAEWLVSQKNESSFDYVEGFVFVNGADPVNGWPTVPLHPDHEFDPTRLPQSCGSVLYCLELGLHYRDSDSNSTIDKRVERLIGRLRFNEGLRFEVDLPYVDFLLRVKRSEEIAKENGTWETPHPWLNLFVSKRDIGDFNRTVFKELVKNGVNGPMLVYPLLRSRWDDRTSVVIPEEGEIFYIVALLRFVPPCAKVSSVEKMVAQNQEIVHWCVKNGIDYKLYLPHYKSQEEWIRHFGNRWSRFVDRKAMFDPMAILSPGQKIFNRSL

SEQ ID NO: 49334 - protein, 468 aa, Arabidopsis thaliana
  peptide (1)..(468): Ceres Seq. ID no. 13587983
MNCVKPLAVVRPVGPEDIAGAVKAALRSDKLTVAARGNGHSINGQAMAEGGLVVDMSTTAENHFEVGYLSGGDATAFVDVSGGALWEDVLKRCVSEYGLAPRSWTDYLGLTVGGTLSNAGVSGQAFRYGPQTSNVTELDVVTGNGDVVTCSEIENSELFFSVLGGLGQFGIITRARVLLQPAPDMVRWIRVVYTEFDEFTQDAEWLVSQKNESSFDYVEGFVFVNGADPVNGWPTVPLHPDHEFDPTRLPQSCGSVLYCLELGLHYRDSDSNSTIDKRVERLIGRLRFNEGLRFEVDLPYVDFLLRVKRSEEIAKENGTWETPHPWLNLFVSKRDIGDFNRTVFKELVKNGVNGPMLVYPLLRSRWDDRTSVVIPEEGEIFYIVALLRFVPPCAKVSSVEKMVAQNQEIVHWCVKNGIDYKLYLPHYKSQEEWIRHFGNRWSRFVDRKAMFDPMAILSPGQKIFNRSL

SEQ ID NO: 49335 - DNA, 1410 bp, Arabidopsis thaliana
  misc_feature (1)..(1410): Ceres Seq. ID no. 14302939
  misc_feature (1)..(1410): Ortholog of  Ceres SEQ ID NO 14305026 as cited in SEQ ID NO 52980
  misc_feature (1)..(1410): Ortholog of  Ceres SEQ ID NO 15175670 as cited in SEQ ID NO 55204
  misc_feature (1)..(1410): Ortholog of  Ceres SEQ ID NO 13655712 as cited in SEQ ID NO 63394
ggttcatatggaaaacgctcatcaacctcaacaatctctctcctctctctctctgtatatagaagaatctccattgtctttaatttctctccatttctctttctctcttccttcaaagttttctcttttcttgatgggtttaagagagtaaagatcatcaagtactatgcattaaattgagaagttattaaaaatttcgattaattaaagattgttgatgatgaagagattaagtagttcagattcagtgggtggtctcatctctttatgtcctacaacttccacagatgagcagagtccgaggagatacggtgggagagagtttcagtcgatgcttgaaggatacgaggaagaagaagaagctatagtagaagaaagaggacacgtgggcttgtcggagaagaagagaaggttaagcattaaccaagttaaagctttggagaagaattttgagttagagaataagcttgagcctgagaggaaagttaagttagctcaagaacttggtcttcaacctcgtcaagttgctgtttggtttcaaaaccgtcgtgctcggtggaagacaaaacagcttgagaaagattatggtgttcttaaaacccagtacgattctctccgtcataactttgattccctccgccgtgacaatgaatctctccttcaagagattagtaaactgaaaacgaagcttgatggaggaggagaagaagaagaagaagaagagaacaacgcggcggtgacaacggagagtgatatttcggtcaaggaggaagaagtttcgttgccggagaagattacagaggcaccgtcgtctcctccacagtttcttgaacattctgatggtcttaattaccggagtttcacagatctacgtgatcttcttccattaaaggcggcggcttcttcattcgccgccgcagctggatcttcagacagtagcgattcaagcgcactgctgaatgaagaaagcagctctaatgtcactgtggcggctccggtgacggttccaggaggtaatttcttccagtttgtgaaaatggagcagacggaggatcatgaggactttctgagtggagaagaagcttgtgaattcttttccgatgaacagccgccgtctctacactggtactccaccgttgatcattggaattgaagctgaaaacaccaccggaagagattttggattggattagatgctcttttcttctctgtggaaaaaacagaggagggcaaaatgggaataaggttaaaaattgaaggtgaaagggcaattaaggaagggttaaatctgggcgggaataatgatttagggtgaatttgtaattatgctttttctctagtggttttcgtgcacttcttgtaattaaggatcatcagatcaaagagaaattgagaaggggttaacatgtc

SEQ ID NO: 49336 - protein, 311 aa, Arabidopsis thaliana
  peptide (1)..(311): Ceres Seq. ID no. 14302940
MMKRLSSSDSVGGLISLCPTTSTDEQSPRRYGGREFQSMLEGYEEEEEAIVEERGHVGLSEKKRRLSINQVKALEKNFELENKLEPERKVKLAQELGLQPRQVAVWFQNRRARWKTKQLEKDYGVLKTQYDSLRHNFDSLRRDNESLLQEISKLKTKLDGGGEEEEEEENNAAVTTESDISVKEEEVSLPEKITEAPSSPPQFLEHSDGLNYRSFTDLRDLLPLKAAASSFAAAAGSSDSSDSSALLNEESSSNVTVAAPVTVPGGNFFQFVKMEQTEDHEDFLSGEEACEFFSDEQPPSLHWYSTVDHWN

SEQ ID NO: 49337 - protein, 310 aa, Arabidopsis thaliana
  peptide (1)..(310): Ceres Seq. ID no. 14302941
MKRLSSSDSVGGLISLCPTTSTDEQSPRRYGGREFQSMLEGYEEEEEAIVEERGHVGLSEKKRRLSINQVKALEKNFELENKLEPERKVKLAQELGLQPRQVAVWFQNRRARWKTKQLEKDYGVLKTQYDSLRHNFDSLRRDNESLLQEISKLKTKLDGGGEEEEEEENNAAVTTESDISVKEEEVSLPEKITEAPSSPPQFLEHSDGLNYRSFTDLRDLLPLKAAASSFAAAAGSSDSSDSSALLNEESSSNVTVAAPVTVPGGNFFQFVKMEQTEDHEDFLSGEEACEFFSDEQPPSLHWYSTVDHWN

SEQ ID NO: 49338 - protein, 273 aa, Arabidopsis thaliana
  peptide (1)..(273): Ceres Seq. ID no. 14302942
MLEGYEEEEEAIVEERGHVGLSEKKRRLSINQVKALEKNFELENKLEPERKVKLAQELGLQPRQVAVWFQNRRARWKTKQLEKDYGVLKTQYDSLRHNFDSLRRDNESLLQEISKLKTKLDGGGEEEEEEENNAAVTTESDISVKEEEVSLPEKITEAPSSPPQFLEHSDGLNYRSFTDLRDLLPLKAAASSFAAAAGSSDSSDSSALLNEESSSNVTVAAPVTVPGGNFFQFVKMEQTEDHEDFLSGEEACEFFSDEQPPSLHWYSTVDHWN

SEQ ID NO: 49339 - DNA, 730 bp, Arabidopsis thaliana
  misc_feature (1)..(730): Ceres Seq. ID no. 13587984
  misc_feature (1)..(730): Ortholog of  Ceres SEQ ID NO 15179194 as cited in SEQ ID NO 0
tcaatctctaattaaatacaccaaaagaagaagaaagactagagannnngcaatggcttcctctatgctctcctccgccgctgtggttacatccccggctcaggccaccatggtcgctccattcaccggcttgaagtcatccgctgcattcccggtcacccgcaagaccaacaaggacatcacttccatcgcaagcaacgggggaagagttagctgcatgaaggtgtggccaccaattggaaagaagaagtttgagactctatcttacctccctgaccttagtgacgtcgaattggctaaggaagttgactaccttctccgcaacaagtggattccttgtgttgaattcgagttagagcacggatttgtgtaccgtgagcacggaaacactcccggatactacgatggacggtactggacaatgtggaagcttccattgttcggatgcaccgactccgctcaagtgttgaaggaagttgaagaatgcaagaaggagtacccgggcgccttcattaggatcatcggattcgacaacacccgtcaagtccaatgcatcagtttcattgcctacaagcccccaagcttcaccgaagcttaatttccctttgcttttgtgtaaacctcaaaactttatcccccatctttgattttatcccttgtttttctgcttttttcttctttcttgggttttaatttccggacttaacgtttttttccggtttgcgagaca

SEQ ID NO: 49340 - protein, 198 aa, Arabidopsis thaliana
  peptide (1)..(198): Ceres Seq. ID no. 15220839
  misc_feature (15)..(15): Xaa is any aa, unknown or other
  misc_feature (16)..(16): Xaa is any aa, unknown or other
QSLIKYTKRRRKTRXXAMASSMLSSAAVVTSPAQATMVAPFTGLKSSAAFPVTRKTNKDITSIASNGGRVSCMKVWPPIGKKKFETLSYLPDLSDVELAKEVDYLLRNKWIPCVEFELEHGFVYREHGNTPGYYDGRYWTMWKLPLFGCTDSAQVLKEVEECKKEYPGAFIRIIGFDNTRQVQCISFIAYKPPSFTEA

SEQ ID NO: 49341 - protein, 181 aa, Arabidopsis thaliana; identical to SEQ ID NO: 36039
  peptide (1)..(181): Ceres Seq. ID no. 15220840

SEQ ID NO: 49342 - protein, 177 aa, Arabidopsis thaliana; identical to SEQ ID NO: 36040
  peptide (1)..(177): Ceres Seq. ID no. 15220841

SEQ ID NO: 49343 - DNA, 1154 bp, Arabidopsis thaliana
  misc_feature (1)..(1154): Ceres Seq. ID no. 13648467
  misc_feature (1)..(1154): Ortholog of  Ceres SEQ ID NO 12611159 as cited in SEQ ID NO 59821
ggagaaagacaaacaaattgaagagaaataataacaattaactcaaccaaaaatatgaggaagccagaggtagccattgcagctagtactcaccaagtaaagaagatgaagaagggactttggtctcctgaggaagactcaaagctgatgcaatacatgttaagcaatggacaaggatgttggagtgatgttgcgaaaaacgcaggacttcaaagatgtggcaaaagctgccgtcttcgttggatcaactatcttcgtcctgacctcaagcgtggcgctttctctcctcaagaagaggatctcatcattcgctttcattccatcctcggcaacaggtggtctcagattgcagcacgattgcctggtcggaccgataacgagatcaagaatttctggaactcaacaataaagaaaaggctaaagaagatgtccgatacctccaacttaatcaacaactcatcctcatcacccaacacagcaagcgattcctcttctaattccgcatcttctttggatattaaagacattataggaagcttcatgtccttacaagaacaaggcttcgtcaacccttccttgacccacatacaaaccaacaatccatttccaacgggaaacatgatcagccacccgtgcaatgacgattttaccccttatgtagatggtatctatggagtaaacgcaggggtacaaggggaactctacttcccacctttggaatgtgaagaaggtgattggtacaatgcaaatataaacaaccacttagacgagttgaacactaatggatccggaaacgcacctgagggtatgagaccagtggaagaattttgggaccttgaccagttgatgaacactgaggttccttcgttttacttcaacttcaaacaaagcatatgaatatttttacgtcatcttattcttttttctattgcggtttataatcaagattcttagccacaccacacacacataaatgcaaatatatatacattgttagagagtattttgtatttcgaataatcttttcgtactagggcttgagccttgaggtgccatgtaatgattagtcaatgtaaaacatatatcctataataaataaataaaagaaataataagcaaaaaaaaaaaaaaaaaaactcgagggggggcccggt

SEQ ID NO: 49344 - protein, 280 aa, Arabidopsis thaliana
  peptide (1)..(280): Ceres Seq. ID no. 15220531
MRKPEVAIAASTHQVKKMKKGLWSPEEDSKLMQYMLSNGQGCWSDVAKNAGLQRCGKSCRLRWINYLRPDLKRGAFSPQEEDLIIRFHSILGNRWSQIAARLPGRTDNEIKNFWNSTIKKRLKKMSDTSNLINNSSSSPNTASDSSSNSASSLDIKDIIGSFMSLQEQGFVNPSLTHIQTNNPFPTGNMISHPCNDDFTPYVDGIYGVNAGVQGELYFPPLECEEGDWYNANINNHLDELNTNGSGNAPEGMRPVEEFWDLDQLMNTEVPSFYFNFKQSI

SEQ ID NO: 49345 - protein, 263 aa, Arabidopsis thaliana
  peptide (1)..(263): Ceres Seq. ID no. 15220532
MKKGLWSPEEDSKLMQYMLSNGQGCWSDVAKNAGLQRCGKSCRLRWINYLRPDLKRGAFSPQEEDLIIRFHSILGNRWSQIAARLPGRTDNEIKNFWNSTIKKRLKKMSDTSNLINNSSSSPNTASDSSSNSASSLDIKDIIGSFMSLQEQGFVNPSLTHIQTNNPFPTGNMISHPCNDDFTPYVDGIYGVNAGVQGELYFPPLECEEGDWYNANINNHLDELNTNGSGNAPEGMRPVEEFWDLDQLMNTEVPSFYFNFKQSI

SEQ ID NO: 49346 - protein, 249 aa, Arabidopsis thaliana
  peptide (1)..(249): Ceres Seq. ID no. 15220533
MQYMLSNGQGCWSDVAKNAGLQRCGKSCRLRWINYLRPDLKRGAFSPQEEDLIIRFHSILGNRWSQIAARLPGRTDNEIKNFWNSTIKKRLKKMSDTSNLINNSSSSPNTASDSSSNSASSLDIKDIIGSFMSLQEQGFVNPSLTHIQTNNPFPTGNMISHPCNDDFTPYVDGIYGVNAGVQGELYFPPLECEEGDWYNANINNHLDELNTNGSGNAPEGMRPVEEFWDLDQLMNTEVPSFYFNFKQSI

SEQ ID NO: 49347 - DNA, 1447 bp, Arabidopsis thaliana
  misc_feature (1)..(1447): Ceres Seq. ID no. 13592262
  misc_feature (1)..(1447): Ortholog of  Ceres SEQ ID NO 13581804 as cited in SEQ ID NO 51424
  misc_feature (1)..(1447): Ortholog of  Ceres SEQ ID NO 14310890 as cited in SEQ ID NO 54290
  misc_feature (1)..(1447): Ortholog of  Ceres SEQ ID NO 13663874 as cited in SEQ ID NO 67003
ctaaatgtactgaaaagaaacaccagtttaattaattatacttccctcatatataactatcaaccaagtacaaaacttttgtcaattctcaaaatcaactttcaccacataattatctaacatgtgtatgttccaaaaccagtttaaatagaattacttttcagaaaatacatgtatattaactctatctaataaagaagaaacacatacttatctcatagattccattcataaaactatgctttagtgagtaagaaaaccagtaatcaaacacaaattgacaagacactatatggatgtaaaaagtggggaaaaatggtgataaatagtagagaaaattaaaaagaaaaaaaatattcctttataaatgtatatacccatctcttcaccagcacaaccttaccttccattttctgcaacttctccaaatctcatactttccagaaaatcattttcccaagaaaaataaaactttcccctttgttcttctccccccaacagcaatcacggcgtaccaatcggagctaggaggagattcctctcccttgaggaaatctgggagaggaaagatcgaaatcaaacggatcgagaacacaacgaatcgtcaagtcactttttgcaaacgtagaaatggtttgctcaagaaagcttacgagctctctgttctttgtgatgctgaagtcgcactcatcgtcttctctagccgtggtcgtctctatgagtactctaacaacagtgtaaaagggactattgagaggtacaagaaggcaatatcggacaattctaacaccggatcggtggcagaaattaatgcacagtattatcaacaagaatcagccaaattgcgtcaacaaataatcagcatacaaaactccaacaggcaattgatgggtgagacgatagggtcaatgtctcccaaagagctcaggaacttggaaggcagattagagagaagtattacccgaatccgatccaagaagaatgagctcttattttctgaaatcgactacatgcagaaaagagaagttgatttgcataacgataaccagattcttcgtgcaaagatagctgaaaatgagaggaacaatccgagtataagtctaatgccaggaggatctaactacgagcagcttatgccaccacctcaaacgcaatctcaaccgtttgattcacggaattatttccaagtcgcggcattgcaacctaacaatcaccattactcatccgcgggtcgccaagaccaaaccgctctccagttagtgtaatataggctgaaggaaatggccgggagtgaataaaaaccagaattgggttgagcaagcaatataaagctaatgcatgttatatatatatttatcccatgaatgttgtatcagtgaattttatgcttatgttgatgtgaaattaatatcttaaagacatgtcattaatgtgcttaatttgcttc

SEQ ID NO: 49348 - protein, 125 aa, Arabidopsis thaliana
  peptide (1)..(125): Ceres Seq. ID no. 13592263
MGETIGSMSPKELRNLEGRLERSITRIRSKKNELLFSEIDYMQKREVDLHNDNQILRAKIAENERNNPSISLMPGGSNYEQLMPPPQTQSQPFDSRNYFQVAALQPNNHHYSSAGRQDQTALQLV

SEQ ID NO: 49349 - protein, 118 aa, Arabidopsis thaliana
  peptide (1)..(118): Ceres Seq. ID no. 13592264
MSPKELRNLEGRLERSITRIRSKKNELLFSEIDYMQKREVDLHNDNQILRAKIAENERNNPSISLMPGGSNYEQLMPPPQTQSQPFDSRNYFQVAALQPNNHHYSSAGRQDQTALQLV

SEQ ID NO: 49350 - protein, 84 aa, Arabidopsis thaliana
  peptide (1)..(84): Ceres Seq. ID no. 13592265
MQKREVDLHNDNQILRAKIAENERNNPSISLMPGGSNYEQLMPPPQTQSQPFDSRNYFQVAALQPNNHHYSSAGRQDQTALQLV

SEQ ID NO: 49351 - DNA, 1585 bp, Arabidopsis thaliana
  misc_feature (1)..(1585): Ceres Seq. ID no. 12592066
  misc_feature (1)..(1585): Ortholog of  Ceres SEQ ID NO 15175898 as cited in SEQ ID NO 57344
agactgacaccaatcttcctctttaacagtcgttttattacagcgttctgatcaaaactccagtgaaagttcaaagtacacagagagaaacaaaaaaagaagaagaagaagttgaagaagaagaagccatgaatgctttagcagcaacaaacagaaacttcaagttagctgctaggcttcttggtctggattctaagctcgagaaaagtcttctcatccccttccgagaaatcaaggtggaatgtaccataccgaaagacgatggtacactagcatcattcgttgggttcagagttcaacacgacaatgcaagaggtcccatgaaaggtggaatcagatatcatcctgaggttgatccggatgaagtgaacgcattggctcagctcatgacatggaaaacagcagtggctaagattccttacggaggagctaaaggagggattggttgtgatcctagcaagctcagtatctccgagctcgagcggttgactcgagttttcactcagaagattcatgatctcattgggattcatactgatgttccagctccagatatgggcactggtcctcagacaatggcttggattcttgatgaatactctaagtttcatggatactcgcctgcagttgtgactggaaaacccattgatcttggtggatcgctagggagagacgcggctactggaagaggagtgatgtttggtaccgaagctttgcttaacgagcacggaaagaccatatcagggcagcgttttgtcatccagggatttggtaatgtgggttcttgggcggcaaagctgataagtgaaaagggtgggaagattgttgccgtgagtgacattaccggagcaatcaagaacaaggatggtatcgatatcccggccttgctcaagcatactaaagaacacagaggtgtcaaagggtttgatggtgcagatccgatcgatccaaactccatactggttgaggattgtgatatcctcgtccctgcagcacttggtggtgtcatcaacagggagaatgcgaatgagattaaagcaaagttcatcatagaagcagctaatcatccaactgatccggacgcggatgagatcctaagtaagaaaggtgtggttattctcccggacatatatgcaaactctggaggagtcactgtaagttacttcgaatgggttcagaacattcaaggctttatgtgggaggaagagaaggtgaacgatgagctaaagacttacatgactcgctctttcaaggacttgaaagagatgtgcaaaactcactcttgcgatctccggatgggagctttcacactcggtgttaatcgtgtggctcaagctaccattctcagaggctggggagcttaaagattatctaatctcttatgcaatctctttagcagctcctgaataagaattgagccaaactttaatctactttttgttttatcctcctactttggcttagaggtcatcctgagttaacagatatgtgtttacaagtactagaagacgcttctgtatgtaataaaaccttggactctaatagttaatgagcttttttactctcttgttaataaaaccaaggt

SEQ ID NO: 49352 - protein, 411 aa, Arabidopsis thaliana
  peptide (1)..(411): Ceres Seq. ID no. 12592067
MNALAATNRNFKLAARLLGLDSKLEKSLLIPFREIKVECTIPKDDGTLASFVGFRVQHDNARGPMKGGIRYHPEVDPDEVNALAQLMTWKTAVAKIPYGGAKGGIGCDPSKLSISELERLTRVFTQKIHDLIGIHTDVPAPDMGTGPQTMAWILDEYSKFHGYSPAVVTGKPIDLGGSLGRDAATGRGVMFGTEALLNEHGKTISGQRFVIQGFGNVGSWAAKLISEKGGKIVAVSDITGAIKNKDGIDIPALLKHTKEHRGVKGFDGADPIDPNSILVEDCDILVPAALGGVINRENANEIKAKFIIEAANHPTDPDADEILSKKGVVILPDIYANSGGVTVSYFEWVQNIQGFMWEEEKVNDELKTYMTRSFKDLKEMCKTHSCDLRMGAFTLGVNRVAQATILRGWGA

SEQ ID NO: 49353 - protein, 347 aa, Arabidopsis thaliana
  peptide (1)..(347): Ceres Seq. ID no. 12592068
MKGGIRYHPEVDPDEVNALAQLMTWKTAVAKIPYGGAKGGIGCDPSKLSISELERLTRVFTQKIHDLIGIHTDVPAPDMGTGPQTMAWILDEYSKFHGYSPAVVTGKPIDLGGSLGRDAATGRGVMFGTEALLNEHGKTISGQRFVIQGFGNVGSWAAKLISEKGGKIVAVSDITGAIKNKDGIDIPALLKHTKEHRGVKGFDGADPIDPNSILVEDCDILVPAALGGVINRENANEIKAKFIIEAANHPTDPDADEILSKKGVVILPDIYANSGGVTVSYFEWVQNIQGFMWEEEKVNDELKTYMTRSFKDLKEMCKTHSCDLRMGAFTLGVNRVAQATILRGWGA

SEQ ID NO: 49354 - protein, 325 aa, Arabidopsis thaliana
  peptide (1)..(325): Ceres Seq. ID no. 12592069
MTWKTAVAKIPYGGAKGGIGCDPSKLSISELERLTRVFTQKIHDLIGIHTDVPAPDMGTGPQTMAWILDEYSKFHGYSPAVVTGKPIDLGGSLGRDAATGRGVMFGTEALLNEHGKTISGQRFVIQGFGNVGSWAAKLISEKGGKIVAVSDITGAIKNKDGIDIPALLKHTKEHRGVKGFDGADPIDPNSILVEDCDILVPAALGGVINRENANEIKAKFIIEAANHPTDPDADEILSKKGVVILPDIYANSGGVTVSYFEWVQNIQGFMWEEEKVNDELKTYMTRSFKDLKEMCKTHSCDLRMGAFTLGVNRVAQATILRGWGA

SEQ ID NO: 49355 - DNA, 3317 bp, Arabidopsis thaliana
  misc_feature (1)..(3317): Ceres Seq. ID no. 12601928
  misc_feature (1)..(3317): Ortholog of  Ceres SEQ ID NO 14316546 as cited in SEQ ID NO 60020
ggctgctgttttcctctctctctctctctaaactcgagaatttttgtagagagaggaggcaaagtgcgaaagctaaacgcagatccacgatcaatctcctccaccttcaaaagccttcaaaagtgtttcttcttcgtcttcttccttttattatctgtgccttgacagatccacgatccgattctggtcaaattttacatttctgcagataagctgctcatactagttatacaacagactccatagaaggtgacatttgtttaagatactcttgttcctggaacacatacgaagatgaagaaagtcttcggacaaactgttagagaccttaagagagaggtcaacaagaaagtgctcaaagttcctggagtagaacagaaggttctagatgctactagtaatgagccatggggtccacatggatcacttcttgctgatcttgcgcaagcttccagaaattatcatgaatatcagctgatcatggtggtcatatggaaacgccttagcgacaccggaaaaaactggcggcatgtctataaggctttgacagttttggagtacatggtaggccatggatcagaacgtgttatagacgagattagagaacgtgcatatcaaatttcgacattgtccgattttcagtatattgattccggtggtagagatcaaggaagcaatgttaggaagaaatcacagagcctggtggctttggtgaatgacaaggaaagaatagctgaagtcagacagaaggctgctgctaatagagataagtatcgcagctcagcaccaggtgggatgtataagccttcaggcggatatggggataaatatgattacggaagccgggatgaagagcgaagtagttatggaagagaaagagaatatggttacagagatgatgatagaaatagtcgtgatggagatcgtcattccagggactctgaagaccggtatgggagagatggtaatagggatgatgattacaggggaaggagcagaagtgttgataactatgggtcacgaggtaggagttcggaaagagagcgggaggatgatggccattcttcatcacggggcagtggtgctcgagctgatgataattctcaggatgggagaggggggctccagaggaagttttctgaacaaaatattggcgctccacccagttatgaagaagctgtcagtgattcacgcagccctgtatatagtgaaagggatggtggggagaccccacaagttaccgctccaggagctgcttctcctcctcccccacaagttgctgctccagaggctgcttctcctccaactggaaccaacacagccaatacaactgctacttttgttaatgaatcaccttctcagaaagttgagactttcgatgaatttgatccacgcagtgcgttttcagctggccctccagcatatgcatctacagatggtgttacagctcctccaactgtgacttctatgtctgcccctaccacctcaaacagtgttgagatggacttgcttggttcccttgcagacgtattttcatcaaacgcattggccattgtaccagctgattctatctatgttgaaaccaatggacaagcaaacgctggtccagctccatcgttttctacatctcagccatcaactcagtcatttgatgacccatttggtgactctcctttcaaggccttcacttctactgacaccgactcaaccccacagcagaattttggagcttctttccagccaccacctccagccttcacttcagaggtctcacatcctgatactgctcataactttggctttggggactcattttccgccgttgccaatcctgatcctgcttctcagaatgtgcaacctccatcgaactcaccaggttttcctcaagagcaatttgctacatctcagagtggtattgatatcctcgctggcattctcccaccatctggacctccagtacaatcgggtccctcaataccaacatctcaatttcctcccagtggaaacaacatgtacgagggatttcattctcagccgccggtatctacagctccaaacctgcctggacaaactccatttggacaagctgttcaaccatataacatggttcctcattctcaaaatatgactggagccatgccatttaatagtggaggcttcatgcaccagccgggctcacaaactccttactctaccccaagtggaccagctggtcagttcatggcacaccaaggtcatggaatgccgccatcccatggtccacaacgaactcaatccggacctgttactctgcaagggaacaacaatgtcatgggagacatgttctcgcaagctacgcccaactccttgacgtcatcatcatctcatccagatctcacacctttaacaggagcaattgagattgttcctccgcctcagaaaaagtttgagccaaaatcatcagtctgggcagacacgttgagcagggggcttgttaactttaacatatctggatctaaaacaaatccattggcagacataggagttgacttcgaggcgatcaacaggagagagaaacggctggagaaacaaacaaacacaccagcaacatcgactatcaatatgggtaaagccatgggatcaggcactggcttagggcgttctggtgcaactgctatgagacctccacctaatccaatgacaggctctggcatgcccatgggcggaggaatgggtgttggtagctacggaggtatgaaccagaaccaacccatgggtatgggtatgggggccggaatgaaccaaaaccaaccgatgggtatgggaatgggacccggcatgaacatgaacatgaacatgggaggatatggccaaggctatccgatgcaaccacaaaacccagggatggtacctagcccaaacatgcctggcaataactacaatccgatgatgggtcaaggtggttacaaccctcaacaatcctatggtggtggataccggtaagatcaagccaaacatgatgcacttgacttcattcgtgtaatcaagaatacgctcgcctgtgctttttctttactctgggatatgtaatatcagtcgataaaagtactcaggttacattattcatccaggcaacacggctccacgaattttcttctctgtttgttcttgccttactcgtcactcatcattcatttttatttttttctggtttggaccaaattgagagcttgttgtgaaatttgtaccagtgtgagagtggcaaaccttgctcgggtctgccctttttttgttatatgcatataatttgatatatacacattcacttctatttcttt

SEQ ID NO: 49356 - protein, 895 aa, Arabidopsis thaliana
  peptide (1)..(895): Ceres Seq. ID no. 12601929
MKKVFGQTVRDLKREVNKKVLKVPGVEQKVLDATSNEPWGPHGSLLADLAQASRNYHEYQLIMVVIWKRLSDTGKNWRHVYKALTVLEYMVGHGSERVIDEIRERAYQISTLSDFQYIDSGGRDQGSNVRKKSQSLVALVNDKERIAEVRQKAAANRDKYRSSAPGGMYKPSGGYGDKYDYGSRDEERSSYGREREYGYRDDDRNSRDGDRHSRDSEDRYGRDGNRDDDYRGRSRSVDNYGSRGRSSEREREDDGHSSSRGSGARADDNSQDGRGGLQRKFSEQNIGAPPSYEEAVSDSRSPVYSERDGGETPQVTAPGAASPPPPQVAAPEAASPPTGTNTANTTATFVNESPSQKVETFDEFDPRSAFSAGPPAYASTDGVTAPPTVTSMSAPTTSNSVEMDLLGSLADVFSSNALAIVPADSIYVETNGQANAGPAPSFSTSQPSTQSFDDPFGDSPFKAFTSTDTDSTPQQNFGASFQPPPPAFTSEVSHPDTAHNFGFGDSFSAVANPDPASQNVQPPSNSPGFPQEQFATSQSGIDILAGILPPSGPPVQSGPSIPTSQFPPSGNNMYEGFHSQPPVSTAPNLPGQTPFGQAVQPYNMVPHSQNMTGAMPFNSGGFMHQPGSQTPYSTPSGPAGQFMAHQGHGMPPSHGPQRTQSGPVTLQGNNNVMGDMFSQATPNSLTSSSSHPDLTPLTGAIEIVPPPQKKFEPKSSVWADTLSRGLVNFNISGSKTNPLADIGVDFEAINRREKRLEKQTNTPATSTINMGKAMGSGTGLGRSGATAMRPPPNPMTGSGMPMGGGMGVGSYGGMNQNQPMGMGMGAGMNQNQPMGMGMGPGMNMNMNMGGYGQGYPMQPQNPGMVPSPNMPGNNYNPMMGQGGYNPQQSYGGGYR

SEQ ID NO: 49357 - protein, 833 aa, Arabidopsis thaliana
  peptide (1)..(833): Ceres Seq. ID no. 12601930
MVVIWKRLSDTGKNWRHVYKALTVLEYMVGHGSERVIDEIRERAYQISTLSDFQYIDSGGRDQGSNVRKKSQSLVALVNDKERIAEVRQKAAANRDKYRSSAPGGMYKPSGGYGDKYDYGSRDEERSSYGREREYGYRDDDRNSRDGDRHSRDSEDRYGRDGNRDDDYRGRSRSVDNYGSRGRSSEREREDDGHSSSRGSGARADDNSQDGRGGLQRKFSEQNIGAPPSYEEAVSDSRSPVYSERDGGETPQVTAPGAASPPPPQVAAPEAASPPTGTNTANTTATFVNESPSQKVETFDEFDPRSAFSAGPPAYASTDGVTAPPTVTSMSAPTTSNSVEMDLLGSLADVFSSNALAIVPADSIYVETNGQANAGPAPSFSTSQPSTQSFDDPFGDSPFKAFTSTDTDSTPQQNFGASFQPPPPAFTSEVSHPDTAHNFGFGDSFSAVANPDPASQNVQPPSNSPGFPQEQFATSQSGIDILAGILPPSGPPVQSGPSIPTSQFPPSGNNMYEGFHSQPPVSTAPNLPGQTPFGQAVQPYNMVPHSQNMTGAMPFNSGGFMHQPGSQTPYSTPSGPAGQFMAHQGHGMPPSHGPQRTQSGPVTLQGNNNVMGDMFSQATPNSLTSSSSHPDLTPLTGAIEIVPPPQKKFEPKSSVWADTLSRGLVNFNISGSKTNPLADIGVDFEAINRREKRLEKQTNTPATSTINMGKAMGSGTGLGRSGATAMRPPPNPMTGSGMPMGGGMGVGSYGGMNQNQPMGMGMGAGMNQNQPMGMGMGPGMNMNMNMGGYGQGYPMQPQNPGMVPSPNMPGNNYNPMMGQGGYNPQQSYGGGYR

SEQ ID NO: 49358 - protein, 806 aa, Arabidopsis thaliana
  peptide (1)..(806): Ceres Seq. ID no. 12601931
MVGHGSERVIDEIRERAYQISTLSDFQYIDSGGRDQGSNVRKKSQSLVALVNDKERIAEVRQKAAANRDKYRSSAPGGMYKPSGGYGDKYDYGSRDEERSSYGREREYGYRDDDRNSRDGDRHSRDSEDRYGRDGNRDDDYRGRSRSVDNYGSRGRSSEREREDDGHSSSRGSGARADDNSQDGRGGLQRKFSEQNIGAPPSYEEAVSDSRSPVYSERDGGETPQVTAPGAASPPPPQVAAPEAASPPTGTNTANTTATFVNESPSQKVETFDEFDPRSAFSAGPPAYASTDGVTAPPTVTSMSAPTTSNSVEMDLLGSLADVFSSNALAIVPADSIYVETNGQANAGPAPSFSTSQPSTQSFDDPFGDSPFKAFTSTDTDSTPQQNFGASFQPPPPAFTSEVSHPDTAHNFGFGDSFSAVANPDPASQNVQPPSNSPGFPQEQFATSQSGIDILAGILPPSGPPVQSGPSIPTSQFPPSGNNMYEGFHSQPPVSTAPNLPGQTPFGQAVQPYNMVPHSQNMTGAMPFNSGGFMHQPGSQTPYSTPSGPAGQFMAHQGHGMPPSHGPQRTQSGPVTLQGNNNVMGDMFSQATPNSLTSSSSHPDLTPLTGAIEIVPPPQKKFEPKSSVWADTLSRGLVNFNISGSKTNPLADIGVDFEAINRREKRLEKQTNTPATSTINMGKAMGSGTGLGRSGATAMRPPPNPMTGSGMPMGGGMGVGSYGGMNQNQPMGMGMGAGMNQNQPMGMGMGPGMNMNMNMGGYGQGYPMQPQNPGMVPSPNMPGNNYNPMMGQGGYNPQQSYGGGYR

SEQ ID NO: 49359 - DNA, 2456 bp, Arabidopsis thaliana; identical to SEQ ID NO: 45655
  misc_feature (1)..(2456): Ceres Seq. ID no. 13592201
  misc_feature (1)..(2456): Ortholog of  Ceres SEQ ID NO 15173102 as cited in SEQ ID NO 61106

SEQ ID NO: 49360 - protein, 793 aa, Arabidopsis thaliana; identical to SEQ ID NO: 45656
  peptide (1)..(793): Ceres Seq. ID no. 13592202

SEQ ID NO: 49361 - protein, 784 aa, Arabidopsis thaliana; identical to SEQ ID NO: 45657
  peptide (1)..(784): Ceres Seq. ID no. 13592203

SEQ ID NO: 49362 - protein, 626 aa, Arabidopsis thaliana; identical to SEQ ID NO: 45658
  peptide (1)..(626): Ceres Seq. ID no. 13592204

SEQ ID NO: 49363 - DNA, 1279 bp, Arabidopsis thaliana
  misc_feature (1)..(1279): Ceres Seq. ID no. 13648459
  misc_feature (1)..(1279): Ortholog of  Ceres SEQ ID NO 15176911 as cited in SEQ ID NO 54868
  misc_feature (1)..(1279): Ortholog of  Ceres SEQ ID NO 13596433 as cited in SEQ ID NO 68721
  misc_feature (1)..(1279): Ortholog of  Ceres SEQ ID NO 13599169 as cited in SEQ ID NO 0
ccccccactccccgtcctacaggtcgactcagtctccggctagttcgactcggtaaaatcacgattactttctccttccatttatcacgatcgtggatccagaaactctgaaagatggcgtctgagctgacaaaccggcgacacgagatagagcaaccagaagcggaatcttattatccaaagccgataaagccatggttcgtagcgattcgtccgatccgttacatgctcagagaacagagactcgtcttcgtcctcgtcggcattgtcatcgccacattaggattcacaatcttctccaaatcatccaaccaccaaccaattccttacgacgtggatccgctttccggatacggaatgcgatcggagtcatcgtatctgccagcgacgattcataagaagccaagcatcgagtacatgagccggatcggatcggcaggcggcaaaatccctctaagcttgaaacggaaagtgctaagggttgttgtgacaggtggagcagggttcgtcgggtcacacctggtggaccggttgatggctcgaggagacaacgtgatcgtggtcgacaatttcttcacgggaaggaaagagaacgtgatgcaccatttcaataaccctaatttcgagatgatccgtcacgatgtagtggagccgatccttctagaggttgatcagatctaccatttggcatgccctgcttctcctgttcactacaaattcaatcccgtcaagactatcaagacgaatgtggtgggaacattgaacatgttgggactagcgaagagagtgggagcaagattcttgctgacgagtacgagtgaggtctatggagatcctcttcaacatcctcaggttgagacttactggggcaacgttaatcccatcggtgttcggagttgttacgacgaaggcaaacgtacggctgagactttgaccatggactatcacagaggcgctaatgttgaggttaggattgctaggatattcaacacttatggcccaaggatgtgtatcgatgacggtcgtgtggttagcaacttcgttgcccaggcattaagaaaagagcctttgactgtttatggtgatggtaagcagactaggagtttccagtttgtctctgatctggtggaaggtctgatgaggttgatggagggagaacatgtcggtccatttaaccttggtaaccccggtgaattcaccatgctcgagctcgctaaggtggttcaagagacaattgacccgaacgcaaagatagagttagctcgagggggggcccggt

SEQ ID NO: 49364 - protein, 388 aa, Arabidopsis thaliana
  peptide (1)..(388): Ceres Seq. ID no. 13648460
MASELTNRRHEIEQPEAESYYPKPIKPWFVAIRPIRYMLREQRLVFVLVGIVIATLGFTIFSKSSNHQPIPYDVDPLSGYGMRSESSYLPATIHKKPSIEYMSRIGSAGGKIPLSLKRKVLRVVVTGGAGFVGSHLVDRLMARGDNVIVVDNFFTGRKENVMHHFNNPNFEMIRHDVVEPILLEVDQIYHLACPASPVHYKFNPVKTIKTNVVGTLNMLGLAKRVGARFLLTSTSEVYGDPLQHPQVETYWGNVNPIGVRSCYDEGKRTAETLTMDYHRGANVEVRIARIFNTYGPRMCIDDGRVVSNFVAQALRKEPLTVYGDGKQTRSFQFVSDLVEGLMRLMEGEHVGPFNLGNPGEFTMLELAKVVQETIDPNAKIELARGGAR

SEQ ID NO: 49365 - protein, 351 aa, Arabidopsis thaliana
  peptide (1)..(351): Ceres Seq. ID no. 13648461
MLREQRLVFVLVGIVIATLGFTIFSKSSNHQPIPYDVDPLSGYGMRSESSYLPATIHKKPSIEYMSRIGSAGGKIPLSLKRKVLRVVVTGGAGFVGSHLVDRLMARGDNVIVVDNFFTGRKENVMHHFNNPNFEMIRHDVVEPILLEVDQIYHLACPASPVHYKFNPVKTIKTNVVGTLNMLGLAKRVGARFLLTSTSEVYGDPLQHPQVETYWGNVNPIGVRSCYDEGKRTAETLTMDYHRGANVEVRIARIFNTYGPRMCIDDGRVVSNFVAQALRKEPLTVYGDGKQTRSFQFVSDLVEGLMRLMEGEHVGPFNLGNPGEFTMLELAKVVQETIDPNAKIELARGGAR

SEQ ID NO: 49366 - protein, 307 aa, Arabidopsis thaliana
  peptide (1)..(307): Ceres Seq. ID no. 13648462
MRSESSYLPATIHKKPSIEYMSRIGSAGGKIPLSLKRKVLRVVVTGGAGFVGSHLVDRLMARGDNVIVVDNFFTGRKENVMHHFNNPNFEMIRHDVVEPILLEVDQIYHLACPASPVHYKFNPVKTIKTNVVGTLNMLGLAKRVGARFLLTSTSEVYGDPLQHPQVETYWGNVNPIGVRSCYDEGKRTAETLTMDYHRGANVEVRIARIFNTYGPRMCIDDGRVVSNFVAQALRKEPLTVYGDGKQTRSFQFVSDLVEGLMRLMEGEHVGPFNLGNPGEFTMLELAKVVQETIDPNAKIELARGGAR

SEQ ID NO: 49367 - DNA, 1656 bp, Arabidopsis thaliana
  misc_feature (1)..(1656): Ceres Seq. ID no. 13648463
  misc_feature (1)..(1656): Ortholog of  Ceres SEQ ID NO 14311367 as cited in SEQ ID NO 53834
atctttccgtttctcgcttctttttctccgccggcgtccttccatttcgccggctgctatcgaaccctaacccgcgacgactccaccgtctccggcgtcttcttcttccggcgaaaccggtaaccgtatcttttgtttctatagaattagcttcatgatggcggatactgaaatgcaagagcaagatgtgccgtctggtaccaaaggtgttgtagaggagccttcagaactagagaaagacctaaactctattgaaagacctaagtcccctgttccagaggatacgactcatactttggatagtgatgttcatttatctgatgctcccattgctaatcaaattgaggctaatgaagaggttggtggacagaacagtgttgatgggaggaatggtgatgttgatcagtctgaaaagaagattactagtgatggcggtcaagaggagacaacacttggggaatcaaatcctttgaagggggatccgtcgagtcctcatgttcctgaagaaagtgttaagaagtggaagacatggttgttgagtgatgctgaggccagggaagttgatgaagcaggggcaccacaggatcaagaggcgtttattaaagaagtggaggccttcaacaaggagaatttcctggaatttaaagccccaaagttttacggacagcccttaaattgtctcaagctttggagagccgttatcaagttaggtggctacgatgtggtcaccacatctaagctatggcggcaagttggagaatcgttccatcctccaaaaacatgcactacagtctcctggacattccgcattttctatgaaaaggcacttttggagtatgagaagcatttaaggcaaaatggtgagcttaaccttcctggttcagcttctcttccgtcttcaggcattgaaaaggaggcaagtagccatcaagcttcagggtcaggcagaacaagaagagatgctgcagctcgtgctatgcaaggttggcattctcagcgccttcttggatctggggaggttactgagcctattgttaaggagaaaggcttgaattcaaccccaaagcaaaagaacctcaaaaacattggtgtgcagaaacaaaaaacaacaaccggcatggaccttgttttttcacacgaatcagaaaaacagtcaactgccgaggttatagatgttggaccccctgcagactgggtgaagatcaatgtcagagaaactaaagactgctttgagatatttgccctggtacctggacttcttcgcgaagaggtccgtgttcagtcagaccctgcagggcggctagttatagcaggccaacctgagcaacttgacaatccttggggaatcacacccttcaaaaaggttgtgaactttcccgcaagaatcgatccgctgcacacgtcagcggttgtgagcctgcatggtcgactgtttgtgcgagtcccatttgagcagtgaccggtctcatcccaagtgagctagttctttatttgtctctttgttttcttttaggaattcgtttgtatcagaactaaaaacaaacgatagcaaatgtgatagtttgactgtgacttgagttctgaatattaaagtagagaaatgaatattgatgttccataaaaaaaaaaaaaaaaactcgagggggggcccggtac

SEQ ID NO: 49368 - protein, 434 aa, Arabidopsis thaliana
  peptide (1)..(434): Ceres Seq. ID no. 13648464
MMADTEMQEQDVPSGTKGVVEEPSELEKDLNSIERPKSPVPEDTTHTLDSDVHLSDAPIANQIEANEEVGGQNSVDGRNGDVDQSEKKITSDGGQEETTLGESNPLKGDPSSPHVPEESVKKWKTWLLSDAEAREVDEAGAPQDQEAFIKEVEAFNKENFLEFKAPKFYGQPLNCLKLWRAVIKLGGYDVVTTSKLWRQVGESFHPPKTCTTVSWTFRIFYEKALLEYEKHLRQNGELNLPGSASLPSSGIEKEASSHQASGSGRTRRDAAARAMQGWHSQRLLGSGEVTEPIVKEKGLNSTPKQKNLKNIGVQKQKTTTGMDLVFSHESEKQSTAEVIDVGPPADWVKINVRETKDCFEIFALVPGLLREEVRVQSDPAGRLVIAGQPEQLDNPWGITPFKKVVNFPARIDPLHTSAVVSLHGRLFVRVPFEQ

SEQ ID NO: 49369 - protein, 433 aa, Arabidopsis thaliana
  peptide (1)..(433): Ceres Seq. ID no. 13648465
MADTEMQEQDVPSGTKGVVEEPSELEKDLNSIERPKSPVPEDTTHTLDSDVHLSDAPIANQIEANEEVGGQNSVDGRNGDVDQSEKKITSDGGQEETTLGESNPLKGDPSSPHVPEESVKKWKTWLLSDAEAREVDEAGAPQDQEAFIKEVEAFNKENFLEFKAPKFYGQPLNCLKLWRAVIKLGGYDVVTTSKLWRQVGESFHPPKTCTTVSWTFRIFYEKALLEYEKHLRQNGELNLPGSASLPSSGIEKEASSHQASGSGRTRRDAAARAMQGWHSQRLLGSGEVTEPIVKEKGLNSTPKQKNLKNIGVQKQKTTTGMDLVFSHESEKQSTAEVIDVGPPADWVKINVRETKDCFEIFALVPGLLREEVRVQSDPAGRLVIAGQPEQLDNPWGITPFKKVVNFPARIDPLHTSAVVSLHGRLFVRVPFEQ

SEQ ID NO: 49370 - protein, 428 aa, Arabidopsis thaliana
  peptide (1)..(428): Ceres Seq. ID no. 13648466
MQEQDVPSGTKGVVEEPSELEKDLNSIERPKSPVPEDTTHTLDSDVHLSDAPIANQIEANEEVGGQNSVDGRNGDVDQSEKKITSDGGQEETTLGESNPLKGDPSSPHVPEESVKKWKTWLLSDAEAREVDEAGAPQDQEAFIKEVEAFNKENFLEFKAPKFYGQPLNCLKLWRAVIKLGGYDVVTTSKLWRQVGESFHPPKTCTTVSWTFRIFYEKALLEYEKHLRQNGELNLPGSASLPSSGIEKEASSHQASGSGRTRRDAAARAMQGWHSQRLLGSGEVTEPIVKEKGLNSTPKQKNLKNIGVQKQKTTTGMDLVFSHESEKQSTAEVIDVGPPADWVKINVRETKDCFEIFALVPGLLREEVRVQSDPAGRLVIAGQPEQLDNPWGITPFKKVVNFPARIDPLHTSAVVSLHGRLFVRVPFEQ

SEQ ID NO: 49371 - DNA, 1229 bp, Arabidopsis thaliana
  misc_feature (1)..(1229): Ceres Seq. ID no. 12601816
  misc_feature (1)..(1229): Ortholog of  Ceres SEQ ID NO 14303355 as cited in SEQ ID NO 59746
  misc_feature (1)..(1229): Ortholog of  Ceres SEQ ID NO 14302415 as cited in SEQ ID NO 62781
aattcgtcaataaggacttagcttttctccaaatattaaggaggggaattgtctcataatccttatccaccactattaataccgtaactcctaattaaactcgtaaagtcttcatcgcagaagtatatataatcaaaaagcaaatcgagttattttctctctcaattcatcccaaaccgtcgtaaccattctctttcgtttcgtttcgtttcttctcttttaaaaacctttcttcgaaaagatgacgatctctgttgagaagccgatttttgaagaagaggtttctgcattcgagaagagtggggacaatatcggagagttgaaattggacggaggattttcgatgccgaaaatggacaccaatgacgacgaagcttttttggctcctgagatgaatgcatttggccgccaattcagggactacgatgttgagagtgagaggcaaaagggcgtcgaagagttttacagattacaacacatcaaccaaactgtcgactttgtgaaaaagatgagggctgaatatggaaaattagataaaatggtgatgagcatttgggaatgttgtgagcttctcaatgaggttgtggatgagagtgatccagatcttgacgagccccagattcagcatttgcttcaatctgccgaagccatccgcaaagattaccctaatgaagattggcttcatctgaccgctcttatccatgatcttgggaaagttattactcttccacaattcggaggacttcctcaatgggctgttgttggtgacacattccctgttggatgtgcatttgatgaatctaacgtacatcacaagtactttgtggaaaacccagattttcacaacgaaacctacaacactaaaaatgggatttactctgaagggtgtggattaaacaatgtcatgatgtcttggggccatgacgactacatgtacctggtggctaaagaaaacggaagtaccttgccgtcggctggacagtttatcataagataccattccttttaccctttgcacacggctggagaatacacccatcttatgaacgaggaagacaaggagaatctgaagtggctacacgttttcaacaagtacgacttgtacagtaagagcaaagttcacgttgatgtggagaaggtcaagccttactacatgtctcttatcaagaaatatttcccggaaaacttgaggtggtgaattcggtggagtaaaaaagtgcccatggagg

SEQ ID NO: 49372 - protein, 318 aa, Arabidopsis thaliana
  peptide (1)..(318): Ceres Seq. ID no. 12601817
MTISVEKPIFEEEVSAFEKSGDNIGELKLDGGFSMPKMDTNDDEAFLAPEMNAFGRQFRDYDVESERQKGVEEFYRLQHINQTVDFVKKMRAEYGKLDKMVMSIWECCELLNEVVDESDPDLDEPQIQHLLQSAEAIRKDYPNEDWLHLTALIHDLGKVITLPQFGGLPQWAVVGDTFPVGCAFDESNVHHKYFVENPDFHNETYNTKNGIYSEGCGLNNVMMSWGHDDYMYLVAKENGSTLPSAGQFIIRYHSFYPLHTAGEYTHLMNEEDKENLKWLHVFNKYDLYSKSKVHVDVEKVKPYYMSLIKKYFPENLRW

SEQ ID NO: 49373 - protein, 284 aa, Arabidopsis thaliana
  peptide (1)..(284): Ceres Seq. ID no. 12601818
MPKMDTNDDEAFLAPEMNAFGRQFRDYDVESERQKGVEEFYRLQHINQTVDFVKKMRAEYGKLDKMVMSIWECCELLNEVVDESDPDLDEPQIQHLLQSAEAIRKDYPNEDWLHLTALIHDLGKVITLPQFGGLPQWAVVGDTFPVGCAFDESNVHHKYFVENPDFHNETYNTKNGIYSEGCGLNNVMMSWGHDDYMYLVAKENGSTLPSAGQFIIRYHSFYPLHTAGEYTHLMNEEDKENLKWLHVFNKYDLYSKSKVHVDVEKVKPYYMSLIKKYFPENLRW

SEQ ID NO: 49374 - protein, 281 aa, Arabidopsis thaliana
  peptide (1)..(281): Ceres Seq. ID no. 12601819
MDTNDDEAFLAPEMNAFGRQFRDYDVESERQKGVEEFYRLQHINQTVDFVKKMRAEYGKLDKMVMSIWECCELLNEVVDESDPDLDEPQIQHLLQSAEAIRKDYPNEDWLHLTALIHDLGKVITLPQFGGLPQWAVVGDTFPVGCAFDESNVHHKYFVENPDFHNETYNTKNGIYSEGCGLNNVMMSWGHDDYMYLVAKENGSTLPSAGQFIIRYHSFYPLHTAGEYTHLMNEEDKENLKWLHVFNKYDLYSKSKVHVDVEKVKPYYMSLIKKYFPENLRW

SEQ ID NO: 49375 - DNA, 1192 bp, Arabidopsis thaliana
  misc_feature (1)..(1192): Ceres Seq. ID no. 15179684
  misc_feature (1)..(1192): Ortholog of  Ceres SEQ ID NO 15179023 as cited in SEQ ID NO 0
ttctttctcctctactagttacatatcttcaacaaagtgaatctcatgaggatattaccgaaaagcggaggaggtgctctttgcctcctctttgtgtttgctctttgttcggtggctcattcccttagccgtgacgtcaaggttgttggcgatgtcgaagtcattggctactcagaaatcagcaaaatcaagatccccaatgcattctcaggacttcgagttacgatagaatgcaaggcggccgattcaaaaggccattttgtaacgaggggaagcggagaagtggacgaaacaggaaagtttcatcttaatattcctcatgacattgtcggtgatgacggaactctaaaagaagcttgctatgctcatcttcaaagtgccttcggcaacccttgtccggcccacgatggccttgaggcctccaagatcgtgtttctatcgaaatccggccaaaaccacgttttgggtctcaaaaaaagtcttaaattctcaccagaagtttgcatctcaaagttcttttggcatatgcctaagttccctttacctcctccgcttaatctcccaccgttaacgtttcctaagatcaagaagccttgtcccccaatttacaaaccaccggtggtgatccctaagaagccgtgtccaccaaagattgcacataaacccatctacaagccgccggttcccatctacaagcctccagtgcctatctacaagccaccagttgttatccccaagaaaccgtgtccaccaaagatacacaagcccatctacaagccacccgtgcctatctacaagcctccagtggtgatcccaaagaagacatttcctccacttcacaagccgatctacaagcacccggttcctatctacaaaccaatcttcaagccgccagtggtggtgattccaaagaaaccatgtccaccacttcccaagtttccacacttcccacctaaatacattccacaccctaagttcggaaaatggcctcctttcccttctcatccttgataaagatgcaaaatcctctgtctttcttaatttaagaaaagtgatcgagtgatgccacaaaagaatgttcctttgttgctttgttgaattctacgtagatgtttcatgtttatgtatcgtaaattccagccaatcatatttgtaattttttaccgttaaataaatctgtaatctcgtttct

SEQ ID NO: 49376 - protein, 321 aa, Arabidopsis thaliana
  peptide (1)..(321): Ceres Seq. ID no. 15179685
MRILPKSGGGALCLLFVFALCSVAHSLSRDVKVVGDVEVIGYSEISKIKIPNAFSGLRVTIECKAADSKGHFVTRGSGEVDETGKFHLNIPHDIVGDDGTLKEACYAHLQSAFGNPCPAHDGLEASKIVFLSKSGQNHVLGLKKSLKFSPEVCISKFFWHMPKFPLPPPLNLPPLTFPKIKKPCPPIYKPPVVIPKKPCPPKIAHKPIYKPPVPIYKPPVPIYKPPVVIPKKPCPPKIHKPIYKPPVPIYKPPVVIPKKTFPPLHKPIYKHPVPIYKPIFKPPVVVIPKKPCPPLPKFPHFPPKYIPHPKFGKWPPFPSHP

SEQ ID NO: 49377 - protein, 161 aa, Arabidopsis thaliana
  peptide (1)..(161): Ceres Seq. ID no. 15179686
MPKFPLPPPLNLPPLTFPKIKKPCPPIYKPPVVIPKKPCPPKIAHKPIYKPPVPIYKPPVPIYKPPVVIPKKPCPPKIHKPIYKPPVPIYKPPVVIPKKTFPPLHKPIYKHPVPIYKPIFKPPVVVIPKKPCPPLPKFPHFPPKYIPHPKFGKWPPFPSHP

SEQ ID NO: 49378 - DNA, 1372 bp, Arabidopsis thaliana
  misc_feature (1)..(1372): Ceres Seq. ID no. 13648032
  misc_feature (1)..(1372): Ortholog of  Ceres SEQ ID NO 15179380 as cited in SEQ ID NO 0
gaagcacactacacagagattctggatgaagaacaaatccacatgaaattcgattctcacatttcttctatttaattcgaatttcaaattgccatttctcagattccggggaaagaaaaaaaaacctagaaaagtgttttctccgttttccaatcatccatgagtccggacaataaactgcttccgaagcggatcatccttgtacggcacggtgaatcggaagggaatctcgacacggcggcgtatacaacgacgccggatcataagatccagttaacggattccggtttgcttcaggcgcaggaagccggagctcgtctccacgctttgatctcttctaatccttcttcaccggagtggcgtgtgtacttctacgtttcgccgtacgatcggactcgatctacgctccgggagatcggacggtcgttctcgcgtcgccgtgtgattggtgttcgcgaagaatgtcggattagggaacaggattttgggaattttcaggttaaagagcgaatgagagcaacgaaaaaggtcagagagagatttggccgctttttttaccggttcccggagggagaatccgccgccgatgtcttcgatcgcgtctccagttttctcgagtctctatggagagacattgacatgaacagactgcacatcaacccgtctcatgagctaaattttgtgattgtctcacatggcttaacatcgcgtgtgtttctgatgaaatggtttaagtggtcagtggaacagttcgagggactaaacaatccagggaacagtgagatcagagtgatggaattaggacaaggcggtgattacagcttggcgattcatcacacagaggaagagttagccacatggggactgtcaccagagatgattgcagatcaaaagtggcgggctaacgcgcataaaggcgaatggaaagaagattgtaagtggtattttggtgatttcttcgaccatatggcagattccgataaagagtgcgagactgaggccactgaagaaagagaagaagaagaagaagaagaagaagaagaggggaaaagggtaaatctgctaacgagttcagaatatagcaatgagccagagttatacaatggacaatgctgctgatactattttacagaacaaaagcatacatgagaagaaacgtttaactaaagaattcagaagatttgattttgataaaaacttgtaccaatttactgattaagctttctggtgtcttagtttgtagcttttggtttgtggaaaagtgttgtacacatcgttataacaccaggaaacattacaggaaatttgaaagattcattttattgtgacaaagcaaaaaaaaaaaaaaaaaaaactcgagggggggcccggt

SEQ ID NO: 49379 - protein, 319 aa, Arabidopsis thaliana
  peptide (1)..(319): Ceres Seq. ID no. 13648033
MSPDNKLLPKRIILVRHGESEGNLDTAAYTTTPDHKIQLTDSGLLQAQEAGARLHALISSNPSSPEWRVYFYVSPYDRTRSTLREIGRSFSRRRVIGVREECRIREQDFGNFQVKERMRATKKVRERFGRFFYRFPEGESAADVFDRVSSFLESLWRDIDMNRLHINPSHELNFVIVSHGLTSRVFLMKWFKWSVEQFEGLNNPGNSEIRVMELGQGGDYSLAIHHTEEELATWGLSPEMIADQKWRANAHKGEWKEDCKWYFGDFFDHMADSDKECETEATEEREEEEEEEEEEGKRVNLLTSSEYSNEPELYNGQCC

SEQ ID NO: 49380 - protein, 202 aa, Arabidopsis thaliana
  peptide (1)..(202): Ceres Seq. ID no. 13648034
MRATKKVRERFGRFFYRFPEGESAADVFDRVSSFLESLWRDIDMNRLHINPSHELNFVIVSHGLTSRVFLMKWFKWSVEQFEGLNNPGNSEIRVMELGQGGDYSLAIHHTEEELATWGLSPEMIADQKWRANAHKGEWKEDCKWYFGDFFDHMADSDKECETEATEEREEEEEEEEEEGKRVNLLTSSEYSNEPELYNGQCC

SEQ ID NO: 49381 - protein, 159 aa, Arabidopsis thaliana
  peptide (1)..(159): Ceres Seq. ID no. 13648035
MNRLHINPSHELNFVIVSHGLTSRVFLMKWFKWSVEQFEGLNNPGNSEIRVMELGQGGDYSLAIHHTEEELATWGLSPEMIADQKWRANAHKGEWKEDCKWYFGDFFDHMADSDKECETEATEEREEEEEEEEEEGKRVNLLTSSEYSNEPELYNGQCC

SEQ ID NO: 49382 - DNA, 1612 bp, Arabidopsis thaliana
  misc_feature (1)..(1612): Ceres Seq. ID no. 12605127
  misc_feature (1)..(1612): Ortholog of  Ceres SEQ ID NO 13595164 as cited in SEQ ID NO 56222
  misc_feature (1)..(1612): Ortholog of  Ceres SEQ ID NO 13591068 as cited in SEQ ID NO 69043
  misc_feature (1)..(1612): Ortholog of  Ceres SEQ ID NO 13623041 as cited in SEQ ID NO 0
ggataaaacagaaacctaatcccttaaacctcgccggcgacggaaaatggctttcgcgtctccttcgctccgtcttcttcctcagtctccgttaggtcgaataacatctaaactacaccgtttcagtactgcgaaactctcactcttctcctttcaccatgattcttcatcttctttggctgtcagaactccggtatcttccttcgtcgtcggcgctatctccggaaaatcctctaccggaacgaaatcgaaatccaaaaccaaacggaaaccacctcctcctccgccagtcactactgtggctgaagagcaacacattgctgagtcagagacagtcaacattgccgaagatgtcactcaattgattggaagcacaccaatggtctatctcaatagagtcacagatggttgtttggctgacattgctgccaagctcgaatcaatggagccctgtagaagcgtcaaagataggatcggtctgagcatgatcaacgaggcagaaaacagcggagctataactccgaggaagactgtattagtagaaccaacaaccggaaacactggccttgggattgcatttgtggctgcagctaaaggctacaagcttatagtgacaatgccagcttctatcaatattgaaaggaggatgcttttacgtgcactaggagcagagattgtgctaacgaatccagagaagggtctcaaaggagcagtggataaagccaaagagattgttctcaagacaaagaacgcatatatgtttcagcaattcgacaatacagcaaatacaaagatccactttgaaactacaggaccagaaatctgggaagatacaatgggtaatgtcgatatattcgttgccggaataggaactggtggtactgtaactggtactggaggtttcttgaaaatgatgaacaaggatattaaggtagttggcgttgaaccatcagaaagaagtgtgatttctggagacaaccctggttacttaccgggaatcttggatgttaaattacttgatgaagtgtttaaggttagcaacggggaagcgattgagatggcgaggagactagctttagaggaaggattgctggttgggatttcatctggagctgctgcagtagcagcagtcagcttggctaaaagagcagagaatgccggtaaactaatcacggttctgtttccaagccatggcgagcggtatatcacaacggctctgtttagttccatcaacagagaagtccaagagatgagatattagtagcagccattagaaaagcccccaaagtttggtccttttggagagtgtaaacaacaaatctctttgcaatacagaaaagagaggtttcagaagactgtgaggttagagctcacacgagaactgagagataaacatgtctcgagcccaaccagttttattcaaagatttgtgaatgtatagaagatcatagaccttgttgcattattcttcttcttctcactcatatgtcagggaagtatgctgaacaaataaaagtttgatcatctaaaccctgaaattgatttgagatctccaagattggaaaaactcaccgagagcaagcatgtatgtacattatatggtggttagaac

SEQ ID NO: 49383 - protein, 404 aa, Arabidopsis thaliana
  peptide (1)..(404): Ceres Seq. ID no. 12605128
MAFASPSLRLLPQSPLGRITSKLHRFSTAKLSLFSFHHDSSSSLAVRTPVSSFVVGAISGKSSTGTKSKSKTKRKPPPPPPVTTVAEEQHIAESETVNIAEDVTQLIGSTPMVYLNRVTDGCLADIAAKLESMEPCRSVKDRIGLSMINEAENSGAITPRKTVLVEPTTGNTGLGIAFVAAAKGYKLIVTMPASINIERRMLLRALGAEIVLTNPEKGLKGAVDKAKEIVLKTKNAYMFQQFDNTANTKIHFETTGPEIWEDTMGNVDIFVAGIGTGGTVTGTGGFLKMMNKDIKVVGVEPSERSVISGDNPGYLPGILDVKLLDEVFKVSNGEAIEMARRLALEEGLLVGISSGAAAVAAVSLAKRAENAGKLITVLFPSHGERYITTALFSSINREVQEMRY

SEQ ID NO: 49384 - protein, 293 aa, Arabidopsis thaliana
  peptide (1)..(293): Ceres Seq. ID no. 12605129
MVYLNRVTDGCLADIAAKLESMEPCRSVKDRIGLSMINEAENSGAITPRKTVLVEPTTGNTGLGIAFVAAAKGYKLIVTMPASINIERRMLLRALGAEIVLTNPEKGLKGAVDKAKEIVLKTKNAYMFQQFDNTANTKIHFETTGPEIWEDTMGNVDIFVAGIGTGGTVTGTGGFLKMMNKDIKVVGVEPSERSVISGDNPGYLPGILDVKLLDEVFKVSNGEAIEMARRLALEEGLLVGISSGAAAVAAVSLAKRAENAGKLITVLFPSHGERYITTALFSSINREVQEMRY

SEQ ID NO: 49385 - protein, 272 aa, Arabidopsis thaliana
  peptide (1)..(272): Ceres Seq. ID no. 12605130
MEPCRSVKDRIGLSMINEAENSGAITPRKTVLVEPTTGNTGLGIAFVAAAKGYKLIVTMPASINIERRMLLRALGAEIVLTNPEKGLKGAVDKAKEIVLKTKNAYMFQQFDNTANTKIHFETTGPEIWEDTMGNVDIFVAGIGTGGTVTGTGGFLKMMNKDIKVVGVEPSERSVISGDNPGYLPGILDVKLLDEVFKVSNGEAIEMARRLALEEGLLVGISSGAAAVAAVSLAKRAENAGKLITVLFPSHGERYITTALFSSINREVQEMRY

SEQ ID NO: 49386 - DNA, 1849 bp, Arabidopsis thaliana
  misc_feature (1)..(1849): Ceres Seq. ID no. 12592085
  misc_feature (1)..(1849): Ortholog of  Ceres SEQ ID NO 13596021 as cited in SEQ ID NO 62020
agaaaatctgaaagcaaagcagagagcagctcccttcccctcggcgaggaggaaggaagaagaaagccagagagagagagagagagagatcatcgcagcttctcctccgaccatttgactgcgactgtgattacaacacaccgttgatcctacgaaaaagaggtaatggatactggcggcaattcgctggcgtccggacctgatggtgtgaagaggaaagtttgttatttctatgaccctgaggtcggcaattactactatggccaaggtcatcccatgaagccccatcgcatccgcatgacccatgccctcctcgctcactacggtctccttcagcatatgcaggttctcaagcccttccctgcccgcgaccgtgatctctgccgcttccacgccgacgactatgtctcttttctccgcagcattacccctgaaacccagcaagatcagattcgccaacttaagcgcttcaatgttggtgaagactgtcccgtctttgacggcctttattccttttgccagacctatgctggaggatctgttggtggctctgtcaagcttaaccacggcctctgcgatattgccatcaactgggctggtggtctccatcacgctaagaagtgcgaggcctctggcttctgttacgtcaatgatatcgtcttagctatcctagagctccttaagcagcatgagcgtgttctttatgtcgatattgatatccaccacggggatggagtggaggaggcattttatgctactgacagggttatgactgtctcgtttcataaatttggtgattactttcccggtacaggtcacattcaggatataggttatggtagcggaaagtactattctctcaatgtaccactggatgatggaatcgatgatgagagctatcatctgttattcaagcccatcatggggaaagttatggaaattttccgaccaggggctgtggtattgcaatgtggtgctgattcattgtctggtgataggttggggtgctttaatctttcaatcaaaggtcatgctgagtgcgtcaaatttatgagatcgttcaatgttcccctactgctcttgggtggtggtggttacactatccgcaatgttgcccgttgctggtgctacgagactggagttgcacttggagttgaagttgaagacaagatgccggagcatgaatattatgaatactttggtccagactatacacttcacgttgctccaagtaacatggaaaataagaattctcgtcagatgcttgaagagattcgcaatgaccttctccacaatctctctaagcttcagcatgctccaagtgtaccatttcaggaaagaccacctgatacagagactcccgaggttgatgaagaccaagaagatggggataaaagatgggatccggattcagacatggatgttgatgatgaccgtaaacctataccaagcagagtaaaaagagaagctgttgaaccagatacaaaggacaaggatggactgaaaggaattatggagcgtggaaaaggttgtgaggtggaggtggatgagagtggaagcactaaggttacaggagtaaacccagtgggagtggaggaagcaagtgtgaaaatggaagaggaaggaacaaacaagggtggggcggagcaggcgtttcctcctaaaacataagactcggagcttctaatttcttgctactttttctgtctatcaaatgttgctagttaagtttctggagttgttgttgttgtaagcactcctctgttttagaggattgagcacggatatgtatttattcgttgcatgtctgaatgatgatatgatatgacaagacgagctattccttttg

SEQ ID NO: 49387 - protein, 501 aa, Arabidopsis thaliana
  peptide (1)..(501): Ceres Seq. ID no. 12592086
MDTGGNSLASGPDGVKRKVCYFYDPEVGNYYYGQGHPMKPHRIRMTHALLAHYGLLQHMQVLKPFPARDRDLCRFHADDYVSFLRSITPETQQDQIRQLKRFNVGEDCPVFDGLYSFCQTYAGGSVGGSVKLNHGLCDIAINWAGGLHHAKKCEASGFCYVNDIVLAILELLKQHERVLYVDIDIHHGDGVEEAFYATDRVMTVSFHKFGDYFPGTGHIQDIGYGSGKYYSLNVPLDDGIDDESYHLLFKPIMGKVMEIFRPGAVVLQCGADSLSGDRLGCFNLSIKGHAECVKFMRSFNVPLLLLGGGGYTIRNVARCWCYETGVALGVEVEDKMPEHEYYEYFGPDYTLHVAPSNMENKNSRQMLEEIRNDLLHNLSKLQHAPSVPFQERPPDTETPEVDEDQEDGDKRWDPDSDMDVDDDRKPIPSRVKREAVEPDTKDKDGLKGIMERGKGCEVEVDESGSTKVTGVNPVGVEEASVKMEEEGTNKGGAEQAFPPKT

SEQ ID NO: 49388 - protein, 464 aa, Arabidopsis thaliana
  peptide (1)..(464): Ceres Seq. ID no. 12592087
MKPHRIRMTHALLAHYGLLQHMQVLKPFPARDRDLCRFHADDYVSFLRSITPETQQDQIRQLKRFNVGEDCPVFDGLYSFCQTYAGGSVGGSVKLNHGLCDIAINWAGGLHHAKKCEASGFCYVNDIVLAILELLKQHERVLYVDIDIHHGDGVEEAFYATDRVMTVSFHKFGDYFPGTGHIQDIGYGSGKYYSLNVPLDDGIDDESYHLLFKPIMGKVMEIFRPGAVVLQCGADSLSGDRLGCFNLSIKGHAECVKFMRSFNVPLLLLGGGGYTIRNVARCWCYETGVALGVEVEDKMPEHEYYEYFGPDYTLHVAPSNMENKNSRQMLEEIRNDLLHNLSKLQHAPSVPFQERPPDTETPEVDEDQEDGDKRWDPDSDMDVDDDRKPIPSRVKREAVEPDTKDKDGLKGIMERGKGCEVEVDESGSTKVTGVNPVGVEEASVKMEEEGTNKGGAEQAFPPKT

SEQ ID NO: 49389 - protein, 457 aa, Arabidopsis thaliana
  peptide (1)..(457): Ceres Seq. ID no. 12592088
MTHALLAHYGLLQHMQVLKPFPARDRDLCRFHADDYVSFLRSITPETQQDQIRQLKRFNVGEDCPVFDGLYSFCQTYAGGSVGGSVKLNHGLCDIAINWAGGLHHAKKCEASGFCYVNDIVLAILELLKQHERVLYVDIDIHHGDGVEEAFYATDRVMTVSFHKFGDYFPGTGHIQDIGYGSGKYYSLNVPLDDGIDDESYHLLFKPIMGKVMEIFRPGAVVLQCGADSLSGDRLGCFNLSIKGHAECVKFMRSFNVPLLLLGGGGYTIRNVARCWCYETGVALGVEVEDKMPEHEYYEYFGPDYTLHVAPSNMENKNSRQMLEEIRNDLLHNLSKLQHAPSVPFQERPPDTETPEVDEDQEDGDKRWDPDSDMDVDDDRKPIPSRVKREAVEPDTKDKDGLKGIMERGKGCEVEVDESGSTKVTGVNPVGVEEASVKMEEEGTNKGGAEQAFPPKT

SEQ ID NO: 49390 - DNA, 1005 bp, Arabidopsis thaliana
  misc_feature (1)..(1005): Ceres Seq. ID no. 13588739
  misc_feature (1)..(1005): Ortholog of  Ceres SEQ ID NO 12557432 as cited in SEQ ID NO 92
aagttcattgtgatgattttttatttactctgaatctctggattaactcagatccgttgtttttctagggttttgattccgttgtgcgaaggactttaagaggttttgcagatcgaaatcggaagagaagaagaagatgtttctcactagaactgagtatgacagaggagtgaacactttttctccagaaggaaggctatttcaagtggaatatgccattgaagctatcaagcttggttctactgcaattggagtaaagacaaaagaaggagttgtgcttgctgtcgagaagcgtatcacgtcgccattgctggaaccgagcagtgtggagaagattatggaaattgatgaccatattggttgtgctatgagcggtttaattgctgacgcgcgcacacttgttgagcatgctagagttgaaactcaaaaccatagattctcgtatggtgagccgatgactgtagagtccacaacacaagcactgtgtgatctggctttacggtttggtgaaggagaggaagaatcaatgtctcggccgtttggagtatctcttctcattgctggccatgatgaaaatggaccaagcttgtactacactgatccttcaggaacattctggcagtgcaatgcaaaggcaattggttcaggttctgaaggagctgatagctctcttcaagagcaattcaacaaagatttgtctctacaagaagctgagactatcgctgtatctatcctaaagcaagttatggaagaaaaggtgactccaaataacgtggatattgccaaggtagcaccagcttatcatctctacactccacaagaagtcgaagcagtcatcgctcgtctttgattgaaaaaactcaatttgggtaatttacctatcagcttgtgtcacaaaacttgttacttttgtctgttagattgaggatcatgtcacattttagtcggttgtgtaagagaatcttttggctcccatgtcattcaataacctttcggatttgtgac

SEQ ID NO: 49391 - protein, 237 aa, Arabidopsis thaliana; identical to SEQ ID NO: 34799
  peptide (1)..(237): Ceres Seq. ID no. 13588740

SEQ ID NO: 49392 - protein, 170 aa, Arabidopsis thaliana; identical to SEQ ID NO: 34800
  peptide (1)..(170): Ceres Seq. ID no. 13588741

SEQ ID NO: 49393 - protein, 160 aa, Arabidopsis thaliana; identical to SEQ ID NO: 34801
  peptide (1)..(160): Ceres Seq. ID no. 13588742

SEQ ID NO: 49394 - DNA, 875 bp, Arabidopsis thaliana
  misc_feature (1)..(875): Ceres Seq. ID no. 13587997
  misc_feature (1)..(875): Ortholog of  Ceres SEQ ID NO 15177083 as cited in SEQ ID NO 51917
  misc_feature (1)..(875): Ortholog of  Ceres SEQ ID NO 13638931 as cited in SEQ ID NO 52200
  misc_feature (1)..(875): Ortholog of  Ceres SEQ ID NO 14304209 as cited in SEQ ID NO 56460
  misc_feature (1)..(875): Ortholog of  Ceres SEQ ID NO 12587429 as cited in SEQ ID NO 63113
  misc_feature (1)..(875): Ortholog of  Ceres SEQ ID NO 12615635 as cited in SEQ ID NO 63133
  misc_feature (1)..(875): Ortholog of  Ceres SEQ ID NO 12586351 as cited in SEQ ID NO 64028
  misc_feature (1)..(875): Ortholog of  Ceres SEQ ID NO 13654441 as cited in SEQ ID NO 67814
  misc_feature (1)..(875): Ortholog of  Ceres SEQ ID NO 15177482 as cited in SEQ ID NO 0
atcctcatctacatttcaataaacacaaagagttgaaaacattaaatcgatatatcagaactaaaccggatctgaaaaatggcgaacgaccaagtgattcttcttgattactggccaagcatgttcgggatgaggacgaagatggctttggctgagaaaggagtcaagtatgagtacaaggaaacagatccatgggttaagactcctttactcatagagatgaacccgattcacaagaagattccggttctcatccacaacggtaaaccgatttgtgaatctcttattcagcttgagtacattgatgaggtttggtccgatgcatccccaatccttccctctgatccttaccagaagtctcgagctagattttgggctgaattcatcgacaaaaagttttacgacccatcatggaaggtatgggcaacaatgggcgaagaacatgcagcagtgaagaaggaattgttggaacatttcaagacacttgagacagagctcggagacaaaccttattacggtggtgaagtatttggatacctagacattgcattaatgggatactacagctggttcaaggccatggagaaatttggtgaattcagtatcgaaacagagtttcctatattgactacgtggaccaagaggtgtttggaaagagagagtgtggtcaaggcattggctgattctgataggatcattgagtatgtttatgtcctgaggaagaaatttggagcagcgtaaaaaaatggtttgggtttcaagaaggctgttattttctgtcttttataatgtttcatgtgaggtttgtaattgttatttctgtcgttttgttgaaagtatgataaaccgtaataacgaaatgtttactgtaccct

SEQ ID NO: 49395 - protein, 220 aa, Arabidopsis thaliana
  peptide (1)..(220): Ceres Seq. ID no. 13587998
MANDQVILLDYWPSMFGMRTKMALAEKGVKYEYKETDPWVKTPLLIEMNPIHKKIPVLIHNGKPICESLIQLEYIDEVWSDASPILPSDPYQKSRARFWAEFIDKKFYDPSWKVWATMGEEHAAVKKELLEHFKTLETELGDKPYYGGEVFGYLDIALMGYYSWFKAMEKFGEFSIETEFPILTTWTKRCLERESVVKALADSDRIIEYVYVLRKKFGAA

SEQ ID NO: 49396 - protein, 206 aa, Arabidopsis thaliana
  peptide (1)..(206): Ceres Seq. ID no. 13587999
MFGMRTKMALAEKGVKYEYKETDPWVKTPLLIEMNPIHKKIPVLIHNGKPICESLIQLEYIDEVWSDASPILPSDPYQKSRARFWAEFIDKKFYDPSWKVWATMGEEHAAVKKELLEHFKTLETELGDKPYYGGEVFGYLDIALMGYYSWFKAMEKFGEFSIETEFPILTTWTKRCLERESVVKALADSDRIIEYVYVLRKKFGAA

SEQ ID NO: 49397 - protein, 203 aa, Arabidopsis thaliana
  peptide (1)..(203): Ceres Seq. ID no. 13588000
MRTKMALAEKGVKYEYKETDPWVKTPLLIEMNPIHKKIPVLIHNGKPICESLIQLEYIDEVWSDASPILPSDPYQKSRARFWAEFIDKKFYDPSWKVWATMGEEHAAVKKELLEHFKTLETELGDKPYYGGEVFGYLDIALMGYYSWFKAMEKFGEFSIETEFPILTTWTKRCLERESVVKALADSDRIIEYVYVLRKKFGAA

SEQ ID NO: 49398 - DNA, 1817 bp, Arabidopsis thaliana
  misc_feature (1)..(1817): Ceres Seq. ID no. 13648292
  misc_feature (1)..(1817): Ortholog of  Ceres SEQ ID NO 14311870 as cited in SEQ ID NO 51574
  misc_feature (1)..(1817): Ortholog of  Ceres SEQ ID NO 15174583 as cited in SEQ ID NO 53693
  misc_feature (1)..(1817): Ortholog of  Ceres SEQ ID NO 13581563 as cited in SEQ ID NO 58942
  misc_feature (1)..(1817): Ortholog of  Ceres SEQ ID NO 13658707 as cited in SEQ ID NO 66286
  misc_feature (1)..(1817): Ortholog of  Ceres SEQ ID NO 13654528 as cited in SEQ ID NO 68080
gtgattcaaagttttgatttttagctaccaatctatgagtgagtgactgagaaacagagaaggattccaagctgctaaagattttttgtcaagatttttaatttaagtttcctggaggaggagatcacagatcttcttttcatatgaagagatctttccttctcttgtatgtgctcctggtacaggccttctatggggcttggtgtagtgttggagaaagcctgcattgtgaatattccaatttagcgagtcttcaccggcctcacagcgtatcgattacagagtttggagcggttggagatggtgtgactctaaacactaaagcctttcagaatgctctgttctacctcaattctttctctgataaaggcggggccaagctttttgttcccgctggtcagtggcttaccgggagtttcgaccttatcagtcacctcaccttatggctagataaaggtgcaacgattctcgggtcaacgagctcagagaattggcccgtggttgatccattaccatcatatggacgaggaagagaattgcccggtagaagacacagaagtcttatatatggtcagaatctcacagatgtagtcataacaggcgagaacgggacaattgatggtcaaggaactgtatggtgggattggtttagaaatggagagcttaactatacaagacctcatcttgttgagctcatgaactctactggtctgatcatctccaacctcacattcttgaattcaccgttttggaacattcatcctgtttattgcagagatgttgttgtaaagaatctcacaattttggctcctcttgaatctccaaatacagatggagttgatccagattcatcaactaatgtttgcatagaggattgttacatagttaccggggatgatttggtatcgataaaaagcggatgggatgagtatggaatatcctacgcaagaccgagctccaagatcaagattaatcggttaacaggtcaaactacttcaagctcaggaatagcaataggaagtgaaatgtcgggaggtgtatccgaaatatacattaaagacttacatttgttcaattcgaatactggaatcagaatcaagacttctgctggaagaggcgggtatgttagaaacgttcacatcttgaacgtgaagctcgataatgtaaagaaagcgattaggttcaccggtaagtacggtgaacatcctgatgagaaatacgatcccaaagcactcccagctatagagaaaatcacctttgagaatgtaaatggcgatggaataggtgttgcgggtcttcttgaaggtatagaaggagatgtgtttaagaatatatgtttccttaatgttactcttagagtgaagaagaattcgaagaaatcaccatgggaatgctcgaatgtgagaggttattcacagtgggtttcgccggaaattacttgtgattctttgaaagagagtatattcccggaacatggatctgattgtttcgggttatcggaaaataatatggagatatcaagtggtttaagtagatcaccatggttactttcttggtaagttactgtgaagttttgaacatcaaaggggaaacacagtttgcttgattctgaagaaacctcttcgattttgaaaaatgatgctttctttcatcttttgttgttttcgtgtaaatttgtgtgcagtgaggaaaataatcagagtggcttaagagtttttgtttttgttttccttgtatgggctttaatgcttttggtgagcggaacaattgtaatatctccgacagagtctgttgaaattttttgacaattatttttc

SEQ ID NO: 49399 - protein, 471 aa, Arabidopsis thaliana
  peptide (1)..(471): Ceres Seq. ID no. 13648293
MKRSFLLLYVLLVQAFYGAWCSVGESLHCEYSNLASLHRPHSVSITEFGAVGDGVTLNTKAFQNALFYLNSFSDKGGAKLFVPAGQWLTGSFDLISHLTLWLDKGATILGSTSSENWPVVDPLPSYGRGRELPGRRHRSLIYGQNLTDVVITGENGTIDGQGTVWWDWFRNGELNYTRPHLVELMNSTGLIISNLTFLNSPFWNIHPVYCRDVVVKNLTILAPLESPNTDGVDPDSSTNVCIEDCYIVTGDDLVSIKSGWDEYGISYARPSSKIKINRLTGQTTSSSGIAIGSEMSGGVSEIYIKDLHLFNSNTGIRIKTSAGRGGYVRNVHILNVKLDNVKKAIRFTGKYGEHPDEKYDPKALPAIEKITFENVNGDGIGVAGLLEGIEGDVFKNICFLNVTLRVKKNSKKSPWECSNVRGYSQWVSPEITCDSLKESIFPEHGSDCFGLSENNMEISSGLSRSPWLLSW

SEQ ID NO: 49400 - protein, 287 aa, Arabidopsis thaliana
  peptide (1)..(287): Ceres Seq. ID no. 13648294
MNSTGLIISNLTFLNSPFWNIHPVYCRDVVVKNLTILAPLESPNTDGVDPDSSTNVCIEDCYIVTGDDLVSIKSGWDEYGISYARPSSKIKINRLTGQTTSSSGIAIGSEMSGGVSEIYIKDLHLFNSNTGIRIKTSAGRGGYVRNVHILNVKLDNVKKAIRFTGKYGEHPDEKYDPKALPAIEKITFENVNGDGIGVAGLLEGIEGDVFKNICFLNVTLRVKKNSKKSPWECSNVRGYSQWVSPEITCDSLKESIFPEHGSDCFGLSENNMEISSGLSRSPWLLSW

SEQ ID NO: 49401 - DNA, 2416 bp, Arabidopsis thaliana
  misc_feature (1)..(2416): Ceres Seq. ID no. 12560030
  misc_feature (1)..(2416): Ortholog of  Ceres SEQ ID NO 13656177 as cited in SEQ ID NO 64997
ggagcctgtctgtgtaatgaaaatccacttgacgacctaaacaacaacaacgactccggcgagtgtatgtatctttcactttctcactaaccaaccagacgacaaaagaaaattattcatcttagctaagctcgattagtttctggcggaaacggttttgtggataattgttagcatattccgatcttgccctcccccgagagagagaggccaatcaatcaatcaatcaatcatctcttacgaagctacgtgtgacctaacattctccagattgttgtttatagcctcttcttagatttacgatttgtgagcttgtgaagatttcttggtagaattagagttctctgtttcgagatcgagatgaataataataataataatagaggaagatttccaccggggattggtgcggcgggtcctggtccggatcctaattttcagtcacggaatccgaatccacctcagcctcaacagtaccttcagtcacggactccgtttccacagcaacctcagcctcagcctcctcagtatctccagtctcaatctgatgctcagcagtacgttcagcgaggttatccccagcagattcaacagcaacagcaactgcagcagcaacaacaacaacaacagcagcagcaagaacaacaatggtctcgacgggctcagcttcctggtgatccaagttacatagatgaggtcgaaaaaacggttcaatctgaagctattagcgattctaataatgaagactggaaagcaaccttaaagctgccaccacgagataatcgttaccagacagaggatgtgactgccactaaaggaaatgaatttgaagattactttttgaagagggatctgcttaggggaatatatgagaagggttttgaaaaaccatctcctattcaggaagaaagcattcccattgctttgactggtagtgatattcttgctagagccaaaaatggtactgggaagactggtgccttctgcattcctacccttgagaaaattgatccagagaacaatgtcattcaagccgtaattctagttccaacccgagagctcgcccttcagacatcccaggtttgcaaggagctttccaaatatttgaaaattgaggttatggtcaccactggcggtaccagtctgagggatgatatcatgcgattgtatcaacctgtccatttactggttggaactcctggaagaatattagatcttgccaaaaagggtgtgtgtgttttgaaagattgtgccatgcttgtaatggatgaggccgacaagcttttgtctgtagaatttcaaccttctatagaggagttgatacagttcttgccagagagccggcagattttgatgttttcagctacatttcctgtcactgtgaagtctttcaaggatcggtatctcaagaagccttacattatcaatctcatggatcagctcacacttatgggtgttacccaatattatgcttttgttgaagagagacagaaggtgcactgccttaacacgctattctctaagctccaaataaaccaatccattatcttttgcaactctgttaatcgtgttgagctgttggccaagaaaattacagaacttggttactcatgcttctatatccatgcaaagatggttcaagaccatcggaacagggttttccatgatttccgcaatggtgcatgcagaaatcttgtttgcactgatttgtttacacgtgggattgacattcaagctgtgaatgtggtgataaatttcgattttcctaggacttctgagtcgtatctacatagggtaggcagatcaggacgatttggacaccttgggttggctgtgaatttggtaacttatgaggaccgcttcaaaatgtatcagacagagcaagaacttggaactgaaatcaagcccataccttcacttatcgacaaggcaatctactgtcagtaacttctacctggtgtacattctctacccggcaaggcattgatggactaaccggtgtagtgaggaggcaaatcattcagctttggcagccactagctcgttctagagatgaaggcaacacatagagtactgtactgaggcaagaagagacagtataggtggttgatggcgatggaagcggttgattgtgtctaaacctttaaagcagtaccggcttgatttggtttgaattgaagacttcttctgctgcatgatatgaaccttaaagttgtcttctctcatctctaattttcatgttcttagaaaccttttcaccttttcattttgatgttctctcatcttgaagacttgagaggaatttccgagtagtgagatcaaaccgaagaagacattttaacttcattcgcttgtttattgcttttagatctccacctgtgcctgaactgtttaaggattatagttggtgtgtgtc

SEQ ID NO: 49402 - protein, 528 aa, Arabidopsis thaliana
  peptide (1)..(528): Ceres Seq. ID no. 12560031
MNNNNNNRGRFPPGIGAAGPGPDPNFQSRNPNPPQPQQYLQSRTPFPQQPQPQPPQYLQSQSDAQQYVQRGYPQQIQQQQQLQQQQQQQQQQQEQQWSRRAQLPGDPSYIDEVEKTVQSEAISDSNNEDWKATLKLPPRDNRYQTEDVTATKGNEFEDYFLKRDLLRGIYEKGFEKPSPIQEESIPIALTGSDILARAKNGTGKTGAFCIPTLEKIDPENNVIQAVILVPTRELALQTSQVCKELSKYLKIEVMVTTGGTSLRDDIMRLYQPVHLLVGTPGRILDLAKKGVCVLKDCAMLVMDEADKLLSVEFQPSIEELIQFLPESRQILMFSATFPVTVKSFKDRYLKKPYIINLMDQLTLMGVTQYYAFVEERQKVHCLNTLFSKLQINQSIIFCNSVNRVELLAKKITELGYSCFYIHAKMVQDHRNRVFHDFRNGACRNLVCTDLFTRGIDIQAVNVVINFDFPRTSESYLHRVGRSGRFGHLGLAVNLVTYEDRFKMYQTEQELGTEIKPIPSLIDKAIYCQ

SEQ ID NO: 49403 - protein, 275 aa, Arabidopsis thaliana
  peptide (1)..(275): Ceres Seq. ID no. 12560032
MVTTGGTSLRDDIMRLYQPVHLLVGTPGRILDLAKKGVCVLKDCAMLVMDEADKLLSVEFQPSIEELIQFLPESRQILMFSATFPVTVKSFKDRYLKKPYIINLMDQLTLMGVTQYYAFVEERQKVHCLNTLFSKLQINQSIIFCNSVNRVELLAKKITELGYSCFYIHAKMVQDHRNRVFHDFRNGACRNLVCTDLFTRGIDIQAVNVVINFDFPRTSESYLHRVGRSGRFGHLGLAVNLVTYEDRFKMYQTEQELGTEIKPIPSLIDKAIYCQ

SEQ ID NO: 49404 - DNA, 827 bp, Arabidopsis thaliana
  misc_feature (1)..(827): Ceres Seq. ID no. 13648275
  misc_feature (1)..(827): Ortholog of  Ceres SEQ ID NO 15178329 as cited in SEQ ID NO 52153
ctagtccccccccccccccgaattccccgagagtaaccaacaacacaaagcgatcaaagaacttttcccgctagagagagagagaagaagaagaagaagaagaagaaaagttacgcagagagactgaaggaagagtgatcgatcggagaaagatggcgatggaagtagcaacaccggctccggcaccaatcccatcggagaggaacatcgttctcgcgcctgcaacaacaacaacaaccgccactgttgagactcacaagaagaacaggatccaagtttccaacaccaagaagccattgttcttctacgttaatctcgccaagaggtacattcagcaacacaacgaggtcgagctttctgcacttggaatggcaatcacaactgtggtaacaatctctgagatcttgaagaacaatggacttgcaacagagaagaaggtgctaacatcgactgtgggaatgaaagatgagacaaaagggaagatggtccagaaggcaaagattgagatagtgttgggcaagtcagacaagtttgactctttggtgccacctgtgaccaacggcaagactccggaggaggaagccagtgcagagacggaagcttccgtggaagcacaagaagaagttgccgctgccaccgaggtctaggttggagccggttgagagatttactgcagaaggactgatttctcttttactatgttttgttggcttttgtttcgtttgtgacatatcgaacataatactctagatatgatagtaattgtttgtttagcaaaaaaaaaaaagaaaaaaaaaaaaaaaaaaactcgagggggggcccggtac

SEQ ID NO: 49405 - protein, 164 aa, Arabidopsis thaliana
  peptide (1)..(164): Ceres Seq. ID no. 13648276
MAMEVATPAPAPIPSERNIVLAPATTTTTATVETHKKNRIQVSNTKKPLFFYVNLAKRYIQQHNEVELSALGMAITTVVTISEILKNNGLATEKKVLTSTVGMKDETKGKMVQKAKIEIVLGKSDKFDSLVPPVTNGKTPEEEASAETEASVEAQEEVAAATEV

SEQ ID NO: 49406 - protein, 162 aa, Arabidopsis thaliana
  peptide (1)..(162): Ceres Seq. ID no. 13648277
MEVATPAPAPIPSERNIVLAPATTTTTATVETHKKNRIQVSNTKKPLFFYVNLAKRYIQQHNEVELSALGMAITTVVTISEILKNNGLATEKKVLTSTVGMKDETKGKMVQKAKIEIVLGKSDKFDSLVPPVTNGKTPEEEASAETEASVEAQEEVAAATEV

SEQ ID NO: 49407 - protein, 92 aa, Arabidopsis thaliana
  peptide (1)..(92): Ceres Seq. ID no. 13648278
MAITTVVTISEILKNNGLATEKKVLTSTVGMKDETKGKMVQKAKIEIVLGKSDKFDSLVPPVTNGKTPEEEASAETEASVEAQEEVAAATEV

SEQ ID NO: 49408 - DNA, 1621 bp, Arabidopsis thaliana
  misc_feature (1)..(1621): Ceres Seq. ID no. 13648468
  misc_feature (1)..(1621): Ortholog of  Ceres SEQ ID NO 13654989 as cited in SEQ ID NO 63117
  misc_feature (1)..(1621): Ortholog of  Ceres SEQ ID NO 13584744 as cited in SEQ ID NO 69137
ccactttaccctcttctctctctctgtctctctttctttttccgtaactcttcatcttcttttcccagatttttccgttttccaattctctgtgtctaattccaaacttcctaggggttttttctccaacgtgagaaaaaagcttctagctttagcgatgggatgtttcggacgcactccgaaatcgaacaaacgatcagataccaaaaccacgaagaacaacgatttcaccccaaaaaaactcaccgtcaatgcaaatcgagataagctgacacaacccagctcagattgtttaaaagttagtatatgtggagatgtaagcaaggagatagttactaagaaggatcaattagctttggatgctaaagatactaatgttgaagatgaagttatagggaagaaagcacagacttttacatttgaagaactctctgtttctactggaaactttaagtcggattgttttctaggagaaggaggttttggaaaagtttacaaaggtttcattgagaaaatcaatcaggttgttgcaattaagcaacttgatcggaatggtgctcaaggaatcagggagtttgttgttgaagtgttgacattaagtctcgctgatcatccaaatctcgtcaagcttataggattttgcgctgagggtgttcagagactgttggtttacgagtatatgcctctaggatctctggataatcaccttcatgatcttccttctggtaaaaacccgcttgcttggaacactcgaatgaaaatagcggctggtgcagcaagaggactagagtatctccacgatacaatgaaacctcctgtgatataccgtgatcttaagtgttcgaatatcttgatcgatgaaggatatcacgcaaaactctcagactttggattagctaaagtaggaccaagaggaagtgaaactcatgtttccacaagagttatgggaacatacggttactgtgctcctgattacgcattaactggacaactcacattcaaatcagatgtatacagtttcggagttgttcttttggagcttattactggaaggaaagcttacgataacacgagaacacgtaatcaccagagtcttgttgaatgggcaaatcccttgtttaaagataggaagaatttcaagaaaatggttgatccgttactcgaaggagattatccggttagaggattgtatcaagcacttgcaatagctgcaatgtgtgttcaagaacagcctagtatgagaccggtgatagctgatgtagtaatggctttggatcacttagcttcttctaaatatgatcgtagtcaccgtcaaaagcaggataatgtgaccgagactaaagtcgatgaagagaaaacacttaccacagaatctaatgtttgtgtggaggagaaacaagagatcaagatatgctcagatcaagcaacttaatcatcaatgaggattcttaaaattttgatattttcttgatttgtagaatgcttcgtttacgtaagcaacagttttgttcgaatttcgactcatacttatatagtaaactgtagcaaaagttcggttannnaaaaaaaaaaaaaaaaaaagaaaaaaaaaaaaaaaaaaactcgagggggggcccggtac

SEQ ID NO: 49409 - protein, 476 aa, Arabidopsis thaliana
  peptide (1)..(476): Ceres Seq. ID no. 15220534
HFTLFSLSVSLSFSVTLHLLFPDFSVFQFSVSNSKLPRGFFSNVRKKLLALAMGCFGRTPKSNKRSDTKTTKNNDFTPKKLTVNANRDKLTQPSSDCLKVSICGDVSKEIVTKKDQLALDAKDTNVEDEVIGKKAQTFTFEELSVSTGNFKSDCFLGEGGFGKVYKGFIEKINQVVAIKQLDRNGAQGIREFVVEVLTLSLADHPNLVKLIGFCAEGVQRLLVYEYMPLGSLDNHLHDLPSGKNPLAWNTRMKIAAGAARGLEYLHDTMKPPVIYRDLKCSNILIDEGYHAKLSDFGLAKVGPRGSETHVSTRVMGTYGYCAPDYALTGQLTFKSDVYSFGVVLLELITGRKAYDNTRTRNHQSLVEWANPLFKDRKNFKKMVDPLLEGDYPVRGLYQALAIAAMCVQEQPSMRPVIADVVMALDHLASSKYDRSHRQKQDNVTETKVDEEKTLTTESNVCVEEKQEIKICSDQAT

SEQ ID NO: 49410 - protein, 424 aa, Arabidopsis thaliana
  peptide (1)..(424): Ceres Seq. ID no. 15220535
MGCFGRTPKSNKRSDTKTTKNNDFTPKKLTVNANRDKLTQPSSDCLKVSICGDVSKEIVTKKDQLALDAKDTNVEDEVIGKKAQTFTFEELSVSTGNFKSDCFLGEGGFGKVYKGFIEKINQVVAIKQLDRNGAQGIREFVVEVLTLSLADHPNLVKLIGFCAEGVQRLLVYEYMPLGSLDNHLHDLPSGKNPLAWNTRMKIAAGAARGLEYLHDTMKPPVIYRDLKCSNILIDEGYHAKLSDFGLAKVGPRGSETHVSTRVMGTYGYCAPDYALTGQLTFKSDVYSFGVVLLELITGRKAYDNTRTRNHQSLVEWANPLFKDRKNFKKMVDPLLEGDYPVRGLYQALAIAAMCVQEQPSMRPVIADVVMALDHLASSKYDRSHRQKQDNVTETKVDEEKTLTTESNVCVEEKQEIKICSDQAT

SEQ ID NO: 49411 - protein, 250 aa, Arabidopsis thaliana
  peptide (1)..(250): Ceres Seq. ID no. 15220536
MPLGSLDNHLHDLPSGKNPLAWNTRMKIAAGAARGLEYLHDTMKPPVIYRDLKCSNILIDEGYHAKLSDFGLAKVGPRGSETHVSTRVMGTYGYCAPDYALTGQLTFKSDVYSFGVVLLELITGRKAYDNTRTRNHQSLVEWANPLFKDRKNFKKMVDPLLEGDYPVRGLYQALAIAAMCVQEQPSMRPVIADVVMALDHLASSKYDRSHRQKQDNVTETKVDEEKTLTTESNVCVEEKQEIKICSDQAT

SEQ ID NO: 49412 - DNA, 3828 bp, Arabidopsis thaliana
  misc_feature (1)..(3828): Ceres Seq. ID no. 13588600
  misc_feature (1)..(3828): Ortholog of  Ceres SEQ ID NO 14308232 as cited in SEQ ID NO 58659
gtaaagttgcgtttgtcttgttgaatcgcccgtcactaaaatcctctccgagaatcctcctccgatctgccactagctatggcggaatcgtctggtaccacgctaatggatctgatctcggcggatccaaccccggttcctgcacaatctacttcttcgtccgcatcttccacggcgtctcagccgacttctgcttccgcatcgtcttcttcccatctgcaccatccaatgtcgacgaagacgactctaggagagaagaaatcgaagagagccactttgatgcagatccaaaacgacactatatctgttgctaaagctgcactgaatcctgttaaggccaatatcatgccacaaaggcagagacagaaaaagaagccggtttcctattcgcaacttgcaaggagcattcatgaattagctgccactttggatcagaaaagttctcagaaacaactagtgaatcacgtgttccctaagcttgctgtgtacaactcagttgatccttctctggccccatctcttcttatgcttaatcagcaatgtgaagacaggaatgtgctacgatatgtttattattacctagctagaattttgtccgatacgggcatgactccagggggtggtatccccactcctaactgggatgctctagcagatattgatgctggtggaggagtcacaagagctgatgttgttcctcggatagtgaatcaacttacaaacgaagctacaaattctgaatttgaatttcatgctcgacgactgcaagctttgaaagctctgacatattcaccatcaggcaattctgagcttttgtcaaaattgtatgagattgtatttggcattcttgaaaaggttggtgatgttccgcataaacgaaagaaaggtgtatttgggacaaaagggggtgataaagagtcgattatgcgaagtaacttgcaatacgctgctatgagtgcactgagaagactccctcttgatccaggaaatccactttttctgcaccgtgcagctcagggtgttttctttgctgatcctgttgcggtgaggcattcactggaaattctatctgagttagccacaagagacccctatacagtagcaatgacattagaaaagcttgcgtctccaacaggggctttgcaagatatcctgcatatgaatgatgttcttgctagagtttctctggctaggttgtgccactcaatatctagagctcgggcattagatgagaggcctgatattaggtctcagttcaactcaattctctatcagctactcctagatccaagcgaaagggtatgctatgaggcgattttgtgcattctgggaaaacacgataacactgagaggatggatgagcgtgctgctgggtggtatcgcttgacgagagagatcctgaagctgccagaagcaccatccttgtcctccaaggataaatctaataaaaccaagcgtccacagccccttattaagcttgtaatgaggaggttagagagctcatttcgcagtttctcaagaccagtacttcatgcagcagcaagggttgtgcaagagatgggaaagagtagagcagcagcgtttgctatgggattacaggacattgatgaatccgttcatgtaaatgcattttctgatgctctagatgatgctgagaccaatgaaagttctcatccagaaggaattcggagaacatcatccatatctgcagggcctggtcgcagtgatacaattgcaagtttgctagctgcattaatggaggtggttcggacaacagtagcatgcgagtgcgtgtatgtccgggcaatggttatcaaagcattgatatggatgcaaagtccagatgaatcattggatgagttaaaatcaatcattgcctcggagctttcagatcctggttggcctgcagctctagtcaatgatgttttgcttactttgcatgcccgctttaaggcaactccagatatggctgttattcttctcgaaattgccagaatatttgccaccaaagttccagggaaaattgacgctgatgtcttacagctgctatggaagacatgtcttgttggagctggtcctgacgggaaacacacagctctggaagcagtcacgatagtactcgatctaccacctccacaaccggggtccatggctggactgacatcaattgatagggtctctgcatcagatcctaagtcagctctggcgctgcagaaattggtgcaagcagcagtatggttccttggagaaaatgcaaactacgccgcatcagaatatgcatgggaatctgcaactccaccaggcacagcacttatgatgttggatgcagataaaatggttgctgctgctagttctcgcaatcctactctagctggtgcattaactcgcctccagaggtgtgcatttagtggaagctgggaggtcagaattgttgcaattcaagctcttactacaatagccattagatctggtgaacctttcaggctgcagatatacgagtttttgtacaccttagcagagggtggtgtacagtctcaactttctgaaatgcacctgagtaatggggaagaccaaggagctagtggtacaggtcttggagttttaataacaccgatgttaaaagttcttgatgaaatgtatgttggacaagacgaattaatcaaggatatacgccatcacgataatgcaaacaaagaatggaaggacgaggagctgaaaaaactctacgaaaaccatgagaggctgctggattttgtttcattgttttgctttattcctagagccaagtatttaccactgggcccgataagcgcgaagctcattgacacataccgtacaaagcacaatatcactgcatctactgggtccaccgatccagctgttgttgctactgggatctcggacttaatctatgagtccactcagcctgcccccgctgcctcaaactccagtggtctggatgatgatttggtgaatgcttgggctgcaaaccttggtgatgatggtcttcttggaaacaatgccccagcaatgagtagggtcaatgaattcattgccggagtcggaacagatgcaccagatgttgaggaggagaatgtcttctctagaccttcggttgggtatgatgacatgtgggctaaaactcttttagaaacttcagaattggaggaagaagatgcgagatcaggttcatcgtctccagattctgctggatcagtggaaagctcaatatcctctcactttggtggaatgaactacccatcattgttcagttcaaagccttcctcacaagcaacggcaaaatcaggtggaagtaaataccagtccacatatgaaggctatggttccccaattagagaagagcctcctccgccttattcgtattctgagccacaaagtcgtgaatcgtttgagaaccctgtagcagggtctggttctcgaagttatgaatcagatgatgaagaacctaggaaatctactggtacaagatttggaacagcgctctatgacttcacagcaggaggagatgatgagctaaacttgacggcagaagaggaattggagatagagtatgaagttgatggctggttttacgtaaagaagaagcggcctggaagagatgggaagatggcgggacttgttcctgttctatacgtcaatcaatcttgaatttttggggaacggctttagacgtagaagccaacacactatggatatgttaagtggacttgcttagatgccaatagacattatgatccatgatttccttgaagaggtagtgtaaaatcagtgtacatgaaggaatgtatttgttggggtttgatgtgt

SEQ ID NO: 49413 - protein, 1196 aa, Arabidopsis thaliana
  peptide (1)..(1196): Ceres Seq. ID no. 13588601
MAESSGTTLMDLISADPTPVPAQSTSSSASSTASQPTSASASSSSHLHHPMSTKTTLGEKKSKRATLMQIQNDTISVAKAALNPVKANIMPQRQRQKKKPVSYSQLARSIHELAATLDQKSSQKQLVNHVFPKLAVYNSVDPSLAPSLLMLNQQCEDRNVLRYVYYYLARILSDTGMTPGGGIPTPNWDALADIDAGGGVTRADVVPRIVNQLTNEATNSEFEFHARRLQALKALTYSPSGNSELLSKLYEIVFGILEKVGDVPHKRKKGVFGTKGGDKESIMRSNLQYAAMSALRRLPLDPGNPLFLHRAAQGVFFADPVAVRHSLEILSELATRDPYTVAMTLEKLASPTGALQDILHMNDVLARVSLARLCHSISRARALDERPDIRSQFNSILYQLLLDPSERVCYEAILCILGKHDNTERMDERAAGWYRLTREILKLPEAPSLSSKDKSNKTKRPQPLIKLVMRRLESSFRSFSRPVLHAAARVVQEMGKSRAAAFAMGLQDIDESVHVNAFSDALDDAETNESSHPEGIRRTSSISAGPGRSDTIASLLAALMEVVRTTVACECVYVRAMVIKALIWMQSPDESLDELKSIIASELSDPGWPAALVNDVLLTLHARFKATPDMAVILLEIARIFATKVPGKIDADVLQLLWKTCLVGAGPDGKHTALEAVTIVLDLPPPQPGSMAGLTSIDRVSASDPKSALALQKLVQAAVWFLGENANYAASEYAWESATPPGTALMMLDADKMVAAASSRNPTLAGALTRLQRCAFSGSWEVRIVAIQALTTIAIRSGEPFRLQIYEFLYTLAEGGVQSQLSEMHLSNGEDQGASGTGLGVLITPMLKVLDEMYVGQDELIKDIRHHDNANKEWKDEELKKLYENHERLLDFVSLFCFIPRAKYLPLGPISAKLIDTYRTKHNITASTGSTDPAVVATGISDLIYESTQPAPAASNSSGLDDDLVNAWAANLGDDGLLGNNAPAMSRVNEFIAGVGTDAPDVEEENVFSRPSVGYDDMWAKTLLETSELEEEDARSGSSSPDSAGSVESSISSHFGGMNYPSLFSSKPSSQATAKSGGSKYQSTYEGYGSPIREEPPPPYSYSEPQSRESFENPVAGSGSRSYESDDEEPRKSTGTRFGTALYDFTAGGDDELNLTAEEELEIEYEVDGWFYVKKKRPGRDGKMAGLVPVLYVNQS

SEQ ID NO: 49414 - protein, 1187 aa, Arabidopsis thaliana
  peptide (1)..(1187): Ceres Seq. ID no. 13588602
MDLISADPTPVPAQSTSSSASSTASQPTSASASSSSHLHHPMSTKTTLGEKKSKRATLMQIQNDTISVAKAALNPVKANIMPQRQRQKKKPVSYSQLARSIHELAATLDQKSSQKQLVNHVFPKLAVYNSVDPSLAPSLLMLNQQCEDRNVLRYVYYYLARILSDTGMTPGGGIPTPNWDALADIDAGGGVTRADVVPRIVNQLTNEATNSEFEFHARRLQALKALTYSPSGNSELLSKLYEIVFGILEKVGDVPHKRKKGVFGTKGGDKESIMRSNLQYAAMSALRRLPLDPGNPLFLHRAAQGVFFADPVAVRHSLEILSELATRDPYTVAMTLEKLASPTGALQDILHMNDVLARVSLARLCHSISRARALDERPDIRSQFNSILYQLLLDPSERVCYEAILCILGKHDNTERMDERAAGWYRLTREILKLPEAPSLSSKDKSNKTKRPQPLIKLVMRRLESSFRSFSRPVLHAAARVVQEMGKSRAAAFAMGLQDIDESVHVNAFSDALDDAETNESSHPEGIRRTSSISAGPGRSDTIASLLAALMEVVRTTVACECVYVRAMVIKALIWMQSPDESLDELKSIIASELSDPGWPAALVNDVLLTLHARFKATPDMAVILLEIARIFATKVPGKIDADVLQLLWKTCLVGAGPDGKHTALEAVTIVLDLPPPQPGSMAGLTSIDRVSASDPKSALALQKLVQAAVWFLGENANYAASEYAWESATPPGTALMMLDADKMVAAASSRNPTLAGALTRLQRCAFSGSWEVRIVAIQALTTIAIRSGEPFRLQIYEFLYTLAEGGVQSQLSEMHLSNGEDQGASGTGLGVLITPMLKVLDEMYVGQDELIKDIRHHDNANKEWKDEELKKLYENHERLLDFVSLFCFIPRAKYLPLGPISAKLIDTYRTKHNITASTGSTDPAVVATGISDLIYESTQPAPAASNSSGLDDDLVNAWAANLGDDGLLGNNAPAMSRVNEFIAGVGTDAPDVEEENVFSRPSVGYDDMWAKTLLETSELEEEDARSGSSSPDSAGSVESSISSHFGGMNYPSLFSSKPSSQATAKSGGSKYQSTYEGYGSPIREEPPPPYSYSEPQSRESFENPVAGSGSRSYESDDEEPRKSTGTRFGTALYDFTAGGDDELNLTAEEELEIEYEVDGWFYVKKKRPGRDGKMAGLVPVLYVNQS

SEQ ID NO: 49415 - protein, 1146 aa, Arabidopsis thaliana
  peptide (1)..(1146): Ceres Seq. ID no. 13588603
MSTKTTLGEKKSKRATLMQIQNDTISVAKAALNPVKANIMPQRQRQKKKPVSYSQLARSIHELAATLDQKSSQKQLVNHVFPKLAVYNSVDPSLAPSLLMLNQQCEDRNVLRYVYYYLARILSDTGMTPGGGIPTPNWDALADIDAGGGVTRADVVPRIVNQLTNEATNSEFEFHARRLQALKALTYSPSGNSELLSKLYEIVFGILEKVGDVPHKRKKGVFGTKGGDKESIMRSNLQYAAMSALRRLPLDPGNPLFLHRAAQGVFFADPVAVRHSLEILSELATRDPYTVAMTLEKLASPTGALQDILHMNDVLARVSLARLCHSISRARALDERPDIRSQFNSILYQLLLDPSERVCYEAILCILGKHDNTERMDERAAGWYRLTREILKLPEAPSLSSKDKSNKTKRPQPLIKLVMRRLESSFRSFSRPVLHAAARVVQEMGKSRAAAFAMGLQDIDESVHVNAFSDALDDAETNESSHPEGIRRTSSISAGPGRSDTIASLLAALMEVVRTTVACECVYVRAMVIKALIWMQSPDESLDELKSIIASELSDPGWPAALVNDVLLTLHARFKATPDMAVILLEIARIFATKVPGKIDADVLQLLWKTCLVGAGPDGKHTALEAVTIVLDLPPPQPGSMAGLTSIDRVSASDPKSALALQKLVQAAVWFLGENANYAASEYAWESATPPGTALMMLDADKMVAAASSRNPTLAGALTRLQRCAFSGSWEVRIVAIQALTTIAIRSGEPFRLQIYEFLYTLAEGGVQSQLSEMHLSNGEDQGASGTGLGVLITPMLKVLDEMYVGQDELIKDIRHHDNANKEWKDEELKKLYENHERLLDFVSLFCFIPRAKYLPLGPISAKLIDTYRTKHNITASTGSTDPAVVATGISDLIYESTQPAPAASNSSGLDDDLVNAWAANLGDDGLLGNNAPAMSRVNEFIAGVGTDAPDVEEENVFSRPSVGYDDMWAKTLLETSELEEEDARSGSSSPDSAGSVESSISSHFGGMNYPSLFSSKPSSQATAKSGGSKYQSTYEGYGSPIREEPPPPYSYSEPQSRESFENPVAGSGSRSYESDDEEPRKSTGTRFGTALYDFTAGGDDELNLTAEEELEIEYEVDGWFYVKKKRPGRDGKMAGLVPVLYVNQS

SEQ ID NO: 49416 - DNA, 1966 bp, Arabidopsis thaliana; identical to SEQ ID NO: 45864
  misc_feature (1)..(1966): Ceres Seq. ID no. 13591692
  misc_feature (1)..(1966): Ortholog of  Ceres SEQ ID NO 13656435 as cited in SEQ ID NO 65853

SEQ ID NO: 49417 - protein, 460 aa, Arabidopsis thaliana; identical to SEQ ID NO: 45865
  peptide (1)..(460): Ceres Seq. ID no. 13591693

SEQ ID NO: 49418 - protein, 258 aa, Arabidopsis thaliana; identical to SEQ ID NO: 45866
  peptide (1)..(258): Ceres Seq. ID no. 13591694

SEQ ID NO: 49419 - DNA, 1456 bp, Arabidopsis thaliana
  misc_feature (1)..(1456): Ceres Seq. ID no. 13588005
  misc_feature (1)..(1456): Ortholog of  Ceres SEQ ID NO 15171430 as cited in SEQ ID NO 51500
  misc_feature (1)..(1456): Ortholog of  Ceres SEQ ID NO 15172476 as cited in SEQ ID NO 54945
  misc_feature (1)..(1456): Ortholog of  Ceres SEQ ID NO 15176106 as cited in SEQ ID NO 60324
  misc_feature (1)..(1456): Ortholog of  Ceres SEQ ID NO 13654989 as cited in SEQ ID NO 63117
  misc_feature (1)..(1456): Ortholog of  Ceres SEQ ID NO 13584744 as cited in SEQ ID NO 69137
atcttcaagtgtgatatattgtgagaagattgcagaagcgtgtccaacttggttccctctctctctgaaattactcaatcatggggatttgcttgagtgctcaggtcaaagctgagagctcaggagcgagtacgaagtatgacgccaaagatataggaagtcttgggagcaaggcttcgtctgtgtctgtaagaccaagccctcgaactgagggtgagatcttacagtctccaaatctcaagagttttagctttgctgagcttaaatcagcaaccaggaattttagaccagacagtgtgcttggtgaaggtggattcggttgtgttttcaaaggatggattgatgagaagtctctcactgcctcaagaccaggcacgggtttggttattgccgtcaaaaagcttaaccaagatggttggcaaggtcaccaggagtggctggctgaagtgaattaccttggtcagttttctcaccgtcaccttgtgaagctgattggttattgcctagaggatgagcaccgtcttcttgtttacgagttcatgcctcggggtagcttggagaatcatcttttcaggagaggtttgtacttccaaccgttatcttggaaacttcggttgaaagttgctcttggtgctgcaaagggacttgcttttcttcacagttccgagacaagagtgatataccgagatttcaagacttctaatatccttcttgactcggagtacaacgcaaagctttctgattttgggttggctaaggatgggccaataggtgataaaagtcatgtctctacacgagtcatgggtacacacggatatgcagctcctgaataccttgcaaccggtcatctaacaacaaagagtgatgtctatagcttcggggttgtccttctggagctgttgtctggtcgtcgagcagtggacaagaaccgcccatctggagagaggaaccttgtggagtgggctaaaccatacctcgtaaacaaaagaaagatattccgagtcattgataatcgtcttcaggaccagtactctatggaagaagcatgtaaagtggctactctgtctctgagatgtctcaccacagagattaagctgagaccaaacatgagcgaggttgtttcgcacctcgaacacattcagtctttaaatgctgctataggaggaaatatggataaaacagatagaagaatgcgtaggagaagtgacagtgttgtcagcaaaaaagtgaatgcaggttttgctcgacagactgctgttggcagtacagttgttgcttatcctcgcccatcagcctcgccactgtatgtttgaatagggttaaacacgtcctgggtctgtgttcagtgttcttggtaaaacatttgcaggacatgaagttcctatatcatgtcctgagaatggaatctggatgtacagtttttgtctctcttaatgtaagaattctgtttaaatcc

SEQ ID NO: 49420 - protein, 410 aa, Arabidopsis thaliana
  peptide (1)..(410): Ceres Seq. ID no. 13588006
MGICLSAQVKAESSGASTKYDAKDIGSLGSKASSVSVRPSPRTEGEILQSPNLKSFSFAELKSATRNFRPDSVLGEGGFGCVFKGWIDEKSLTASRPGTGLVIAVKKLNQDGWQGHQEWLAEVNYLGQFSHRHLVKLIGYCLEDEHRLLVYEFMPRGSLENHLFRRGLYFQPLSWKLRLKVALGAAKGLAFLHSSETRVIYRDFKTSNILLDSEYNAKLSDFGLAKDGPIGDKSHVSTRVMGTHGYAAPEYLATGHLTTKSDVYSFGVVLLELLSGRRAVDKNRPSGERNLVEWAKPYLVNKRKIFRVIDNRLQDQYSMEEACKVATLSLRCLTTEIKLRPNMSEVVSHLEHIQSLNAAIGGNMDKTDRRMRRRSDSVVSKKVNAGFARQTAVGSTVVAYPRPSASPLYV

SEQ ID NO: 49421 - protein, 257 aa, Arabidopsis thaliana
  peptide (1)..(257): Ceres Seq. ID no. 13588007
MPRGSLENHLFRRGLYFQPLSWKLRLKVALGAAKGLAFLHSSETRVIYRDFKTSNILLDSEYNAKLSDFGLAKDGPIGDKSHVSTRVMGTHGYAAPEYLATGHLTTKSDVYSFGVVLLELLSGRRAVDKNRPSGERNLVEWAKPYLVNKRKIFRVIDNRLQDQYSMEEACKVATLSLRCLTTEIKLRPNMSEVVSHLEHIQSLNAAIGGNMDKTDRRMRRRSDSVVSKKVNAGFARQTAVGSTVVAYPRPSASPLYV

SEQ ID NO: 49422 - DNA, 1850 bp, Arabidopsis thaliana; identical to SEQ ID NO: 43424
  misc_feature (1)..(1850): Ceres Seq. ID no. 13592577
  misc_feature (1)..(1850): Ortholog of  Ceres SEQ ID NO 13656177 as cited in SEQ ID NO 64997

SEQ ID NO: 49423 - protein, 555 aa, Arabidopsis thaliana; identical to SEQ ID NO: 43425
  peptide (1)..(555): Ceres Seq. ID no. 13592578

SEQ ID NO: 49424 - protein, 537 aa, Arabidopsis thaliana; identical to SEQ ID NO: 43426
  peptide (1)..(537): Ceres Seq. ID no. 13592579

SEQ ID NO: 49425 - protein, 517 aa, Arabidopsis thaliana; identical to SEQ ID NO: 43427
  peptide (1)..(517): Ceres Seq. ID no. 13592580

SEQ ID NO: 49426 - DNA, 1839 bp, Arabidopsis thaliana; identical to SEQ ID NO: 45999
  misc_feature (1)..(1839): Ceres Seq. ID no. 12581062
  misc_feature (1)..(1839): Ortholog of  Ceres SEQ ID NO 14302343 as cited in SEQ ID NO 67343

SEQ ID NO: 49427 - protein, 486 aa, Arabidopsis thaliana; identical to SEQ ID NO: 46000
  peptide (1)..(486): Ceres Seq. ID no. 12581063

SEQ ID NO: 49428 - protein, 470 aa, Arabidopsis thaliana; identical to SEQ ID NO: 46001
  peptide (1)..(470): Ceres Seq. ID no. 12581064

SEQ ID NO: 49429 - protein, 388 aa, Arabidopsis thaliana; identical to SEQ ID NO: 46002
  peptide (1)..(388): Ceres Seq. ID no. 12581065

SEQ ID NO: 49430 - DNA, 1058 bp, Arabidopsis thaliana; identical to SEQ ID NO: 35374
  misc_feature (1)..(1058): Ceres Seq. ID no. 13592274
  misc_feature (1)..(1058): Ortholog of  Ceres SEQ ID NO 12608863 as cited in SEQ ID NO 51470
  misc_feature (1)..(1058): Ortholog of  Ceres SEQ ID NO 13639221 as cited in SEQ ID NO 56429
  misc_feature (1)..(1058): Ortholog of  Ceres SEQ ID NO 14302493 as cited in SEQ ID NO 67957
  misc_feature (1)..(1058): Ortholog of  Ceres SEQ ID NO 13624608 as cited in SEQ ID NO 0

SEQ ID NO: 49431 - protein, 222 aa, Arabidopsis thaliana; identical to SEQ ID NO: 35375
  peptide (1)..(222): Ceres Seq. ID no. 13592275

SEQ ID NO: 49432 - protein, 219 aa, Arabidopsis thaliana; identical to SEQ ID NO: 35376
  peptide (1)..(219): Ceres Seq. ID no. 13592276

SEQ ID NO: 49433 - DNA, 2127 bp, Arabidopsis thaliana; identical to SEQ ID NO: 42669
  misc_feature (1)..(2127): Ceres Seq. ID no. 13646490
  misc_feature (1)..(2127): Ortholog of  Ceres SEQ ID NO 15174638 as cited in SEQ ID NO 53185
  misc_feature (1)..(2127): Ortholog of  Ceres SEQ ID NO 13657460 as cited in SEQ ID NO 66115
  misc_feature (1)..(2127): Ortholog of  Ceres SEQ ID NO 13659394 as cited in SEQ ID NO 67049

SEQ ID NO: 49434 - protein, 533 aa, Arabidopsis thaliana; identical to SEQ ID NO: 42670
  peptide (1)..(533): Ceres Seq. ID no. 13646491

SEQ ID NO: 49435 - protein, 518 aa, Arabidopsis thaliana; identical to SEQ ID NO: 42671
  peptide (1)..(518): Ceres Seq. ID no. 13646492

SEQ ID NO: 49436 - protein, 517 aa, Arabidopsis thaliana; identical to SEQ ID NO: 42672
  peptide (1)..(517): Ceres Seq. ID no. 13646493

SEQ ID NO: 49437 - DNA, 1497 bp, Arabidopsis thaliana
  misc_feature (1)..(1497): Ceres Seq. ID no. 12591183
  misc_feature (1)..(1497): Ortholog of  Ceres SEQ ID NO 14315966 as cited in SEQ ID NO 57769
aagtctccgtctcagcctctcttcgccgtctgatgtctgatcttctaggtcacctccacaaattcgaacaagaatttgtctttatgtgcaaaaccaaaatgggagtcaatgcttcagagccaaaacgaacacgatcgcgaccaagtcaatcgcaggggaggcatccgtcgacgagacgatctccgtcaacgagcaacaccggcacaacaacaaccacgacgacatcgaattctaacaaaactggtgcctcctcttcctcctccggtgcggcttcttcctcagtcgctagtcgaacatctctcgctagtctccgagaatccttaccggaaaatcctcacatatacaacgtctccgagattcgtgccgctaccaacaatttcctcgctaatcgcttatcttcctcttcctctaaagcctcctggcgttgcaatttaagagggaaagaagtcgttgtgtttcagagaaagtttaggcgaaggatcgacacggatgagcttagagatcgtctttcagatatttgccggagccaccacggaagcatcattaatctactcggcgcttctgtttccggcggtggaagagtaggaggaggaggaggaggaggaggtgatcacatctacttggtctacgaatacgtcaacggagcatctctagctgattgcttgagaaaccctaagaaccctaaatttacagttctatcgaattggacttcacggattcaaattgcaacagatctagctcatggactcgattacatccacaacaaaaccggattaaagatcgaaaacctagttcacaatcacatcaagagctcggcggtgatcgtgacggagccagatttcaacgctaagatctgtcacttcggaactgcgcagctttgcggcgaaacagatgaaatgtcactggagagagacgaatcgagaaattcaaggcgatctgatagcagagcgatcagattcgaaggagttagaggttacatgtcgccggaatttcaaaatttgggaatcgctactcagaaatcggatgtttacgctttcggagttatgatgttggagcttctctcaggcgaggagccgttgaagtacaggtatgataaagccacaggagatttcgagcggacgtcggtgattgaaacggcgagagcggcgatcgaagatggagatggtgatagagatggaagactgaggaggtggatggatcggagattggaggattcgtttcctgtgacggtggtggagaagttaacgaggctagcgttggattgtgttcaggatgatccagtgaataggccggagatgggaagagtcgccggaaaaatatcacaactgtatttagaatcggaaaaatggtcggcgaatatgaaacggccaacggatatcaccgtctctttcgctcccagatgagggaatcttcttattcctttttttcaaaagatgtaaattcgatagtaggcttattattattttctcccaaattagtgatgatttggatgtaatg

SEQ ID NO: 49438 - protein, 466 aa, Arabidopsis thaliana
  peptide (1)..(466): Ceres Seq. ID no. 12591184
VSVSASLRRLMSDLLGHLHKFEQEFVFMCKTKMGVNASEPKRTRSRPSQSQGRHPSTRRSPSTSNTGTTTTTTTSNSNKTGASSSSSGAASSSVASRTSLASLRESLPENPHIYNVSEIRAATNNFLANRLSSSSSKASWRCNLRGKEVVVFQRKFRRRIDTDELRDRLSDICRSHHGSIINLLGASVSGGGRVGGGGGGGGDHIYLVYEYVNGASLADCLRNPKNPKFTVLSNWTSRIQIATDLAHGLDYIHNKTGLKIENLVHNHIKSSAVIVTEPDFNAKICHFGTAQLCGETDEMSLERDESRNSRRSDSRAIRFEGVRGYMSPEFQNLGIATQKSDVYAFGVMMLELLSGEEPLKYRYDKATGDFERTSVIETARAAIEDGDGDRDGRLRRWMDRRLEDSFPVTVVEKLTRLALDCVQDDPVNRPEMGRVAGKISQLYLESEKWSANMKRPTDITVSFAPR

SEQ ID NO: 49439 - protein, 456 aa, Arabidopsis thaliana
  peptide (1)..(456): Ceres Seq. ID no. 12591185
MSDLLGHLHKFEQEFVFMCKTKMGVNASEPKRTRSRPSQSQGRHPSTRRSPSTSNTGTTTTTTTSNSNKTGASSSSSGAASSSVASRTSLASLRESLPENPHIYNVSEIRAATNNFLANRLSSSSSKASWRCNLRGKEVVVFQRKFRRRIDTDELRDRLSDICRSHHGSIINLLGASVSGGGRVGGGGGGGGDHIYLVYEYVNGASLADCLRNPKNPKFTVLSNWTSRIQIATDLAHGLDYIHNKTGLKIENLVHNHIKSSAVIVTEPDFNAKICHFGTAQLCGETDEMSLERDESRNSRRSDSRAIRFEGVRGYMSPEFQNLGIATQKSDVYAFGVMMLELLSGEEPLKYRYDKATGDFERTSVIETARAAIEDGDGDRDGRLRRWMDRRLEDSFPVTVVEKLTRLALDCVQDDPVNRPEMGRVAGKISQLYLESEKWSANMKRPTDITVSFAPR

SEQ ID NO: 49440 - protein, 439 aa, Arabidopsis thaliana
  peptide (1)..(439): Ceres Seq. ID no. 12591186
MCKTKMGVNASEPKRTRSRPSQSQGRHPSTRRSPSTSNTGTTTTTTTSNSNKTGASSSSSGAASSSVASRTSLASLRESLPENPHIYNVSEIRAATNNFLANRLSSSSSKASWRCNLRGKEVVVFQRKFRRRIDTDELRDRLSDICRSHHGSIINLLGASVSGGGRVGGGGGGGGDHIYLVYEYVNGASLADCLRNPKNPKFTVLSNWTSRIQIATDLAHGLDYIHNKTGLKIENLVHNHIKSSAVIVTEPDFNAKICHFGTAQLCGETDEMSLERDESRNSRRSDSRAIRFEGVRGYMSPEFQNLGIATQKSDVYAFGVMMLELLSGEEPLKYRYDKATGDFERTSVIETARAAIEDGDGDRDGRLRRWMDRRLEDSFPVTVVEKLTRLALDCVQDDPVNRPEMGRVAGKISQLYLESEKWSANMKRPTDITVSFAPR

SEQ ID NO: 49441 - DNA, 1203 bp, Arabidopsis thaliana; identical to SEQ ID NO: 45276
  misc_feature (1)..(1203): Ceres Seq. ID no. 12560595
  misc_feature (1)..(1203): Ortholog of  Ceres SEQ ID NO 12608143 as cited in SEQ ID NO 59963

SEQ ID NO: 49442 - protein, 314 aa, Arabidopsis thaliana; identical to SEQ ID NO: 45277
  peptide (1)..(314): Ceres Seq. ID no. 12560596

SEQ ID NO: 49443 - protein, 280 aa, Arabidopsis thaliana; identical to SEQ ID NO: 45278
  peptide (1)..(280): Ceres Seq. ID no. 12560597

SEQ ID NO: 49444 - protein, 258 aa, Arabidopsis thaliana; identical to SEQ ID NO: 45279
  peptide (1)..(258): Ceres Seq. ID no. 12560598

SEQ ID NO: 49445 - DNA, 3249 bp, Arabidopsis thaliana; identical to SEQ ID NO: 47098
  misc_feature (1)..(3249): Ceres Seq. ID no. 13578479
  misc_feature (1)..(3249): Ortholog of  Ceres SEQ ID NO 13600701 as cited in SEQ ID NO 0

SEQ ID NO: 49446 - protein, 996 aa, Arabidopsis thaliana; identical to SEQ ID NO: 47099
  peptide (1)..(996): Ceres Seq. ID no. 13578480

SEQ ID NO: 49447 - protein, 911 aa, Arabidopsis thaliana; identical to SEQ ID NO: 47100
  peptide (1)..(911): Ceres Seq. ID no. 13578481

SEQ ID NO: 49448 - protein, 828 aa, Arabidopsis thaliana; identical to SEQ ID NO: 47101
  peptide (1)..(828): Ceres Seq. ID no. 13578482

SEQ ID NO: 49449 - DNA, 2957 bp, Arabidopsis thaliana; identical to SEQ ID NO: 38468
  misc_feature (1)..(2957): Ceres Seq. ID no. 12560451
  misc_feature (1)..(2957): Ortholog of  Ceres SEQ ID NO 13595870 as cited in SEQ ID NO 62101
  misc_feature (1)..(2957): Ortholog of  Ceres SEQ ID NO 13590241 as cited in SEQ ID NO 63878
  misc_feature (1)..(2957): Ortholog of  Ceres SEQ ID NO 13657939 as cited in SEQ ID NO 66349

SEQ ID NO: 49450 - protein, 809 aa, Arabidopsis thaliana; identical to SEQ ID NO: 38469
  peptide (1)..(809): Ceres Seq. ID no. 12560452

SEQ ID NO: 49451 - protein, 807 aa, Arabidopsis thaliana; identical to SEQ ID NO: 38470
  peptide (1)..(807): Ceres Seq. ID no. 12560453

SEQ ID NO: 49452 - protein, 683 aa, Arabidopsis thaliana; identical to SEQ ID NO: 38471
  peptide (1)..(683): Ceres Seq. ID no. 12560454

SEQ ID NO: 49453 - DNA, 2226 bp, Arabidopsis thaliana
  misc_feature (1)..(2226): Ceres Seq. ID no. 12592115
  misc_feature (1)..(2226): Ortholog of  Ceres SEQ ID NO 14306279 as cited in SEQ ID NO 56860
atggacgagattgtagaagactcgagcagagtcatggagatagaaggacagaatgatgatctggaccggtgcgtggtggaggaggttgagctaaccgttccaaaaaccgatgatccaacgttaccggttctcacatttcgaatgtggactttaggtcttggtgcgtgtatcatactctcgttcataaaccagtttttctggtacagacagatgccgttaaccattagcggaatctcggctcagattgcggtcgtgccacttggtcacctgatggctaaggttcttcctacaaggatgttcttggaaggatcaaagtgggagttttctatgaatccaggtccttttaatgtcaaggaacatgtattgatcacgatttttgctaattcgggagctggaacggtttatgcgactcatatacttagtgcaattaagctctattataagagatctcttccatttctaccggcttttctccttatgatcacaacgcagtttctcggatttgggtgggctggtctattccgtaaacatcttgttgagcctggtgaaatgtggtggccaagcaatctagttcaagtgtctctcttcagtgccttgcacgagaaggaaaagaagaaaaagggaggcatgacccgaatccaattcttcctcattgtccttgttaccagttttgcatactacattctccctggttatttattcacaatgataacttccatctcatggatctgttggcttggtcccaaatcggttttggttcaccaactcggttcaggtgaacaaggtcttggtattggcgcaattggtattgactgggctacaattagctcttacctcggtagcccactcgcgagtcccttattcgctacaatcaatgtaaccatcggttttgtggtgatcatgtatgtcgccactccaatttgctattggctaaatatttacaaagccaaaacatatcccatcttctcaagtgggcttttcatgggcaatggctcgtcctatgatgttttaagcatcattgataagaagtttcatctcgaccgagatatatatgcaaagactggtcctatcaatatgagcactttctttgcagtcacatatggtcttgggtttgctactttgtccgcaactattgtccatgttttactcttcaacggaagggatttatggaaacaaacaagaggtgcttttcagaggaacaagaaaatggatttccacacgagaatcatgaagaaaaactatagggaagttcctatgtggtggttttatgtgatcctcgtactcaacattgcgctcatcatgttcatatcattctactacaatgcaaccgtgcagctaccttggtggggagtgttgctagcttgtgccattgctgtcttcttcactccgcttatcggtgttatcgccgccaccactaatcaggaaccgggtttgaacgtcattacggaatatgtaatcgggtatctctatccagaacgtccggttgctaacatgtgctttaaagtatatggatacatcagcatgactcaggctctaacattcatccaagacttcaaactcggactctacatgaagattcctcctagaagcatgttcatggcacaggtggttgggacgcttgtgtctgtggtagtgtacacaggaactgcttggtggttaatggtagacattcctcatctatgtgacaaatctttgcttcctccagatagcgaatggacatgtcccatggaccgtgtcttctttgatgcttcagttatttggggacttgtaggaccacgtagaatgttcggtaacttaggagaatacgcagccataaactggttcttcctcgtaggtgcaatcgctcctttctttgtctggctagcgaccaaagcattcccagctcataaatggatctcgaagattcattttccggtcattttaggagcaacctcgatgatgccacccgcgatggcggttaacttcacgagttggtgcatcgttgcatttgtgtttggacactttttgtataagtacaagagacagtggtggaaaaagtataactacgttttgtcgggtggtttagacgcgggcactgcgtttatgacaatacttatattcctatcggttggacgcaaaggaattggattgttgtggtggggaaacgctgatgatagcacaaactgtagcctcgcgtcttgtcctaccgctaaaggcgttattatgcatggatgtccagttttatga

SEQ ID NO: 49454 - protein, 741 aa, Arabidopsis thaliana
  peptide (1)..(741): Ceres Seq. ID no. 12592116
MDEIVEDSSRVMEIEGQNDDLDRCVVEEVELTVPKTDDPTLPVLTFRMWTLGLGACIILSFINQFFWYRQMPLTISGISAQIAVVPLGHLMAKVLPTRMFLEGSKWEFSMNPGPFNVKEHVLITIFANSGAGTVYATHILSAIKLYYKRSLPFLPAFLLMITTQFLGFGWAGLFRKHLVEPGEMWWPSNLVQVSLFSALHEKEKKKKGGMTRIQFFLIVLVTSFAYYILPGYLFTMITSISWICWLGPKSVLVHQLGSGEQGLGIGAIGIDWATISSYLGSPLASPLFATINVTIGFVVIMYVATPICYWLNIYKAKTYPIFSSGLFMGNGSSYDVLSIIDKKFHLDRDIYAKTGPINMSTFFAVTYGLGFATLSATIVHVLLFNGRDLWKQTRGAFQRNKKMDFHTRIMKKNYREVPMWWFYVILVLNIALIMFISFYYNATVQLPWWGVLLACAIAVFFTPLIGVIAATTNQEPGLNVITEYVIGYLYPERPVANMCFKVYGYISMTQALTFIQDFKLGLYMKIPPRSMFMAQVVGTLVSVVVYTGTAWWLMVDIPHLCDKSLLPPDSEWTCPMDRVFFDASVIWGLVGPRRMFGNLGEYAAINWFFLVGAIAPFFVWLATKAFPAHKWISKIHFPVILGATSMMPPAMAVNFTSWCIVAFVFGHFLYKYKRQWWKKYNYVLSGGLDAGTAFMTILIFLSVGRKGIGLLWWGNADDSTNCSLASCPTAKGVIMHGCPVL

SEQ ID NO: 49455 - protein, 730 aa, Arabidopsis thaliana
  peptide (1)..(730): Ceres Seq. ID no. 12592117
MEIEGQNDDLDRCVVEEVELTVPKTDDPTLPVLTFRMWTLGLGACIILSFINQFFWYRQMPLTISGISAQIAVVPLGHLMAKVLPTRMFLEGSKWEFSMNPGPFNVKEHVLITIFANSGAGTVYATHILSAIKLYYKRSLPFLPAFLLMITTQFLGFGWAGLFRKHLVEPGEMWWPSNLVQVSLFSALHEKEKKKKGGMTRIQFFLIVLVTSFAYYILPGYLFTMITSISWICWLGPKSVLVHQLGSGEQGLGIGAIGIDWATISSYLGSPLASPLFATINVTIGFVVIMYVATPICYWLNIYKAKTYPIFSSGLFMGNGSSYDVLSIIDKKFHLDRDIYAKTGPINMSTFFAVTYGLGFATLSATIVHVLLFNGRDLWKQTRGAFQRNKKMDFHTRIMKKNYREVPMWWFYVILVLNIALIMFISFYYNATVQLPWWGVLLACAIAVFFTPLIGVIAATTNQEPGLNVITEYVIGYLYPERPVANMCFKVYGYISMTQALTFIQDFKLGLYMKIPPRSMFMAQVVGTLVSVVVYTGTAWWLMVDIPHLCDKSLLPPDSEWTCPMDRVFFDASVIWGLVGPRRMFGNLGEYAAINWFFLVGAIAPFFVWLATKAFPAHKWISKIHFPVILGATSMMPPAMAVNFTSWCIVAFVFGHFLYKYKRQWWKKYNYVLSGGLDAGTAFMTILIFLSVGRKGIGLLWWGNADDSTNCSLASCPTAKGVIMHGCPVL

SEQ ID NO: 49456 - protein, 694 aa, Arabidopsis thaliana
  peptide (1)..(694): Ceres Seq. ID no. 12592118
MWTLGLGACIILSFINQFFWYRQMPLTISGISAQIAVVPLGHLMAKVLPTRMFLEGSKWEFSMNPGPFNVKEHVLITIFANSGAGTVYATHILSAIKLYYKRSLPFLPAFLLMITTQFLGFGWAGLFRKHLVEPGEMWWPSNLVQVSLFSALHEKEKKKKGGMTRIQFFLIVLVTSFAYYILPGYLFTMITSISWICWLGPKSVLVHQLGSGEQGLGIGAIGIDWATISSYLGSPLASPLFATINVTIGFVVIMYVATPICYWLNIYKAKTYPIFSSGLFMGNGSSYDVLSIIDKKFHLDRDIYAKTGPINMSTFFAVTYGLGFATLSATIVHVLLFNGRDLWKQTRGAFQRNKKMDFHTRIMKKNYREVPMWWFYVILVLNIALIMFISFYYNATVQLPWWGVLLACAIAVFFTPLIGVIAATTNQEPGLNVITEYVIGYLYPERPVANMCFKVYGYISMTQALTFIQDFKLGLYMKIPPRSMFMAQVVGTLVSVVVYTGTAWWLMVDIPHLCDKSLLPPDSEWTCPMDRVFFDASVIWGLVGPRRMFGNLGEYAAINWFFLVGAIAPFFVWLATKAFPAHKWISKIHFPVILGATSMMPPAMAVNFTSWCIVAFVFGHFLYKYKRQWWKKYNYVLSGGLDAGTAFMTILIFLSVGRKGIGLLWWGNADDSTNCSLASCPTAKGVIMHGCPVL

SEQ ID NO: 49457 - DNA, 3240 bp, Arabidopsis thaliana
  misc_feature (1)..(3240): Ceres Seq. ID no. 13593697
  misc_feature (1)..(3240): Ortholog of  Ceres SEQ ID NO 13598373 as cited in SEQ ID NO 62185
  misc_feature (1)..(3240): Ortholog of  Ceres SEQ ID NO 12584664 as cited in SEQ ID NO 62232
  misc_feature (1)..(3240): Ortholog of  Ceres SEQ ID NO 13597389 as cited in SEQ ID NO 63426
  misc_feature (1)..(3240): Ortholog of  Ceres SEQ ID NO 15169537 as cited in SEQ ID NO 64197
  misc_feature (1)..(3240): Ortholog of  Ceres SEQ ID NO 15180463 as cited in SEQ ID NO 0
gtgtgttctgccaaagtttctctgcagcttctcctcttctcagaaattagggttccgtctcaaattacgagcagatctcgtactctctgatgtctgaagatccggagtaccgttgcttcattggtgggcttgcttggacaacgtctgatcgtggtctcagagatgcctttgagaagtatggtcacctcgttgaggccaaggtggttcttgacaagttttctggtcgctcccgtggttttggattcatcactttcgatgagaaaaaagctatggatgaagctattgcagcaatgaatggaatggatttggatgggcgaactatcactgttgataaagctcagcctcatcagggtggtgcaggcagagataatgatggtgaccgtggtcgagaccgtggatatgatcgtgatcgcagtcgtccctctggtgggcgaggtggtggagattgctttaaatgtggcaagcctggacattttgcaagagagtgtccttctgaaagtagtagagatggtggtggaaggttcagctcaaaggatgataggtacagttcgaaggacgataggtatggtgcaaaagatgataggtatggtgcaaaggaggataggtatggtgcaaaggatgataggtacagctccaaggatgataggtacagctccaaggatgataggtatggtagtagggatggtggaggtagtcgctatggacctgatcgcagtggtgaacgcgctggaggacgcagccgggatggtggcagccgtggagctccaggaggtgagaggcacagtcgtgctccatatgaccgccccagagctggtggtttccactagaattctactccaaaggttaaagaagttgaaggtttctgctttcagctcgtgtcaagtcaaagttacgcttgatggtctattttcttcaatgtatttggatagctcgagaaagaagatgtgttctctattttggccctaaactcaagagtcgactatgttcctaaagtgctctctctccttttgatatgttgatccctatggaaaccttgtgcttggttggtttgagacaatttgagatgtgctactttatgcttatcgtaatgaatgcgtgggttatcccccaacaccaaatatgcaaaagcctcaggatggtctgatactcgggtttagccgtgaaaattaaagactgatctataaaacttgtgatgggattgggaaatatacattgctgattgatacttggctactggaactcaaacatcccttcatgagcaacaaattgtcattttcaggaaaaagattgactttgtgcaattttagatcttggcaagtcaaatccaatagttttcttcaactagggaaatttctacagccaaatggtctctggttggctcgtctagtatagctcactgggtttatcttcgatctattctttgtgggttcttcgtgcctcttcgtctactttgtttcttgctcgtgacctctacctctgcctttgattctcaagctctaaactccaggaattgggaaatggtgttaatgtatatatagttaatatacgcttgaataggtatccttactttgataatttgttgaaattgcatacataaataggtcacacgagttatgtcgggaaaacactgacttgattattttatacaagtgaatagtatatgtatggttagaacttagatgcatgactagttcgttcaccttctttcacaattttgtattgcatacatacatacattgcttaggtgaatatataatcaatttaccataaataaatgactttgtaagtctcataatttaagactttgtttctaacataaagaaagactttgtagaacatatgagttggtgtatagcttaaacgttgactcaattatttgatagaaatcgaatagcatagctattcgacgccactattcggttactcgtacctcgaccacaccaaattaagaacacttaccggaagaagataaaaggagaaaatggaaactaatctcttgttggtaaagtgtgtcttattagcatcatgtctcatacatccccgtgcttgctctccttcttgcaatttcccggcgatattcaacttcggcgactctaactccgacacaggtggcctttctgcctctttcggacaagccccttacccaaatggccaaaccttcttccactccccttccggtcgtttctcagatggtcgactcatcattgacttcatagcggaggagttaggtttaccatacctaaatgctttcttagactccatcggttcaaacttcagccatggtgccaatttcgccaccgctggctccaccgtccggccaccaaacgcaaccatcgctcagagcggtgtgagtccaatctctctcgacgttcaattggtccaattctccgatttcatcacacgatcacaactcattcgcaatcgaggtggagtgtttaagaaattgcttcccaagaaagagtatttctctcaagcattgtacacattcgacatcggtcagaacgatctcaccgctggactaaaacttaacatgacttcagatcaaatcaaggcttatataccagatgttcatgatcagctctctaacgtcattcgtaaggtgtatagtaaaggaggaagaagattttggatacacaacacagctccacttggttgtttaccttatgttttagaccggttcccagtaccggcttctcaaatcgacaatcacggttgtgcaattccgcgtaatgagattgctcgatactataactctgaacttaaaagaagagtgattgagttgagaaaagagctctctgaagctgcgtttacttatgttgatatctactctatcaagcttactctcatcactcaagccaagaaactcggttttaggtatcctttggtggcttgttgtggacatggtgggaagtacaatttcaacaagcttattaaatgtggagctaaagttatgatcaaagggaaagagattgtgcttgctaagtcttgtaacgatgtgtcgtttagagttagctgggacggtatacatttcactgaaacgacaaacagttggatctttcagcaaataaacgacggggcgttttcggatcctcctcttcctgtgaagtctgcctgcaccagatagaagaacttagggaatcatatgaccaaagtgtccttgaaaatggggacaaataaaagttctttggaatatttgttttttgtcaagttctaagaaaattctcatgaaagtgaaatcat

SEQ ID NO: 49458 - protein, 380 aa, Arabidopsis thaliana
  peptide (1)..(380): Ceres Seq. ID no. 15221229
METNLLLVKCVLLASCLIHPRACSPSCNFPAIFNFGDSNSDTGGLSASFGQAPYPNGQTFFHSPSGRFSDGRLIIDFIAEELGLPYLNAFLDSIGSNFSHGANFATAGSTVRPPNATIAQSGVSPISLDVQLVQFSDFITRSQLIRNRGGVFKKLLPKKEYFSQALYTFDIGQNDLTAGLKLNMTSDQIKAYIPDVHDQLSNVIRKVYSKGGRRFWIHNTAPLGCLPYVLDRFPVPASQIDNHGCAIPRNEIARYYNSELKRRVIELRKELSEAAFTYVDIYSIKLTLITQAKKLGFRYPLVACCGHGGKYNFNKLIKCGAKVMIKGKEIVLAKSCNDVSFRVSWDGIHFTETTNSWIFQQINDGAFSDPPLPVKSACTR
